United States Patent Application Publication US 2011/0214205 A1 - sequence listing, part 22

SEQ ID NO: 96867 - protein, 302 aa, Setaria italica
  Transcript Sequence Number=SeqID_30893
  Gene Ontology: Mol. function=calcium ion binding; Cellular component =nucleus; Biological process=regulation of transcription, DNA -dependent
  Homolog annotation: Hit_ID=Q5JJP2; Match level="QueryCoverage=90%, HitCoverage=71%, E-value=2e-92, Identity=64%"; Hit description =Ethylene-induced calmodulin-binding protein 4-like
  Pfam annotation: Domain name=IQ; Domain location=117-137; Score=5.0; E_value=9; Accession=PF00612.19; Description=IQ calmodulin-binding motif
  Pfam annotation: Domain name=IQ; Domain location=159-179; Score=22.8; E_value=0.0014; Accession=PF00612.19; Description=IQ calmodulin -binding motif
  Pfam annotation: Domain name=IQ; Domain location=182-202; Score=23.4; E_value=0.00097; Accession=PF00612.19; Description=IQ calmodulin -binding motif
  Pfam module annotation: Pfam domain module=IQ::IQ::IQ; Domain location=117-137::159-179::182-202
WAARFGREEMVVALLTADAAAGALSHPTSEDPAAKTPASIALAYGFKGLSAFLSEAQLTTHLDSIESKENGKCKGNASGGGIRNAVDRISDKSTHVHGGTDDQLALKDTLGAVRNAVQAAARIQAAYRVFSFKKKKEAALQNSCLSVHETVPVSHGMLEKAALSIQKNFRCWKKRKEFLKLRKNVIKIQARVRAHQGRKKYRELLRSVGVLEKVMLRWHRKGVGLRGFNSGAMPIDEEVEEDVAKVFRKLRVETAIDEAVSRVSCIIGSPKAMQQYRRMLQRYQEAKVNIQKDASEVPASKG

SEQ ID NO: 96868 - protein, 274 aa, Setaria italica
  misc_feature (62)..(62): Xaa can be any naturally occurring amino acid
  misc_feature (239)..(239): Xaa can be any naturally occurring amino acid
  misc_feature (259)..(259): Xaa can be any naturally occurring amino acid
  Transcript Sequence Number=SeqID_30894
  Gene Ontology: Mol. function=DNA binding; Cellular component=nucleus; Biological process=regulation of transcription, DNA-dependent
  Homolog annotation: Hit_ID=P20024; Match level="QueryCoverage=99%, HitCoverage=79%, E-value=2e-65, Identity=57%"; Hit description=Myb -related protein Zm1
  Pfam annotation: Domain name=Myb_DNA-binding; Domain location=1-44; Score=31.4; E_value=3.5e-06; Accession=PF00249.23; Description=Myb -like DNA-binding domain
NFTVEEEETIIRLHGMLGNKWSKIAACLPGRTDNEIKNVWNTHLKKKVALREDSKRLARPVXGGAASGNDAGTPVTASSSASSSTTTNNSSGGSDSGDQCGTSKEPDAVDVPPLQLEDIDVSDMLADAPTAAQPMLSSSCSSSSLTTCIGRGVEELIELPVIDIEPDIWSIIDGECADASGARHGDATAPCTGAAISTTSVAGEEAANDDWWLENLEKELGLWGPVGGPQDHTGLGPLXTLRGTPVSTYFQTGPSNAEXELLDVELEPSSAVLL

SEQ ID NO: 96869 - protein, 94 aa, Setaria italica
  Transcript Sequence Number=SeqID_30895
  Gene Ontology: Mol. function=protein dimerization activity; Cellular component=nucleus; Biological process=regulation of transcription, DNA-dependent
  Homolog annotation: Hit_ID=B6TPL3; Match level="QueryCoverage=98%, HitCoverage=22%, E-value=3e-43, Identity=95%"; Hit description=DNA binding protein
  Pfam annotation: Domain name=bZIP_1; Domain location=22-86; Score =32.6; E_value=1.6e-06; Accession=PF00170.13; Description=bZIP transcription factor
  Pfam annotation: Domain name=bZIP_2; Domain location=22-72; Score =20.6; E_value=0.0035; Accession=PF07716.7; Description=Basic region leucine zipper
  Pfam module annotation: Pfam domain module=bZIP_1::bZIP_2; Domain location=22-86::22-72
SKDVKPLAKKDHRRGASTAERDPKVMTLRRLAQNREAARKSRLRKKAYIQQLESSRIRLAQLEQELHTARAQGVFFPNSGLLADQGVAGKGVPI

SEQ ID NO: 96870 - protein, 123 aa, Setaria italica
  Transcript Sequence Number=SeqID_30896
  Gene Ontology: Mol. function=transferase activity, transferring groups other than amino-acyl groups
MMAVTVEITRRAVLRPPPATCRGGGSKSPLTAFDRASTDGYIPAVFAWNAPAPDNAALVDGLLAAVARYPHLAGRFGVDDSGRKCFHLNDAGVLVVEAQADADLADALAHDVAAHINDLYPKA

SEQ ID NO: 96871 - protein, 82 aa, Setaria italica
  Transcript Sequence Number=SeqID_30897
  Gene Ontology: Mol. function=transporter activity; Cellular component= integral to membrane; Biological process=transport
  Homolog annotation: Hit_ID=Q94C70; Match level="QueryCoverage=100%, HitCoverage=15%, E-value=3e-35, Identity=82%"; Hit description =Nucleobase-ascorbate transporter 2
MAEAKPEEISHPPMEQLQGFEYCIDSNPPWGEAIILAFQHYILALGTAVMIPAVLVPMMGGDDGDRVRVVQTLLFVTGINTL

SEQ ID NO: 96872 - protein, 75 aa, Setaria italica
  Transcript Sequence Number=SeqID_30898
KADLRCDGAGKEEAEQAKAALMHEADMHPNHPRHSIRIIADLSRRVFEGKNEGDRALLCVQRKKQIRQSSLASRR

SEQ ID NO: 96873 - protein, 82 aa, Setaria italica
  Transcript Sequence Number=SeqID_30899
MQVSSRASIRDTCEQFMYEKFKAKIEMPIDKAMETLVRLGLVIELPTNGGSSVIGLPCSEAYDILRSRWDSLLEHRTEQGDM

SEQ ID NO: 96874 - protein, 646 aa, Setaria italica
  misc_feature (244)..(244): Xaa can be any naturally occurring amino acid
  misc_feature (485)..(485): Xaa can be any naturally occurring amino acid
  Transcript Sequence Number=SeqID_30900
  Gene Ontology: Mol. function=sodium:dicarboxylate symporter activity; Cellular component=plasma membrane
  Homolog annotation: Hit_ID=UPI0001A7B14A; Match level="QueryCoverage =34%, HitCoverage=26%, E-value=2e-13, Identity=27%"; Hit description =aminopeptidase
NEEAGPESDGKGIPGIYVPRQRYIAIPKAALLDAVLSQFPSDADAADFKRCTRCLDAILHAEHKGMLEEMRTSYTLTQRHQEEDQTDTSDVQAIFNGKASSGLSGITQEDGTLFLTRSLGLRTLLGLTPDPDSNTRAAFATQFQRSFMNLLRNAQFEELSVQDLLLTYALNSDYLLTLPIYVDWKKAAQSNAIIFRRGYATERQKGLLLVEKLDYLQSKLLQSIFFSLSKPLKRPGKWLNEFMXALKRSTGNQGFQIWIDKLRLWLKEQTYADNSLLLIESSSWEKLSSDQLPDDDVPIWIAAQRAVSRYEGILSPVGPRGRLLRRLLTWTGLIPSLPEATIKSDDETKHLEGHVRPNFLPRITLANIWEPASRESCKNNIWEIVKTSFRILFGRSTLQEPAFQELILLYTDENDQSEKKDKSEMLPLQLKIYEKIPIPDLPVVFPHKKLSFRILDTVRLDIATVIGLLAYVVNYKFESLASSPXSAFLLDIVAISALLILVFRVGLGYKQTRDRYQLLVNKTLYEKTLASGFGSVYFLLDASEQQQYKEALLAYAMLLCRNKYQVSSRASIRDTCEQFMYEKFKAKIEMPIDKAMETLVRLGLVIELPTNGGSSVIGLPCSEAYDILRSRWDSLLEHRTEQGDMV

SEQ ID NO: 96875 - protein, 77 aa, Setaria italica
  Transcript Sequence Number=SeqID_30901
MKPADNETAAVGKARHKDKKQKRKKRNDATDDHCGAAIAKEGAPHEKKKQKQMKDGGEVEEKMKMLKPTVSIAVAGS

SEQ ID NO: 96876 - protein, 201 aa, Setaria italica
  misc_feature (190)..(190): Xaa can be any naturally occurring amino acid
  Transcript Sequence Number=SeqID_30902
  Homolog annotation: Hit_ID=B6TIL9; Match level="QueryCoverage=86%, HitCoverage=47%, E-value=5e-76, Identity=82%"; Hit description =Conserved protein
  Pfam annotation: Domain name=DUF171; Domain location=69-200; Score =43.7; E_value=8.7e-11; Accession=PF02598.9; Description =Uncharacterized ACR, COG2106
MKPADNETAAVGKARHKDKKQKRKKRNDATDDHCGAAIAKEGAPHEKKKQKQMKDGGEVEEKMKMLKPTVSIAVAGSIIDNAQSLELATLLAGQIARAATVFRIDEVVVFDSTPTSENGDTGDGEESGARFLVRILEYLETPQYLRRRLFPMHKNLKFVGLLPPLDAPHHVRKHEWSEFREGVTLEGDRXKGTLVDVGLSK

SEQ ID NO: 96877 - protein, 110 aa, Setaria italica
  misc_feature (94)..(94): Xaa can be any naturally occurring amino acid
  Transcript Sequence Number=SeqID_30903
  Subcellular localization annotation: CTP_CleavageSite=40; ConfidenceScore=5.15e-01
GGEGEGQAGGGDPPGPDAGSASGSGGKRRNGYGYARAGPSSSSAAKRRRRAGVQQFVDDAAGVDDDYEEEDVLESEEEASDPDDGFFTGGEHAXNLSSKRAERSHPLPFL

SEQ ID NO: 96878 - protein, 58 aa, Setaria italica
  Transcript Sequence Number=SeqID_30904
YIPSTYTLKLKLNVSYFRSVTISLLSKFQVSHPLYPTIKRYWPNTQRARQSRAEISSP

SEQ ID NO: 96879 - protein, 114 aa, Setaria italica
  Transcript Sequence Number=SeqID_30905
  Gene Ontology: Mol. function=catalytic activity; Biological process =metabolic process
  Homolog annotation: Hit_ID=B6TV46; Match level="QueryCoverage=100%, HitCoverage=24%, E-value=7e-32, Identity=72%"; Hit description =Mitochondrion protein
MGERAKEWLLAAGAGAAVGALSAAAVMNLLSRSKRREGYVRQLLESNGVTAGNARSSRHLGATGSSDLLSDEVVSEQLTRNTQFFGMDSQKKVTESYVVVIGLGGVGSHAASML

SEQ ID NO: 96880 - protein, 112 aa, Setaria italica
  Transcript Sequence Number=SeqID_30906
GTTRKGRALLPCLPARELQAVDRSLQSSHQIDVERHARDFMEAAKKLQSYFISLQREDQPTAEDVLRKEITTMEEELKTKSELIAKHKKLIEGWRKELKEQLGKHITELERV

SEQ ID NO: 96881 - protein, 77 aa, Setaria italica
  Transcript Sequence Number=SeqID_30907
  Subcellular localization annotation: CTP_CleavageSite=27; ConfidenceScore=5.39e-01
MEPDKNSPVQRAPSVSNSPATPAITPPAPPGSSNPPSTPGAGGDPPAVQPVTPPAVPDPADPDSENRHDPKAFLRDP

SEQ ID NO: 96882 - protein, 195 aa, Setaria italica
  misc_feature (29)..(29): Xaa can be any naturally occurring amino acid
  Transcript Sequence Number=SeqID_30908
  Gene Ontology: Mol. function=protein binding; Cellular component =nucleus; Biological process=cell division
  Homolog annotation: Hit_ID=B6TDV7; Match level="QueryCoverage=100%, HitCoverage=55%, E-value=3e-84, Identity=78%"; Hit description =Cyclin delta-3
  Pfam annotation: Domain name=Cyclin_N; Domain location=2-117; Score =69.8; E_value=1e-17; Accession=PF00134.15; Description=Cyclin, N -terminal domain
AAGVGTLAEEMEEWMKAARSGCVRWIIKXTAMFRFSGKTAYVAVTYLDRFLAQRRVNRGQEWALQLLAVACLSLASKVEEHHAPRLSELRVDAYEFDTASILRMELLVLGTLQWRMIAATPFPYISCFAARFQQDERRPIVFRAVECVFAAIKEMSSVEYQPSTIAVASILAARGNDETPAANLDELKSILGSSW

SEQ ID NO: 96883 - protein, 69 aa, Setaria italica
  Transcript Sequence Number=SeqID_30909
STSIFRPVTITISRLSPVSQQPCEMADRRSTAQASSFSVFELDAIGVVVDRGLRGILGCAVAIYRLALR

SEQ ID NO: 96884 - protein, 101 aa, Setaria italica
  misc_feature (54)..(54): Xaa can be any naturally occurring amino acid
  Transcript Sequence Number=SeqID_30910
  Gene Ontology: Mol. function=DNA topoisomerase (ATP-hydrolyzing) activity; Cellular component=chromosome; Biological process=DNA topological change
  Homolog annotation: Hit_ID=Q6Z8D9; Match level="QueryCoverage=70%, HitCoverage=4%, E-value=5e-19, Identity=69%"; Hit description=DNA topoisomerase 2
RTPCPPPRSTWSRAQPTTPPRPETARGILLLPQDSIGSVEKCTRKIWVCEGSRXSMTHRVLTYVPGLYKIFDEILTYAADNKQRDPSMDSLRVEVDVDLVV

SEQ ID NO: 96885 - protein, 122 aa, Setaria italica
  Transcript Sequence Number=SeqID_30911
  Gene Ontology: Mol. function=hydrolase activity; Biological process =metabolic process
  Homolog annotation: Hit_ID=B9SDP1; Match level="QueryCoverage=93%, HitCoverage=34%, E-value=4e-14, Identity=34%"; Hit description =Gibberellin receptor GID1, putative
  Pfam annotation: Domain name=Abhydrolase_3; Domain location=1-95; Score=-79.7; E_value=0.019; Accession=PF07859.5; Description =alphabeta hydrolase fold
PPPAANSSLLTADMVDRYARLFLPPGATRDHPVINLAGPEAPRLEVAAMAPVLVVAAERDVLRDRHAQYARRMKEEWGKEVEYAELAGVGHGFSEADDPWTRPADELVRLVRRFVVAHMDAE

SEQ ID NO: 96886 - protein, 385 aa, Setaria italica
  Transcript Sequence Number=SeqID_30912
  Gene Ontology: Mol. function=ATP-dependent helicase activity
  Homolog annotation: Hit_ID=B9S326; Match level="QueryCoverage=87%, HitCoverage=28%, E-value=4e-93, Identity=50%"; Hit description=ATP -dependent RNA helicase, putative
  Pfam annotation: Domain name=DUF1605; Domain location=59-177; Score =68.5; E_value=2.5e-17; Accession=PF07717.8; Description=Domain of unknown function (DUF1605)
AAAAKVELASLYGGFSDQLAVVAAFDCWRRAKDRGQESQFCTKYFVSSNIMYMLSNMRKQLQNELSQRGFVPADTSACSLNSKDPGIMRAVLMAGAYPMVGRLLPPRKNARKAVVETASGAKVRLHPHSCNFNLSFSKSSGNPLLIYDEITRGDGGMYIKNCSVVGSHPLLLLATEMVVAPPDDDSDEEEDSSEDEAEKSTLVQHKEEIMSSPDNTVSVVVDRWLRFDATALDVAQIYCLRERLASAILFKVKYPQDVLPQALGASMYAIACILSYDGLPAMVPSNDLPANRGSGQNSAEASSFSQGRRAGYIPPGGFLVSLLADKPHQPPNFQNSYNHPGGASVHTGPSRAPTGRFDQSQRSFRNSGPGSSTRRSFKRQRDAAR

SEQ ID NO: 96887 - protein, 99 aa, Setaria italica
  Transcript Sequence Number=SeqID_30913
  Gene Ontology: Mol. function=protein dimerization activity; Cellular component=nucleus; Biological process=regulation of transcription, DNA-dependent
  Homolog annotation: Hit_ID=Q6K223; Match level="QueryCoverage=100%, HitCoverage=14%, E-value=6e-41, Identity=84%"; Hit description=Auxin response factor 8
VRYMADQDTDEVFARIRLVPLRAREADAGLEDDPAADDEQEKPASFAKTLTQSDTNNGGGFSVPRYCAETIFPRLDYAADPPVQTVVAKDVHGAAWKFR

SEQ ID NO: 96888 - protein, 42 aa, Setaria italica
  Transcript Sequence Number=SeqID_30914
  Gene Ontology: Mol. function=ATPase activity, coupled to transmembrane movement of substances; Cellular component=integral to membrane; Biological process=transport
  Homolog annotation: Hit_ID=Q6UNK5; Match level="QueryCoverage=100%, HitCoverage=2%, E-value=2e-11, Identity=80%"; Hit description=PGP1
MSSSSAAADPDEIRARVVVLGAPHADAADEWARPELEAFHLP

SEQ ID NO: 96889 - protein, 152 aa, Setaria italica
  Transcript Sequence Number=SeqID_30915
  Gene Ontology: Mol. function=transferase activity, transferring groups other than amino-acyl groups; Cellular component=cellular _component; Biological process=biosynthetic process
  Homolog annotation: Hit_ID=Q7G628; Match level="QueryCoverage=90%, HitCoverage=45%, E-value=8e-42, Identity=63%"; Hit description =Chalcone and stilbene synthases, N-terminal domain containing protein
  Pfam annotation: Domain name=ACP_syn_III; Domain location=86-152; Score=-17.1; E_value=0.046; Accession=PF08545.2; Description=3 -Oxoacyl-[acyl-carrier-protein (ACP)]
  Pfam annotation: Domain name=Chal_sti_synt_N; Domain location=1-152; Score=141.7; E_value=2.3e-39; Accession=PF00195.11; Description =Chalcone and stilbene synthases, N-te
  Pfam module annotation: Pfam domain module=ACP_syn_III::Chal_sti_synt_ N; Domain location=86-152::1-152
ILPSSANPDFTDRTLPSLDARVDIASAAVPELAAAAAAKAITEWGRPATEITHLIFSTYSGARAPSADRRLASLLGLSPTVSRTMLNLHGCYGGGRSLQLAKELAENNRGARVLVACSEITLIAFYGPEGGCPDNILGQSLFGDGAGAVIIG

SEQ ID NO: 96890 - protein, 91 aa, Setaria italica
  Transcript Sequence Number=SeqID_30916
  Gene Ontology: Mol. function=protein serine/threonine kinase activity; Cellular component=integral to membrane; Biological process=protein amino acid phosphorylation
  Homolog annotation: Hit_ID=Q9LJF3; Match level="QueryCoverage=100%, HitCoverage=7%, E-value=2e-16, Identity=52%"; Hit description =Receptor-like protein kinase BRI1-like 3
  Pfam annotation: Domain name=LRR_1; Domain location=17-40; Score=4.9; E_value=36; Accession=PF00560.25; Description=Leucine Rich Repeat
  Pfam annotation: Domain name=LRR_1; Domain location=42-64; Score =13.6; E_value=0.76; Accession=PF00560.25; Description=Leucine Rich Repeat
  Pfam annotation: Domain name=LRR_1; Domain location=67-89; Score =13.5; E_value=0.78; Accession=PF00560.25; Description=Leucine Rich Repeat
  Pfam module annotation: Pfam domain module=LRR_1::LRR_1::LRR_1; Domain location=17-40::42-64::67-89
NNISGDISRYDFGGCTNLKMLDWSYNRLSGMGLPQSLANCSRLETLDMSGNKLLSGTIPVFSAVFQQLKQLALAGNNFTGEIPDELSLLCR

SEQ ID NO: 96891 - protein, 134 aa, Setaria italica
  Transcript Sequence Number=SeqID_30917
  Gene Ontology: Mol. function=ATPase activity, coupled to transmembrane movement of substances; Cellular component=integral to membrane; Biological process=transport
  Homolog annotation: Hit_ID=Q6YUU5; Match level="QueryCoverage=100%, HitCoverage=10%, E-value=6e-53, Identity=74%"; Hit description =Putative multidrug resistance protein
  Subcellular localization annotation: CTP_CleavageSite=77; ConfidenceScore=5.19e-01
LALVMIAVQPLIIASFYTRRVLLQNMSNKSIRAQSECSKLAVEAVSNLRTVTAFSSQDHIMCLFEQAQNGSFSESIRQSWLAGLGLGTSMSLLRCVWALTFWYGSILMAKHHITFKALMQTFLILISTGRVIAD

SEQ ID NO: 96892 - protein, 46 aa, Setaria italica
  Transcript Sequence Number=SeqID_30918
KMNLDSHLVIIAYVKKLQCYIGDSFPNLALLHFCSSWTSHAVLWTH

SEQ ID NO: 96893 - protein, 108 aa, Setaria italica
  Transcript Sequence Number=SeqID_30919
  Subcellular localization annotation: CTP_CleavageSite=13; ConfidenceScore=5.13e-01
MSNSFTVKPSFISNSSRRNLMKPLVPMNNSYVPHLYSENFEIEECTFAPVPSPASARPFIVTDGRRIISKSCYEPVPVPFNTGFEEEEEKETEGRHDGGRRSLSSSFP

SEQ ID NO: 96894 - protein, 362 aa, Setaria italica
  Transcript Sequence Number=SeqID_30920
  Subcellular localization annotation: CTP_CleavageSite=98; ConfidenceScore=5.09e-01
FDEENVPCNTPRNSVHSTFGRSSGRAVASTSGSHNTDSVSPGEYLNDPGSILSLQPWIFKRSGSQNSEERMHASGSRAFGSGKNLANCFRDAQAVEVCARSPGVGSGPGRGCGALRSRRSRRNLMKPLVPMNNSYVPHLYSENFEIEECTFAPVPSPASARPFIVTDGRRIISKSCYEPVPVPFNTGFEEEECRGTLVMPGSVIGIASLPELKKLKEEGTDSHAARLGLSSSQRSSKSYGQAGLRDRLLLFSTGLSIGILSSSLSNKKEFDTLKGTLKQMENLVQDLQDELEMKEGLTVKELPNESSGEHDDDNSKIHEVDPEPMSKIEAELEAELARLELNITSKRLEEETSDFNEVDQEF

SEQ ID NO: 96895 - protein, 331 aa, Setaria italica
  Transcript Sequence Number=SeqID_30921
  Gene Ontology: Mol. function=DNA binding
  Homolog annotation: Hit_ID=B9SKE7; Match level="QueryCoverage=31%, HitCoverage=22%, E-value=6e-15, Identity=44%"; Hit description =Transcription factor, putative
  Pfam annotation: Domain name=MADF_DNA_bdg; Domain location=36-116; Score=6.5; E_value=0.047; Accession=PF10545.1; Description=Alcohol dehydrogenase transcription f
MMAAGAHEDSDEPPRRSALKKSAPAQPWSDPETLHLIDAYDERWTALGRGQLKAQQWEEVAADTAARCAATPGLAVQRKTGTQCRHKLEKLRKRYRTEAARPVTSLWTFFRRMDQLERGPNAASSAYPAAGGSPPAAASDEEEEEEEDEEENQEDEEEEEEELIPRNNTRSINGIIREFGSGLAPRHPQLQLQQQQQPPPPPSITPSTAPPRKRVAYEAFQAKAAAAAAAAVAADKAKEEEVELVRRRPSGPGGASAQLSAVLRDFSDGVMRLERRRMEMQWEIERGWQETEARHAQMLQDAQRQLRDAIAAACSLPPKKARRDYGSSGDS

SEQ ID NO: 96896 - protein, 291 aa, Setaria italica
  Transcript Sequence Number=SeqID_30922
PSHAEPPPHAGRGPEYYRSRYAGRYRTSLLQPSPYDQLQRSVSDETYTRQSSGRFRQYPDGRRENYGFGQGSRHHSTCQCAQCLPVQRVVAPEENIPMARYFAGQQGSFRFDRSQPFSSELDRRSVASSLYSDPSMSKRRVEYFRKKAENFCRPLRGAAPFVVCSSCSHLLQMPQGKFTGCKKNQVQCGSCSEIINLKPKEAKVHPVIPQSSFPVPKSVRSSNHRDPKSSGWYQHQDDDNFNFYKLQAHDSHRQKEDFSDNMSPSSTGSYDRTDSERGSSRSIQLKSVPAS

SEQ ID NO: 96897 - protein, 130 aa, Setaria italica
  misc_feature (8)..(8): Xaa can be any naturally occurring amino acid
  misc_feature (28)..(28): Xaa can be any naturally occurring amino acid
  Transcript Sequence Number=SeqID_30923
NYFFAQHXDPDPLLSCRHDGFYHQAACXCMHCCHQEFMPVQGNHLGFNDQRAPYLLNSYGVYPVDSPLFGQQRHCTRGTNILSQNHPRANVSKKPAQSCEPVAGGAPFTICYNCYEVLQIPKNQSLSGKE

SEQ ID NO: 96898 - protein, 100 aa, Setaria italica
  Transcript Sequence Number=SeqID_30924
  Subcellular localization annotation: CTP_CleavageSite=28; ConfidenceScore=5.48e-01
CCRRTSCSRGRCRRTPSRRQSACSIAPAASGRTEPRRRRRRCGSRRSRRATAQLRGRCKLHGSGGEFRAAQQARVLLPARRGRSRQCGDDGRLRRRRQLR

SEQ ID NO: 96899 - protein, 314 aa, Setaria italica
  Transcript Sequence Number=SeqID_30925
  Gene Ontology: Mol. function=calcium-dependent phospholipid binding; Cellular component=cytoplasm
  Homolog annotation: Hit_ID=Q43864; Match level="QueryCoverage=100%, HitCoverage=100%, E-value=1e-161, Identity=89%"; Hit description =Annexin p35
  Pfam annotation: Domain name=Annexin; Domain location=15-80; Score =96.9; E_value=6.9e-26; Accession=PF00191.12; Description=Annexin
  Pfam annotation: Domain name=Annexin; Domain location=170-235; Score =65.2; E_value=2.4e-16; Accession=PF00191.12; Description=Annexin
  Pfam annotation: Domain name=Annexin; Domain location=245-310; Score =92.6; E_value=1.4e-24; Accession=PF00191.12; Description=Annexin
  Pfam annotation: Domain name=Annexin; Domain location=87-152; Score =66.4; E_value=1e-16; Accession=PF00191.12; Description=Annexin
  Pfam module annotation: Pfam domain module=Annexin::Annexin::Annexin:: Annexin; Domain location=15-80::170-235::245-310::87-152
MATLTVPAAVPPVAEDCEQLHKAFEGWGTNEKLIISILAHRDAAHRRAIRRAYAEAYGKELLRALGDEIHGKFERAVILWTLDPAERDAVLANEEAKKWHPGGRVLVEIACARTPAQLFAAKQAYHDRFKRSLEEDVAAHITGDFRKLLVPLVSAYRYDGPEVNTSLAHSEAKILHEKIHKKAYSDEEIIRILTTRSKAQLLATFNSYKDQFDHPINKDLKADPKDEFLATLRAIIRCFTCPDRYFEKILRLALGGMGTDEDDLTRVITTRAEVDLKLIKEAYQKRNSVTLERAVAKDTTRDYEDIILALLGAE

SEQ ID NO: 96900 - protein, 35 aa, Setaria italica
  Transcript Sequence Number=SeqID_30926
LSQLTVAYLKEKSSSQGSQPSTPSSSSGMRSAAAR

SEQ ID NO: 96901 - protein, 184 aa, Setaria italica
  Transcript Sequence Number=SeqID_30927
  Gene Ontology: Mol. function=sequence-specific DNA binding; Cellular component=intracellular; Biological process=DNA repair
  Homolog annotation: Hit_ID=B6UFK1; Match level="QueryCoverage=86%, HitCoverage=41%, E-value=4e-66, Identity=77%"; Hit description =Mating-type switching protein swi10
  Pfam annotation: Domain name=HHH; Domain location=59-88; Score=27.1; E_value=7.1e-05; Accession=PF00633.15; Description=Helix-hairpin -helix motif
SLEECGRYLETIKVYENKPADSIREHTDSDYLSRLTHALTSIRHVNKTDVVTLGSSFGSLSQVMNASMEELARCPGIGERKVKQLYDTFHEPFKRVSARPNLVVPDTPDREKASGQPPSTNDSSENTAEKSETSKKKKGSDVRSALTTAFAKYSEKIRSQNGDAANEAGEGASSSNMEDGKTKD

SEQ ID NO: 96902 - protein, 281 aa, Setaria italica
  Transcript Sequence Number=SeqID_30928
  Gene Ontology: Mol. function=deoxyhypusine monooxygenase activity; Cellular component=cellular_component; Biological process=peptidyl -lysine modification to hypusine
  Homolog annotation: Hit_ID=B6UH29; Match level="QueryCoverage=100%, HitCoverage=93%, E-value=1e-140, Identity=72%"; Hit description=HEAT- like
  Pfam annotation: Domain name=HEAT_PBS; Domain location=1-26; Score =1.2; E_value=78; Accession=PF03130.8; Description=PBS lyase HEAT -like repeat
  Pfam annotation: Domain name=HEAT_PBS; Domain location=155-181; Score= 10.6; E_value=3; Accession=PF03130.8; Description=PBS lyase HEAT-like repeat
  Pfam annotation: Domain name=HEAT_PBS; Domain location=186-212; Score= 21.1; E_value=0.0047; Accession=PF03130.8; Description=PBS lyase HEAT- like repeat
  Pfam annotation: Domain name=HEAT_PBS; Domain location=219-245; Score= 30.8; E_value=5.6e-06; Accession=PF03130.8; Description=PBS lyase HEAT-like repeat
  Pfam annotation: Domain name=HEAT_PBS; Domain location=31-57; Score =33.2; E_value=1.1e-06; Accession=PF03130.8; Description=PBS lyase HEAT-like repeat
  Pfam annotation: Domain name=HEAT_PBS; Domain location=64-90; Score =28.5; E_value=2.7e-05; Accession=PF03130.8; Description=PBS lyase HEAT-like repeat
  Pfam module annotation: Pfam domain module=HEAT_PBS::HEAT_PBS::HEAT _PBS::HEAT_PBS::HEAT_PBS::HEAT_PBS; Domain location=1-26::155 -181::186-212::219-245::31-57::64-90
RFRALFSLRNLRGDAPRSALLQAARDPSNLLAHEAAFALGQMQDADAIPALVAVLKDLSLHPIVRHEAAEALGAIGLEKSIPLLEESLTADPAVEVQETCELALRRIEEQKKVNGAENTTNSPFLSVDPALPAKHGLSVDQLRDLLLNEQESMYERYAALFALRNDGGDAAVSAIVAALGVKSALLRHEVAYVLGQLQNKAASDALSMVLKDVCEHPMVRHEAAEALGSIADQESIALLEEFAKDPEPIVSQSCEVALSMLEYERSGKSFEFLFLQTPHVQ

SEQ ID NO: 96903 - protein, 185 aa, Setaria italica
  Transcript Sequence Number=SeqID_30929
  Gene Ontology: Mol. function=binding
  Homolog annotation: Hit_ID=Q84Z28; Match level="QueryCoverage=100%, HitCoverage=14%, E-value=2e-48, Identity=55%"; Hit description =Abnormal spindle-like protein
  Pfam annotation: Domain name=Arm; Domain location=29-71; Score=4.9; E_ value=3; Accession=PF00514.15; Description=Armadillobeta-catenin-like repeat
  Pfam annotation: Domain name=Arm; Domain location=73-118; Score=18.6; E_value=0.027; Accession=PF00514.15; Description=Armadillobeta -catenin-like repeat
  Pfam module annotation: Pfam domain module=Arm::Arm; Domain location =29-71::73-118
IIQSYVKAYLVRKASKQEVAHIRSRLQKSSALVDDIMRLINRLVAALSQLRHSRSTRSIRQTCTALSTATEYSKKCCETLVTDGAVDILLKQIHFLNRGIPDQEVLKQVFLTLRNIARYPHLRQVLVNIPESAEIIFQELLRNKAAVFFIASDILKKLCESKEGHETARALHHHIKRLRSLVQDL

SEQ ID NO: 96904 - protein, 49 aa, Setaria italica
  Transcript Sequence Number=SeqID_30930
AHHVERLGHERRDGAGLQLLLRRRQPSPAGAEAGVELKVLLALAAHVSS

SEQ ID NO: 96905 - protein, 90 aa, Setaria italica
  Transcript Sequence Number=SeqID_30931
AGVDSFDEASPWEQQFSICWTASQLTEYILKSEGEKWDNELTKLINSLDIKHFTMPMYSTIRCFYALYSTDIIYICRNNDHTTPRIQRSD

SEQ ID NO: 96906 - protein, 46 aa, Setaria italica
  Transcript Sequence Number=SeqID_30932
  Homolog annotation: Hit_ID=Q7X7P2; Match level="QueryCoverage=91%, HitCoverage=31%, E-value=3e-12, Identity=76%"; Hit description =OSJNBa0074L08.18 protein
MGGFDLQVKERTKELKHLKAAAMRGIKAAGESCKKAWSKVRSSIRR

SEQ ID NO: 96907 - protein, 110 aa, Setaria italica
  Transcript Sequence Number=SeqID_30933
  Gene Ontology: Mol. function=violaxanthin de-epoxidase activity
ATSPEGTVRIVAVVGEGTISPIKDTPWEEVMRHTADRLKWVDEEFEMLVFTDNSIENNDIRKELSRCDMLLNVAVTNQDAVEWLINNSKDISNVICFQSSPSLLNKLGGT

SEQ ID NO: 96908 - protein, 46 aa, Setaria italica
  Transcript Sequence Number=SeqID_30934
VLQKRYLKFKIKLIVLIAGTENYRQEGCNNHLPSTVVNKDKQNLIC

SEQ ID NO: 96909 - protein, 87 aa, Setaria italica
  Transcript Sequence Number=SeqID_30935
  Subcellular localization annotation: CTP_CleavageSite=30; ConfidenceScore=5.27e-01
ANNGAPVPPCHLAGRRAGRLQRRCRGGGVVVGVEVGLPVPQQRPRRLRQPRPRRLRRPRPRRRLPEPQPQPRGIDRDGGPVPLLLPA

SEQ ID NO: 96910 - protein, 122 aa, Setaria italica
  misc_feature (8)..(8): Xaa can be any naturally occurring amino acid
  Transcript Sequence Number=SeqID_30936
MEKGSRGXSGRAAVCGIVALLSAPAFSCSLAAEFRKVKEKDVKLDGSLCSLPRSSAFELGVAAIAFLFVAQLVGTTAAVTTAYAAKPKKSAAGRGRATFVALLVLSWLSFAVAVVLLATAAS

SEQ ID NO: 96911 - protein, 84 aa, Setaria italica
  Transcript Sequence Number=SeqID_30937
  Gene Ontology: Mol. function=UDP-glucose:glycoprotein glucosyltransfer ase activity; Biological process=protein amino acid glycosylation
  Homolog annotation: Hit_ID=Q6ESI8; Match level="QueryCoverage=100%, HitCoverage=5%, E-value=3e-34, Identity=79%"; Hit description =Putative UDP-glucose:glycoprotein glucosyltransferase
TGNAPLFTSGDLHEWLEGLGKLAMDSTEQPELFDFDHVYPRANVTAPIAIFYGAVGTKCFKELHVQLAEASKQGKVRYALRPVL

SEQ ID NO: 96912 - protein, 170 aa, Setaria italica
  Transcript Sequence Number=SeqID_30938
AGLRRWRRIPREQQHHEGSPASPGAVGAGVGAGANAAEDLAAQLHKRRLFPTADAPKGKEDAAVEEVESSVASVESSFVPLVASPPPAPTRLDPNLGHLIATAGFSLGAGGADSDNSDDRTSKFSTAASAPRHDFSSGGFGRDRDRPRSRAPGGAAHEQRLRAARGRGAS

SEQ ID NO: 96913 - protein, 132 aa, Setaria italica
  Transcript Sequence Number=SeqID_30939
  Gene Ontology: Mol. function=protein serine/threonine kinase activity; Cellular component=plasma membrane; Biological process =protein amino acid phosphorylation
  Homolog annotation: Hit_ID=Q9M0G7; Match level="QueryCoverage=98%, HitCoverage=43%, E-value=2e-44, Identity=37%"; Hit description =Leucine-rich repeat receptor-like protein kinase
  Pfam annotation: Domain name=LRR_1; Domain location=21-44; Score=5.0; E_value=33; Accession=PF00560.25; Description=Leucine Rich Repeat
  Pfam annotation: Domain name=LRR_1; Domain location=45-67; Score=8.8; E_value=6.4; Accession=PF00560.25; Description=Leucine Rich Repeat
  Pfam annotation: Domain name=LRR_1; Domain location=69-91; Score =11.9; E_value=1.6; Accession=PF00560.25; Description=Leucine Rich Repeat
  Pfam annotation: Domain name=LRR_1; Domain location=93-115; Score =12.4; E_value=1.3; Accession=PF00560.25; Description=Leucine Rich Repeat
  Pfam module annotation: Pfam domain module=LRR_1::LRR_1::LRR_1::LRR _1; Domain location=21-44::45-67::69-91::93-115
  Subcellular localization annotation: CTP_CleavageSite=28; ConfidenceScore=5.31e-01
FELWNNSLTGQLPASLGKSSPLQWVDVSSNSFSGPVPAGICDGKSLAKLIMFNNGFTGGIPAGLASCASLVRVRMQSNRLTGTIPIGFGKLPSLQRLELAGNDLSGELPGDLALSTSLSFIDVSHNHLSTRC

SEQ ID NO: 96914 - protein, 66 aa, Setaria italica
  Transcript Sequence Number=SeqID_30940
  Subcellular localization annotation: CTP_CleavageSite=19; ConfidenceScore=5.03e-01
TNMTSQGDFFFLISKGLKRSSVFTKRPNTHRKQDLALPALYPKYEIMLATCSKNLLFGMANQRLTF

SEQ ID NO: 96915 - protein, 81 aa, Setaria italica
  Transcript Sequence Number=SeqID_30941
  Subcellular localization annotation: CTP_CleavageSite=46; ConfidenceScore=5.84e-01
QLAQAHPHLLKRAASKQGPCPPQLRRPSRSAASAWGSAPPFCPPSSASRRRVPSTPLKLLHRHSSIPPPHGMLTAVATFFT

SEQ ID NO: 96916 - protein, 76 aa, Setaria italica
  Transcript Sequence Number=SeqID_30942
  Gene Ontology: Mol. function=protein serine/threonine kinase activity; Biological process=protein amino acid phosphorylation
  Homolog annotation: Hit_ID=B6U286; Match level="QueryCoverage=67%, HitCoverage=9%, E-value=1e-17, Identity=83%"; Hit description =Nodulation receptor kinase
  Pfam annotation: Domain name=LRRNT_2; Domain location=23-66; Score =12.1; E_value=0.054; Accession=PF08263.4; Description=Leucine rich repeat N-terminal domain
MAARFLLLYALLLALATAAASQGLAQEDVAKRLKEELSERNRENEMLESWNGDPCSPSTWEGFSCEPKDGVRVVVK

SEQ ID NO: 96917 - protein, 103 aa, Setaria italica
  Transcript Sequence Number=SeqID_30943
VGVGGHGARRRRRHEPRRVAPQVAGPVHDQKEAPRRHRQRRRRGGAAAVRPAATWVPVPLPLPVPVQQRRRRRDGAAPGPSSCLRPAAGALPVRGRGRGPRLG

SEQ ID NO: 96918 - protein, 94 aa, Setaria italica
  misc_feature (47)..(47): Xaa can be any naturally occurring amino acid
  Transcript Sequence Number=SeqID_30944
  Gene Ontology: Mol. function=receptor activity
  Homolog annotation: Hit_ID=Q7XIS2; Match level="QueryCoverage=97%, HitCoverage=18%, E-value=2e-10, Identity=40%"; Hit description =Receptor-like kinase-like
PTFYVFQLFEDYRNLVAGVQVYSSETGQTVGEETEWDNRIIGRCASXSVSVFLNGCQHYLTYDPAIAVVDTRGKLRRSIPVPDNKDDGFIHQSQ

SEQ ID NO: 96919 - protein, 129 aa, Setaria italica
  misc_feature (37)..(37): Xaa can be any naturally occurring amino acid
  misc_feature (56)..(56): Xaa can be any naturally occurring amino acid
  Transcript Sequence Number=SeqID_30945
  Gene Ontology: Mol. function=oxidoreductase activity, acting on single donors with incorporation of molecular oxygen, incorporation of two atoms of oxygen
  Homolog annotation: Hit_ID=B6UEM5; Match level="QueryCoverage=96%, HitCoverage=22%, E-value=6e-55, Identity=80%"; Hit description =Carotenoid cleavage dioxygenase
EGAIPEDFPEGVYIRNGSNPLFGALHSTASIFGKSRXEIWVEGEGMLHALYFTKTXSGSWSVRYANRYVQSKTLRLERARQKPCFLPAIEGDSAAIIAAYIFNYMRFGKVNKDISNTNVFEHAGRVVCL

SEQ ID NO: 96920 - protein, 127 aa, Setaria italica
  Transcript Sequence Number=SeqID_30946
  Gene Ontology: Cellular component=integral to membrane
  Pfam annotation: Domain name=DUF588; Domain location=1-106; Score =49.1; E_value=1.7e-11; Accession=PF04535.4; Description=Domain of unknown function (DUF588)
MSSTSDFASVSAFCYLIAAAILQCVWSLSVAIVDIYALLVKRCLRNRRLVTLFAIGDTITCGVTFSGACAAAGITVLIDNDLNICSENHCSSFMTAVAMAFMCSFSLSPSFVLNLYSVASTRVLAAG

SEQ ID NO: 96921 - protein, 154 aa, Setaria italica
  Transcript Sequence Number=SeqID_30947
DVGLATVANVCSNLRAVDISRCEKITNAGVSKIVSHCLSLEILRCGGCPRSEFTARRCLNLLKPKLNTLEEDSWEELDTLDIGGGAESLRWLVWPKIDDNSKETLAAECPRVTINPQPSLYDLSGSKVPVEALASVPLDHSIVEDVDPKNMGSF

SEQ ID NO: 96922 - protein, 56 aa, Setaria italica
  Transcript Sequence Number=SeqID_30948
TGNKTFFYLFSIHMKLQHYAYERHVNSTSTEIGVITSKDIAQAYTHIVHVLCIYVP

SEQ ID NO: 96923 - protein, 93 aa, Setaria italica
  Transcript Sequence Number=SeqID_30949
  Gene Ontology: Mol. function=metal ion binding
  Homolog annotation: Hit_ID=B6UCK3; Match level="QueryCoverage=83%, HitCoverage=38%, E-value=6e-21, Identity=66%"; Hit description=Zinc finger, C3HC4 type family protein
PSNSAGADAGDDEDDSLPVASPWASRWRHEDDSLGALPLEDVASALPVYIYSSPGAGDDGGKLQVDECAVCIVELRDGDSARMLPRCGHRFHA

SEQ ID NO: 96924 - protein, 82 aa, Setaria italica
  Transcript Sequence Number=SeqID_30950
  Gene Ontology: Mol. function=structural constituent of ribosome; Cellular component=intracellular; Biological process=protein modification process
  Homolog annotation: Hit_ID=A8NSV0; Match level="QueryCoverage=82%, HitCoverage=35%, E-value=5e-25, Identity=83%"; Hit description =Ubiquitin, putative
  Pfam annotation: Domain name=ubiquitin; Domain location=33-82; Score =53.7; E_value=7e-13; Accession=PF00240.15; Description=Ubiquitin family
DPRSRSRNLRTRRQGTEASLSPDRRIKMQIFVKTLTGKTITLEVESSDTIDNVKAKIQDKEGIPPDQQRLIFAGKQLEDGRT

SEQ ID NO: 96925 - protein, 86 aa, Setaria italica
  Transcript Sequence Number=SeqID_30951
  Gene Ontology: Cellular component=integral to membrane
AVVLLTIGPAVLGFAPSSETEAQAEGSTAYWTGFLECMSSAALIGLVLPLVEVAMSRYGRRDGGPAAARAPPPSYATVMQIQAVMG

SEQ ID NO: 96926 - protein, 119 aa, Setaria italica
  misc_feature (102)..(102): Xaa can be any naturally occurring amino acid
  Transcript Sequence Number=SeqID_30952
NRWEFLNPDASDSDSESSETEDDQYEPSDMETGSESDNEGSDSESVVNSGDDDGGSDEDDGGESWDEMERKARDANAEIGSESDSEDERQHRRVKAKAKSRXPNEPSSKGAPQKRQRLN

SEQ ID NO: 96927 - protein, 90 aa, Setaria italica
  Transcript Sequence Number=SeqID_30953
  Gene Ontology: Mol. function=electron carrier activity; Cellular component=extracellular region; Biological process=response to oxidative stress
  Homolog annotation: Hit_ID=Q9SSZ8; Match level="QueryCoverage=98%, HitCoverage=32%, E-value=1e-16, Identity=46%"; Hit description =Peroxidase 2
RDSTTANMTEANNALPGPNSNLDELIGKFHNKSFNARELVALSGAHTIGQAQCQFADPKQQKARCPNGVVGKTASLDVHTPEVFDNRYYG

SEQ ID NO: 96928 - protein, 85 aa, Setaria italica
  Transcript Sequence Number=SeqID_30954
  Gene Ontology: Mol. function=translation initiation factor activity; Biological process=translational initiation
  Homolog annotation: Hit_ID=B6T3J2; Match level="QueryCoverage=35%, HitCoverage=11%, E-value=1e-10, Identity=93%"; Hit description =Eukaryotic translation initiation factor 2 beta subunit
MVCLFSRLTKVSFFLQLHSLDEYVICNGCKSPDTILSKENRLFFLRCEQVNKLFRICWHSLSCLLLSCEYFLPNIMIILSGTPPY

SEQ ID NO: 96929 - protein, 272 aa, Setaria italica
  Transcript Sequence Number=SeqID_30955
  Gene Ontology: Mol. function=translation initiation factor activity; Cellular component=eukaryotic translation initiation factor 2 complex; Biological process=translational initiation
  Homolog annotation: Hit_ID=B6T3J2; Match level="QueryCoverage=100%, HitCoverage=100%, E-value=1e-131, Identity=87%"; Hit description =Eukaryotic translation initiation factor 2 beta subunit
  Pfam annotation: Domain name=eIF-5_eIF-2B; Domain location=126-253; Score=278.7; E_value=1.3e-80; Accession=PF01873.9; Description =Domain found in IF2BIF5
MADDEQAERKEEVAELAPFDPTKKKKKKKVVIQEPSDEVDKLAEKTESLAVAESSEPSFAGMKKKKKKHVELDPSLTEVGDGDDAEDDQVKDDEEGEGIVLGGAVATGYPWEGTDRDYKYEELLGRVFNILRENNPDLAGDRRRTVMRPPQVLREGTKKTVFVNFMDLCKTMHRQPEHVMMFLLAEMGTSGSLDGQQRLVIKGRFAPKNFEAILRRYINEYVICNGCKSPDTILSKENRLFFLRCEQCGSSRSVAPIKAGFVAQVGRRKAGA

SEQ ID NO: 96930 - protein, 112 aa, Setaria italica
  Transcript Sequence Number=SeqID_30956
  Gene Ontology: Mol. function=transferase activity, transferring groups other than amino-acyl groups
  Homolog annotation: Hit_ID=Q84QG5; Match level="QueryCoverage=100%, HitCoverage=30%, E-value=2e-32, Identity=64%"; Hit description =Putative agmatine coumaroyltransferase (Fragment)
VSDGRATSNFFVAWSQATRGAAVDPAPVHDRASFFAPRDPPQVEFEHRGVEYKQKQPARVKEYAISADDDGADDEVAVHKVHFSREFISKLKSQASPPGTHRPCSTLRCIVA

SEQ ID NO: 96931 - protein, 55 aa, Setaria italica
  Transcript Sequence Number=SeqID_30957
FVKRGYKITQMCLDLLLLMRTIYPPIILPSMTEIDSDVHRLPLCVNKNIVCTQQI

SEQ ID NO: 96932 - protein, 346 aa, Setaria italica
  Transcript Sequence Number=SeqID_30958
  Gene Ontology: Mol. function=FMN binding
  Homolog annotation: Hit_ID=B6SUB0; Match level="QueryCoverage=98%, HitCoverage=99%, E-value=1e-137, Identity=76%"; Hit description=Root border cell-specific protein
  Pfam annotation: Domain name=DUF2470; Domain location=252-339; Score =14.4; E_value=6e-06; Accession=PF10615.1; Description=Protein of unknown function (DUF2470)
  Pfam annotation: Domain name=Pyridox_oxidase; Domain location=101 -194; Score=46.6; E_value=9.5e-11; Accession=PF01243.12; Description =Pyridoxamine 5'-phosphate oxidase
  Pfam module annotation: Pfam domain module=DUF2470::Pyridox_oxidase; Domain location=252-339::101-194
  Subcellular localization annotation: CTP_CleavageSite=9; ConfidenceScore=5.06e-01
MMPFLLTPGAARIASAPCPSPSTLSRLLLPLHLQINGRHNHHHRHHVHASSTPSPLVYPRLRNRRGRFFASSQMAAPADAPGGSADAFEVIRAHQAKAARLPPVEEIRTILDQSVRGVLATHSQEHDGYPSGSMVDFACDQDGSPILAVSSLAVHSKNLSGNPKCSLLVAKDPEDRTDTVITVYGDAVPVSDEQKDSVRSAYLRRHPNAFWVDFGDFSFLRIKPKAVRYVSGVATALLGSGEFSAAEYREAKVDPISQFSTPITSHMNKDHADDTKLIVQHSTNVKVDFAFMLDVDSLGFNVKAGYDGSVLKLRIPFPRQAQDRKDVKTLIVEMLQAAKAASSHAD

SEQ ID NO: 96933 - protein, 64 aa, Setaria italica
  Transcript Sequence Number=SeqID_30959
NLVGKVLMEMAKWVSNCLGQNLVACKSVLYLLLIYISSRGLPLLCFTKKILSWHERKSWMAWNF

SEQ ID NO: 96934 - protein, 118 aa, Setaria italica
  Transcript Sequence Number=SeqID_30960
  Gene Ontology: Cellular component=vacuole
  Pfam annotation: Domain name=DUF538; Domain location=42-118; Score =50.3; E_value=7.6e-12; Accession=PF04398.4; Description=Protein of unknown function, DUF538
  Subcellular localization annotation: CTP_CleavageSite=62; ConfidenceScore=5.12e-01
MRRLALLLLPLLLAAGAAAAATPPPSPPTPTPTPPPPHKNATLAELLPLYGLPPGVFPSTVTAFSLADNGSLAVDLAGPCYVHFGYLTYFQPRVTGVLRYGSLSGLEGVQVRRFLFLG

SEQ ID NO: 96935 - protein, 37 aa, Setaria italica
  Transcript Sequence Number=SeqID_30961
  Gene Ontology: Mol. function=ammonium transmembrane transporter activity; Cellular component=integral to membrane; Biological process=transport
  Homolog annotation: Hit_ID=Q0EEW6; Match level="QueryCoverage=100%, HitCoverage=7%, E-value=1e-09, Identity=72%"; Hit description =Putative ammonium transporter AMT2
PIAYRNSSSSPDWLNKGDNAWQMISATLVGLQSMPGL

SEQ ID NO: 96936 - protein, 219 aa, Setaria italica
  Transcript Sequence Number=SeqID_30962
  Gene Ontology: Mol. function=aspartic-type endopeptidase activity; Cellular component=nucleus; Biological process=regulation of transcription, DNA-dependent
  Homolog annotation: Hit_ID=Q53QA4; Match level="QueryCoverage=92%, HitCoverage=15%, E-value=1e-104, Identity=87%"; Hit description =Retrotransposon protein, putative, Ty1-copia subclass
  Pfam annotation: Domain name=RVT_2; Domain location=82-219; Score =165.3; E_value=1.8e-46; Accession=PF07727.6; Description=Reverse transcriptase (RNA-dependent DNA pol
CARPLSLGSADAHDDVQQTPEEDLPIAHRKSKRTVAPPTRLIEECNLSYHALSCAEQVENVHEPATYKEAIHCDDTANWILAMHEEMKSLEKNSTWELVPLPKNKKAIRCKWIFKRKEGLSPSEPPKYKARLVAKGYSQIPGVDYNDVFSPVVKHSSIRTFLSVVASHDLELEQLDVKTAFLHGELEEDIYMDQPEGFTVPGKEKYVCKLKRSLYGLKQ

SEQ ID NO: 96937 - protein, 45 aa, Setaria italica
  Transcript Sequence Number=SeqID_30963
SAKKLAFQVTFSGGHDAAAKKGAMSGSITWSDGKHLVRSPFVVTS

SEQ ID NO: 96938 - protein, 77 aa, Setaria italica
  Transcript Sequence Number=SeqID_30964
  Gene Ontology: Mol. function=protein dimerization activity
  Homolog annotation: Hit_ID=Q259H8; Match level="QueryCoverage=94%, HitCoverage=19%, E-value=2e-14, Identity=41%"; Hit description =H0103C06.4 protein
  Subcellular localization annotation: CTP_CleavageSite=39; ConfidenceScore=5.24e-01
RPAQPSAATGKKRTAWGKIFGGPGSCGSPVLSSTPPISPASELSSYLNSDTITCYDDDFNILSWWHEHKLSYPILSI

SEQ ID NO: 96939 - protein, 412 aa, Setaria italica
  misc_feature (378)..(378): Xaa can be any naturally occurring amino acid
  Transcript Sequence Number=SeqID_30965
  Gene Ontology: Mol. function=nucleoside-triphosphatase activity; Cellular component=integral to membrane; Biological process=cell division
  Homolog annotation: Hit_ID=Q7XJW9; Match level="QueryCoverage=100%, HitCoverage=71%, E-value=0.0, Identity=78%"; Hit description =OSJNBa0016O02.1 protein
  Pfam annotation: Domain name=AAA; Domain location=159-345; Score =287.8; E_value=2.4e-83; Accession=PF00004.21; Description=ATPase family associated with various cellular activities (AAA)
  Pfam annotation: Domain name=AAA_5; Domain location=159-291; Score =0.3; E_value=0.00091; Accession=PF07728.6; Description=ATPase family associated with various
  Pfam annotation: Domain name=FtsH_ext; Domain location=1-133; Score =50.1; E_value=8.3e-12; Accession=PF06480.7; Description=FtsH Extracellular
  Pfam module annotation: Pfam domain module=AAA::AAA_5::FtsH_ext; Domain location=159-345::159-291::1-133
TAAAFEEDSRRIYFSKRAEDGDDGDEASEAGETESAPEAAPKWPYYARRVPHDEGFLLGLMREGGVDYRSAPRPAGRLVVDMLSTLLTLWVSLLPMMWFLQRQLSGGGSADKRRKPRKQRVGFDDVQGVDEAKEELVEIVSCLHGSLNYKKLGAKLPRGVLLVGPPGTGKTLLARAVAGEAGIPFFSVSASEFVEVFVGRGAARVRDLFKEAKEAAPSIIFIDELDAVGGSRGRSFNDERDQTLNQLLTEMDGFDSDMKVIVMAATNRPKALDAALCRPGRFSRKVVVGVPDVEGRKKILAVHLRDIPLEEDPEIICDLVANLTPGLVGADLANIVNEAALLAARRGGNTVSREDIMDAIEREKYGVNGRQETNDSEXRQGLTKLFPWLPKPGNKPSSPDDFRGLMGYQTLS

SEQ ID NO: 96940 - protein, 133 aa, Setaria italica
  Transcript Sequence Number=SeqID_30966
  Gene Ontology: Mol. function=protein serine/threonine kinase activity; Biological process=protein amino acid phosphorylation
  Homolog annotation: Hit_ID=Q6ZK05; Match level="QueryCoverage=67%, HitCoverage=12%, E-value=4e-11, Identity=47%"; Hit description =Putative wall-associated serine/threonine kinase
EILDEQIMEEGEEKPKQVAAIAAMCLRLKGEDRPTMRYVEMRLQGLQSSDIYISGMEEQMGDLNGQTYQGGDARVGDSYSSRQYSIEAEILYQRACNGDHGIKYVNNVQCHTILYFAWIVNNHTVEFSSLKPL

SEQ ID NO: 96941 - protein, 336 aa, Setaria italica
  Transcript Sequence Number=SeqID_30967
  Gene Ontology: Mol. function=hydrolase activity, hydrolyzing O -glycosyl compounds; Cellular component=extracellular region; Biological process=carbohydrate metabolic process
  Homolog annotation: Hit_ID=B5U8Y9; Match level="QueryCoverage=100%, HitCoverage=36%, E-value=1e-145, Identity=77%"; Hit description =Alpha-glucosidase
  Pfam annotation: Domain name=Glyco_hydro_31; Domain location=1-170; Score=-40.2; E_value=9.6e-09; Accession=PF01055.18; Description =Glycosyl hydrolases family 31
MPMVGSDICGFYPSPTEELCNRWIELGAFYPFSRDHANFASPRQELYVWESVAKSARNALGMRYKLLPYLYTLNYQAHLTGAPVARPVFFSFPDFTPCYGLSTQFLLGSSVMVSPVLEEGATLVSAMFPPGTWYNLFDTTKVVVSKSGAPVRLDAPLNEINVHVYQGTVLPMQRGGVISKDARATPFTLVVAFPYGATQADAEGAVYVDDDERPEMVLAEGQATYVRFHASVRGKAVTVRSEVQMGSFSLHKGLVIEKVSVLGLEGTGKDLAIQVDGADATAVATSIPYFAAGGNAKLQGEDGLEDSKRSVSVEVGGLALPLGKSFTMTWNMRIEA

SEQ ID NO: 96942 - protein, 70 aa, Setaria italica
  Transcript Sequence Number=SeqID_30968
VKSDLHGKPLDVKYLNMALIDQTIIPDVYHMHDQVAHLQERLCKSSQLNSFGTNIKKSMEKRERITKHCR

SEQ ID NO: 96943 - protein, 337 aa, Setaria italica
  Transcript Sequence Number=SeqID_30969
  Gene Ontology: Cellular component=membrane
  Homolog annotation: Hit_ID=B9SJK6; Match level="QueryCoverage=100%, HitCoverage=74%, E-value=1e-163, Identity=78%"; Hit description =Catalytic, putative
  Pfam annotation: Domain name=Exostosin; Domain location=1-260; Score =233.0; E_value=7.3e-67; Accession=PF03016.7; Description=Exostosin family
QVKIHQLLLKSRFRTFNKDQANLFFVPSYVKCVRMTGALNDKEINQTYVKVLSQMPYFRRSSGRDHIFVFPSGAGAHLFRSWATFLNRSIILTPEGDRTDKRGTSAFNTWKDIIIPGNVDDSMVKSDARAVQPIPLTKRKYLANFLGRAQGKAGRLQLVKLAKQYPDKLESPELKLSGPNKLGRLDYFKHLRNAKFCLAPRGESSWTLRFYESFFVECVPVILSDEAELPFQNVIDYREISIKWPSSRIGPELLEYLESIPDERVEEMIGHGRDMRCLWVYAADSEPCSAMSGILSELQRKVRRFHQSPETFWLHNRSIVNRDLVEFHSWRTPVPLP

SEQ ID NO: 96944 - protein, 60 aa, Setaria italica
  Transcript Sequence Number=SeqID_30970
YPNQLTENNEFCESLARILQSSKSTRHIMVDLICIDMKNIFKCLRCTTGSNAYMLRHLSI

SEQ ID NO: 96945 - protein, 288 aa, Setaria italica
  Transcript Sequence Number=SeqID_30971
  Gene Ontology: Mol. function=transporter activity; Cellular component= membrane; Biological process=transport
  Homolog annotation: Hit_ID=Q9SRK7; Match level="QueryCoverage=100%, HitCoverage=49%, E-value=1e-116, Identity=72%"; Hit description =Adenine/guanine permease AZG1
  Pfam annotation: Domain name=Xan_ur_permease; Domain location=1-287; Score=-164.7; E_value=0.064; Accession=PF00860.12; Description =Permease family
  Subcellular localization annotation: CTP_CleavageSite=67; ConfidenceScore=5.36e-01
LAQFIPKPVRISASAGIGLFLAFIGLQSNEGVGLVGFSSSTLVTLGACPASQRASVAPVVTFPNGTVALMPGGTVSGGILCLSGRMTSPTFWLAVVGFLIIAFCLIKNVRGAMIYGILFVTFVSWPRGTAVTAFPDTPAGDDSFHYFKKVFDVHRIRSTAGALDFRGIGHGYFWEALFTFLYVDILDTTGGLYSMARFAGFVDDATGDFEGQYFAFMSDASAIVFGSLLGTSPVTAFIESSTGIREGGRTGLTALTAAVYFAAALFITPLLASIPSWAVGPPLVLVGV

SEQ ID NO: 96946 - protein, 98 aa, Setaria italica
  Transcript Sequence Number=SeqID_30972
PEPNKRDLIETKNEGDPTSVPQKPKLSKAERRAIQEAQRAAKAAAKEAGLKSTAKESDVNTKISKQPKAGKASLKKDVTQVNPPVASDKKTDERPPDK

SEQ ID NO: 96947 - protein, 65 aa, Setaria italica
  Transcript Sequence Number=SeqID_30973
  Homolog annotation: Hit_ID=Q10R94; Match level="QueryCoverage=100%, HitCoverage=14%, E-value=2e-18, Identity=75%"; Hit description =Lipase, putative, expressed
AGTSTAHLARFGVGVRAARVVTRMEESWTIDDVAFNVPGLGPDAFIPPEEVRRSRSYGAAIAAGK

SEQ ID NO: 96948 - protein, 95 aa, Setaria italica
  Transcript Sequence Number=SeqID_30974
  Gene Ontology: Mol. function=metal ion binding
  Homolog annotation: Hit_ID=B6U108; Match level="QueryCoverage=83%, HitCoverage=26%, E-value=1e-26, Identity=67%"; Hit description =Ubiquitin-protein ligase CIP8
  Pfam annotation: Domain name=zf-C3HC4; Domain location=24-64; Score =35.9; E_value=1.6e-07; Accession=PF00097.17; Description=Zinc finger, C3HC4 type (RING finger)
KAAVEALPTVVVAEADAARGDAQCAVCKDGVEAGERARRLPCAHLYHDACILPWLAIRNTCPLCRHELPTDDPEYEKWKARRAAGDADPRGAATG

SEQ ID NO: 96949 - protein, 186 aa, Setaria italica
  Transcript Sequence Number=SeqID_30975
  Homolog annotation: Hit_ID=Q6YZW3; Match level="QueryCoverage=100%, HitCoverage=47%, E-value=6e-91, Identity=86%"; Hit description =Pentatricopeptide (PPR) repeat-containing protein-like
AYISRQKYYKLGAFVADAGLHRRDAGNLLWNLYLLSFAGNFKMKSLQRAFLEMAAAGFRPDLTTFNIRAAAFSKMCMFWDLHLTAEHMRRDGVAPDLVTHGCFVDAYLERRLARNLTFAFDRLDGNAEPVVATDGIVFEAFGKGGFHASSEALLEATAGKRRWTYYKLLGVYLRKQHRRNQVFWNY

SEQ ID NO: 96950 - protein, 53 aa, Setaria italica
  Transcript Sequence Number=SeqID_30976
IFYFFNNVGKLVRLSGNFLETLGPFVEHNYPASSNLLTINLLVLSQIIFYSEQ

SEQ ID NO: 96951 - protein, 278 aa, Setaria italica
  misc_feature (112)..(112): Xaa can be any naturally occurring amino acid
  misc_feature (229)..(229): Xaa can be any naturally occurring amino acid
  Transcript Sequence Number=SeqID_30977
  Gene Ontology: Mol. function=protein dimerization activity; Biological process=regulation of RNA metabolic process
  Homolog annotation: Hit_ID=Q6Y8E6; Match level="QueryCoverage=99%, HitCoverage=39%, E-value=5e-42, Identity=40%"; Hit description=Ac -like transposase THELMA13
  Pfam annotation: Domain name=hATC; Domain location=219-278; Score =24.0; E_value=9.7e-05; Accession=PF05699.6; Description=hAT family dimerisation domain
YLDTKRKLCVDMHVRWNSTYRMLENAIFNKGALKQYASRDGTFMSHFDLSELEWKRVDIMTTLFKSFHEVTCSFSGTKYPTANLYFKCVFRIHSQLLEAAKEPQNFMSSMVXEMRAKFDKYWSDYSLILSCAAILDPRYKINLLRFCYKKLCANESAAEEQVNKAVTKLYELFEAYRAQNSNPSITSPRNLVGHSHQDDLFDDYADYVTTVAPQTQKSQLDLYLEQATXQQPTRDPKVDLDILEFWKASSVTYPELASMARDLLTIPVSSVASESAFS

SEQ ID NO: 96952 - protein, 69 aa, Setaria italica
  Transcript Sequence Number=SeqID_30978
PNLNQSPPMAPWADLPPDLLARIADRLGLKCYTSARGACAAWRRVLAPPAPALLLVAGDGWGQSRPTFT

SEQ ID NO: 96953 - protein, 115 aa, Setaria italica
  misc_feature (17)..(17): Xaa can be any naturally occurring amino acid
  Transcript Sequence Number=SeqID_30979
  Gene Ontology: Mol. function=protein binding; Cellular component =plasma membrane
  Homolog annotation: Hit_ID=Q8RX50; Match level="QueryCoverage=89%, HitCoverage=19%, E-value=1e-15, Identity=40%"; Hit description=PSR9 (Fragment)
MGTVVDAAAFGSVDGVXGEVMRLHRSLPPRPSLEEVEAAEALARAADREERARLDAVSHLRRPPAVPDELFGVALEMHRALAAFHCREQKRDATRLIELDALHALFDDLIQRASQ

SEQ ID NO: 96954 - protein, 60 aa, Setaria italica
  Transcript Sequence Number=SeqID_30980
  Gene Ontology: Mol. function=catalytic activity
  Homolog annotation: Hit_ID=B8QQD4; Match level="QueryCoverage=91%, HitCoverage=11%, E-value=6e-18, Identity=79%"; Hit description =Protein pyrophosphatase
CVTLIIVDGIFISGINAGLYARELMDGCKKIVIETQGAPGMRTEEVLAKAADEARSPGSS

SEQ ID NO: 96955 - protein, 123 aa, Setaria italica
  Transcript Sequence Number=SeqID_30981
  Subcellular localization annotation: CTP_CleavageSite=71; ConfidenceScore=5.16e-01
NPGTSPPRTPDQNPFPPAPFPFPFLPRDPLALLPCPPARPRESKKSGEESDQPAAGGFLIRARDSSRPGPRARRIKNGLPGPGSNQDRFFLVFLRGLPVLFPSQRDNAGSGRRPPPAPTPPGW

SEQ ID NO: 96956 - protein, 46 aa, Setaria italica
  Transcript Sequence Number=SeqID_30982
  Gene Ontology: Mol. function=electron carrier activity; Biological process=oxidation reduction
  Homolog annotation: Hit_ID=C4PJN6; Match level="QueryCoverage=80%, HitCoverage=6%, E-value=5e-12, Identity=89%"; Hit description =Cytochrome P450 monooxygenase
VLIRSACRFHVGRQPLTIVADAELCKEVGIKKFKSIPNRSLPSAPR

SEQ ID NO: 96957 - protein, 49 aa, Setaria italica
  Transcript Sequence Number=SeqID_30983
VLHDTLVNQIVSRWFNMTENYCLTLQFYEIHSILWSVKTYSTFSGTMEF

SEQ ID NO: 96958 - protein, 152 aa, Setaria italica
  Transcript Sequence Number=SeqID_30984
  Gene Ontology: Mol. function=transferase activity, transferring glycosyl groups; Cellular component=integral to membrane; Biological process=cell wall organization and biogenesis
  Homolog annotation: Hit_ID=Q6Z2T9; Match level="QueryCoverage=98%, HitCoverage=25%, E-value=2e-61, Identity=73%"; Hit description =Probable mannan synthase 6
HLIPLIILFPEAQIPVWELIYIPTAIILAEFIWTPRSIHLILLWVLFENAMALHRFKAILIGFFEADRANEWIVTQKLGNLQKLKSIASVTGNGRFKDRFHCLEIFIGLFLLVSACFDYIYRDDYLYLFVLPQSIMYFAIGFQFIGLSLSED

SEQ ID NO: 96959 - protein, 62 aa, Setaria italica
  Transcript Sequence Number=SeqID_30985
SQSGDSAGDVFSTSHVETRQDITKHRKEAKHGKNTFPSSTFFFNKNCKSCVRNYSYMHLDNT

SEQ ID NO: 96960 - protein, 75 aa, Setaria italica
  Transcript Sequence Number=SeqID_30986
WASINENEWKATGNLQRGLDFKKLSCVPVYRDKQGKVGDSRYSSYMLICSDDRMKSVTYILATVYGSYTILKLTK

SEQ ID NO: 96961 - protein, 55 aa, Setaria italica
  Transcript Sequence Number=SeqID_30987
  Subcellular localization annotation: CTP_CleavageSite=28; ConfidenceScore=5.04e-01
SRQTGSYFMHSLLLSPLQRVAFGPFVTRVITTPCPRQLCLLRYAYHLVVNLGIVV

SEQ ID NO: 96962 - protein, 79 aa, Setaria italica
  Transcript Sequence Number=SeqID_30988
  Gene Ontology: Mol. function=phosphoribosylanthranilate isomerase activity; Biological process=aromatic amino acid family biosynthetic process
  Homolog annotation: Hit_ID=B4FZQ3; Match level="QueryCoverage=82%, HitCoverage=21%, E-value=1e-24, Identity=86%"; Hit description=N-(5'- phosphoribosyl)anthranilate isomerase
TSARDAEMAAEAGAKLIGMILWPNSKRSVPLSEAKEISRVAKSYGAEPVGVFVDDDEGTILRASSSCDLELIQLHGDSS

SEQ ID NO: 96963 - protein, 160 aa, Setaria italica
  Transcript Sequence Number=SeqID_30989
KNTPARWRAIRAVESRPRGERRKKKIPFFPTATPHRVSDHPPPAAPVPLPSPPSLRAAAASPLPQLTSHSLDSPIPGRRRHGGTTNRCQFSIRFRANFTATPRGRWEEPIIEEASNHPPNRSGAGADSSDGGVLLLVLVGAVGVHPRRRPRPGPPPPLLR

SEQ ID NO: 96964 - protein, 199 aa, Setaria italica
  misc_feature (103)..(103): Xaa can be any naturally occurring amino acid
  Transcript Sequence Number=SeqID_30990
  Gene Ontology: Mol. function=transferase activity, transferring groups other than amino-acyl groups; Cellular component=nucleus; Biological process=DNA metabolic process
  Homolog annotation: Hit_ID=UPI0000162FA8; Match level="QueryCoverage =93%, HitCoverage=14%, E-value=6e-73, Identity=68%"; Hit description =DEAD/DEAH box helicase, putative
  Pfam annotation: Domain name=DEAD; Domain location=3-152; Score=6.5; E_value=1.5e-05; Accession=PF00270.21; Description=DEADDEAH box helicase
  Pfam annotation: Domain name=ResIII; Domain location=1-147; Score =25.0; E_value=4.3e-07; Accession=PF04851.7; Description=Type III restriction enzyme, res subunit
  Pfam module annotation: Pfam domain module=DEAD::ResIII; Domain location=3-152::1-147
FTNTLIALPTGLGKTFIAAVVMYNYYRWFPEGKIIFAAPSRPLVAQQIEACLNTVGIPQEWTIDLRGNKNPSSRSVHWKSKRVFFVTPQILQNDIKSGICMVXQIVCLVIDEAHRASGNYAYCIAIRELLAARVPLRILALTATPGSKHAGIQSVINNLCISELIYCDEEDSLVKEYVNTRKVRVVKYRSLLEAMQLKS

SEQ ID NO: 96965 - protein, 83 aa, Setaria italica
  Transcript Sequence Number=SeqID_30991
  Gene Ontology: Mol. function=tRNA isopentenyltransferase activity; Biological process=tRNA processing
  Homolog annotation: Hit_ID=B2XWS7; Match level="QueryCoverage=51%, HitCoverage=12%, E-value=1e-13, Identity=90%"; Hit description =Isopentenyl transferase IPT6
  Subcellular localization annotation: CTP_CleavageSite=46; ConfidenceScore=5.18e-01
MAAPAMAAAPAFPRLTMPLPPPIITLPDAAVPVPPPLSVVGRQRVAAKHKAVVVLGATGTGKSRLAIDLALRFGGEVINSDKM

SEQ ID NO: 96966 - protein, 140 aa, Setaria italica
  misc_feature (47)..(47): Xaa can be any naturally occurring amino acid
  Transcript Sequence Number=SeqID_30992
  Gene Ontology: Mol. function=RNA binding; Cellular component=U2 -dependent spliceosome; Biological process=protein modification process
  Homolog annotation: Hit_ID=Q8RXF1; Match level="QueryCoverage=47%, HitCoverage=8%, E-value=1e-24, Identity=77%"; Hit description =Probable splicing factor 3 subunit 1
  Pfam annotation: Domain name=Surp; Domain location=72-116; Score =78.5; E_value=2.4e-20; Accession=PF01805.12; Description=Surp module
TRRNPNPPTAAMGNPILTLPAPEGDGGDADQQQQAPPPSPPPGAKAXPPATVATHTRTIGIIHPPPDIRVIIEKTATFVAKNGPEFERRIISHNQGNAKFNFLQPSDPYHAYYQHRVAEIAAAPPGADASAGTEPDADPA

SEQ ID NO: 96967 - protein, 52 aa, Setaria italica
  Transcript Sequence Number=SeqID_30993
CGASVESECSFCFCTWLVAFLFVLKQKEHSDSTEAPQDVRLCSQHQQNSTTA

SEQ ID NO: 96968 - protein, 195 aa, Setaria italica
  Transcript Sequence Number=SeqID_30994
  Pfam annotation: Domain name=AT_hook; Domain location=122-133; Score =8.0; E_value=1.1; Accession=PF02178.11; Description=AT hook motif
  Pfam annotation: Domain name=AT_hook; Domain location=134-146; Score =12.5; E_value=0.19; Accession=PF02178.11; Description=AT hook motif
  Pfam annotation: Domain name=AT_hook; Domain location=28-40; Score =11.2; E_value=0.31; Accession=PF02178.11; Description=AT hook motif
  Pfam module annotation: Pfam domain module=AT_hook::AT_hook::AT_hook; Domain location=122-133::134-146::28-40
MAEDTEGIEVDAGTMEEVPAAVGGEETKRKRGRPKGSLKMKKKKTPKPKARTKGSRRTGDHALASPAISPGDLGHGVAAGPRVLRERRPATNAFYERDTDTEDDEETTDDQVIQRPKSSDSGKKRGRPKSSDSGKKRGRPRKTKLGQLDSKAQFSNVKSSGEMNGSNAEAFQTAKKRKRRDDGKEFINKKVEKHG

SEQ ID NO: 96969 - protein, 150 aa, Setaria italica
  Transcript Sequence Number=SeqID_30995
  Gene Ontology: Mol. function=protein serine/threonine kinase activity; Cellular component=plasma membrane; Biological process =protein amino acid phosphorylation
  Homolog annotation: Hit_ID=B9TAC6; Match level="QueryCoverage=98%, HitCoverage=52%, E-value=1e-39, Identity=35%"; Hit description =Receptor protein kinase CLAVATA1, putative
  Pfam annotation: Domain name=LRR_1; Domain location=114-136; Score =7.4; E_value=12; Accession=PF00560.25; Description=Leucine Rich Repeat
  Pfam annotation: Domain name=LRR_1; Domain location=42-64; Score =11.3; E_value=2; Accession=PF00560.25; Description=Leucine Rich Repeat
  Pfam annotation: Domain name=LRR_1; Domain location=66-88; Score =10.1; E_value=3.5; Accession=PF00560.25; Description=Leucine Rich Repeat
  Pfam annotation: Domain name=LRR_1; Domain location=90-112; Score =6.3; E_value=19; Accession=PF00560.25; Description=Leucine Rich Repeat
  Pfam module annotation: Pfam domain module=LRR_1::LRR_1::LRR_1::LRR _1; Domain location=114-136::42-64::66-88::90-112
  Subcellular localization annotation: CTP_CleavageSite=14; ConfidenceScore=5.20e-01
KGSSHCSWTAVGCNAAGLVDRLNLSGKNLSGKVTDDVLRLPSLTVLNLSSNAFAVALPKSFAALSKLQVFDVSQNSFEGAFPAGLSSCADLAIVNASGNNFVGALPADLANATSLETIDLRGSFFGGDIPAAYRSLIKLKFLGLSGNNIT

SEQ ID NO: 96970 - protein, 115 aa, Setaria italica
  Transcript Sequence Number=SeqID_30996
  Gene Ontology: Mol. function=protein serine/threonine kinase activity; Cellular component=cell surface; Biological process =protein amino acid phosphorylation
  Homolog annotation: Hit_ID=Q69MP3; Match level="QueryCoverage=69%, HitCoverage=9%, E-value=2e-21, Identity=62%"; Hit description =Putative receptor kinase 5
MASTSSRVTMRSTPIYAILLFLSCSFSSILLCASSDHLVPGKPLTPGNTLVSDDGTFTLGFFSLSNPTEKHYYVGIWYNNISQRTVVWIANRDVPITNISSAMLALTSSSHIVLS

SEQ ID NO: 96971 - protein, 308 aa, Setaria italica
  Transcript Sequence Number=SeqID_30997
  Gene Ontology: Mol. function=nucleic acid binding; Cellular component= intracellular; Biological process=regulation of transcription from RNA polymerase III promoter
  Homolog annotation: Hit_ID=B9RAP0; Match level="QueryCoverage=37%, HitCoverage=6%, E-value=9e-54, Identity=76%"; Hit description =Nucleic acid binding protein, putative
  Pfam annotation: Domain name=zf-C2H2; Domain location=191-213; Score =2.2; E_value=7; Accession=PF00096.18; Description=Zinc finger, C2H2 type
  Pfam annotation: Domain name=zf-C2H2; Domain location=214-238; Score =17.6; E_value=0.05; Accession=PF00096.18; Description=Zinc finger, C2H2 type
  Pfam annotation: Domain name=zf-C2H2; Domain location=244-268; Score =21.4; E_value=0.0036; Accession=PF00096.18; Description=Zinc finger, C2H2 type
  Pfam annotation: Domain name=zf-C2H2; Domain location=274-300; Score =26.0; E_value=0.00016; Accession=PF00096.18; Description=Zinc finger, C2H2 type
  Pfam module annotation: Pfam domain module=zf-C2H2::zf-C2H2::zf -C2H2::zf-C2H2; Domain location=191-213::214-238::244-268::274-300
KVLEKASAGKSNCRTSVEKMGKRKKELAEKANTKKLKHTEEDNSKALTGASEASPPLPSGMVVRSSSRIANRKNMLKSKMEEEDNGPASHPKAKVEEDSNDPAICSSARSLRQNINVKKQTKKSRAEKRKAPSSAALKDEEQISDVKGFSVTKQQLSSHKQKNKVEETQQMKKTRERKGAPPSSPKHGEEYACDIEGCSMSFGTKQELSLHKRDICPVQGCRRKFFSHKYLLQHRKVHNDDRPLKCSWKGCDMAFKWPWARTEHMRVHTGDRPYVCPEPECGQTFRFVSDFSRHKRRTGHAAKVKAKK

SEQ ID NO: 96972 - protein, 64 aa, Setaria italica
  Transcript Sequence Number=SeqID_30998
PIEAGRAGTSTSAASWQHGTLPHRCTGDGRSDLRHQGSIPGGRRLNVRAYHHAMSTSATYIDLM

SEQ ID NO: 96973 - protein, 87 aa, Setaria italica
  misc_feature (1)..(11): Xaa can be any naturally occurring amino acid
  Transcript Sequence Number=SeqID_30999
XXXXXXXXXXXVNRIHVTDFKLCSLKYMFTYIATSKLETIMPRSKNIYIQRTGAFTGTKRKRKGTKSQSTQVEGPSETIGQSATAFL

SEQ ID NO: 96974 - protein, 56 aa, Setaria italica
  Transcript Sequence Number=SeqID_31000
LTGKFMQFYRVQIYIYCVAYHYGCTHMVGLQLYIPRGECGCVYVNINVCVVVRKKL

SEQ ID NO: 96975 - protein, 121 aa, Setaria italica
  Transcript Sequence Number=SeqID_31001
  Gene Ontology: Mol. function=electron carrier activity; Biological process=oxidation reduction
  Homolog annotation: Hit_ID=B6TYK7; Match level="QueryCoverage=75%, HitCoverage=17%, E-value=1e-33, Identity=75%"; Hit description =Flavonoid 3-monooxygenase
SLAKATEALDRVVGRECLVTERDFSHLPYMEAVLKETLRLHPVAPVLAPHLAREDTSVDGYDIPAGTNVFVNVWSIGRDPALWDAPQEFDPSFFFFFLCPDGLYLVGLHTPNQSPGLCSGP

SEQ ID NO: 96976 - protein, 81 aa, Setaria italica
  Transcript Sequence Number=SeqID_31002
NINSSLPVTMCNQKFELKVEMQKINWFSKCRFQPAFLGATSCLCDIETWERKAIIIHPVLAPFNFTFKLLIIISTLLHLFW

SEQ ID NO: 96977 - protein, 124 aa, Setaria italica
  misc_feature (98)..(98): Xaa can be any naturally occurring amino acid
  misc_feature (107)..(107): Xaa can be any naturally occurring amino acid
  misc_feature (115)..(115): Xaa can be any naturally occurring amino acid
  Transcript Sequence Number=SeqID_31003
  Gene Ontology: Mol. function=structural constituent of ribosome; Cellular component=plasma membrane; Biological process=protein modification process
  Homolog annotation: Hit_ID=Q0WRN6; Match level="QueryCoverage=100%, HitCoverage=99%, E-value=1e-55, Identity=82%"; Hit description =Polyubiquitin 4 UBQ4
  Pfam annotation: Domain name=ubiquitin; Domain location=1-60; Score =97.1; E_value=6e-26; Accession=PF00240.15; Description=Ubiquitin family
  Pfam annotation: Domain name=ubiquitin; Domain location=68-123; Score= 32.5; E_value=1.8e-06; Accession=PF00240.15; Description=Ubiquitin family
  Pfam module annotation: Pfam domain module=ubiquitin::ubiquitin; Domain location=1-60::68-123
LEVESSDTIDNVKAKIQDKEGIPPDQQRLIFAGKQLEDGRTLADYNIQKESTLHLVLRLRGGMQIFVKTLTGKTITLEVESSDTIDNVKAKIQDKEGXIPPDQQRLXLAGSSWRXGPSTIGDYN

SEQ ID NO: 96978 - protein, 360 aa, Setaria italica
  Transcript Sequence Number=SeqID_31004
  Gene Ontology: Mol. function=electron carrier activity; Biological process=oxidation reduction
  Homolog annotation: Hit_ID=B6U8A2; Match level="QueryCoverage=97%, HitCoverage=67%, E-value=0.0, Identity=90%"; Hit description =Cytochrome P450 CYP734A8
  Pfam annotation: Domain name=p450; Domain location=2-346; Score=27.1; E_value=5.8e-13; Accession=PF00067.14; Description=Cytochrome P450
LLPFVGRTVVDMVDKWRDMAAAGSGEVEIDVSEWFQVVTEDAITRTAFGRSYEDGKAVFKLQTQLMAFASEAFRKVFIPGYRFLPTRKNTSSWKLDKEIRKNLVTLISRRQEAADDEKLSGCAKDLLGLMINASSNGGKVSPITVNDIVEECKTFFFAGKQTTSNLLTWTTVVLAMHPEWQELARQEVLDVCGAHDIPSREQLVKLKTLGMILNETLRLYPPAVATVRRAKADVELGGCLIPRDTELLIPIMALHHDARLWGPDATQFNPARFARGVAQAAAHPTAFIPFGLGARMCIGQNLALLEAKLTVAIILQRFDFRLSPSYLHAPTVLMLLHPQYGAPVIFRPRSSEPSDHNRGM

SEQ ID NO: 96979 - protein, 254 aa, Setaria italica
  misc_feature (103)..(103): Xaa can be any naturally occurring amino acid
  Transcript Sequence Number=SeqID_31005
  Gene Ontology: Mol. function=ATP-dependent helicase activity; Cellular component=intracellular; Biological process=RNA processing
  Homolog annotation: Hit_ID=A7LFZ6-2; Match level="QueryCoverage=98%, HitCoverage=15%, E-value=1e-106, Identity=73%"; Hit description =Isoform 2 of Endoribonuclease Dicer homolog 4
  Pfam annotation: Domain name=dsRNA_bind; Domain location=85-175; Score=63.8; E_value=6.4e-16; Accession=PF03368.6; Description=Double stranded RNA binding domain
FVFFPETVSSFIQSRGRARMSKSKYIFLLERGNQSQEKLLGDYITGESIMDKEVNLRTSNDMFDSLEENIYRVNNTGASISTACSVSLLHCYCDNLPRDRFFXPSPSFFYVDDVEGIVCRLILPPNAAFRQVNSQPCPSKDEAKRDACLKACIRLHELGALTDFLLPGQGSRKTKVSTTDILESNKAEDESFREELHEMLVPAVLRSSRYKLDCLLNLHFYYIEFIPKPADRRYQMFGLFVIDALPKEAEKLDV

SEQ ID NO: 96980 - protein, 85 aa, Setaria italica
  Transcript Sequence Number=SeqID_31006
  Homolog annotation: Hit_ID=Q9SX36; Match level="QueryCoverage=81%, HitCoverage=18%, E-value=3e-20, Identity=62%"; Hit description =F14I3.21 protein (Fragment)
PFLTRRERFRSEFLRRVVPWEKGTLSWQNFPYYVNENARQLLSECVASHLRHKGVTSEYGSRLESSGGRILLQSSPGTELYRERF

SEQ ID NO: 96981 - protein, 174 aa, Setaria italica
  Transcript Sequence Number=SeqID_31007
  Gene Ontology: Mol. function=N-acetyltransferase activity; Cellular component=intracellular; Biological process=metabolic process
  Homolog annotation: Hit_ID=Q9SA54; Match level="QueryCoverage=100%, HitCoverage=100%, E-value=4e-63, Identity=56%"; Hit description =F10O3.2 protein
  Pfam annotation: Domain name=Acetyltransf_1; Domain location=47-128; Score=75.5; E_value=2e-19; Accession=PF00583.16; Description =Acetyltransferase (GNAT) family
  Pfam annotation: Domain name=FR47; Domain location=53-138; Score=0.1; E_value=0.015; Accession=PF08445.2; Description=FR47-like protein
  Pfam module annotation: Pfam domain module=Acetyltransf_1::FR47; Domain location=47-128::53-138
MTTIRRFCCDDLLRFASVNLDHLTETFNMSFYMTYLARWPDYFHAAVNPGGRVMGYIMGKVEGQGESWHGHVTAVSVASEFRRQKLAKKLMNLLEEISDKMDKAYFVDLFVRASNMPAIRMYEKLGYVVYRRVLRYYSGEEDGLDMRKALSQDVEKKSIIPLKRPITPDELEYD

SEQ ID NO: 96982 - protein, 91 aa, Setaria italica
  misc_feature (77)..(77): Xaa can be any naturally occurring amino acid
  Transcript Sequence Number=SeqID_31008
  Gene Ontology: Mol. function=metal ion binding
  Homolog annotation: Hit_ID=B6STH0; Match level="QueryCoverage=74%, HitCoverage=28%, E-value=2e-30, Identity=92%"; Hit description=RNA -binding protein
LLLELIFFVFQILCFDITLLSRRNSRSQSCPFCRDNLKKTCPGDLWIYVEDQDVVDMETVSSENLRRLFMYISKLPXVPDVIFTAYDSHIK

SEQ ID NO: 96983 - protein, 242 aa, Setaria italica
  Transcript Sequence Number=SeqID_31009
  Gene Ontology: Mol. function=metal ion binding
  Homolog annotation: Hit_ID=B6STH0; Match level="QueryCoverage=100%, HitCoverage=100%, E-value=1e-127, Identity=90%"; Hit description=RNA- binding protein
  Pfam annotation: Domain name=zf-C3HC4; Domain location=146-183; Score= 17.8; E_value=0.00095; Accession=PF00097.17; Description=Zinc finger, C3HC4 type (RING finger)
MRKAYRDSIKVLEADIQHANTLASEFPRDCDGACLQMRLSYSSAAHIFLFLVQWTDCSLAGALGLLRILIYKVYVDGTTTMSTHERKASIKEFYAVIFPSLLQLQRGITDVEDKKQKAVCMERYRKKDEDERSSLSDIDVEREEECGICMEMNSKVVLPNCTHAMCLRCYQDWNSRSQSCPFCRDNLKKTCPGDLWIYVEDQDVVDMETVSSENLRRLFMYISKLPLIVPDVIFTAYDSHIK

SEQ ID NO: 96984 - protein, 96 aa, Setaria italica
  Transcript Sequence Number=SeqID_31010
  Gene Ontology: Mol. function=ribonuclease activity
  Homolog annotation: Hit_ID=Q0WPN0; Match level="QueryCoverage=79%, HitCoverage=7%, E-value=6e-21, Identity=61%"; Hit description =Putative 3'-5' exoribonuclease
GRAGGGAPGRRYFQPHWPEGTVEEAVKRGYAFVGKFRVNAHNRNEAYCTIDGIPVDILITGLAQNRAVEGDLVAITLDPVVHWTRMKGPNVACNPA

SEQ ID NO: 96985 - protein, 100 aa, Setaria italica
  Transcript Sequence Number=SeqID_31011
CGRSGWPGALVIAYGHASDGKQARGPENGQYILRETTSGRFDKDKSIGTEIPNNFTQFYEKSYGVSASLAEKRKLRRICKNLRILRKNLRKFHKTLQKLR

SEQ ID NO: 96986 - protein, 167 aa, Setaria italica
  misc_feature (149)..(149): Xaa can be any naturally occurring amino acid
  Transcript Sequence Number=SeqID_31012
  Gene Ontology: Mol. function=protein serine/threonine kinase activity; Biological process=protein amino acid phosphorylation
  Homolog annotation: Hit_ID=Q9FIU5; Match level="QueryCoverage=99%, HitCoverage=37%, E-value=1e-78, Identity=82%"; Hit description =Serine/threonine-specific protein kinase-like protein
  Pfam annotation: Domain name=Pkinase; Domain location=1-165; Score =9.2; E_value=4.9e-09; Accession=PF00069.17; Description=Protein kinase domain
  Pfam annotation: Domain name=Pkinase_Tyr; Domain location=1-167; Score=-21.2; E_value=2.5e-12; Accession=PF07714.9; Description =Protein tyrosine kinase
  Pfam module annotation: Pfam domain module=Pkinase::Pkinase_Tyr; Domain location=1-165::1-167
NHNEVLLLGRLHHRNLVNLVGYCADKGQHMLLYAYMPNGSLASHLYGENSAPLKWDLRVNIALDVARGLEYLHDGAVPPVVHRDIKSPNILLDQSMQARVADFGLSREEMVTRNGANIRGTYGYLDPEYVSTRSFTKKSDVYSYGVLLXELIAGRNPQQGLMEYVEL

SEQ ID NO: 96987 - protein, 155 aa, Setaria italica
  misc_feature (13)..(13): Xaa can be any naturally occurring amino acid
  misc_feature (23)..(23): Xaa can be any naturally occurring amino acid
  misc_feature (80)..(80): Xaa can be any naturally occurring amino acid
  misc_feature (123)..(123): Xaa can be any naturally occurring amino acid
  Transcript Sequence Number=SeqID_31013
  Gene Ontology: Mol. function=aspartic-type endopeptidase activity; Cellular component=chromatin; Biological process=RNA-dependent DNA replication
  Homolog annotation: Hit_ID=Q8SA93; Match level="QueryCoverage=100%, HitCoverage=5%, E-value=4e-39, Identity=49%"; Hit description =Putative polyprotein
MDLPKWFLKAVDXRRRGFLWKGXNRQMGGNCLVAWEKVERSLEYGGLGIHNLELLGWALRIRWLWAQKTDPGRPWAGLPXVPRKAQALFDVVVDAVVGNGEEIWFWTDRWLDGHTMAEIAPNXFKPVTKQTAKRRTVAQALQNRRWVVDIKGALT

SEQ ID NO: 96988 - protein, 183 aa, Setaria italica
  misc_feature (54)..(54): Xaa can be any naturally occurring amino acid
  misc_feature (66)..(66): Xaa can be any naturally occurring amino acid
  Transcript Sequence Number=SeqID_31014
  Gene Ontology: Mol. function=peptidase activity; Cellular component =integral to membrane; Biological process=proteolysis
  Homolog annotation: Hit_ID=B1PDK9; Match level="QueryCoverage=100%, HitCoverage=25%, E-value=2e-99, Identity=92%"; Hit description =Putative membrane localized peptidase
  Pfam annotation: Domain name=Peptidase_M28; Domain location=1-182; Score=34.5; E_value=1.3e-09; Accession=PF04389.9; Description =Peptidase family M28
VILGNHRDAWTYGAVDPNSGTASLLDIARRLGIMLQSGWKPRRSIILCSWDAEXFGMIGSTEWVEXNLADLHSKAVAYLNVDCAVQGVGFFAGSTPQLDKLLVDVTRQVKDPDVMGKMVHDTWNEMDGGISIERLARTDSDFAPFLHHAGIPSVDLYYGKEFPGYHTALDSYNWMEKFGDPLF

SEQ ID NO: 96989 - protein, 103 aa, Setaria italica
  Transcript Sequence Number=SeqID_31015
  Homolog annotation: Hit_ID=B6U990; Match level="QueryCoverage=87%, HitCoverage=27%, E-value=8e-37, Identity=84%"; Hit description =Ankyrin repeat domain-containing protein 2
  Pfam annotation: Domain name=Ank; Domain location=3-46; Score=1.9; E _value=19; Accession=PF00023.22; Description=Ankyrin repeat
  Pfam annotation: Domain name=Ank; Domain location=47-79; Score=40.1; E_value=9e-09; Accession=PF00023.22; Description=Ankyrin repeat
  Pfam module annotation: Pfam domain module=Ank::Ank; Domain location =3-46::47-79
EPRFVSLFDISIDSNDKEFGDFCFGFQLKCAQVLLEAGAAVDALDKNKNTPLHYAAGYGRKECVDLLLKHGAAVTLQNMDGKTPIDVAKLNNQDEVLKLLEKG

SEQ ID NO: 96990 - protein, 129 aa, Setaria italica
  Transcript Sequence Number=SeqID_31016
  Homolog annotation: Hit_ID=B6U990; Match level="QueryCoverage=100%, HitCoverage=38%, E-value=1e-62, Identity=92%"; Hit description =Ankyrin repeat domain-containing protein 2
MASSGDPPGSADEKKSPKPEGSSNEHQGLPPAGFSNPFDFASMQSLLNDPSIKEMADQIARDPAFNQMAEQLQKGAQSTGEQGMPPLDPQQYMETMQKVMENPQFMTMAERLGNALMQDPAMSSMLETF

SEQ ID NO: 96991 - protein, 311 aa, Setaria italica
  Transcript Sequence Number=SeqID_31017
  Homolog annotation: Hit_ID=B6U990; Match level="QueryCoverage=100%, HitCoverage=92%, E-value=1e-153, Identity=85%"; Hit description =Ankyrin repeat domain-containing protein 2
  Pfam annotation: Domain name=Ank; Domain location=219-251; Score =29.7; E_value=1.2e-05; Accession=PF00023.22; Description=Ankyrin repeat
  Pfam annotation: Domain name=Ank; Domain location=252-284; Score =40.1; E_value=9e-09; Accession=PF00023.22; Description=Ankyrin repeat
  Pfam module annotation: Pfam domain module=Ank::Ank; Domain location =219-251::252-284
ELTSLPPAGFSNPFDFASMQSLLNDPSIKEMADQIARDPAFNQMAEQLQKGAQSTGEQGMPPLDPQQYMETMQKVMENPQFMTMAERLGNALMQDPAMSSMLETFSSPSHKEQLEERMSRIKEDPAMKSILDELENGGPAAMMKYWNDPDTLQKIGQAMGGSFPFGAGSSAEPSGTEEAEEEGGDEDESIVHHTASVGDDKGLKKALDGGADKDEEDSEGRRALHFACGYGELKCAQVLLEAGAAVDALDKNKNTPLHYAAGYGRKECVDLLLKHGAAVTLQNMDGKTPIDVAKLNNQDEVLKLLEKDVFL

SEQ ID NO: 96992 - protein, 87 aa, Setaria italica
  Transcript Sequence Number=SeqID_31018
  Subcellular localization annotation: CTP_CleavageSite=43; ConfidenceScore=5.38e-01
MASLCRSAAAVRSAALRSRSPVERLFQAARSPLAPPRIRRPVVAAALASLDTLMPLHSAVAAARLRSCIAADSACWSCLSQGLTKRI

SEQ ID NO: 96993 - protein, 231 aa, Setaria italica
  misc_feature (17)..(17): Xaa can be any naturally occurring amino acid
  Transcript Sequence Number=SeqID_31019
  Homolog annotation: Hit_ID=B9SBM1; Match level="QueryCoverage=93%, HitCoverage=12%, E-value=1e-47, Identity=50%"; Hit description =Nuclear pore complex protein nup153, putative
EEQDVSSSARQAYMKGXVSQSSDTQYWDIWNRQKLSPEFEVKRQNILKANQNLTNQLVELERHFNNLEMNRSSETGRLASSRRAVYSNKSRASQTQLSSVCNALNSQLAAAEQLSECLSKQISVLNIGSPTTKRGAVTKELFESIGLAHTTDATKFLGSTPSKSIKRFPSVNEHSKGVLGPSKSAEPETARRRRESLDMSLASLEPQKTTVKRIAQQQRLKISSFLRFQTS

SEQ ID NO: 96994 - protein, 69 aa, Setaria italica
  Transcript Sequence Number=SeqID_31020
  Gene Ontology: Mol. function=structural constituent of ribosome; Cellular component=intracellular; Biological process=translation
  Homolog annotation: Hit_ID=B6SQA2; Match level="QueryCoverage=100%, HitCoverage=47%, E-value=2e-29, Identity=92%"; Hit description=60S ribosomal protein L28
KQNTPAKLNHKSVMRKEFRKMAKAVKNQVSDNYYRPDLTKPALARLSSVYRSLQVAKSGVKKKNRQPKH

SEQ ID NO: 96995 - protein, 109 aa, Setaria italica
  Transcript Sequence Number=SeqID_31021
  Gene Ontology: Mol. function=structural constituent of ribosome; Cellular component=intracellular; Biological process=translation
  Homolog annotation: Hit_ID=B6SQA2; Match level="QueryCoverage=99%, HitCoverage=73%, E-value=2e-51, Identity=93%"; Hit description=60S ribosomal protein L28
  Pfam annotation: Domain name=Ribosomal_L28e; Domain location=1-100; Score=100.3; E_value=6.8e-27; Accession=PF01778.9; Description =Ribosomal L28e protein family
  Subcellular localization annotation: CTP_CleavageSite=25; ConfidenceScore=5.21e-01
TNLYNVHSYKYSGLANKKTVTIQPAAGKESAVVLSTTKTKKQNTPAKLNHKSVMRKEFRKMAKAVKNQVSDNYYRPDLTKPALARLSSVYRSLQVAKSGVKKKNRQPKH

SEQ ID NO: 96996 - protein, 143 aa, Setaria italica
  Transcript Sequence Number=SeqID_31022
  Gene Ontology: Mol. function=structural constituent of ribosome; Cellular component=ribonucleoprotein complex; Biological process =translation
  Homolog annotation: Hit_ID=Q84K87; Match level="QueryCoverage=84%, HitCoverage=84%, E-value=2e-43, Identity=74%"; Hit description=50S ribosomal protein L35
  Pfam annotation: Domain name=Ribosomal_L35p; Domain location=75-133; Score=97.9; E_value=3.6e-26; Accession=PF01632.11; Description =Ribosomal protein L35
  Subcellular localization annotation: CTP_CleavageSite=41; ConfidenceScore=5.68e-01
MALSLSLARAAPLAVSAGAGARRLPAASLAFPPKSFFGAPLAATATSVASPLPRKPATTSTSLAVVAAGKKGYKMKTHKASAKRFRVTGRGKIVRRCAGKQHLLSKKNTKRKKRLSKMVQVNKSDYDNVTGALPYLKVNRKAD

SEQ ID NO: 96997 - protein, 139 aa, Setaria italica
  Transcript Sequence Number=SeqID_31023
  Gene Ontology: Mol. function=translation initiation factor activity
  Homolog annotation: Hit_ID=B6SS88; Match level="QueryCoverage=100%, HitCoverage=64%, E-value=4e-36, Identity=64%"; Hit description=GTP binding protein
  Pfam annotation: Domain name=DUF567; Domain location=1-123; Score= -12.2; E_value=0.0011; Accession=PF04525.4; Description=Protein of unknown function (DUF567)
GRALLTVRRRKVIGLGADQWLVYPGEETRLPPLYAVKRAAQYMRGAGKSMAHVAPCSGAAGGKQAGGGYEVEGSYLRRCCTVYDARRRAVAEVRPKEAVGSDVFRLVVQPGTEVSLAMAVVLALDQMFGKPSLLRSWSS

SEQ ID NO: 96998 - protein, 150 aa, Setaria italica
  misc_feature (11)..(11): Xaa can be any naturally occurring amino acid
  Transcript Sequence Number=SeqID_31024
  Gene Ontology: Mol. function=receptor activity; Cellular component =integral to membrane; Biological process=regulation of transcription, DNA-dependent
  Homolog annotation: Hit_ID=Q2HU72; Match level="QueryCoverage=71%, HitCoverage=18%, E-value=1e-16, Identity=38%"; Hit description =Steroid nuclear receptor, ligand-binding
LQSIKAGAGGXVLLGNVEVNQHNRPQDRLLDWFFHPVLVLKEQIQALKMTEEEVRFLEKLTLFVGNAASTSVWDNGAEMPQDPVRLAQIQAISRRLVGIVRSLSKFPTYRRRYRHVVKLLIAYSIERDGSCRSSASSHSVSFFEITQLDV

SEQ ID NO: 96999 - protein, 265 aa, Setaria italica
  Transcript Sequence Number=SeqID_31025
  Gene Ontology: Mol. function=nucleotide binding; Biological process =defense response
  Homolog annotation: Hit_ID=Q9ATQ3; Match level="QueryCoverage=99%, HitCoverage=28%, E-value=5e-63, Identity=47%"; Hit description=LRR14
  Pfam annotation: Domain name=NB-ARC; Domain location=47-263; Score =56.6; E_value=9.3e-14; Accession=PF00931.14; Description=NB-ARC domain
AELKEAATRRDRYTIPGNKRYGGGSVHHDISTNQISCLPKEEDLVGIEDNVDKLTQYLGSDLEEKKCKIATVWGMGGVGKTTLVDHVYKIVKVNFDTAAWVTVAKSYQVEDLLKKIVRELGISVDTSNMDMRVVVGIIRNHLQGKTFILVLDDVWEDDVLIKIMDVFPTNCISRFVLTSQNYEVASLATSNCEIKVEPLGKGHSWELFCKVAFRSSDDKGCPSDLHDLAVKFLQKCEELPIAIACIGRLLSCKPRSYIAWNNVYE

SEQ ID NO: 97000 - protein, 188 aa, Setaria italica
  misc_feature (14)..(14): Xaa can be any naturally occurring amino acid
  misc_feature (34)..(34): Xaa can be any naturally occurring amino acid
  Transcript Sequence Number=SeqID_31026
  Gene Ontology: Mol. function=secondary active sulfate transmembrane transporter activity; Cellular component=integral to membrane; Biological process=sulfate transport
  Homolog annotation: Hit_ID=B6UC24; Match level="QueryCoverage=100%, HitCoverage=28%, E-value=1e-86, Identity=84%"; Hit description =Sulfate transporter 1.2
  Pfam annotation: Domain name=Sulfate_transp; Domain location=1-165; Score=104.8; E_value=2.9e-28; Accession=PF00916.12; Description =Sulfate transporter family
KGFKIGVVCGMIGXTEAVAIGRTFAAMKDYQLDXNKEMVALGTMNVVGSMTSCYIATGSFSRSAVNFMAGCRTPVSNVVMSMVVLLTLLVITPLFKYTPNAILGSIIISAVIGLVDYEAAILIWKVDKMDFIACMGAFFGVVFKSVEIGLLIAVSISFAKILLQVTRPRTALLGNLPGTTIYRNTDQY

SEQ ID NO: 97001 - protein, 82 aa, Setaria italica
  Transcript Sequence Number=SeqID_31027
  Subcellular localization annotation: CTP_CleavageSite=29; ConfidenceScore=5.29e-01
STLIPLSQRLPTIPPPVGRVLLGWRSSVRVDTPATRRVIQYAAMAPGSTREEVEFCTRIVLDCHGRTRRGAGGAALSMLDIR

SEQ ID NO: 97002 - protein, 145 aa, Setaria italica
  Transcript Sequence Number=SeqID_31028
  Gene Ontology: Mol. function=zinc ion binding; Cellular component =COPII vesicle coat; Biological process=ER to Golgi vesicle-mediated transport
  Homolog annotation: Hit_ID=Q9LUG1; Match level="QueryCoverage=90%, HitCoverage=16%, E-value=1e-43, Identity=63%"; Hit description =Protein transport protein Sec23
  Pfam annotation: Domain name=Sec23_BS; Domain location=1-40; Score= -17.6; E_value=0.05; Accession=PF08033.4; Description=Sec23Sec24 beta- sandwich domain
  Pfam annotation: Domain name=Sec23_helical; Domain location=55-144; Score=78.6; E_value=2.2e-20; Accession=PF04815.7; Description =Sec23Sec24 helical domain
  Pfam module annotation: Pfam domain module=Sec23_BS::Sec23_helical; Domain location=1-40::55-144
RRPNQGQPKIRHLYIQFVTSYQHPEGQMRIRVTTICRKWVDGSTNTEELVEGFDQETAAVVLARYISLKMEMEEEFDATRWLDRSLIRLCSRFGDYRKDDPSSFSLHSNFSLFPQFMFNLRRSQFVQVMCYTPIFPSPLIHVLPC

SEQ ID NO: 97003 - protein, 109 aa, Setaria italica
  Transcript Sequence Number=SeqID_31029
  Gene Ontology: Mol. function=zinc ion binding; Cellular component =COPII vesicle coat; Biological process=ER to Golgi vesicle-mediated transport
  Homolog annotation: Hit_ID=B9RRN0; Match level="QueryCoverage=76%, HitCoverage=10%, E-value=5e-33, Identity=78%"; Hit description =Protein transport protein sec23, putative
MPWKMTTLKYASSSSIRSEHEQFAQLLQAPHEEAQMIIKGRFPVPRLVVCDQHGSQARFLLAKLNPSSTYNSAHDVAPGSDIIFTDDVSFQVFCEHLQRLAQFGATPDC

SEQ ID NO: 97004 - protein, 135 aa, Setaria italica
  Transcript Sequence Number=SeqID_31030
QHLYVHETSRIASMQHSKQTHCNNKKNNLLQHCNNERRRDKTEKTTICNIRNKLVQHPIASKSDCCKTDEMSIATVATSKNNYCNTMRYLLQHSDPQQPACPLSAEREEMPPHLRRLPPAGVGEGQGLARILPGS

SEQ ID NO: 97005 - protein, 732 aa, Setaria italica
  Transcript Sequence Number=SeqID_31031
  Gene Ontology: Mol. function=zinc ion binding; Cellular component =COPII vesicle coat; Biological process=ER to Golgi vesicle-mediated transport
  Homolog annotation: Hit_ID=B9RRN0; Match level="QueryCoverage=97%, HitCoverage=92%, E-value=0.0, Identity=70%"; Hit description=Protein transport protein sec23, putative
  Pfam annotation: Domain name=Gelsolin; Domain location=598-688; Score= 85.4; E_value=2e-22; Accession=PF00626.14; Description=Gelsolin repeat
  Pfam annotation: Domain name=Sec23_BS; Domain location=369-474; Score= 176.9; E_value=5.6e-50; Accession=PF08033.4; Description=Sec23Sec24 beta-sandwich domain
  Pfam annotation: Domain name=Sec23_helical; Domain location=489-589; Score=155.0; E_value=2.3e-43; Accession=PF04815.7; Description =Sec23Sec24 helical domain
  Pfam annotation: Domain name=Sec23_trunk; Domain location=84-359; Score=404.4; E_value=1.9e-118; Accession=PF04811.7; Description =Sec23Sec24 trunk domain
  Pfam annotation: Domain name=zf-Sec23_Sec24; Domain location=8-48; Score=71.4; E_value=3.3e-18; Accession=PF04810.7; Description =Sec23Sec24 zinc finger
  Pfam module annotation: Pfam domain module=Gelsolin::Sec23_BS::Sec23 _helical::Sec23_trunk::zf-Sec23_Sec24; Domain location=598-688::369 -474::489-589::84-359::8-48
RRTTPPYPPLRCKPPCSALLNPFARVDFAAKIWICPLCFSRNHFPPHYAAISESNVPAELFPQCSTVEYIVGGAPGAPGAAGAPPPPVFLFVIDTCVIEEELDYVKMAMRKAVALLPEHALVGLVTFGTQVHLHELGFSDLSKIYVFRGTKEISKEQILDQLGLAGAGRPGFPKMPQQPGGPQVNGMHPATTAGVNRFLLPVSECECTLSTLLDELQPDQWPVEAGNRAIRCTGVALSVAAGLLGACMPGTGARIIALLGGPCTEGPGMIVSKDLSEPVRSHKDLDKDAAPHFQKAVKFYDVLAKQLVSQGHVLDVFASALDQVGLAEMKVAIERTGGLVVLSESFGHSVFKDSFKRIFEGGEQSLGLSFNGTIEINCSKDIKVQGIIGPCTSLEKKGALCADTIVGQGNTTAWKMCGLDRSTSLTVFFDVSPSERSSQPGHQNPHLYIQFVTSYQHPEGQMRIRVTTICRKWVDGSTNTEELVEGFDQETAAVVLARYISLKMEMEEEFDATRWLDRSLIRLCSRFGDYRKDDPSSFSLHSNFSLFPQFMFNLRRSQFVQVFNNSPDETAYFRMLLNRETVTNSVAMIQPSLISFSFDSPPSPVFLDVASIAADRILLLDAYFSVVIFHGMTIAQWRNMGYQNQPEHEQFAQLLQAPHEEAQMIIKGRFPVPRLVVCDQHGSQARFLLAKLNPSSTYNSAHDVAPGSDIIFTDDVSFQVFCEHLQRLAVQS

SEQ ID NO: 97006 - protein, 57 aa, Setaria italica
  Transcript Sequence Number=SeqID_31032
  Gene Ontology: Mol. function=transcription regulator activity; Cellular component=nucleus; Biological process=regulation of transcription
  Homolog annotation: Hit_ID=Q01HI8; Match level="QueryCoverage=82%, HitCoverage=14%, E-value=8e-14, Identity=78%"; Hit description =OSIGBa0142I02-OSIGBa0101B20.1 protein
SVTTLDALVLYTISVKIEEGCGLATVDDIAAAVHHVLCIIDAEATEQQQMLAAAGPR

SEQ ID NO: 97007 - protein, 128 aa, Setaria italica
  Transcript Sequence Number=SeqID_31033
  Homolog annotation: Hit_ID=Q7XP53; Match level="QueryCoverage=93%, HitCoverage=99%, E-value=3e-21, Identity=49%"; Hit description =OSJNBa0013K16.14 protein
  Pfam annotation: Domain name=DUF581; Domain location=11-67; Score =43.5; E_value=8.2e-10; Accession=PF04570.6; Description=Protein of unknown function (DUF581)
MKGSGAMKPSSMFYVHEADVVQIHHFLEECSLCAKSLSGWLCPRRGDTPFCSEECRQQQIEVDRAKHRRKKRAAAHALSSRSREHRQHHHHPHHHHHHHHQQPQPRKAGMDTNPWVDGGFPRAPALRV

SEQ ID NO: 97008 - protein, 85 aa, Setaria italica
  Transcript Sequence Number=SeqID_31034
MADIALLVAEEFEKRVKRGAPGASGEADGSGERRNFGAVAKVWSSWVESASAAASGVRVNVAVQLRELEPKTGLGLAAVDGLFSA

SEQ ID NO: 97009 - protein, 150 aa, Setaria italica
  Transcript Sequence Number=SeqID_31035
  Gene Ontology: Mol. function=protein serine/threonine kinase activity; Biological process=protein amino acid phosphorylation
  Homolog annotation: Hit_ID=Q2QWW5; Match level="QueryCoverage=95%, HitCoverage=21%, E-value=5e-30, Identity=48%"; Hit description =Protein kinase domain containing protein
AVYDGFCNLKQINLELKVCGGSSIRKTLVKEAASCGAAHLILGVAKNSRSFGSSSTSVAKYCSKRVPVGCSVLAVNNGKVVYHKDGGHGMQHELYQSTIPETPRRSYRKLLSSMIGEKLWDEHGKDNRSISRAVTMPMRSPASSIPMTVS

SEQ ID NO: 97010 - protein, 82 aa, Setaria italica
  Transcript Sequence Number=SeqID_31036
  Gene Ontology: Mol. function=Rab GTPase activator activity; Cellular component=intracellular; Biological process=regulation of Rab GTPase activity
  Homolog annotation: Hit_ID=Q54YL8; Match level="QueryCoverage=75%, HitCoverage=6%, E-value=9e-16, Identity=59%"; Hit description =Ankyrin repeat-containing protein
RWAPWRCRSIRTRISTAACSRDQSKWTTQIDLDVNRAARNHMMFRERYGKGQRALFSILKAYSSEDTELGYCQGMSDMTALL

SEQ ID NO: 97011 - protein, 75 aa, Setaria italica
  Transcript Sequence Number=SeqID_31037
LLTSLLRAYHRFPSMETMVAAHDQQAAWPWGCWWLALALLPLLLALAICHGNDAYHCAAFAFRRWRHGRPRAKLP

SEQ ID NO: 97012 - protein, 95 aa, Setaria italica
  Transcript Sequence Number=SeqID_31038
  Subcellular localization annotation: CTP_CleavageSite=34; ConfidenceScore=5.44e-01
ARQSGASHYQPTLRTKTNYTFFLFFTPVYNYKVRTSMWTQSTTQLHANIQLDSLVTSWPSSYFLHHAAYNHIHPQKVWTPRMGDPKIILRGSPPP

SEQ ID NO: 97013 - protein, 164 aa, Setaria italica
  misc_feature (24)..(24): Xaa can be any naturally occurring amino acid
  misc_feature (153)..(153): Xaa can be any naturally occurring amino acid
  Transcript Sequence Number=SeqID_31039
  Gene Ontology: Mol. function=sugar binding
  Homolog annotation: Hit_ID=B9HB85; Match level="QueryCoverage=78%, HitCoverage=42%, E-value=5e-24, Identity=46%"; Hit description=F-box family protein
SESKKELFSRLCDTPVLLDGCVQXLWARKRRSGAKCFMLSARALSIAWGDDPTCWIWTASLPGSRFPEVAELVDVCWLEISGKLSLSLLSPGTTYAAYLVFAIADDSYGLECHVGMLPPKATVTVVSGTSGKPAATSTEHAICLQHMQGREEXAVHRRKAAVHA

SEQ ID NO: 97014 - protein, 150 aa, Setaria italica
  Transcript Sequence Number=SeqID_31040
  Homolog annotation: Hit_ID=B6TRR6; Match level="QueryCoverage=98%, HitCoverage=36%, E-value=1e-63, Identity=82%"; Hit description =NOL1/NOP2/sun family protein
ILPVNSNLQRREGSIGLEENGSTFSEWTSRRSWKDRQKAKKANATGSQHLLSSSEPELIYYGKHSGLVGLRKSDVLCPAVDDEACTSGYDKVLVDAECTHDGSIKHIQKFEFWGWKTLDRRVLDAERTDNLFQLQLHLLTNRLPLVRRCN

SEQ ID NO: 97015 - protein, 177 aa, Setaria italica
  misc_feature (98)..(98): Xaa can be any naturally occurring amino acid
  Transcript Sequence Number=SeqID_31041
  Gene Ontology: Mol. function=protein binding
  Homolog annotation: Hit_ID=Q8S5N8; Match level="QueryCoverage=88%, HitCoverage=12%, E-value=1e-56, Identity=77%"; Hit description =Putative F-box protein family
LPNLKNISLVHLRNIYCLALYFRFADLNLRSPVLSYIKVSRCSALHRVSITSTALEKLVLQKQESLSSLTLQCHNLIDVDLSDCESLTNAICEVFSDXGGCPMLRSLILDNCESLSIVELNSSSLASLSLAGCRSMTFLRLSCPNLQNVNLDGCDHLVKLSSLFLLPVLVSFVNFPL

SEQ ID NO: 97016 - protein, 38 aa, Setaria italica
  Transcript Sequence Number=SeqID_31042
MFRQLEDDSLSRMAEACPLIEHLILSSCLSIGIDGLSS

SEQ ID NO: 97017 - protein, 55 aa, Setaria italica
  Transcript Sequence Number=SeqID_31043
  Gene Ontology: Mol. function=protein binding
  Homolog annotation: Hit_ID=Q338L7; Match level="QueryCoverage=100%, HitCoverage=5%, E-value=1e-20, Identity=90%"; Hit description=F-box family protein, putative, expressed
ACTMLQEEELESAISLCSALEILNVHSCPKINALDFARLRVVCPSLKRIQSSLIA

SEQ ID NO: 97018 - protein, 904 aa, Setaria italica
  Transcript Sequence Number=SeqID_31044
  Gene Ontology: Mol. function=protein binding; Cellular component =cytoplasm; Biological process=ubiquitin-dependent protein catabolic process
  Homolog annotation: Hit_ID=Q338L7; Match level="QueryCoverage=98%, HitCoverage=93%, E-value=0.0, Identity=80%"; Hit description=F-box family protein, putative, expressed
  Pfam annotation: Domain name=F-box; Domain location=105-152; Score =30.5; E_value=6.8e-06; Accession=PF00646.25; Description=F-box domain
  Pfam annotation: Domain name=LRR_1; Domain location=264-285; Score =2.2; E_value=1.1e+02; Accession=PF00560.25; Description=Leucine Rich Repeat
  Pfam annotation: Domain name=LRR_1; Domain location=336-361; Score =7.1; E_value=13; Accession=PF00560.25; Description=Leucine Rich Repeat
  Pfam annotation: Domain name=LRR_1; Domain location=382-404; Score =4.6; E_value=40; Accession=PF00560.25; Description=Leucine Rich Repeat
  Pfam annotation: Domain name=LRR_1; Domain location=466-486; Score =1.4; E_value=1.7e+02; Accession=PF00560.25; Description=Leucine Rich Repeat
  Pfam annotation: Domain name=LRR_1; Domain location=494-511; Score =1.6; E_value=1.5e+02; Accession=PF00560.25; Description=Leucine Rich Repeat
  Pfam annotation: Domain name=LRR_1; Domain location=515-537; Score =6.3; E_value=19; Accession=PF00560.25; Description=Leucine Rich Repeat
  Pfam annotation: Domain name=LRR_1; Domain location=557-579; Score =5.4; E_value=28; Accession=PF00560.25; Description=Leucine Rich Repeat
  Pfam annotation: Domain name=LRR_1; Domain location=625-648; Score =1.1; E_value=1.8e+02; Accession=PF00560.25; Description=Leucine Rich Repeat
  Pfam annotation: Domain name=LRR_1; Domain location=650-671; Score =9.4; E_value=4.8; Accession=PF00560.25; Description=Leucine Rich Repeat
  Pfam annotation: Domain name=LRR_1; Domain location=673-693; Score =0.5; E_value=2.4e+02; Accession=PF00560.25; Description=Leucine Rich Repeat
  Pfam annotation: Domain name=LRR_1; Domain location=701-724; Score =4.8; E_value=36; Accession=PF00560.25; Description=Leucine Rich Repeat
  Pfam annotation: Domain name=LRR_1; Domain location=726-749; Score =4.3; E_value=46; Accession=PF00560.25; Description=Leucine Rich Repeat
  Pfam annotation: Domain name=LRR_1; Domain location=775-798; Score =2.0; E_value=1.3e+02; Accession=PF00560.25; Description=Leucine Rich Repeat
  Pfam annotation: Domain name=LRR_1; Domain location=821-843; Score =9.5; E_value=4.7; Accession=PF00560.25; Description=Leucine Rich Repeat
  Pfam annotation: Domain name=LRR_1; Domain location=868-891; Score =3.0; E_value=82; Accession=PF00560.25; Description=Leucine Rich Repeat
  Pfam module annotation: Pfam domain module=F-box::LRR_1::LRR_1::LRR _1::LRR_1::LRR_1::LRR_1::LRR_1::LRR_1::LRR_1::LRR_1::LRR_1::LRR _1::LRR_1::LRR_1::LRR_1; Domain location=105-152::264-285::336 -361::382-404::466-486::...
  Pfam module annotation: Domain location=494-511::515-537::557 -579::625-648::650-671::673-693::701-724::726-749::775-798::821 -843::868-891
MEVGWANLDDEDEDRDLQNKRLRVRRFGEESPQHSGASAFGSESPFLPISDEHAHFKQSRSPEHELEFGLSLFPNDGGSESSRDANNELVDDAENSGGRNSEDVGIKMDLSDDLLHLIFSFLGQKDLCRAGVACKQWRSASVHADFWKCLKFENTRISLQNFVDICRRYQNVTELNLHGVINAEILVLEAIMFLRHLKTLTMGKGQLGEAFFQALAECPLLTALTVTDASLGSGIQEVTVNHDGLRELQILKCRALRISVRCSQLKILSLRRTGMAHVSLNCPQLLELDFQSCHKLSDNAIRQAATACPLLAKLDMSSCSCVTDETLREIAGACPHLSVLDASNCPNISFESVRLPMLIDLRLLSCEGITSASMAAIAYSRLLEALQLDNCSLLTSVSLDLPNLKNISLVHLRKFADLNLRSPVLSYIKVSRCSALHRVSITSTALEKLVLQKQESLSSLTLQCHNLIDVDLSDCESLTNAICEVFSDGGGCPMLRSLILDNCESLSIVELNSSSLASLSLAGCRSMTFLRLSCPNLQNVNLDGCDHLESAAFSPVGLESLNLGICPKLSVLRIEAPNMSILELKGCGVLSEAFINCPLLTSLDASFCRQLEDDSLSRMAEACPLIEHLILSSCLSIGIDGLSSLHCLHKLTLLDLSYTFLISLKPVFDNCPQLKVLKLSACKYLGDSSLDALYRDGALPLLVELDLSYSSIGQTAIEDLLACCTNLVNVNLNGCTNLQELVCNDCSSVDMPVDFSHPNSAPANNEEISEQSGRLLEVLNCTGCPNIKKVVIPSMANFLNLSKINLNLSTNLKEVDLTCSNLHSLNLSNCSSLEVLKLDCPRLTNLQLLACTMLQEEELESAISLCSALEILNVHSCPKINALDFARLRVVCPSLKRIQSSLIA

SEQ ID NO: 97019 - protein, 226 aa, Setaria italica
  Transcript Sequence Number=SeqID_31045
  Gene Ontology: Mol. function=nucleic acid binding; Cellular component= cytoplasm; Biological process=multicellular organismal development
  Homolog annotation: Hit_ID=Q75HC2; Match level="QueryCoverage=99%, HitCoverage=21%, E-value=1e-107, Identity=80%"; Hit description =Protein argonaute 7
  Pfam annotation: Domain name=Piwi; Domain location=2-226; Score =156.6; E_value=7.3e-44; Accession=PF02171.9; Description=Piwi domain
FQFLANLALKINAKLGGCNVALYNSLPCQIPRIFSDKEPVMFMGADVTHPHPLDDSSPSVVAVVASMNWPSANKYTSRMRSQTHRKEIIEHLDVMTGELLEEFVKEVGKLPSRIIFFRDGVSETQFYKVLSEELQAVRLTCSRYPGYKPSITFVVVQKRHHTRLFHREKNGGSTHYSDQNVPPGTVVDTVITHPREFDFYLCSHWGTKGTSRPTHYRVLWDENNFK

SEQ ID NO: 97020 - protein, 55 aa, Setaria italica
  Transcript Sequence Number=SeqID_31046
  Subcellular localization annotation: CTP_CleavageSite=17; ConfidenceScore=5.15e-01
MASKSQADLESQKSAPPAAAVASAPTATAPASGGSVERTLGSVVVGISDAHRAAP

SEQ ID NO: 97021 - protein, 116 aa, Setaria italica
  Transcript Sequence Number=SeqID_31047
  Gene Ontology: Cellular component=plasma membrane
LETDEYVTGNSEGVRVDLVTVTTAYQKMKSLCNNLRNEIFTDIEIHNQHILPSFVDLPNLAASIYSVELSNRLRAFLVACPPAGPASPVADLVIATADFQKDLASWNICPIKAGVD

SEQ ID NO: 97022 - protein, 68 aa, Setaria italica
  Transcript Sequence Number=SeqID_31048
IIYGVGIRSMPVFGVSYRGKKSILLPCIFELFWSKILFYTIVPTPVLFAYSLGHGRSPFLPFFPISVS

SEQ ID NO: 97023 - protein, 183 aa, Setaria italica
  Transcript Sequence Number=SeqID_31049
  Gene Ontology: Mol. function=adenosine deaminase activity; Cellular component=intracellular; Biological process=RNA processing
  Homolog annotation: Hit_ID=Q7XPV6; Match level="QueryCoverage=97%, HitCoverage=41%, E-value=1e-64, Identity=71%"; Hit description =OSJNBa0032F06.25 protein
  Pfam annotation: Domain name=A_deamin; Domain location=3-183; Score =85.1; E_value=2.5e-22; Accession=PF02137.10; Description=Adenosine -deaminase (editase) domain
YLSMGAGTKCLGASRLSTRGDLVHDAHAEVIARRALLRLVYSEFGHSGQPDWLVGSGDGRRWRLKDGHCLHLYITQLPCGVMPVPPSESELPREQLDCGVNGCSDIGFVQRKPGRGDTTLSMSCFDKITRWSVVGIQGALLSHILEPLYLTTITIGQLPDGAPEGFSIENNIEKVLNARLSSL

SEQ ID NO: 97024 - protein, 55 aa, Setaria italica
  Transcript Sequence Number=SeqID_31050
  Subcellular localization annotation: CTP_CleavageSite=14; ConfidenceScore=5.16e-01
FLVRNARRQNCSAPSMMAPSPRHVGFRISNCAWTLAPRWLAPRRVSLAPAWMAPS

SEQ ID NO: 97025 - protein, 94 aa, Setaria italica
  Transcript Sequence Number=SeqID_31051
  Subcellular localization annotation: CTP_CleavageSite=68; ConfidenceScore=5.59e-01
PSQSMCIKIDLSKQCLKYSSQLGMPRKLLRSSTSRSIISRISSSSTKSPELSARILWPFRSACAASFLAATDAAGIAHACRGAVMTAFLLTREL

SEQ ID NO: 97026 - protein, 82 aa, Setaria italica
  Transcript Sequence Number=SeqID_31052
  Subcellular localization annotation: CTP_CleavageSite=35; ConfidenceScore=5.00e-01
IYCPVEAWVGKTRTSLRRRGQAGAARKEQRRRSCRARAEFTPARLAAPMSLCALLAGKLAERPSRRGGTACVSGDLPQRIWA

SEQ ID NO: 97027 - protein, 63 aa, Setaria italica
  Transcript Sequence Number=SeqID_31053
MAARRRPGGAAAGDPPTRPQPADAVAASGEPAKDPVLRPPNLSVAAAAAAIFLAPFSYLAFVH

SEQ ID NO: 97028 - protein, 98 aa, Setaria italica
  Transcript Sequence Number=SeqID_31054
  Gene Ontology: Mol. function=oxidoreductase activity, acting on CH-OH group of donors
  Homolog annotation: Hit_ID=B6SXM3; Match level="QueryCoverage=83%, HitCoverage=10%, E-value=7e-24, Identity=73%"; Hit description =Oxidoreductase
HSHATRRGCHGRGREAGHPLLRGGGARRERYTHGFSSSQMAALTALCGALVPSLPPPVSRNGHHPEEDGGRGGGERGGNKVVEEFLLASAADPPVPDE

SEQ ID NO: 97029 - protein, 69 aa, Setaria italica
  Transcript Sequence Number=SeqID_31055
  Gene Ontology: Mol. function=protein kinase activity; Cellular component=plastoglobule; Biological process=protein amino acid phosphorylation
  Homolog annotation: Hit_ID=B6UDS6; Match level="QueryCoverage=97%, HitCoverage=13%, E-value=9e-26, Identity=70%"; Hit description =Ubiquinone biosynthesis protein ubiB
FYLTVLEGLALYADPNFKLLFKDGRFRWNRLENLLVQGRQDREFAAKDALQPVLKLLLGPDGEELRVLV

SEQ ID NO: 97030 - protein, 61 aa, Setaria italica
  Transcript Sequence Number=SeqID_31056
MSKKAEGGSKLGRWLGAPVRALSRACDSYVRRMSACAGRMPTHAAAYGGRGGFAPGHVQAA

SEQ ID NO: 97031 - protein, 118 aa, Setaria italica
  misc_feature (106)..(106): Xaa can be any naturally occurring amino acid
  Transcript Sequence Number=SeqID_31057
  Gene Ontology: Mol. function=electron carrier activity; Cellular component=cytoplasmic vesicle membrane; Biological process=oxidation reduction
  Homolog annotation: Hit_ID=Q2R6X3; Match level="QueryCoverage=100%, HitCoverage=24%, E-value=2e-41, Identity=62%"; Hit description =Cytochrome P450 family protein, expressed
EYKSLTFTTMVVNELTRMSNATPGVFRKTVTDVQLNGYTIPTGWMVMVCPMAVHLNPEVFEDPLTFNPWRWQDESQRSTLLKNFMPFGLGIRTCPAADFSKLSLQXFPHVLVTNYRWK

SEQ ID NO: 97032 - protein, 66 aa, Setaria italica
  misc_feature (2)..(2): Xaa can be any naturally occurring amino acid
  Transcript Sequence Number=SeqID_31058
YXPLKKCTVVFVNSLDSEGSRLTNFLATRSIIIIRQMHINHISGLYNVRFHHTCSLLSYHLSIYFF

SEQ ID NO: 97033 - protein, 113 aa, Setaria italica
  misc_feature (67)..(67): Xaa can be any naturally occurring amino acid
  Transcript Sequence Number=SeqID_31059
  Gene Ontology: Mol. function=electron carrier activity; Cellular component=cytoplasmic vesicle membrane; Biological process=oxidation reduction
  Homolog annotation: Hit_ID=Q2R6X3; Match level="QueryCoverage=84%, HitCoverage=19%, E-value=2e-20, Identity=50%"; Hit description =Cytochrome P450 family protein, expressed
MDFTFMMFKSIGVFLSKGKENMQKIMSDLLSKRLTRPDVKHGDFLDLIVEELQSGKPTIDEKFATDXLVALLFTSFVTLAPILILAFKFLGNNPKVLKALKEEHEAIVRNRGD

SEQ ID NO: 97034 - protein, 214 aa, Setaria italica
  Transcript Sequence Number=SeqID_31060
  Gene Ontology: Mol. function=electron carrier activity; Cellular component=cytoplasmic vesicle membrane; Biological process=oxidation reduction
  Homolog annotation: Hit_ID=Q2R6X3; Match level="QueryCoverage=81%, HitCoverage=35%, E-value=9e-54, Identity=54%"; Hit description =Cytochrome P450 family protein, expressed
MVSLQVTCASLCAGTLLIAWLLHWVYKWMNPPCKGTSPPGSMGLPIVGESIQFFKISYSLDIPDFYKLRLKRYGPIFKTSLVGQPLVVSADPEVNRFIFQQEGKLFRSWYPEAANIIIGEETIDGFHGPPHKFIRNSIYKLFGLEYLKHNLLPELEAAIRDNFAEWATKYVIDVHDSTPDRLEMPPFSKKNILKGDMIVMNMCGETLHYTVLEM

SEQ ID NO: 97035 - protein, 306 aa, Setaria italica
  Transcript Sequence Number=SeqID_31061
  Gene Ontology: Mol. function=electron carrier activity; Cellular component=cytoplasmic vesicle membrane; Biological process=oxidation reduction
  Homolog annotation: Hit_ID=Q2R6X3; Match level="QueryCoverage=96%, HitCoverage=61%, E-value=2e-98, Identity=56%"; Hit description =Cytochrome P450 family protein, expressed
  Pfam annotation: Domain name=p450; Domain location=1-294; Score= -116.9; E_value=5.1e-06; Accession=PF00067.14; Description=Cytochrome P450
MIIDLVAKKLVNLDPSESRELTKNYSAFLQGLISFPLYVPGTTFYRCMQGRKNMQKIMSDLLSKRLTRPDVKHGDFLDLIVEELQSGKPTIDEKFATDALVALLFTSFVTLAPILILAFKFLGNNPKVLKALKEEHEAIVRNRGDANSGFTWEEYKSLTFTTMVVNELTRMSNATPGVFRKTVTDVQLNGYTIPTGWMVMVCPMAVHLNPEVFEDPLTFNPWRWQDESQRSTLLKNFMPFGLGIRTCPAADFSKLFTAIFLHVLVTNYRWKEINDGEVARMGVIIFPNGYKIQLLRSQGPDLPSVY

SEQ ID NO: 97036 - protein, 82 aa, Setaria italica
  Transcript Sequence Number=SeqID_31062
  Gene Ontology: Mol. function=2 iron, 2 sulfur cluster binding; Cellular component=chloroplast envelope; Biological process =oxidation reduction
  Homolog annotation: Hit_ID=B6ST74; Match level="QueryCoverage=98%, HitCoverage=15%, E-value=2e-38, Identity=90%"; Hit description =Pheophorbide a oxygenase
  Pfam annotation: Domain name=Rieske; Domain location=1-82; Score =21.0; E_value=1.8e-05; Accession=PF00355.18; Description=Rieske [2Fe- 2S] domain
RVVAWHDRAAGEWRVFEDACPHRLAPLSEGRIDGKGRLQCVYHGWCFDGAGACQFIPQAPALGPPVHKNSRACVASYPCVVQ

SEQ ID NO: 97037 - protein, 114 aa, Setaria italica
  Transcript Sequence Number=SeqID_31063
  Gene Ontology: Mol. function=oxidoreductase activity; Biological process=oxidation reduction
  Homolog annotation: Hit_ID=B6UB33; Match level="QueryCoverage=94%, HitCoverage=29%, E-value=5e-32, Identity=71%"; Hit description =Retinol dehydrogenase 12
MLQAARYLLGSPGATGFGSKSTAEDVTAACPDLGAVTAIITGATSGIGAETARVLAKRGARVVIPARSVKAAEDMRARIRAECPAADVLVLPLDLSSLASVHTFADRFLALGLP

SEQ ID NO: 97038 - protein, 414 aa, Setaria italica
  Transcript Sequence Number=SeqID_31064
  Gene Ontology: Mol. function=protein kinase activity; Cellular component=plasma membrane; Biological process=protein amino acid phosphorylation
  Homolog annotation: Hit_ID=Q8RUT5; Match level="QueryCoverage=100%, HitCoverage=68%, E-value=1e-143, Identity=43%"; Hit description =Putative receptor-like protein kinase
  Pfam annotation: Domain name=LRR_1; Domain location=10-32; Score =13.7; E_value=0.74; Accession=PF00560.25; Description=Leucine Rich Repeat
  Pfam annotation: Domain name=LRR_1; Domain location=105-127; Score =5.5; E_value=27; Accession=PF00560.25; Description=Leucine Rich Repeat
  Pfam annotation: Domain name=LRR_1; Domain location=129-151; Score =9.4; E_value=4.8; Accession=PF00560.25; Description=Leucine Rich Repeat
  Pfam annotation: Domain name=LRR_1; Domain location=153-175; Score =16.8; E_value=0.089; Accession=PF00560.25; Description=Leucine Rich Repeat
  Pfam annotation: Domain name=LRR_1; Domain location=177-199; Score =15.9; E_value=0.17; Accession=PF00560.25; Description=Leucine Rich Repeat
  Pfam annotation: Domain name=LRR_1; Domain location=201-224; Score =13.8; E_value=0.7; Accession=PF00560.25; Description=Leucine Rich Repeat
  Pfam annotation: Domain name=LRR_1; Domain location=57-79; Score =13.3; E_value=0.87; Accession=PF00560.25; Description=Leucine Rich Repeat
  Pfam annotation: Domain name=LRR_1; Domain location=81-103; Score =16.3; E_value=0.13; Accession=PF00560.25; Description=Leucine Rich Repeat
  Pfam module annotation: Pfam domain module=LRR_1::LRR_1::LRR_1::LRR _1::LRR_1::LRR_1::LRR_1::LRR_1; Domain location=10-32::105-127::129 -151::153-175::177-199::201-224::57-79::81-103
ISYTIANCKNLVEVDLSRNALTGELPWWVFGLPLQRVSVAGNQLHGWVKVPEDAAMALRVLDLSRNAFSGEIPSRITAFAGLQSLNLSSNSLSGQLPAGIGGMRLLEVLDVSANRLDGTVPPEIGGAVALRDLRMGRNSLTGGIPAQIGNCSSLVALDLSHNSLTGPIPSTMGNLTSLQVVNLSQNKLNGTLPVELSNLPSLHIFDVSHNMLTGDLPNSRFFNNIPDSFVMDNSGLCSSRKNDSCSAVMPKPIVLNPNSSSNPSSQATSSAPSNKHHKKIILSISTLIAIAGGAAIAIGVITISVLNRRVRARAAASRSAPATALSDDYLSQSPENDASSGKLVMFGKGSPEFSAGGHALLNKDCELGRGGFGAVYKTVLRDGQPVAIKKLTVSSLVKSKDDFERQVKMLSKVR

SEQ ID NO: 97039 - protein, 278 aa, Setaria italica
  Transcript Sequence Number=SeqID_31065
  Gene Ontology: Mol. function=protein kinase activity; Cellular component=plasma membrane; Biological process=protein amino acid phosphorylation
  Homolog annotation: Hit_ID=Q8RUT5; Match level="QueryCoverage=99%, HitCoverage=29%, E-value=1e-134, Identity=84%"; Hit description =Putative receptor-like protein kinase
  Pfam annotation: Domain name=Pkinase; Domain location=3-263; Score =104.7; E_value=3.2e-28; Accession=PF00069.17; Description=Protein kinase domain
  Pfam annotation: Domain name=Pkinase_Tyr; Domain location=2-263; Score=53.2; E_value=2.9e-17; Accession=PF07714.9; Description =Protein tyrosine kinase
  Pfam module annotation: Pfam domain module=Pkinase::Pkinase_Tyr; Domain location=3-263::2-263
LCGGFGAVYKTVLRDGQPVAIKKLTVSSLVKSKDDFERQVKMLSKVRHHNIVALRGFYWTSSLQLLIYDYLPGGNLHKQLHECTEDNSLSWMERFDIILGVARGLTYLHQHGIIHYNLKSSNVLLDSNGEPKVGDYGLAKLLPMLDRYVLSSKIQSSLGYMAPEFACKTVKITEKCDVYGFGVLVLEVLTGRRPVEYLEDDVVVLCDLVRSTLEEGRPEDCIDPRLCGEFPMDEALPIIKLGLVCTSQVPSNRPDMGEVVSILELVRSPQDSAEEELV

SEQ ID NO: 97040 - protein, 162 aa, Setaria italica
  misc_feature (6)..(6): Xaa can be any naturally occurring amino acid
  misc_feature (45)..(45): Xaa can be any naturally occurring amino acid
  misc_feature (96)..(96): Xaa can be any naturally occurring amino acid
  misc_feature (146)..(146): Xaa can be any naturally occurring amino acid
  Transcript Sequence Number=SeqID_31066
  Gene Ontology: Mol. function=metal ion binding
  Homolog annotation: Hit_ID=Q7XQ90; Match level="QueryCoverage=91%, HitCoverage=33%, E-value=3e-58, Identity=54%"; Hit description =OSJNBa0018M05.18 protein
LKGLPXFLSEDSVAPPVITRPKSQMWLVSSKMRILSADSCSMYLXRKLGWCDAPNVNILSSQLVELSKSYDELKTSSADTDIDAILQKEVQIIYSXKLQDIIGTTNAIILKEYLDDYSTTYIGDRFVTPQALAFDSPVKYHPYLYXVPSELSEFKKLLLELV

SEQ ID NO: 97041 - protein, 75 aa, Setaria italica
  Transcript Sequence Number=SeqID_31067
  Gene Ontology: Mol. function=transferase activity, transferring glycosyl groups; Cellular component=cytoplasm; Biological process =purine ribonucleoside salvage
  Homolog annotation: Hit_ID=B6SSV8; Match level="QueryCoverage=100%, HitCoverage=38%, E-value=2e-35, Identity=94%"; Hit description =Bifunctional protein tilS/hprT
LEKKGASSISVCTFLDKPARRKVNIQLVGDGKFYSGFECPDCFVVGYGLDYAELYRNLPYVGVLKPEMYKKDSSN

SEQ ID NO: 97042 - protein, 51 aa, Setaria italica
  Transcript Sequence Number=SeqID_31068
MYICIYIQFAQFFQVENQHFSVPSSAQTESGPFLDSGGNRTDTAGRNGAER

SEQ ID NO: 97043 - protein, 228 aa, Setaria italica
  Transcript Sequence Number=SeqID_31069
  Gene Ontology: Mol. function=transcription regulator activity; Cellular component=nucleus; Biological process=regulation of transcription
  Homolog annotation: Hit_ID=Q2HRT7; Match level="QueryCoverage=66%, HitCoverage=21%, E-value=2e-16, Identity=41%"; Hit description=Helix- loop-helix DNA-binding
LIPNCNKIDKASMLDEAIEYLKTLQLQVQMMSMGIGLCIPPMLLPPTMQHLQIPQIAHFPHLGMGLGYGMGVFDMNSSPAVPFPSMPGAHFPCSMIPGTTAQGLGMPGRNTVPMFGLPGQAIHPSASSVQPFPSLAGLPVRPNLAPQVSAAMANMVQEQHQDVATQQQQNMNSEARQGTNTGDPELQTILQVENQHFSVPSSAQTESGPFLDSGGNRTDTAGRNGAER

SEQ ID NO: 97044 - protein, 221 aa, Setaria italica
  Transcript Sequence Number=SeqID_31070
  Gene Ontology: Mol. function=transcription regulator activity; Cellular component=nucleus; Biological process=regulation of transcription
  Homolog annotation: Hit_ID=O80536; Match level="QueryCoverage=48%, HitCoverage=20%, E-value=4e-33, Identity=70%"; Hit description =Transcription factor PIF3
  Pfam annotation: Domain name=HLH; Domain location=15-64; Score=60.5; E_value=6.2e-15; Accession=PF00010.18; Description=Helix-loop-helix DNA-binding domain
PVSILGSRGTKRSRTAEVHNLSERRRRDRINEKMRALQELIPNCNKIDKASMLDEAIEYLKTLQLQVQMMSMGSGLCIPPMLLPPTMQHLQIPQIAHFPHLGMGLGYGMGVFDMNSSPAVPFPSMPGAHFPCSMIPGTTAQGLGMPGRNTEQHQDVATQQQQNMNSEARQGTNTGDPELQTILQVENQHFSVPSSAQTESGPFLDSGGNRTDTAGRNGAER

SEQ ID NO: 97045 - protein, 269 aa, Setaria italica
  misc_feature (81)..(81): Xaa can be any naturally occurring amino acid
  misc_feature (103)..(103): Xaa can be any naturally occurring amino acid
  Transcript Sequence Number=SeqID_31071
  Gene Ontology: Mol. function=DNA-directed DNA polymerase activity; Cellular component=nucleus; Biological process=DNA repair
  Homolog annotation: Hit_ID=Q9LPM1; Match level="QueryCoverage=100%, HitCoverage=61%, E-value=1e-113, Identity=71%"; Hit description =F2J10.13 protein
  Pfam annotation: Domain name=IMS; Domain location=40-268; Score=32.5; E_value=2.4e-11; Accession=PF00817.12; Description=impBmucBsamB family
LRAQCATLTDNDISHFQKVAEKKMLELEASRDLSKIWLHTDMDAFYAAVETLEDPSLKGKPLAVGSMSMIATASYEARKFXGVRAAMPGFIGCKLCPGLVFVXRPNFERYTHYSELTRKVFQRYDPSFIATSLDEAYLNITNVCIERGITGEEVATELRAAIHQETGLTCSAGVAPNRMIAKVCSDINKPNGQFILPNDREAVLTFVSTLPIRKIGGIGKVTEQMLCQVLGISTCQEMLQKAAFLCALFSEGSADFFLSVGLGLGGTET

SEQ ID NO: 97046 - protein, 64 aa, Setaria italica
  Transcript Sequence Number=SeqID_31072
  Gene Ontology: Mol. function=protein serine/threonine kinase activity; Cellular component=intracellular; Biological process =protein amino acid phosphorylation
  Homolog annotation: Hit_ID=Q5QN75; Match level="QueryCoverage=100%, HitCoverage=18%, E-value=4e-28, Identity=93%"; Hit description =Mitogen-activated protein kinase kinase 1
PSAPADQFSPEFCSFISSCIQKDPAERMSASELLNHPFIKKFEGKDLDLRTLVESLEPPMNIPE

SEQ ID NO: 97047 - protein, 355 aa, Setaria italica
  Transcript Sequence Number=SeqID_31073
  Gene Ontology: Mol. function=protein serine/threonine kinase activity; Cellular component=intracellular; Biological process =protein amino acid phosphorylation
  Homolog annotation: Hit_ID=Q5QN75; Match level="QueryCoverage=100%, HitCoverage=100%, E-value=0.0, Identity=93%"; Hit description =Mitogen-activated protein kinase kinase 1
  Pfam annotation: Domain name=Pkinase; Domain location=71-330; Score =258.8; E_value=1.3e-74; Accession=PF00069.17; Description=Protein kinase domain
  Pfam annotation: Domain name=Pkinase_Tyr; Domain location=71-330; Score=15.5; E_value=9.3e-15; Accession=PF07714.9; Description =Protein tyrosine kinase
  Pfam module annotation: Pfam domain module=Pkinase::Pkinase_Tyr; Domain location=71-330::71-330
MKGKKPLKELKLSVPAQEIPVDKFLTASGTFKDGELRLNQSGLRLTSEENGDEDESTNLKVEDVQLSMDDLEMIQVIGKGSGGVVQLVRHKWVGTLYALKGIQMNIQESVRKQIVQELKINQATQSPHIVLCHQSFYHNGVIYLVLEYMDRGSLADIIKQVKTVLEPYLAVLCKQVLEGLLYLHHERHVIHRDIKPSNLLVNRKGEVKITDFGVSAVLASSVGQRDTFVGTYNYMAPERISGSSYDYKSDIWSLGLVILECAIGRFPYIPSEGEGWSSFYELLEAIVDQPPPSAPADQFSPEFCSFISSCIQKDPAQRMSAAELLNHPFLKKFEDKDLDLRILVESLEPPMNIPE

SEQ ID NO: 97048 - protein, 115 aa, Setaria italica
  Transcript Sequence Number=SeqID_31074
TPVPSITGFWLLQISLIIHFLFFMFLSYLILLIHLQSCVSFREIFRGKSEYHCIIVILGKVYPCPDDVACSERVRLKWQWDPRNGFNLPTPCQPARHRSTHPVHVAQNTMTIIGV

SEQ ID NO: 97049 - protein, 108 aa, Setaria italica
  Transcript Sequence Number=SeqID_31075
MEKGGGGGGDDPATRAAGGMCDRFLTFLTRNLTMSRVKSIADGPKNGAGAGQPAMERAEEGEEEDEFAIPIERAEFDYEFGGGHGDGGYSSVATILEESAAMTTTTTR

SEQ ID NO: 97050 - protein, 99 aa, Setaria italica
  Transcript Sequence Number=SeqID_31076
  Gene Ontology: Mol. function=protein dimerization activity
  Pfam annotation: Domain name=DUF295; Domain location=10-62; Score =68.1; E_value=3.3e-17; Accession=PF03478.10; Description=Protein of unknown function (DUF295)
WTPNQRLELHERVRDLGDHSLFVGRGDTFALSAKEFPVIKRNCIYYAGIACNKPYWVSVFHLESDVVEEIPYMEKLKEGRTNRTPYAWFRPRKPFLKQS

SEQ ID NO: 97051 - protein, 94 aa, Setaria italica
  misc_feature (57)..(57): Xaa can be any naturally occurring amino acid
  Transcript Sequence Number=SeqID_31077
  Gene Ontology: Mol. function=transferase activity, transferring glycosyl groups
  Homolog annotation: Hit_ID=B6T8T9; Match level="QueryCoverage=45%, HitCoverage=6%, E-value=8e-12, Identity=88%"; Hit description =Transferase, transferring glycosyl groups
MVRTRRRSVLLLLLALTVLSPLALYTSSLSAALNPTQTRDFPGEITNQGRGVKADKXWNALPLETVSSLKEPVGIVFSEELDGWRKIDWIRGQD

SEQ ID NO: 97052 - protein, 131 aa, Setaria italica
  misc_feature (84)..(84): Xaa can be any naturally occurring amino acid
  Transcript Sequence Number=SeqID_31078
  Gene Ontology: Mol. function=binding
  Homolog annotation: Hit_ID=Q10D20; Match level="QueryCoverage=100%, HitCoverage=3%, E-value=4e-62, Identity=83%"; Hit description=WD-40 repeat family protein, putative, expressed
DMSKAGHASIQVSLGERTWPPVSGYSFVCWFQFQNFFKGQPKEAEKTSKGAYGKRSGHVLRMFSVGAVDDANTLYAELYLHDNXVFTISTGSSSSLSFPGIEMEEGKWHHLAVVHSKPNALAGLFQASVAS

SEQ ID NO: 97053 - protein, 133 aa, Setaria italica
  misc_feature (112)..(112): Xaa can be any naturally occurring amino acid
  Transcript Sequence Number=SeqID_31079
  Gene Ontology: Mol. function=inositol or phosphatidylinositol phosphatase activity
  Homolog annotation: Hit_ID=B9S378; Match level="QueryCoverage=49%, HitCoverage=14%, E-value=3e-21, Identity=69%"; Hit description=Type I inositol polyphosphate 5-phosphatase, putative
  Subcellular localization annotation: CTP_CleavageSite=67; ConfidenceScore=5.67e-01
KDGNALSRHSAESSINSTVDLKESPERSSVASPSASSSSFFKSLSESRSLKFSGFSSPPTTTSTHIEAFRVFAATWNVAGKTPGMGLNLNDFLPSDDYSDIYVLGFQEVVPXNAGNVLVIEDNEPASRWLALQ

SEQ ID NO: 97054 - protein, 87 aa, Setaria italica
  Transcript Sequence Number=SeqID_31080
  Subcellular localization annotation: CTP_CleavageSite=70; ConfidenceScore=5.76e-01
GASRTRNAAAAPLARSPPSPAPGTSSAAARGRRGEASRPATPARIRTARRTGGARAGRAEPAPEGRRAARAPAAPAAGVRLGERVAV

SEQ ID NO: 97055 - protein, 236 aa, Setaria italica
  misc_feature (6)..(6): Xaa can be any naturally occurring amino acid
  misc_feature (19)..(19): Xaa can be any naturally occurring amino acid
  Transcript Sequence Number=SeqID_31081
  Homolog annotation: Hit_ID=B6SLR0; Match level="QueryCoverage=100%, HitCoverage=92%, E-value=1e-124, Identity=91%"; Hit description =Tic20-like protein
  Pfam annotation: Domain name=Tic20; Domain location=102-233; Score =289.7; E_value=6.4e-84; Accession=PF09685.2; Description=Chloroplast import component protein (
  Subcellular localization annotation: CTP_CleavageSite=40; ConfidenceScore=5.24e-01
GRSSSXKNAQFRVKRNHFXARALRVGTDSIHHGMPTSFPMGNSVKGIPSLSIRHSQHPRSVSCQAFSLASFSYPELTSKPRWWWRTLACVPYLLPLHNMWSYADVIYQLHTYLQGFSLLYTFIDTMTLCPGWLFLVIFMTVYFFVVRRKWSPHFLRFHVILAILLDTGSQAVATMCTWMPSIVYQGKPMQYFWMSIAFMQIFTVLECMRCALCGMYPDVPFISHTAFIHSDLNLFR

SEQ ID NO: 97056 - protein, 149 aa, Setaria italica
  Transcript Sequence Number=SeqID_31082
SVASASRAPRAAGAVAARFTGGPIQAQLILLCVWPTHCCTDWGRFLPQGREIGLQFGMDLSGLANPNPTASLMEGGGRGREFAAERNRSALNFCGLLACAGERGAGEAEARGGHGVSWPMAAGDHRRREWTARNRKRGVLGIAEVSFLA

SEQ ID NO: 97057 - protein, 69 aa, Setaria italica
  Transcript Sequence Number=SeqID_31083
  Gene Ontology: Mol. function=metal ion binding
  Homolog annotation: Hit_ID=B6TV57; Match level="QueryCoverage=98%, HitCoverage=15%, E-value=5e-28, Identity=91%"; Hit description=RING -H2 finger protein ATL5I
LLSSINADIMEGKKICARNKGESFSVFSVSKIWQWSNLKGKLPAGSDECSDAGSLPWMKRGGAADTSNI

SEQ ID NO: 97058 - protein, 237 aa, Setaria italica
  Transcript Sequence Number=SeqID_31084
  Gene Ontology: Mol. function=metal ion binding; Cellular component =integral to membrane; Biological process=ubiquitin-dependent protein catabolic process
  Homolog annotation: Hit_ID=B6TV57; Match level="QueryCoverage=97%, HitCoverage=55%, E-value=1e-110, Identity=84%"; Hit description=RING- H2 finger protein ATL5I
  Pfam annotation: Domain name=zf-C3HC4; Domain location=1-32; Score =17.2; E_value=0.0011; Accession=PF00097.17; Description=Zinc finger, C3HC4 type (RING finger)
YRTTGLLPLCGHAFHLNCIDTWLLSNSTCPLCRGVLFVPGLMGEDDTMFDFEERLEEGRLSEDCDDGFGLPGQKASGLAQTPVAEKRVFPVRLGKFKNVGTQGPVQGGNADVNASVLSRDQGESSSSSLDGRRCFSMGTYQYVLGTSELRVALQPGWNRNGAGGAMRGRPAGLSSINADIMEGKKICARNKGESFSVSKIWQWSNLKGKLPAGSDECSDAGSLPWMKRGGAADTSNI

SEQ ID NO: 97059 - protein, 115 aa, Setaria italica
  misc_feature (49)..(49): Xaa can be any naturally occurring amino acid
  misc_feature (78)..(78): Xaa can be any naturally occurring amino acid
  misc_feature (88)..(88): Xaa can be any naturally occurring amino acid
  misc_feature (102)..(102): Xaa can be any naturally occurring amino acid
  Transcript Sequence Number=SeqID_31085
  Subcellular localization annotation: CTP_CleavageSite=21; ConfidenceScore=5.05e-01
RGKRPPRVSKSRRRPEANSVRVSEVEAQNNSSSSPSRSPGAARTKNDAXVAYGVRFGLSLYGWKQNFMELPMELFPPXNSIGVNGNRXNKWISRICQVTPPXLGHWPVYRVGVYR

SEQ ID NO: 97060 - protein, 196 aa, Setaria italica
  misc_feature (99)..(99): Xaa can be any naturally occurring amino acid
  Transcript Sequence Number=SeqID_31086
  Gene Ontology: Mol. function=transferase activity, transferring groups other than amino-acyl groups
  Homolog annotation: Hit_ID=Q9FWI8; Match level="QueryCoverage=98%, HitCoverage=46%, E-value=2e-53, Identity=53%"; Hit description =Putative hsr201 hypersensitivity-related protein
ELLPEAGNIQVVAGKPIVAVQVTRFLGGGFAIGLQISHCIADGFGMIQFLKAIADMARGQSAPTALPVWERHLLMAREPPDTAYVQQKTDVPFSRTLQXETPPSMVYRHFFFGPAEVSALRSHVPGDLGASCTRFELLTAAIWRCRAAVWGFNDDHRAVLAFSANVRRRWEHIPRGYYGNALVYHVVDAAAGELRR

SEQ ID NO: 97061 - protein, 61 aa, Setaria italica
  Transcript Sequence Number=SeqID_31087
  Gene Ontology: Mol. function=aminoacyl-tRNA ligase activity
  Homolog annotation: Hit_ID=Q9LPE7; Match level="QueryCoverage=100%, HitCoverage=5%, E-value=6e-19, Identity=73%"; Hit description =T12C22.11 protein
MGYTKDQLLARLQELKIDFTCYDHPVVLTVEEQAKHVGHLGGALSKNLLLKDKKHRLYVVS

SEQ ID NO: 97062 - protein, 43 aa, Setaria italica
  Transcript Sequence Number=SeqID_31088
LLATREAYRKLHMLYLLAKYYSDACQICTFTPVFVSSYGRTPV

SEQ ID NO: 97063 - protein, 62 aa, Setaria italica
  Transcript Sequence Number=SeqID_31089
  Subcellular localization annotation: CTP_CleavageSite=49; ConfidenceScore=5.15e-01
AGKLRKKQQHIWPSQTCHKQNKLRAIFTQFNRKQWTLTGSFQLSIHSTKSKQKQQARNDERN

SEQ ID NO: 97064 - protein, 178 aa, Setaria italica
  Transcript Sequence Number=SeqID_31090
  Gene Ontology: Mol. function=acyltransferase activity; Cellular component=plastoglobule; Biological process=metabolic process
  Homolog annotation: Hit_ID=B9REV2; Match level="QueryCoverage=97%, HitCoverage=23%, E-value=4e-60, Identity=62%"; Hit description =Catalytic, putative
VKEDKADVPVVKDEDEKKGLDVLYDDGFGSVTVKDYFAAAKAVSRDDGGPPRWFCPVECGRPAVDDAPLLLFLPGTDGVGMGLILHHKSLGKVFEVRCLHIPINDRTPFEGLLQTVENTIEHEHDLSPNRPIYLVGDSFGGCLAVAVAARNPQIDLVLILVNPATSFARTPLQPILPL

SEQ ID NO: 97065 - protein, 99 aa, Setaria italica
  Transcript Sequence Number=SeqID_31091
  Gene Ontology: Mol. function=nuclease activity; Cellular component =Mre11 complex; Biological process=response to DNA damage stimulus
  Homolog annotation: Hit_ID=A8IE00; Match level="QueryCoverage=100%, HitCoverage=7%, E-value=3e-47, Identity=94%"; Hit description=DNA repair protein Rad50
INSDSEGAGTRSYSYRVVMQTGDAELEMRGRCSAGQKVLASLIIRLALAETFCLNCGILALDEPTTNLDGPNAESLATALLRIMEARKGQENFQLIVIT

SEQ ID NO: 97066 - protein, 83 aa, Setaria italica
  misc_feature (60)..(60): Xaa can be any naturally occurring amino acid
  misc_feature (78)..(78): Xaa can be any naturally occurring amino acid
  Transcript Sequence Number=SeqID_31092
  Gene Ontology: Mol. function=two-component response regulator activity; Cellular component=nucleus; Biological process=two -component signal transduction system (phosphorelay)
  Homolog annotation: Hit_ID=Q0PVB3; Match level="QueryCoverage=92%, HitCoverage=37%, E-value=2e-22, Identity=68%"; Hit description =Response regulator
  Pfam annotation: Domain name=Response_reg; Domain location=10-83; Score=-9.7; E_value=0.0087; Accession=PF00072.16; Description =Response regulator receiver domain
MSTMPEPPHVLAVDDSIVDRAVISRLLRSSKYRVTTVDSGKRALEVLSLDRSVHMIITDXPEMSGYDLLKRVKESADXREIPV

SEQ ID NO: 97067 - protein, 76 aa, Setaria italica
  Transcript Sequence Number=SeqID_31093
  Subcellular localization annotation: CTP_CleavageSite=31; ConfidenceScore=5.16e-01
QQQWSLSSVITVPNGIIKPFALRPPNSKGIKDAALKTINRAKAIAINSPAVLQPATSTLSQHMQAKGNNEGNSCSK

SEQ ID NO: 97068 - protein, 66 aa, Setaria italica
  Transcript Sequence Number=SeqID_31094
  Homolog annotation: Hit_ID=Q2R2X5; Match level="QueryCoverage=90%, HitCoverage=17%, E-value=1e-13, Identity=67%"; Hit description=Uvb -resistance protein uvr8, possible, putative, expressed
MWRATRRWPPLLRCLSSDAASSRAPRQRVAALWGNGDYGRLGLGALESRWSPTACPFFLSRAADPP

SEQ ID NO: 97069 - protein, 270 aa, Setaria italica
  Transcript Sequence Number=SeqID_31095
  Gene Ontology: Mol. function=extracellular-glutamate-gated ion channel activity; Cellular component=integral to membrane; Biological process=G-protein coupled receptor protein signaling pathway
  Homolog annotation: Hit_ID=Q7XP59; Match level="QueryCoverage=94%, HitCoverage=28%, E-value=4e-80, Identity=61%"; Hit description =Glutamate receptor 3.1
  Pfam annotation: Domain name=Lig_chan; Domain location=1-208; Score =106.2; E_value=1.1e-28; Accession=PF00060.18; Description=Ligand -gated ion channel
EHAGRFVIIKWLLNAMIIKSSYTANLTSILTVQQLTSPIRGIDSLIASDEPIGFQVGSFAESYLVHELGVSPSRLRKLGSPDEYEAALELGPRKGGVVAIVDERPYVELFLTNHDKFAIVGAEFTKSGWGFAFPRDSPLAVDLSTAILALSENGDLQRIHDKWLSVGSSSESATTNLQSAPLEVQSFSALFLICGVACAAALAIHACVLVRQYSRHVASAADGTAISRSGHRSSIRSFLSFADHREAQYQKGPKDPAALGASGSSCGVSS

SEQ ID NO: 97070 - protein, 473 aa, Setaria italica
  Transcript Sequence Number=SeqID_31096
  Gene Ontology: Mol. function=pyridoxal phosphate binding; Cellular component=chloroplast; Biological process=methionine biosynthetic process
  Homolog annotation: Hit_ID=B4FU01; Match level="QueryCoverage=97%, HitCoverage=97%, E-value=0.0, Identity=87%"; Hit description =Cystathionine gamma-synthase
  Pfam annotation: Domain name=Aminotran_5; Domain location=115-460; Score=-179.3; E_value=0.0095; Accession=PF00266.11; Description =Aminotransferase class-V
  Pfam annotation: Domain name=Beta_elim_lyase; Domain location=138 -385; Score=-90.3; E_value=0.00028; Accession=PF01212.13; Description= Beta-eliminating lyase
  Pfam annotation: Domain name=Cys_Met_Meta_PP; Domain location=97-469; Score=704.3; E_value=1e-208; Accession=PF01053.12; Description=CysMet metabolism PLP-dependent enzyme
  Pfam module annotation: Pfam domain module=Aminotran_5::Beta_elim _lyase::Cys_Met_Meta_PP; Domain location=115-460::138-385::97-469
  Subcellular localization annotation: CTP_CleavageSite=70; ConfidenceScore=5.80e-01
MAATAAAPTAPARLFLLHSTRSSNPSSSASAQAQALRVPLPGLTLSRRRMAGAPPAAIAGASGDSERDLSASALSVEAHESAVAPDSDLEAKEPSVATILTSFENSFDMYGALSTPLYQTATFKQPSATDYGAYDYTRSGNPTRDVLQSLMAKLEKADQAFCFTSGMAALAAVTHLIQSGQEIVAGEDIYGGSDRLLSQVAPRHGIVVKRVDTTKISDVASAIGPLTKLVWLESPTNPRQQITDIKKISEIAHSHGALVLVDNSIMSPVLSRPIELGADIVMHSATKFIAGHSDLMAGILAVKGESLAKEIAFLQNAEGSGLAPFDCWLCLRGIKTMALRVEKQQANAQKIAEFLASHPRVKQVNYAGLPDHPGRSLHYSQAKGAGSVLSFLTGSLALSKHVVETTKYFHVTVSFGSVKSLISLPCFMSHASIPAAVREERGLTDDLVRISVGIEDVEDLIADLDRALRTGPA

SEQ ID NO: 97071 - protein, 68 aa, Setaria italica
  Transcript Sequence Number=SeqID_31097
VTDCTPNYLTKANALRITKIDTGCPNLTILPPALQLKSHKILSSQNSNQKALLHSEILLTTKHYPFLP

SEQ ID NO: 97072 - protein, 97 aa, Setaria italica
  Transcript Sequence Number=SeqID_31098
  Gene Ontology: Mol. function=aminoacyl-tRNA hydrolase activity; Cellular component=ribonucleoprotein complex; Biological process =mRNA processing
  Homolog annotation: Hit_ID=B9T1E8; Match level="QueryCoverage=85%, HitCoverage=38%, E-value=7e-28, Identity=72%"; Hit description =Peptidyl-tRNA hydrolase, putative
GFWYGLLIGLKSVIYHFRRNREFCRLRIGIGRPPGQMDPKAFVLQKFNRTGRERIDSAIKEGVNILKMVATKGLTEAARLSNADQKYKHLRSHDLQD

SEQ ID NO: 97073 - protein, 200 aa, Setaria italica
  misc_feature (109)..(109): Xaa can be any naturally occurring amino acid
  Transcript Sequence Number=SeqID_31099
  Gene Ontology: Mol. function=aminoacyl-tRNA hydrolase activity; Cellular component=ribonucleoprotein complex; Biological process =mRNA processing
  Homolog annotation: Hit_ID=B9T1E8; Match level="QueryCoverage=82%, HitCoverage=75%, E-value=1e-66, Identity=74%"; Hit description =Peptidyl-tRNA hydrolase, putative
  Pfam annotation: Domain name=Pept_tRNA_hydro; Domain location=6-194; Score=212.7; E_value=9.4e-61; Accession=PF01195.11; Description =Peptidyl-tRNA hydrolase
PIQPWLFIGLGNPGEKYQSTRHNVGFDMIDAFAESQGIPLTTHYFKALFGEGMVDGIPVLLAKPQTYMNLSGESVGPLAAYYKLPLNRVLVAFDDMDLPCGVLRLQPKXGGFGRHNGLKSVIYHFRRNREFCRLRIGIGRPPGQMDPKAFVLQKFNRTGRERVNISSQVICTFFVVVSPYLPGLTLLMLTQCLARFEPTS

SEQ ID NO: 97074 - protein, 149 aa, Setaria italica
  Transcript Sequence Number=SeqID_31100
  Gene Ontology: Mol. function=protein serine/threonine kinase activity; Cellular component=integral to membrane; Biological process=protein amino acid phosphorylation
  Homolog annotation: Hit_ID=Q8GWJ7; Match level="QueryCoverage=90%, HitCoverage=20%, E-value=1e-33, Identity=54%"; Hit description =Cysteine-rich receptor-like protein kinase 19
  Pfam annotation: Domain name=Pkinase; Domain location=3-149; Score= -46.0; E_value=9.5e-06; Accession=PF00069.17; Description=Protein kinase domain
  Pfam annotation: Domain name=Pkinase_Tyr; Domain location=2-149; Score=-88.3; E_value=7.4e-08; Accession=PF07714.9; Description =Protein tyrosine kinase
  Pfam module annotation: Pfam domain module=Pkinase::Pkinase_Tyr; Domain location=3-149::2-149
IHGRLVAIKRYSTSGSISYRKGQARCFEAEIYCLLKFQHINIVKLLGYCTERREMILVYEYIPNGGLDKYISGAGTGMLLDWTRRFSIILGIAQGVAYLHKYCGVTILHRDLKPSNVLLDSDMNPKITDFGIARLLGSALNEEVIEGTL

SEQ ID NO: 97075 - protein, 86 aa, Setaria italica
  Transcript Sequence Number=SeqID_31101
  Gene Ontology: Mol. function=protein serine/threonine kinase activity; Biological process=protein amino acid phosphorylation
  Homolog annotation: Hit_ID=Q9ZUI0; Match level="QueryCoverage=81%, HitCoverage=7%, E-value=2e-11, Identity=50%"; Hit description =Putative receptor-like protein kinase
  Pfam annotation: Domain name=LRR_1; Domain location=30-52; Score=9.3; E_value=4.9; Accession=PF00560.25; Description=Leucine Rich Repeat
  Pfam annotation: Domain name=LRR_1; Domain location=55-77; Score =12.7; E_value=1.1; Accession=PF00560.25; Description=Leucine Rich Repeat
  Pfam module annotation: Pfam domain module=LRR_1::LRR_1; Domain location=30-52::55-77
LLYLSYNYLESPENNTNLDPFFASLTNCTSLKELGVSWNEIAGMMPPLIGRLSPGLKQLHLEYNKIFGPIPANLTNLANLTTLNLS

SEQ ID NO: 97076 - protein, 81 aa, Setaria italica
  Transcript Sequence Number=SeqID_31102
MEKKPRAAAGGGDDGGGSRGEASGSSEGGGLVERLPEALLVEVLGRLEVDDACSAAASCRALRGAASAAISAITTIDLSAF

SEQ ID NO: 97077 - protein, 92 aa, Setaria italica
  Transcript Sequence Number=SeqID_31103
VRERGLLAPRRATVSARVRGATANHSLLGGGAAAAIKEWGGEKKAPAPAPEADRRVGQREVGRRASEGRIARLGSRGSGEAVMDERRRPGRG

SEQ ID NO: 97078 - protein, 122 aa, Setaria italica
  Transcript Sequence Number=SeqID_31104
  Gene Ontology: Mol. function=protein binding; Cellular component =nucleus; Biological process=cell division
  Homolog annotation: Hit_ID=Q5XLI2; Match level="QueryCoverage=100%, HitCoverage=35%, E-value=9e-62, Identity=94%"; Hit description=D -type cyclin
  Pfam annotation: Domain name=Cyclin_N; Domain location=1-77; Score =10.9; E_value=0.00037; Accession=PF00134.15; Description=Cyclin, N -terminal domain
AVNYLDRFLSLYQLPEDKAWMTQLLSVACLSLAAKMEETYVLPSLDLQVGDARYVFEAKTIQRMELLVLSTLKWRMQAVTPFSYIDYFLHRLNGGDAPNRRAVRRSAELILCIARGTHCLDF

SEQ ID NO: 97079 - protein, 85 aa, Setaria italica
  misc_feature (20)..(20): Xaa can be any naturally occurring amino acid
  misc_feature (47)..(47): Xaa can be any naturally occurring amino acid
  Transcript Sequence Number=SeqID_31105
  Gene Ontology: Mol. function=oxidoreductase activity; Biological process=oxidation reduction
  Homolog annotation: Hit_ID=B6TE77; Match level="QueryCoverage=100%, HitCoverage=27%, E-value=1e-30, Identity=79%"; Hit description=1 -aminocyclopropane-1-carboxylate oxidase 1
IEVISGGAYRSVVHRVAAGXEGRRLSVATFYNPGPDAVVAPAARGTXAALSYPGPYRFGDYLEYYQGPKFGDKDARFQAVKKLLG

SEQ ID NO: 97080 - protein, 68 aa, Setaria italica
  Transcript Sequence Number=SeqID_31106
  Gene Ontology: Mol. function=electron carrier activity; Biological process=response to oxidative stress
YNHRALLASDAALLNDSLSGAYVQLMTNASSVDVFFADFAVSMINMGRIGVRTGTDGEIRATCAIYVD

SEQ ID NO: 97081 - protein, 163 aa, Setaria italica
  Transcript Sequence Number=SeqID_31107
  Gene Ontology: Mol. function=superoxide dismutase activity; Cellular component=cytoplasm; Biological process=superoxide metabolic process
  Homolog annotation: Hit_ID=B6TAX5; Match level="QueryCoverage=88%, HitCoverage=88%, E-value=3e-64, Identity=84%"; Hit description =Superoxide dismutase [Cu-Zn]
  Pfam annotation: Domain name=Sod_Cu; Domain location=8-161; Score =286.7; E_value=4.9e-83; Accession=PF00080.12; Description=Copperzinc superoxide dismutase (SODC)
MAGKAGGLKGVALIGGGANSTVAGALHFFQDPSTGYTEVRGKVTGLAPGRHGFHIHVFGDTTNGCNSTGPHFNPHNKPHGAPFDDERHVGDLGNIVANKDGVAEVFIRDLQISLSGPHSILGRAVVVHADPDDLGRGGHELSKSTGNAGARIGCGIIGIQSSV

SEQ ID NO: 97082 - protein, 46 aa, Setaria italica
  Transcript Sequence Number=SeqID_31108
RRLRSIWACEFSLTVLASSRLFLRDLQFTFYWRLEPFMSGVKGLHK

SEQ ID NO: 97083 - protein, 86 aa, Setaria italica
  Transcript Sequence Number=SeqID_31109
  Gene Ontology: Mol. function=fatty-acid synthase activity; Cellular component=fatty acid synthase complex; Biological process=fatty acid biosynthetic process
  Homolog annotation: Hit_ID=UPI00001628DB; Match level="QueryCoverage =89%, HitCoverage=22%, E-value=6e-17, Identity=57%"; Hit description =maoC-like dehydratase domain-containing protein
  Pfam annotation: Domain name=MaoC_dehydratas; Domain location=8-86; Score=-10.3; E_value=0.01; Accession=PF01575.11; Description=MaoC like domain
PSAAPPPPAVLSVGHALRERRCFTEADVAAYAAVSGDRNPVHLDDAVARELCGFQRGRVVHGMLVASLFPSIIAASFPGAVYASQT

SEQ ID NO: 97084 - protein, 64 aa, Setaria italica
  misc_feature (7)..(7): Xaa can be any naturally occurring amino acid
  misc_feature (11)..(11): Xaa can be any naturally occurring amino acid
  Transcript Sequence Number=SeqID_31110
  Gene Ontology: Mol. function=electron carrier activity
  Homolog annotation: Hit_ID=B9RUK8; Match level="QueryCoverage=95%, HitCoverage=12%, E-value=2e-19, Identity=78%"; Hit description =Oxidoreductase, putative
TAGGVPXISEXSLGTMESKKQPNLFFAGEVLNVDGVTGGFNFQNAWTGGYIAGTSIGTLALTSN

SEQ ID NO: 97085 - protein, 87 aa, Setaria italica
  Transcript Sequence Number=SeqID_31111
IFLVISSQADARRLMAATTCDVKEGSCKGGVAVDIEGDGGVTSSKQEMVSATGTEQAGEGMPMTTTDSRPTAPGNSPGIGNRGKINN

SEQ ID NO: 97086 - protein, 75 aa, Setaria italica
  misc_feature (32)..(32): Xaa can be any naturally occurring amino acid
  Transcript Sequence Number=SeqID_31112
  Gene Ontology: Mol. function=hydrolase activity; Biological process =metabolic process
  Homolog annotation: Hit_ID=B6TC25; Match level="QueryCoverage=97%, HitCoverage=22%, E-value=1e-17, Identity=54%"; Hit description =Gibberellin receptor GID1L2
GLRGLACGRVLVCLAEKDVVRDRGRAYAEGLXASGWAGKVEVLEVAGQGHCFHLVDFACADAVKQDDAIARFVNL

SEQ ID NO: 97087 - protein, 47 aa, Setaria italica
  Transcript Sequence Number=SeqID_31113
  Gene Ontology: Mol. function=strictosidine synthase activity
EDGKTIEAVSVHGAIQKIFKSVSEVEERNGSLWIGSVMSPFLGVYRL

SEQ ID NO: 97088 - protein, 396 aa, Setaria italica
  Transcript Sequence Number=SeqID_31114
  Gene Ontology: Mol. function=strictosidine synthase activity; Cellular component=plasma membrane; Biological process=biosynthetic process
  Homolog annotation: Hit_ID=B9T2X5; Match level="QueryCoverage=84%, HitCoverage=88%, E-value=8e-84, Identity=46%"; Hit description =Strictosidine synthase, putative
  Pfam annotation: Domain name=SGL; Domain location=65-341; Score= -66.4; E_value=4.2e-05; Accession=PF08450.4; Description=SMP -30GluconolaconaseLRE-like region
  Pfam annotation: Domain name=Str_synth; Domain location=182-270; Score=130.4; E_value=5.9e-36; Accession=PF03088.8; Description =Strictosidine synthase
  Pfam module annotation: Pfam domain module=SGL::Str_synth; Domain location=65-341::182-270
  Subcellular localization annotation: CTP_CleavageSite=28; ConfidenceScore=5.53e-01
SKSAPACVVAQCTIYSTASPASSSSPSLAAMRAEVVVLVAAAAFLSLDSLSDVRRLEIGNGDVELVPLDGAAGPESIVFDKTGEGPYTSVSDGRVLRWLAEERRWVEHSCSAPELLDSCRGSQDPGREHECGRPLGLKFNNETGELYVADAYHGLRVVGPDDHVSRPLVPEWQGSRPFSFANGIEIDYETGAIYFTETSTRFQRREFLNIVISGDNTGRLLKYDPKSNQVEVLVDGLSFANGLAMSKDGTYLLLVETTTGKILRYWIKTPKASTLEEVAQLPWFPDNIKMSPRGGFWVGLHAKRGKIAEWSISYPWVRRLILKLPMRHVQRASWLLNQLGRQVIALRLSEDGKTIEAVSVHGAIQKVFKSVSEVEERNGSLWIGSVMSPFLGVYRL

SEQ ID NO: 97089 - protein, 321 aa, Setaria italica
  misc_feature (9)..(9): Xaa can be any naturally occurring amino acid
  Transcript Sequence Number=SeqID_31115
  Gene Ontology: Mol. function=glycerophosphodiester phosphodiesterase activity; Cellular component=cytoplasm; Biological process=glycerol metabolic process
  Homolog annotation: Hit_ID=A2RAH5; Match level="QueryCoverage=81%, HitCoverage=25%, E-value=7e-27, Identity=31%"; Hit description =Complex: Pho85(cyclin-dependent kinase)/Pho80(cyclin)
  Pfam annotation: Domain name=GDPD; Domain location=6-273; Score =142.0; E_value=1.9e-39; Accession=PF03009.9; Description =Glycerophosphoryl diester phosphodiesterase family
APPGARVGXARERENTLLSFGRAAAHAAVAFVEFDVQVTKDGCPIIFHDDFILTQGIGAVYERRVTDLLLEEFLSYGPQKESRKVSKPLLRRTGDGRVLNWSTEEDDSLCTLQEVFECVSPHLGFNIELKFDDNVLHHKKDLERALQAILQVVFQNARDRPVFFSSFHPDAAMMTRELQSLYPVLFLTEGGTSKHHDSRRNSLNNAIQVCLEHDLHGIVSDVRGILKNPAAVVRAQESNLALLTYGQLNNVWEAVYVQYLMGINGVIVDQVEEISNAVAGFSKPDLNRSSAGVDGATHQAFSQQQLGFLLRLIPELIEQRH

SEQ ID NO: 97090 - protein, 95 aa, Setaria italica
  Transcript Sequence Number=SeqID_31116
  Gene Ontology: Mol. function=sequence-specific DNA binding; Cellular component=nucleus; Biological process=regulation of transcription, DNA-dependent
  Homolog annotation: Hit_ID=Q6IEP4; Match level="QueryCoverage=97%, HitCoverage=19%, E-value=7e-17, Identity=56%"; Hit description=WRKY transcription factor 37
DHGDLMQQMFSQSYRPMIPEGGHHVDDFFADLAELESDPMSLIFPCGDPGREKATTPKGLGADPLFNMLDWGTMATNVVATSAGSSFEQGESGLL

SEQ ID NO: 97091 - protein, 128 aa, Setaria italica
  Transcript Sequence Number=SeqID_31117
  Gene Ontology: Mol. function=electron carrier activity; Cellular component=integral to membrane; Biological process=oxidation reduction
  Homolog annotation: Hit_ID=B6UDW1; Match level="QueryCoverage=89%, HitCoverage=21%, E-value=5e-47, Identity=78%"; Hit description =Transposon protein
AAADDDKEEVSEEDVHKMPYLKAVVLEGLRKHPPAHFVLPHKAAEDMEIGGYLIPKGASVNFMVAEMSRDEREWRNPTEFSPERFLPGDDGEGVDVTGTKGIRMMPFGVGRRICAGIGVAMLHLEYFV

SEQ ID NO: 97092 - protein, 93 aa, Setaria italica
  Transcript Sequence Number=SeqID_31118
  Gene Ontology: Mol. function=protein serine/threonine kinase activity; Biological process=protein amino acid phosphorylation
  Homolog annotation: Hit_ID=B9S6V7; Match level="QueryCoverage=100%, HitCoverage=20%, E-value=1e-22, Identity=53%"; Hit description=Srpk, putative
  Subcellular localization annotation: CTP_CleavageSite=72; ConfidenceScore=5.11e-01
HTDLKPENVLLVSTINPAKDPVRSGFTPILDRPVGSQYGGTVISFSEKMLRMRARRAVARISQRRVSLGGIAAEVEKERNLDGISLKCKIVDF

SEQ ID NO: 97093 - protein, 242 aa, Setaria italica
  Transcript Sequence Number=SeqID_31119
  Gene Ontology: Mol. function=DNA binding; Biological process =regulation of transcription
  Homolog annotation: Hit_ID=B6T0L0; Match level="QueryCoverage=95%, HitCoverage=77%, E-value=4e-98, Identity=80%"; Hit description=MYB -like transcription factor DIVARICATA
  Pfam annotation: Domain name=Myb_DNA-binding; Domain location=141 -188; Score=50.9; E_value=5e-12; Accession=PF00249.23; Description =Myb-like DNA-binding domain
  Pfam annotation: Domain name=Myb_DNA-binding; Domain location=31-80; Score=28.7; E_value=2.4e-05; Accession=PF00249.23; Description=Myb -like DNA-binding domain
  Pfam module annotation: Pfam domain module=Myb_DNA-binding::Myb_DNA -binding; Domain location=141-188::31-80
MMESWMEVLPPPYFAGQAAGRFLPDRRAPGPGAWTQEENKLFERALARVDWDAPDRWERVAAMLPGRMVPDVVAHFDDLENDVCFIEAGLLPFPQYGGGAAQNAGFTFDWDGDAGGLGFKRSCYMVAGKRGRGPDQERKKGVPWTEEEHKLFLMGLKKYGRGDWRNISRNFVTSRTPTQVASHAQKYFIRLNSGGKDKRRSSIHDITTVNLPDDDGGNPSPSPPSVLTSASTRWGARAASAG

SEQ ID NO: 97094 - protein, 98 aa, Setaria italica
  Transcript Sequence Number=SeqID_31120
KTNCPQIQSISYQEYGLEHRRRTNRRNELIEADGWIQIGSSRRNQPIQAGDGWIYVPLDGSRSGGVASVRSGRKRGGTDQRVSAWLRHHKSLDSNWIS

SEQ ID NO: 97095 - protein, 222 aa, Setaria italica
  Transcript Sequence Number=SeqID_31121
  Gene Ontology: Mol. function=kinase activity
  Homolog annotation: Hit_ID=B9GJ33; Match level="QueryCoverage=52%, HitCoverage=20%, E-value=1e-35, Identity=56%"; Hit description =Global transcription factor group
  Pfam annotation: Domain name=Bromodomain; Domain location=78-163; Score=116.4; E_value=9.2e-32; Accession=PF00439.17; Description =Bromodomain
SYWLTRKQVFSQNTLSSQEYKKRRAVCISSEPERSSTDSEVGEITSQKSEVTSHSIFEHQSFTKSMAESMNVSKTRLCGKILKKLMDHKGGWLFHKPVDPVLYGIPDYFDVICNPMDLGTVKKKLTNKQYVTASEFAADVRLTFANAMKYNPPGNDVHAVAEQLQGIFDSEWRSVIRKWNGRNPVQEQKPMKATKPEAAMKSKSLIPRGLVNNRLQNLQLRY

SEQ ID NO: 97096 - protein, 398 aa, Setaria italica
  Transcript Sequence Number=SeqID_31122
  Gene Ontology: Mol. function=kinase activity; Cellular component =integral to membrane; Biological process=multicellular organismal development
  Homolog annotation: Hit_ID=B9GJ33; Match level="QueryCoverage=98%, HitCoverage=81%, E-value=3e-48, Identity=34%"; Hit description =Global transcription factor group
  Pfam annotation: Domain name=Bromodomain; Domain location=2-71; Score= 70.3; E_value=7.3e-18; Accession=PF00439.17; Description=Bromodomain
PSLKPVDPVLYGIPDYFDVICNPMDLGTVKKKLTNKQYVTASEFAADVRLTFANAMKYNPPGNDVHAVAEQLNRIFDSEWRSVIRKWNGRNPVQEQKPMKATKPEAAMKSKSLIPRGLVTCSNSLAKEPSINAISSKVKIKFFVRGCENTSLKAGIQEHSIDNSLDCTKGNDKISRIQSNESCALSNGNESPSCNSTSPLASSEQGEESYLHLEPLSPSKALRIAMLKSRFAGTIVKAQQNALLDHGKEVDLAKLQLEKERLEKSQLEEKARIEAQVKAAEAAAQLKLEEEMRMKREKERKAARLALHMMKKTVDIDNSDFLKDLENLCQKWQLNPPSKLIVDFVHGIELPQGLGSPLEALGLFIKKDLEEEVEQELEDSLSTSLNADVEEGEISCCQ

SEQ ID NO: 97097 - protein, 267 aa, Setaria italica
  misc_feature (22)..(22): Xaa can be any naturally occurring amino acid
  Transcript Sequence Number=SeqID_31123
  Gene Ontology: Mol. function=protein tyrosine kinase activity; Cellular component=plasma membrane; Biological process=protein amino acid phosphorylation
  Homolog annotation: Hit_ID=B9RDB7; Match level="QueryCoverage=98%, HitCoverage=41%, E-value=6e-53, Identity=44%"; Hit description =Leucine rich repeat receptor kinase, putative
  Pfam annotation: Domain name=LRR_1; Domain location=32-54; Score =13.6; E_value=0.74; Accession=PF00560.25; Description=Leucine Rich Repeat
  Pfam annotation: Domain name=LRR_1; Domain location=56-78; Score =12.1; E_value=1.5; Accession=PF00560.25; Description=Leucine Rich Repeat
  Pfam annotation: Domain name=LRR_1; Domain location=8-30; Score=2.7; E_value=93; Accession=PF00560.25; Description=Leucine Rich Repeat
  Pfam annotation: Domain name=LRR_1; Domain location=80-102; Score =16.8; E_value=0.092; Accession=PF00560.25; Description=Leucine Rich Repeat
  Pfam module annotation: Pfam domain module=LRR_1::LRR_1::LRR_1::LRR _1; Domain location=32-54::56-78::8-30::80-102
EDYGRLAKPPVLQLGYNQLSGXIPTQLGQLKKLTVLALQSNQLTGAIPASLGDLPALTRLDLSSNQLFGSIPSKLAEIPQLSTLNLRNNTLSGSVPSGLKKLHEGFRYENNSELCGAQFDSLKPCPDDSNDDGKMPHKPESTSVKPQQIQKTADLNRNCDNGGCSKPSTLSAGAVIAGTIIIVAGAAACGLSVFSWHRRQKQKVGSSVEHLEGRLSLDQSKETCQRSASSLINVEYSSGWDTSSEGSQHGARLSSEGSPSVRFNLEE

SEQ ID NO: 97098 - protein, 71 aa, Setaria italica
  Transcript Sequence Number=SeqID_31124
  Gene Ontology: Mol. function=DNA binding; Biological process =regulation of transcription
  Homolog annotation: Hit_ID=Q6NQK2; Match level="QueryCoverage=84%, HitCoverage=13%, E-value=4e-10, Identity=58%"; Hit description=NAC domain-containing protein 8
GDEPRAIKPRLAVYAQLPTEDFKKDLEECQRLEPSDTVNLELDNTTEFRLSQIDFSQDSFTTWAGGKIIDD

SEQ ID NO: 97099 - protein, 250 aa, Setaria italica
  Transcript Sequence Number=SeqID_31125
  Gene Ontology: Mol. function=protein phosphatase type 2A regulator activity; Cellular component=nucleus; Biological process=nucleosome assembly
  Homolog annotation: Hit_ID=B9IJV5; Match level="QueryCoverage=87%, HitCoverage=99%, E-value=3e-76, Identity=65%"; Hit description =Nucleosome/chromatin assembly factor group (Fragment)
  Pfam annotation: Domain name=NAP; Domain location=32-226; Score =110.6; E_value=5.4e-30; Accession=PF00956.10; Description=Nucleosome assembly protein (NAP)
MTAPADKGKKAKTEADGGEENEQIDGALVLSIEKLQEIQDELEKVNEEASDKVMEVEQKYSEIRRPVYLKRGDIIKTIPDFWLTAFMSHPLLSELLTEEDQKIFKYLDSVDVDDSDVKAGYSIHLNFSENPYFEDTKLTKTYSFADDGTTTIKASQIKWKEGMGPVGNGINKKGAKRPLVEESFFTWFGDTELKSLADGVQDEVAEIIKEDLWPNPLKYFNNEVEDEFEGDEEDDEDLDGEDGEDDDEEN

SEQ ID NO: 97100 - protein, 94 aa, Setaria italica
  Transcript Sequence Number=SeqID_31126
RDIDEEGNSMWQFKRRVRLPAQYVFSFADAMDRHLLLRGIPWNLHLGSSTDEVDIGYFSVEFESMQIEKMCDLKHLLYAKLYTGFPPSLCVPSI

SEQ ID NO: 97101 - protein, 156 aa, Setaria italica
  Transcript Sequence Number=SeqID_31127
  Gene Ontology: Mol. function=transferase activity, transferring glycosyl groups; Cellular component=integral to membrane; Biological process=cell wall organization and biogenesis
  Homolog annotation: Hit_ID=B6SWB6; Match level="QueryCoverage=100%, HitCoverage=18%, E-value=9e-79, Identity=89%"; Hit description=CSLF3- cellulose synthase-like family F; beta1,3;1,4 glucan synthase
DIATEDIVTGFRIHGQGWRSMYCTMEHDAFCGIAPINLTERLHQIVRWSGGSLEMFFSHNNPFIGGRRIQPLQRVSYLNMTIYPVTSVFILIYALSPVMWLIPDEVYIQRPFTRYVVYLLVIIVMIHMIGWLEIKWAGVTWLDYWRNEQFFMIGST

SEQ ID NO: 97102 - protein, 69 aa, Setaria italica
  Transcript Sequence Number=SeqID_31128
GCSFQMTGIYVWDEMFREYVFFDIITIDTQTHMPSHARVLAHVSICINQGYVHDLKEHRCTLSIEMCSH

SEQ ID NO: 97103 - protein, 73 aa, Setaria italica
  Transcript Sequence Number=SeqID_31129
  Gene Ontology: Mol. function=extracellular-glutamate-gated ion channel activity; Cellular component=integral to membrane; Biological process=G-protein coupled receptor protein signaling pathway
  Homolog annotation: Hit_ID=Q69L15; Match level="QueryCoverage=97%, HitCoverage=8%, E-value=1e-20, Identity=66%"; Hit description =Putative Avr9/Cf-9 rapidly elicited protein 141
KEILQSKFIGLSGRFDLSDRQLAVSTFQIINIIGRGWREIGFWKAQNGLSRRLNQSQSTTNLLPDLNPVIWPG

SEQ ID NO: 97104 - protein, 390 aa, Setaria italica
  misc_feature (1)..(1): Xaa can be any naturally occurring amino acid
  misc_feature (19)..(19): Xaa can be any naturally occurring amino acid
  Transcript Sequence Number=SeqID_31130
  Gene Ontology: Mol. function=nucleotide binding; Biological process =defense response
  Homolog annotation: Hit_ID=Q6WSR3; Match level="QueryCoverage=99%, HitCoverage=32%, E-value=3e-68, Identity=41%"; Hit description =Resistance protein T10rga2-1A
  Pfam annotation: Domain name=LRR_1; Domain location=102-124; Score =11.1; E_value=2.3; Accession=PF00560.25; Description=Leucine Rich Repeat
  Pfam annotation: Domain name=LRR_1; Domain location=126-147; Score =7.6; E_value=11; Accession=PF00560.25; Description=Leucine Rich Repeat
  Pfam annotation: Domain name=LRR_1; Domain location=318-340; Score =1.6; E_value=1.5e+02; Accession=PF00560.25; Description=Leucine Rich Repeat
  Pfam module annotation: Pfam domain module=LRR_1::LRR_1::LRR_1; Domain location=102-124::126-147::318-340
XLIGETCVQRSLRLDLDLXLEEGWSSNTKTKVRQLAISNNWKRDKDEFERTLDLSHVRSLIVFGEWMPFFITDTMKFVHVLDLEGASGLKDHHLNQICQLVHLKYLSLRGCKDIFKMPESLGNLRQLHTMDIRGTYIFQLPSSFNKLRKLQQLHASAWFKDEHKVGPSISNERVTENLKRRDKLKLSFCYDKNFHFLGRNVSCVVQVPRGIGKLNALRTLGYVRFGHGKRNASVKELIGLTQLRKLELHGVDRTNCRDFWSAIAGHNHLLSLSVNRDCVADDLDWHLGGSLSPPKFLKNLKLWGRLVRVLEWVQQLQYLSKLQLHRSGLKQDAIEAIGKLPNLGILRFWKSSFVEGELKIKGGSFPSLILLDLRELDAVTIVEFEDGGMP

SEQ ID NO: 97105 - protein, 421 aa, Setaria italica
  Transcript Sequence Number=SeqID_31131
  Gene Ontology: Mol. function=inorganic anion exchanger activity; Cellular component=integral to membrane; Biological process=anion transport
  Homolog annotation: Hit_ID=B6SV45; Match level="QueryCoverage=97%, HitCoverage=62%, E-value=0.0, Identity=90%"; Hit description=Boron transporter-like protein 2
  Pfam annotation: Domain name=HCO3_cotransp; Domain location=37-303; Score=-376.5; E_value=0.0041; Accession=PF00955.13; Description=HCO3- transporter family
  Subcellular localization annotation: CTP_CleavageSite=12; ConfidenceScore=5.00e-01
MVIVWTALSYTLPSKVPSGVPRRLFSPLPWESSSLGHWTIVKDLFSVPPAYIFAAILPALMVAGLYFFDHSVASQLAQQNEYNLKKPSAYHYDILVLGIMVLLCGLIGIPPSNGVLPQSPMHTRSLAILKRQLLSKKMVDTAKESIGKSATSLEIYGKMQEVFIEMDSEQNTDSVDKELKNFKDAVLQEGDEEGKLAGEFDPRKHIEAHLPVRVNEQRLSNLLQSILVGGCVGAMPVIRMIPTSVLWGYFAYMAIDSLPGNQFWERMQLLFIAESRHYKVLEGPHASFVESVPPRTITIFTVFQLVYLLICFGITWIPIAGILFPVPFFLMILIRQYLLPKFFDPIVLRELDAAEYEELDGVPHEHTLEDEVSEAGSCISRRDAEILDELTTNRGELKHRTSSLREERSVQVPSNAVQPRL

SEQ ID NO: 97106 - protein, 77 aa, Setaria italica
  misc_feature (15)..(15): Xaa can be any naturally occurring amino acid
  Transcript Sequence Number=SeqID_31132
MSTAAASRHVVAVPXPGRGHINPMLVVCRQLAAAYTALAVTVVVTEEWHELLAAAGVLAALPARVRLATIPNVIPSE

SEQ ID NO: 97107 - protein, 191 aa, Setaria italica
  Transcript Sequence Number=SeqID_31133
  Gene Ontology: Mol. function=transporter activity; Cellular component= integral to membrane; Biological process=transport
  Homolog annotation: Hit_ID=Q84LK4; Match level="QueryCoverage=100%, HitCoverage=36%, E-value=1e-105, Identity=93%"; Hit description =Putative high affinity nitrate transporter
LIMPLVYDIIRKCGATPFTAWRLAYFVPGSLHIVMGILVLTMGQDLPDGNLRSLQKKGDANKDKFSKVMWYAITNYRTWIFVLLYGYCMGVELTTDNVIAEYYFDHFNLDLRVAGIIAACFGMANIVARPLGGILSDVGARYWGMRARLWNIWILQTAGGAFCLWLGRATTLPASITAMVLFSFCAQAACG

SEQ ID NO: 97108 - protein, 130 aa, Setaria italica
  Transcript Sequence Number=SeqID_31134
  Gene Ontology: Mol. function=oxidoreductase activity; Biological process=oxidation reduction
  Homolog annotation: Hit_ID=B6UFQ5; Match level="QueryCoverage=83%, HitCoverage=34%, E-value=8e-23, Identity=54%"; Hit description =Oxidoreductase
NPREHGHRQGRVREARGRAGLNIVDLHGLRPGGPGWAEAQTAVASSMETLGCVVVAHDALGGELRRDLFGVAMPELFSLPLAAKQGSLSGHIGGYIGPVPGKAPGLESMRVSDASDAANVRAFAGLLWPT

SEQ ID NO: 97109 - protein, 201 aa, Setaria italica
  Transcript Sequence Number=SeqID_31135
  Gene Ontology: Mol. function=DNA topoisomerase (ATP-hydrolyzing) activity; Cellular component=mitochondrion; Biological process=DNA topological change
  Homolog annotation: Hit_ID=Q7XZF7; Match level="QueryCoverage=100%, HitCoverage=21%, E-value=1e-100, Identity=87%"; Hit description =Probable DNA gyrase subunit A, chloroplastic/mitochondrial
  Pfam annotation: Domain name=DNA_topoisoIV; Domain location=8-201; Score=98.8; E_value=1.9e-26; Accession=PF00521.12; Description=DNA gyrasetopoisomerase IV, subunit A
AMSVLLGRALPDVRDGLKPVHRRILYAMHEMGLASRRPFRKCARVVGEVLGKFHPHGDTAVYDALVRMAQDFSMRYPLVQGHGNFGSIDADPPAAMRYTECRLDPLAEAMFLTDLELNTVDFVPNFDNSQKEPSLLPTRVPSLLLNGSSGIAVGMATNIPPHNLGELVDALSVMIQNPEATLQELLECMPGPDLPYEGGTI

SEQ ID NO: 97110 - protein, 158 aa, Setaria italica
  Transcript Sequence Number=SeqID_31136
  Pfam annotation: Domain name=Rpr2; Domain location=1-75; Score=36.2; E_value=1.4e-07; Accession=PF04032.8; Description=RNAse P Rpr2Rpp21 subunit domain
GPVAALLGRRLASSAEAAGVPLGAATFLCQRCETVLKPGFNCSVRIRNKRNKAKRRKKSNCCQNSISYACHFCGDQNLILGSGKGVVKSLLPSRDHATMALTGRILKGNNSNTRIRDRKNVLEHSQAATLQVDSPSGLRQSTSERGEHGERLKCKSLY

SEQ ID NO: 97111 - protein, 256 aa, Setaria italica
  Transcript Sequence Number=SeqID_31137
  Subcellular localization annotation: CTP_CleavageSite=46; ConfidenceScore=5.30e-01
RFNKKWSVSRLNHEVQADIATSILYTSHASSNRNMTSLSSAPTNVNGSTFPVVVPSLLLMQDLSNCQYWQSFVFAYADATLQPDGQGSSSRIAGLGVLVDLRSTSISCCLQVLGSVRVDSVVMAGLAALLLAAKFLSVLQIQSEGIGSDCLQAVRLLHMAPLDSPWKLHPWISHFQDLGSRDALQVTKISRAQNEAAHQLAVRARNVFSHRLFHPVYKFSPWSWLCCSCSTPFCSLGPSDPSSCTLLLMLNEVLYK

SEQ ID NO: 97112 - protein, 55 aa, Setaria italica
  Transcript Sequence Number=SeqID_31138
  Gene Ontology: Mol. function=protein kinase activity; Cellular component=integral to membrane; Biological process=protein amino acid phosphorylation
  Homolog annotation: Hit_ID=Q10E02; Match level="QueryCoverage=100%, HitCoverage=8%, E-value=1e-20, Identity=92%"; Hit description =Atypical receptor-like kinase MARK, putative, expressed
MGSLSAVLHGNRSSGRTPLNWELRSSIALAAARGVEYIHSTSSTASHGNIKSSIV

SEQ ID NO: 97113 - protein, 174 aa, Setaria italica
  misc_feature (21)..(21): Xaa can be any naturally occurring amino acid
  Transcript Sequence Number=SeqID_31139
  Gene Ontology: Mol. function=protein kinase activity; Cellular component=integral to membrane; Biological process=protein amino acid phosphorylation
  Homolog annotation: Hit_ID=Q6Y2W9; Match level="QueryCoverage=99%, HitCoverage=24%, E-value=2e-71, Identity=82%"; Hit description =Atypical receptor-like kinase MARK
  Pfam annotation: Domain name=LRR_1; Domain location=123-143; Score =9.7; E_value=4.2; Accession=PF00560.25; Description=Leucine Rich Repeat
  Pfam annotation: Domain name=LRR_1; Domain location=144-166; Score =7.1; E_value=14; Accession=PF00560.25; Description=Leucine Rich Repeat
  Pfam annotation: Domain name=LRR_1; Domain location=26-49; Score=5.8; E_value=24; Accession=PF00560.25; Description=Leucine Rich Repeat
  Pfam annotation: Domain name=LRR_1; Domain location=51-73; Score=8.5; E_value=7.2; Accession=PF00560.25; Description=Leucine Rich Repeat
  Pfam annotation: Domain name=LRR_1; Domain location=75-97; Score=7.6; E_value=11; Accession=PF00560.25; Description=Leucine Rich Repeat
  Pfam annotation: Domain name=LRR_1; Domain location=99-121; Score =9.7; E_value=4.3; Accession=PF00560.25; Description=Leucine Rich Repeat
  Pfam module annotation: Pfam domain module=LRR_1::LRR_1::LRR_1::LRR _1::LRR_1::LRR_1; Domain location=123-143::144-166::26-49::51-73::75 -97::99-121
RRLAWNASGAAGACSWTGVNXDENGRVAVLRLPGATLSGAIPAGTLGNLTALHTLSLRLNGLSGALPDDLANAAALRNVFLNGNRLSGGFPQGILALPGLVRLALDGNDLSGPIPAALGSLTHLKALLLENNRFSGEIPDLKLELQQFNVSFNQLNGSIPAALRSQPRSAFLGM

SEQ ID NO: 97114 - protein, 562 aa, Setaria italica
  Transcript Sequence Number=SeqID_31140
  Gene Ontology: Mol. function=catalytic activity; Cellular component =Golgi apparatus; Biological process=metabolic process
  Homolog annotation: Hit_ID=Q8VYU6; Match level="QueryCoverage=89%, HitCoverage=68%, E-value=9e-86, Identity=40%"; Hit description =Golgin candidate 4
PKGNVLEEERASFALKQASLENEIKQLKQQLSNKSKKETEIERKLEDENKRNGFLQQELNELKINKERISTSMEELHKELNEKKLELRRVQDELSRRDKEHVSDGSFQSLRSMLMALQKENSDLKIERARLEADLKSTKSTSQKTADGTSDNKIPDSGKVKEEMESLKRALQDASRERDKAVQDLARLKQHLLDKDMEDQEKMDEDSKLIEELRVICEQQRAHIMQLERALKVEIAKQEESKRIINEEHQRSNEHVEDLKSKLASCMSALESKNVELLNLQTALGQYYAESEAKERLGGDLAVAREELSKLSQSLKVANQTIEISRREKEDIATKLSQAERMLTDGKRSMQKLEDDNSRLRRALEQSMTTVNRMSLDSDNSVDRRIVIKLLVTYFQRNHSKEVLDLMVRMLGFSEEDKQRIGFAQNNAGKGVVRGVLGLPGRLVGGIVGGGSSGKSTQASQDSQSFADLWVDFLLKETEEREKREASEAARQSQEESQTATSTSSSSSIPQPSQHPSNLAPGPSTTTRPHLFGRPDSEFSTVPLASSSYSSVPTPFLRPPPR

SEQ ID NO: 97115 - protein, 57 aa, Setaria italica
  Transcript Sequence Number=SeqID_31141
ETETMQLISLRGGQSKPKVILSMDYSIYGLNNKLDKLVMLIEQANRHTKIYQISREF

SEQ ID NO: 97116 - protein, 122 aa, Setaria italica
  Transcript Sequence Number=SeqID_31142
  Gene Ontology: Mol. function=DNA binding
  Pfam annotation: Domain name=B3; Domain location=19-117; Score=43.2; E_value=1e-09; Accession=PF02362.13; Description=B3 DNA binding domain
TPKKIVEERVRAIQAKFPICVAVMKNNNGVAQKWMLELGVRYAAAHLPASGQAVALQCMGKTWITQMVIHNGRRWFLNGGWARFARDNGLRVGDICLFELKKNKRKLTMKVHIISREQSSLK

SEQ ID NO: 97117 - protein, 89 aa, Setaria italica
  Transcript Sequence Number=SeqID_31143
QFVDKCNFATAYATSLCFYVIPIHRINMKGSFPSHFPIKKYGMDIFRIFYYYTKSSQSQDPCGTSKMKLPKSECKLELLMNHFKSTKNL

SEQ ID NO: 97118 - protein, 174 aa, Setaria italica
  Transcript Sequence Number=SeqID_31144
SVKSSQELELEELEKAPKFKAKPLNKKILESKGDIGVFAHPKPQVTAPKEFHFSTDVRLGPPSVADLFDKLSLHSDCSSNNNRQDMPRLTRPNPFNLHTEERGHLKERQLEAQLLQKKMEEEKARVHKANPYPYTTDYPVVPPKPEPKPCTRPEGFQLESLVRHELEQQRLMEE

SEQ ID NO: 97119 - protein, 779 aa, Setaria italica
  Transcript Sequence Number=SeqID_31145
  Gene Ontology: Mol. function=transferase activity, transferring glycosyl groups; Cellular component=cytoplasm; Biological process =pyrimidine nucleotide biosynthetic process
  Homolog annotation: Hit_ID=UPI000034F1A9; Match level="QueryCoverage =92%, HitCoverage=86%, E-value=0.0, Identity=50%"; Hit description =NOL1/NOP2/sun family protein
  Pfam annotation: Domain name=Nol1_Nop2_Fmu; Domain location=24-308; Score=41.6; E_value=2.5e-10; Accession=PF01189.9; Description =NOL1NOP2sun family
IASCQFFQDICSQLENDFRKSLETEVSDEHEEDAIRPLPWYPGNLAWHLNFSRMQLRRNQALESFHEFLKRENEVGNITRQEAVSMVPPLFLNVQPDHHILDMCAAPGSKTFQLLEMIHQSTKPGLLPNALVVANDVDVQRCNLLIHQTKRMCTANLIVTNHEAQNFPGCNLAKFCSETCMDEAKLQRLEFDRVLCDVPCSGDGTVRKAPDMWRKWNAGMGNGLHRLILEIAMRGMGLLKVGGRMVYSTCSMNPVENEAVVAEILRRCGDSVELLDVSNELPELARRPGLNTWKVRDRGSWFGVHEDIPRYRKSVVSPSMFPSGKGSKDVEVNTDVIDADMKDSTDMVEGEQETNTAINKSNDDDDQKTEEKAEVDCESGEAPTRYKKLNSTSTRTEHSDYPLHRCMRIVPHDQNSGAFFIAVLHKLSPLNESHVVDGVKSEQNISKDKTGKLEKDLGSDKVSSEENIVHQQVVDDTNVLDGEQNRDMGSKSSKDKTSEDTKVIGNEAEKGQAGTRDRRRQQNQGRWRGVDPVIFFKDEVTVKSIVSFYGIKDSFPLDGHLVTRNPDTSHVKRIYYVSKSVQDVLELNIKVGERLKITSLGLKIFERQSSKDGSPCTFRLSSEGLPLLLPYITKQILYASAIDFQHLLQYRTIKFPDFVDAKFGEEASALLPGCCVVVLREGHQDIGSIATDPSAIAIVCWKGKTNLCVMVSPLDGKELLERISLRFGLKIPKLDEEKPNPKITGSDEQPDGATETDDQECLPESKASDMEIPDAGEAE

SEQ ID NO: 97120 - protein, 88 aa, Setaria italica
  Transcript Sequence Number=SeqID_31146
DLQPNYFLTRNSHHESKFAPQVVYYLILLVSQFASTFICFCYLSTVYFQLLHQINHSIYGALQVILHISIRLILQVCLRYWCFVRDFL

SEQ ID NO: 97121 - protein, 93 aa, Setaria italica
  Transcript Sequence Number=SeqID_31147
GSWYNLIKFVLFPQPPNVPNEQRGLETYNLVNVELNMTIFPKPPVCVLFHLEENNDTLGKHMHASSQNSITPNINDHFSVLKTSNIKKNGSIV

SEQ ID NO: 97122 - protein, 103 aa, Setaria italica
  misc_feature (2)..(2): Xaa can be any naturally occurring amino acid
  Transcript Sequence Number=SeqID_31148
  Subcellular localization annotation: CTP_CleavageSite=5; ConfidenceScore=5.01e-01
LXQAMDSSRGSRTGGSVQTRQRRRFFPDTKRNGADDEEAKNLHSPGPLAFSKVQAPFRFLPPSFADASSSADYTTATASRLRSEGTCAHQYFRSKQGCGFRNV

SEQ ID NO: 97123 - protein, 146 aa, Setaria italica
  misc_feature (10)..(10): Xaa can be any naturally occurring amino acid
  misc_feature (64)..(64): Xaa can be any naturally occurring amino acid
  Transcript Sequence Number=SeqID_31149
  Homolog annotation: Hit_ID=Q9SGY3; Match level="QueryCoverage=69%, HitCoverage=23%, E-value=2e-13, Identity=43%"; Hit description =F20B24.10
ADHGTYIIAXNRESAYGHAIKSSCYSRIHGGQKLQDFGVYLFQIMFQTNAGAVMITDLVFWLIXYPFLAHNQYDMNFILIGTHSINVVFLVGDAALNKLHFPWFRIAYFLLWTGLFVNIQWIIHANVSIWWPYPFLDLAFPGAPVW

SEQ ID NO: 97124 - protein, 406 aa, Setaria italica
  misc_feature (290)..(290): Xaa can be any naturally occurring amino acid
  Transcript Sequence Number=SeqID_31150
  Homolog annotation: Hit_ID=Q9SGY3; Match level="QueryCoverage=85%, HitCoverage=86%, E-value=1e-30, Identity=29%"; Hit description =F20B24.10
  Subcellular localization annotation: CTP_CleavageSite=69; ConfidenceScore=5.04e-01
VGGTGRELGPWRRQADQGSGGSWLLRHPLRSSSCPGRSASAGVSELILPCAILSKNPSPWSTNSAFQSSAMAVDTTEPEYWLNWMLSLCALWVYSCMALACFLIWKYEGPRSRDSNGDDGGDREEAPPRAGPGVVYLEDCWKPCLEEIHPGWLLAFRVVAFFILASLLLIDIVTDGWSIFLYYTQWTFLLVTLYFGLGSLLSIYGCYQYAYKISGDGSDLIGSGADHGTYIIAPTGESAYGHAIKSSCYSRIHGGQEIAGFWGYLFQIMFQTNAGAVMITDLVFWLILYXFLAHNQYDMNFILIGTHSINVVFLVGDAALNKLHFPWFRIAYFLLWTGLFVNIQWIIHANVSIWWPYPFLDLAFPGAPVWYLVVALLHFPCYALFTLVLRLKHSVLESWFPQTYVK

SEQ ID NO: 97125 - protein, 45 aa, Setaria italica
  Transcript Sequence Number=SeqID_31151
TAGGHANFTHNMRVRGSWDSNPRPQGSHEPSLPSHHLTYIAHVTE

SEQ ID NO: 97126 - protein, 98 aa, Setaria italica
  Transcript Sequence Number=SeqID_31152
  Homolog annotation: Hit_ID=Q6XPW9; Match level="QueryCoverage=77%, HitCoverage=21%, E-value=2e-13, Identity=67%"; Hit description =Submergence induced protein SI397
  Subcellular localization annotation: CTP_CleavageSite=34; ConfidenceScore=5.01e-01
CARTPLSSVTTATTADSRARGGGGHSERGETTTRAEAGPTMARSRSDAGRSYGREASRYHALRPDHPAGGGIEPDGSRAPEKREPRRRSEELRSPAVA

SEQ ID NO: 97127 - protein, 73 aa, Setaria italica
  Transcript Sequence Number=SeqID_31153
  Gene Ontology: Mol. function=hydrolase activity, hydrolyzing O -glycosyl compounds; Cellular component=vacuole; Biological process =carbohydrate metabolic process
  Homolog annotation: Hit_ID=B6SKG0; Match level="QueryCoverage=100%, HitCoverage=13%, E-value=1e-19, Identity=73%"; Hit description=Non -cyanogenic beta-glucosidase
MGAPARSICRHVLLILLSLQLLLVAPWQGGTAARALNFTRQDFPRDFVFGAGTSAYQYEGATDEDGRSPSIWD

SEQ ID NO: 97128 - protein, 98 aa, Setaria italica
  Transcript Sequence Number=SeqID_31154
  Gene Ontology: Mol. function=protein serine/threonine kinase activity; Cellular component=integral to membrane; Biological process=protein amino acid phosphorylation
  Homolog annotation: Hit_ID=Q53P17; Match level="QueryCoverage=98%, HitCoverage=32%, E-value=1e-39, Identity=77%"; Hit description =Protein kinase domain
MDRPVVHMDLKPENILLDDNMVPKIADFGLSRLFGQEQTRMHTQNVVGSLGYMAPEYLYRGEISTQSDIYSLGLLIIQISTGEKNIPDAEDKCGKKFI

SEQ ID NO: 97129 - protein, 306 aa, Setaria italica
  Transcript Sequence Number=SeqID_31155
  Homolog annotation: Hit_ID=B6TCG2; Match level="QueryCoverage=100%, HitCoverage=100%, E-value=1e-159, Identity=89%"; Hit description =Lipid binding protein
  Pfam annotation: Domain name=DUF1336; Domain location=34-245; Score =384.3; E_value=2.2e-112; Accession=PF07059.4; Description=Protein of unknown function (DUF1336)
MASLNGETEHQWIENIKSGGAVPCLAPESCPNGWATPPGDSFMVRGPEYLTNKVKIPGGESLLKPLGFDWIKGPAKICEILKDKNHRVRKAIDEEVSLGKQHFVWAFNLQLPKDNYSAIFYFVSLEPVPEGSLMDQFLKGDDAFRKSRLKLIANIVKGPWIVRTAVGEQAICILGRALTCKYVQGSNFIEVDVDIGSSIVANAIVHLAFGYITTLTVDLAFLIESQTESELPERLLGAVRFSELNPGSAGHYERQSEEHQESTQSRSVGFWQGFWSNNQGNPTEPSPSLQNTNGNLHKEEANENAK

SEQ ID NO: 97130 - protein, 147 aa, Setaria italica
  Transcript Sequence Number=SeqID_31156
  Homolog annotation: Hit_ID=B9RVT3; Match level="QueryCoverage=85%, HitCoverage=7%, E-value=1e-09, Identity=27%"; Hit description =Homeobox protein, putative
METPFVPNSFTGKRKSTVGNPPIVQPHVGSRAVHEYQFLPEQPSDTYERASRSHYYDTPVEISNSRISSLTSGSQLLHGSEEAAPSYAFQGHTSGSGLLPQPSRSQAFPAVPADHEMAQSNSNLNSVPVEGQFDISQVAAFENPLVS

SEQ ID NO: 97131 - protein, 51 aa, Setaria italica
  Transcript Sequence Number=SeqID_31157
  Subcellular localization annotation: CTP_CleavageSite=25; ConfidenceScore=5.34e-01
PSASGSGTDSGAASSMAPSAGKSPNAAALTAAGVSAPALLMMALVGFLVAV

SEQ ID NO: 97132 - protein, 74 aa, Setaria italica
  Transcript Sequence Number=SeqID_31158
GWPIHIIRLDLEGLWTDLCIALAGLFIVHKSEVEVSGYANLGMEYACLCIKACCSRMSSPQAHQPLPLPASTAW

SEQ ID NO: 97133 - protein, 216 aa, Setaria italica
  Transcript Sequence Number=SeqID_31159
  Gene Ontology: Mol. function=serine-type peptidase activity; Biological process=proteolysis
  Homolog annotation: Hit_ID=Q9FW17; Match level="QueryCoverage=96%, HitCoverage=33%, E-value=2e-92, Identity=73%"; Hit description =Putative serine peptidase
TTFQYGDPDSVCSPLINAKKSRKNLVEAYAQFVKDYYIKEMETPPSSYDQEYLKDTTPNDSSSRLWWFQVCSEVAFFQIAPKTDSVRSARIDTRYHLDLCRNVFGEGVYPDVFMTNLYYGGTRIAASKIVLTNGSQDPWRHASKQKSSKGMPSYLMKCSNCGHGTDLRGCPQSPFRIEGDSSNCSSPAAVNAVREQIAKHMDLWLSQCQKPSASGV

SEQ ID NO: 97134 - protein, 148 aa, Setaria italica
  Transcript Sequence Number=SeqID_31160
MAVDAHHLLHTGGGAGGQRQLLAHAGWAWAGDAACYEAPASAARQQGQRSPCYGGKEVVAAGRPTATTGQQVFQQSCVANPAPAAGQYAAGPRMCAADASESGVTFGGGGAQQEVMMAPRKRKRPDQIQTPVLGLGAADVAAHFQQQL

SEQ ID NO: 97135 - protein, 105 aa, Setaria italica
  Transcript Sequence Number=SeqID_31161
KNIGRGGKKRTQHKQPSGASQGEGNEAGEGQTGGTNPSQPPPPSPGWIWPPPQLMPDDRLVRRSYSSHRDHTLGLLYHGTRRIGTERNPSRGVGGTRCRLVRARD

SEQ ID NO: 97136 - protein, 114 aa, Setaria italica
  Transcript Sequence Number=SeqID_31162
  Gene Ontology: Mol. function=pseudouridine synthase activity; Biological process=pseudouridine synthesis
  Homolog annotation: Hit_ID=Q654A2; Match level="QueryCoverage=71%, HitCoverage=16%, E-value=4e-28, Identity=71%"; Hit description =Pseudouridylate synthase
MLAKFRPLMATAAKARAPPVVAASTSAAAAAAERDEHVHYKHTDACHHLRWTAKESYEYMYARPWSRVVDFYAELVRTGAGAAGLAKLFGKDEKDYSLDTTGENYLAPSEKQTA

SEQ ID NO: 97137 - protein, 107 aa, Setaria italica
  misc_feature (85)..(85): Xaa can be any naturally occurring amino acid
  Transcript Sequence Number=SeqID_31163
  Gene Ontology: Mol. function=nucleotide binding; Biological process =defense response
  Homolog annotation: Hit_ID=C3SBK4; Match level="QueryCoverage=98%, HitCoverage=9%, E-value=4e-13, Identity=40%"; Hit description=Pi5-2
INLNMSYDFNSIASAIVSEANRAEEGTSQVKEEIEDNPQILMNCLREVLHGKRCLIVFDSLWTTDEGELLHLKKMLQGAENTKIXVTTSSKNVAKLMHTIRALQISG

SEQ ID NO: 97138 - protein, 119 aa, Setaria italica
  Transcript Sequence Number=SeqID_31164
  Gene Ontology: Mol. function=methyltransferase activity
  Homolog annotation: Hit_ID=Q5VNJ0; Match level="QueryCoverage=94%, HitCoverage=18%, E-value=6e-27, Identity=58%"; Hit description =Putative tRNA-(N1G37) methyltransferase
KLAREFNARGFLRFPNLARLSRPSPAARKRRERKGGGGDEEATREPDRDKAYVVEVVREGMEDDEDEWWKGLVGEEGFGRGAWRIGPTRLLMLDESYAERRVDELPEAVKVLISSGASS

SEQ ID NO: 97139 - protein, 117 aa, Setaria italica
  Transcript Sequence Number=SeqID_31165
  Gene Ontology: Mol. function=methyltransferase activity
  Homolog annotation: Hit_ID=Q5VNJ0; Match level="QueryCoverage=76%, HitCoverage=15%, E-value=7e-25, Identity=65%"; Hit description =Putative tRNA-(N1G37) methyltransferase
PDLLRRTQVPDRRRKEGRERKGGGGDEEATREPDRDKAYVVEVVREGMEDDEDEWWKGLVGEEGFGRGAWRIGPTRLLMLDESYAERRVDELPEAVKGVLNHETQQDGLSAYELIRC

SEQ ID NO: 97140 - protein, 61 aa, Setaria italica
  Transcript Sequence Number=SeqID_31166
LVVSVTNKPRHVTIVPTDVAIIDIKSSQMLICSTEIKSNLVARVLTDVITSAPTNDPYFSC

SEQ ID NO: 97141 - protein, 162 aa, Setaria italica
  Transcript Sequence Number=SeqID_31167
  Gene Ontology: Mol. function=acid phosphatase activity
  Homolog annotation: Hit_ID=Q53Q74; Match level="QueryCoverage=92%, HitCoverage=27%, E-value=7e-64, Identity=78%"; Hit description =Ser/Thr protein phosphatase family protein, expressed
PLPPVPGSPPPFAAYGARWPAPHEESGSPSNLYYSFEAAGGAVHVAMLGSYAPFDSGSDQYRWLARDLAGVDRRATPWLVVLLHAPWYNTNAAHQGEGEAMREAMERLLFEARVDVVFAGHVHAYERFTRVYNNEANPCGPVYITIGDGGNREGLAFDFEKN

SEQ ID NO: 97142 - protein, 85 aa, Setaria italica
  misc_feature (20)..(20): Xaa can be any naturally occurring amino acid
  misc_feature (38)..(38): Xaa can be any naturally occurring amino acid
  Transcript Sequence Number=SeqID_31168
  Subcellular localization annotation: CTP_CleavageSite=39; ConfidenceScore=5.51e-01
PSPSALGLPLHSAHLPSAGXGRAFREVNAGVGTGRTKXAAGAVGAVGGPSATSVLELLECPVCTCSMFPPIHQVGARNPISRNPI

SEQ ID NO: 97143 - protein, 104 aa, Setaria italica
  Transcript Sequence Number=SeqID_31169
  Homolog annotation: Hit_ID=Q6YZ47; Match level="QueryCoverage=100%, HitCoverage=67%, E-value=8e-18, Identity=50%"; Hit description =Growth-regulating factor 1-like
GHTAKEVGEHAFFSDSTTERDRQQAAGQWQFKNLGMEPKHSAAPLFSAGGYGNGAASAYAVDLTREDDEERRRQQQQHCFVLGADLRLERPSGHDAAPEQKPLR

SEQ ID NO: 97144 - protein, 52 aa, Setaria italica
  Transcript Sequence Number=SeqID_31170
  Subcellular localization annotation: CTP_CleavageSite=35; ConfidenceScore=5.29e-01
QPDAAPGPSSAGPGPWTGTGRRMTWHATSGPARMMAMGLSSLTRLFDPWTNF

SEQ ID NO: 97145 - protein, 70 aa, Setaria italica
  Transcript Sequence Number=SeqID_31171
  Gene Ontology: Mol. function=iron-sulfur cluster binding
  Homolog annotation: Hit_ID=Q8LHR9; Match level="QueryCoverage=60%, HitCoverage=2%, E-value=1e-10, Identity=76%"; Hit description =Putative aldehyde oxidase
  Subcellular localization annotation: CTP_CleavageSite=12; ConfidenceScore=5.14e-01
MAAAAAAAASPSAAPPSAAAAVFAVNGERVELRGGEVDPGATLLEFLRTRTRFTGPKLGCGEGTPPFRSP

SEQ ID NO: 97146 - protein, 94 aa, Setaria italica
  misc_feature (86)..(86): Xaa can be any naturally occurring amino acid
  Transcript Sequence Number=SeqID_31172
  Gene Ontology: Cellular component=integral to membrane
  Homolog annotation: Hit_ID=Q9LNJ8; Match level="QueryCoverage=91%, HitCoverage=44%, E-value=5e-31, Identity=75%"; Hit description =F6F3.4 protein
  Pfam annotation: Domain name=ORMDL; Domain location=2-94; Score =115.2; E_value=2.1e-31; Accession=PF04061.6; Description=ORMDL family
DISPITYHFFHWKKGTPFADDQGMYNTLTWWEQMDNGKQLTRNRKFLTAVPVVLYLIASHTTDYQHPMLFLNTLAVTVLVVAKLPXNMHKLRKF

SEQ ID NO: 97147 - protein, 157 aa, Setaria italica
  Transcript Sequence Number=SeqID_31173
  Gene Ontology: Cellular component=integral to membrane
  Homolog annotation: Hit_ID=Q9LNJ8; Match level="QueryCoverage=93%, HitCoverage=76%, E-value=2e-64, Identity=77%"; Hit description =F6F3.4 protein
  Pfam annotation: Domain name=ORMDL; Domain location=14-156; Score =299.3; E_value=8e-87; Accession=PF04061.6; Description=ORMDL family
MAKLYVQAVPPPDLNRNTEWFMYPGVWTTYILILFFSWILVLSVFGCAPGTAWTLVNLGHFAITYHFFHWKKGTPFADDQGMYNTLTWWEQMDNGKQLTRNRKFLTAVPVVLYLIASHTTDYQHPMLFLNTLAVTVLVVAKLPNMHKVRIFGINAGS

SEQ ID NO: 97148 - protein, 122 aa, Setaria italica
  Transcript Sequence Number=SeqID_31174
  Gene Ontology: Mol. function=RNA polymerase II transcription factor activity; Cellular component=nucleus; Biological process=regulation of transcription, DNA-dependent
  Homolog annotation: Hit_ID=Q259V6; Match level="QueryCoverage=77%, HitCoverage=20%, E-value=2e-44, Identity=93%"; Hit description =B0213E10.4 protein
MIITSKLAYFGAKKDLEPTPPFSKGAPKMPQVMVVARNFMDMVAALPASKLDMLYDSAFICEAVLRSLPPLAKKYALQMLYVLAPLTAAAMEEWVLDEYASKHRVAIDKLLQLRVFVEVRDR

SEQ ID NO: 97149 - protein, 120 aa, Setaria italica
  Transcript Sequence Number=SeqID_31175
  Subcellular localization annotation: CTP_CleavageSite=40; ConfidenceScore=5.17e-01
YRSRLHSSISLASPCHVSDESRLVVSETSRNRVLPVRGTAAAAVESHARSPANVFIWLGTSNLKDFCYGIRICLNRIPIRRRFKILEIISVPNKKYTLISIFVPHENRCGELGTPSVANR

SEQ ID NO: 97150 - protein, 420 aa, Setaria italica
  misc_feature (113)..(113): Xaa can be any naturally occurring amino acid
  Transcript Sequence Number=SeqID_31176
  Gene Ontology: Mol. function=RNA polymerase II transcription factor activity; Cellular component=nucleus; Biological process=regulation of transcription, DNA-dependent
  Homolog annotation: Hit_ID=Q259V6; Match level="QueryCoverage=100%, HitCoverage=93%, E-value=0.0, Identity=71%"; Hit description =B0213E10.4 protein
  Pfam annotation: Domain name=Tfb2; Domain location=13-366; Score =228.8; E_value=1.3e-65; Accession=PF03849.6; Description =Transcription factor Tfb2
MPQVLVVARNFMDMVAALPASKLDMLYDSAFICEAVLRSLPPLAKKYALQMLYVLAPVAAAAMEEWVLDEYASKHRVAIDKLLQLRVFVEVRDRRKEVSYKMNQKFQGNMQKXGVDGGSLPREPIPLSVTGRLPASADLEAYALDQWECFLLQLINSSQVEKGTSFSSSMMKTFQRGLLSSRDGEAPKLTENGFQFLLMETNAQLWYIMREYISSAEERGVDPTELISFLLELSFHKLGAAYSLNTLTDVERIAIRDLAELGLVKLQQGRKDSWFIPTQLATNLSASLSDSSSSKEGFVVLETNFRMYAYSTSKLHCEILRLFSRVEYQLPNLIVGAITKESIYGAFENGITAEQIISFLRQNAHPRVVDKIPVVPENVTDQIRLWETDRNRVEMIPSHLYEDFPSKEWFEQCCDHARDH

SEQ ID NO: 97151 - protein, 78 aa, Setaria italica
  Transcript Sequence Number=SeqID_31177
  Homolog annotation: Hit_ID=C0J4N7; Match level="QueryCoverage=98%, HitCoverage=9%, E-value=9e-18, Identity=72%"; Hit description =Respiratory burst oxidase protein B variant beta
PSSHRLLQFSQELKAEAMSIARQFSQDLTKRFGRTHSRAEGQGHQQQPTSGIESALAARAARRQRAQLDRTRSGAHKA

SEQ ID NO: 97152 - protein, 405 aa, Setaria italica
  misc_feature (53)..(53): Xaa can be any naturally occurring amino acid
  misc_feature (120)..(120): Xaa can be any naturally occurring amino acid
  misc_feature (169)..(169): Xaa can be any naturally occurring amino acid
  misc_feature (211)..(211): Xaa can be any naturally occurring amino acid
  misc_feature (238)..(238): Xaa can be any naturally occurring amino acid
  misc_feature (341)..(341): Xaa can be any naturally occurring amino acid
  Transcript Sequence Number=SeqID_31178
  Gene Ontology: Mol. function=catalytic activity; Cellular component =ribosome; Biological process=metabolic process
  Homolog annotation: Hit_ID=Q6K1V9; Match level="QueryCoverage=92%, HitCoverage=42%, E-value=1e-130, Identity=59%"; Hit description =Ribosomal protein-like
  Pfam annotation: Domain name=Plant_tran; Domain location=234-344; Score=236.9; E_value=4.9e-68; Accession=PF04827.6; Description=Plant transposon protein
MSRLFLLDSSSSDYDDDELILTTLHQAHTQYEAMNVPRWGVSVPGRRYIHRDXFSDAPTYGPSFFRRRFRMACSLFIRIVQAVEQHDKYFVQKRDINGRLGLSCLQKITAAYMMISHGVXADFMDHYIHIGESTVIQSLRRFVRAVVEVFGDEYLRTPNEHDTARLLSXAIDCMHWQWKNCPTAWQGMHTSHLQEPTIILEAVASHDLWIXHAFFGLPGSLNDINVLHRSHLFAKLAXGEAPAVNYTINYHDYMMGYYLADGIYPRWATFVKTISQPLGNKRKYFAKGQEATRKDVERAFGVLEARFAIIRGPARFWDKETLREIMTACVIMHNMIIEDEXNEDEDFHYDGVGQVVIPTPREVRNRTQELHDFIQVHHNIRDLQGHSQLQEDLIEHLWNRHADMY

SEQ ID NO: 97153 - protein, 80 aa, Setaria italica
  Transcript Sequence Number=SeqID_31179
IKLLLMLMLLMYFTTSAFCLLHFGCNDQRAMPHSSFRIIDAAQERKATGGKGCGINPGEQRMGTIKLINSHMIQHGYRIS

SEQ ID NO: 97154 - protein, 143 aa, Setaria italica
  Transcript Sequence Number=SeqID_31180
  Subcellular localization annotation: CTP_CleavageSite=39; ConfidenceScore=5.50e-01
RCLWHKTESFLPSSSSPSPALPKSPPTPRFLSCGDGWVSAAVLRQAFAGDEHPPRNTSSCLVIMDPKHSAEVSKHLDKQNQALMGTYRAMSHELHKLQVEEETIMRKLYELMSAEGLLPKRKKEKQQEEKDVESTLENKEWEP

SEQ ID NO: 97155 - protein, 150 aa, Setaria italica
  Transcript Sequence Number=SeqID_31181
  Subcellular localization annotation: CTP_CleavageSite=75; ConfidenceScore=5.52e-01
RSSRAGWAPGWRRPARAGGPDLVGGSSRRGEGRRRLNSLVSSSCVFRCKAGCSFSTIFLPLLVSVSECAQTVVVKCQTNFAFATDSVPSGGGNGGELVGERCLFHFFFGRLEWVGARETLIFSAFCCTSGHQVHFDFCLLTNRFAVRRGR

SEQ ID NO: 97156 - protein, 141 aa, Setaria italica
  misc_feature (8)..(8): Xaa can be any naturally occurring amino acid
  Transcript Sequence Number=SeqID_31182
  Gene Ontology: Mol. function=nucleic acid binding; Cellular component= nucleus; Biological process=regulation of transcription, DNA-dependent
  Homolog annotation: Hit_ID=Q67W65; Match level="QueryCoverage=99%, HitCoverage=7%, E-value=5e-68, Identity=86%"; Hit description =Transcription initiation factor TFIID subunit 1
IDPADKSXPFLGDIRSGSHQSCLETNMFRAPIFPHKVAPTDYLLVRSAKGVLSLRRIDKLYAVGQQEPHMEVFSPGTKNVQNYLLNRVLAYVYREFRARERPDGIPQIRADELPIQSPLTEAIVKKRLKHCADFKKGPKGL

SEQ ID NO: 97157 - protein, 61 aa, Setaria italica
  Transcript Sequence Number=SeqID_31183
AVQEQPARSEASGETGAAVAPQASSKLVLVVGGTGGVGKTEIPLLSVSVPSLQYFSSYTVK

SEQ ID NO: 97158 - protein, 122 aa, Setaria italica
  Transcript Sequence Number=SeqID_31184
SRTLLKESQGICFPKKERNFIHIGVLLIFFFNSVSCNRARGLVITHHHRLELTLGLFSKAIIGYNDLIPGLTHACCNALQVAAARPPRPARRRAELPVITRGGGWEWERSVTAAHARWCSPS

SEQ ID NO: 97159 - protein, 96 aa, Setaria italica
  Transcript Sequence Number=SeqID_31185
VSVSVERERWGREERERSSRSREQLNSRGPRKRRGVGRRPAPSRESQPASHPHRTAAAVRGAKALHLDQASSSRRFLRSPSPPRAAAEWRSAPGPG

SEQ ID NO: 97160 - protein, 92 aa, Setaria italica
  misc_feature (85)..(85): Xaa can be any naturally occurring amino acid
  Transcript Sequence Number=SeqID_31186
  Gene Ontology: Mol. function=phosphoribosylformylglycinamidine synthase activity; Cellular component=chloroplast; Biological process='de novo' IMP biosynthetic process
  Homolog annotation: Hit_ID=Q9M8D3; Match level="QueryCoverage=100%, HitCoverage=6%, E-value=1e-23, Identity=61%"; Hit description =Probable phosphoribosylformylglycinamidine synthase, chloroplastic
TCSFLEDEVSRSPYSVIVEVGPRMAFSTAFSTNAVSICKALSLTEVTRLERSRRYLLFLQPGSGPLDESQLNSFAALIHDRMTEXCIYPSKL

SEQ ID NO: 97161 - protein, 57 aa, Setaria italica
  Transcript Sequence Number=SeqID_31187
VWGDRPGSRREIRFLRLFYSRDRSNESRLLSKLRFPFSRSIVKEEEQIKQQEEEFRG

SEQ ID NO: 97162 - protein, 88 aa, Setaria italica
  Transcript Sequence Number=SeqID_31188
LSWCGAQRFGSLVHRFGEIGRVLAARFDFCACFIREVRPPQISSLPTLFLIPLLCLISSLLIFFRSIFCTCRSQQRVSIAKQAKISFF

SEQ ID NO: 97163 - protein, 99 aa, Setaria italica
  Transcript Sequence Number=SeqID_31189
  Homolog annotation: Hit_ID=B6TNH4; Match level="QueryCoverage=71%, HitCoverage=17%, E-value=7e-28, Identity=84%"; Hit description=Kelch motif family protein
INRKRRGANKAARGRISGVSKGEGIMLEGKSYLVSRSVPSSCEAETEWAYLANEVLSGKRPAPEDVGVEGLDEADGGGKRSKPPSPQPHTPDITEATAP

SEQ ID NO: 97164 - protein, 77 aa, Setaria italica
  Transcript Sequence Number=SeqID_31190
LGHCSVYIKLPNVHPPVRIQELSRELEAYDYGAIMFDLYNCTCVTVSNSTFICCTVLCPHSSLQARRKVPLVCLGLN

SEQ ID NO: 97165 - protein, 424 aa, Setaria italica
  misc_feature (360)..(360): Xaa can be any naturally occurring amino acid
  Transcript Sequence Number=SeqID_31191
  Gene Ontology: Mol. function=nucleotide binding; Cellular component =small-subunit processome; Biological process=rRNA processing
  Homolog annotation: Hit_ID=B9SAS6; Match level="QueryCoverage=78%, HitCoverage=38%, E-value=1e-87, Identity=51%"; Hit description=U3 small nucleolar RNA-associated protein, putative
  Pfam annotation: Domain name=Utp14; Domain location=65-424; Score= -172.5; E_value=0.0018; Accession=PF04615.5; Description=Utp14 protein
GPRLPTAMRRELDAMGPGGSDDEELSDAGAQDVYEYEEGVPEEEAGKNGRYDAVAKYEYEFDSDASEADEDVPSEEGEDMEEDDDGEDEEKQIRILQETTGMPREAFDGKKRKQPLELPLQHGDGPVTIHDLLDNIQGKPGYSKVRKRLQQQEKKTMIVAAPLPKVDREKLERGVANQELKRELTKWERNVKGNREAPTLFFENDANLGVNTVAAIASKFKPRSEFEKRMAEITRSSEIMEAHKNDGAKILELNKIDVEDVRERQNRLAKMRSLLFRHEMKAKRVKKIKSRTYHRMLKKDKLKVASAEFEADPEAIKDYAMKQEFKRAEERMTLKHKNTSKWAKRILKRGLSVQDEGTRXAAITAQLQQNALLTRKMNSMKDDSSSEESSDDDEDENDSEAKNLKTEGKKRFLKFLEEDKEIPN

SEQ ID NO: 97166 - protein, 92 aa, Setaria italica
  Transcript Sequence Number=SeqID_31192
PVPHCLGRLQGRQGEQRARGAASRDEVKRVAAQAPLPRTQSLPIPPRAEIQGPAALSQIEEGMAPQLTGASDSAAAAAVKLQFRHYHHHCLF

SEQ ID NO: 97167 - protein, 44 aa, Setaria italica
  Transcript Sequence Number=SeqID_31193
WARRVQGDQASIVAGAINFVKELEQLLQSLEAQKRRAGSCTEPH

SEQ ID NO: 97168 - protein, 96 aa, Setaria italica
  Transcript Sequence Number=SeqID_31194
MACAGASRKVSAVLYHYPCPDGAFAALAAHLYFSAAARPVRFFPNTVYDPIRSDSLPVDEIEDVYLLDFVGPPGFVEDIAPKVERVTILDHHKTVF

SEQ ID NO: 97169 - protein, 93 aa, Setaria italica
  misc_feature (12)..(12): Xaa can be any naturally occurring amino acid
  Transcript Sequence Number=SeqID_31195
  Gene Ontology: Mol. function=protein dimerization activity; Cellular component=nucleus; Biological process=regulation of transcription, DNA-dependent
  Homolog annotation: Hit_ID=Q653U3; Match level="QueryCoverage=100%, HitCoverage=10%, E-value=5e-41, Identity=89%"; Hit description=Auxin response factor 17
  Pfam annotation: Domain name=Auxin_resp; Domain location=54-92; Score= 2.1; E_value=0.00012; Accession=PF06507.5; Description=Auxin response factor
  Subcellular localization annotation: CTP_CleavageSite=53; ConfidenceScore=5.10e-01
VSAKRLVAGDSXLFIWNDNNQLLLGIRRANRPQTVMPSSVLSSDSMHIGLLAAAAHAASTNSRFTIFYNPRASPCEFVIPLAKYVKAVYHTRI

SEQ ID NO: 97170 - protein, 373 aa, Setaria italica
  Transcript Sequence Number=SeqID_31196
  Gene Ontology: Mol. function=oxidoreductase activity, acting on the aldehyde or oxo group of donors, disulfide as acceptor; Cellular component=chloroplast; Biological process=oxidation reduction
  Homolog annotation: Hit_ID=B9RNK3; Match level="QueryCoverage=94%, HitCoverage=80%, E-value=0.0, Identity=86%"; Hit description =Pyruvate dehydrogenase, putative
  Pfam annotation: Domain name=E1_dh; Domain location=31-338; Score =482.0; E_value=8.3e-142; Accession=PF00676.12; Description =Dehydrogenase E1 component
  Pfam annotation: Domain name=TPP_enzyme_C; Domain location=107-262; Score=-2.2; E_value=5.6e-06; Accession=PF02775.13; Description =Thiamine pyrophosphate enzyme, C-term
  Pfam annotation: Domain name=Transketolase_N; Domain location=75-333; Score=-200.2; E_value=0.013; Accession=PF00456.13; Description =Transketolase, thiamine diphosphate b
  Pfam module annotation: Pfam domain module=E1_dh::TPP_enzyme _C::Transketolase_N; Domain location=31-338::107-262::75-333
VSSDVLAGNKAAQATPAHPAVTREEALELYEDMVLGRIFEDMCAQMYYRGKMFGFVHLYNGQEAVSTGFIKLLNQADCVVSTYRDHVHALSKGVPPRSVMAELFGKATGCCRGQGGSMHMFSAPHNLIGGFAFIGEGIPVATGAAFAAKYRHEVLKESGPDGLDVTLAFFGDGTCNNGQFFECLNMAQLWKLPIVFVVENNLWAIGMSHLRATSDPEIYKKGPAFGMPGVHVDGMDVLKVREVAKEAIERARRGEGPTLVECETYRFRGHSLADPDELRKPDEKTHYAARDPITALKKYIIEQNLATEPELKSIEKNIDNVVEEAVEFADASPHPPRSQLLENVFADPKGFGIGPDGKYRCEDPKFTQGTAQV

SEQ ID NO: 97171 - protein, 82 aa, Setaria italica
  Transcript Sequence Number=SeqID_31197
  Gene Ontology: Mol. function=protein phosphatase type 2A regulator activity; Cellular component=protein phosphatase type 2A complex; Biological process=signal transduction
  Homolog annotation: Hit_ID=Q32SG1; Match level="QueryCoverage=100%, HitCoverage=15%, E-value=3e-24, Identity=69%"; Hit description =Protein phosphatase 2A regulatory subunit B'
NGHWNQAVQSLTLNVRKLFSDHDAGLFTECLRKYEEEKAKEKEVKLKQEATWKRLEEIASAKATSGTAVLVSRPLPRQSSAV

SEQ ID NO: 97172 - protein, 121 aa, Setaria italica
  Transcript Sequence Number=SeqID_31198
  Gene Ontology: Mol. function=protein phosphatase type 2A regulator activity; Cellular component=protein phosphatase type 2A complex; Biological process=signal transduction
  Homolog annotation: Hit_ID=Q32SG1; Match level="QueryCoverage=100%, HitCoverage=23%, E-value=4e-34, Identity=62%"; Hit description =Protein phosphatase 2A regulatory subunit B'
  Subcellular localization annotation: CTP_CleavageSite=71; ConfidenceScore=5.61e-01
MIKQFLGRLPKKPSKSGDKDPIGRPSPSVSHPPLGPRTADRTSNSSSQPPVISSSGLSYGSGMHVGNANSRVNMNGDSASSAFVSLPSFKDVPNSEKQSLFIKKLNLCCTQFDFTDPTKNI

SEQ ID NO: 97173 - protein, 418 aa, Setaria italica
  Transcript Sequence Number=SeqID_31199
  Gene Ontology: Mol. function=protein phosphatase type 2A regulator activity; Cellular component=protein phosphatase type 2A complex; Biological process=signal transduction
  Homolog annotation: Hit_ID=Q32SG1; Match level="QueryCoverage=99%, HitCoverage=80%, E-value=0.0, Identity=90%"; Hit description=Protein phosphatase 2A regulatory subunit B'
  Pfam annotation: Domain name=B56; Domain location=1-396; Score=831.1; E_value=6.6e-247; Accession=PF01603.12; Description=Protein phosphatase 2A regulatory B subunit (B56 family)
IKKLNLCCTQFDFTDPTKNIKEKEIKRQNLVELVDYIGSASGKFSEASMQEITKMVSANLFRTLSTPPRENKVDGFDLDEEEPVMDPAWSHLQIVYELFLRFIQSPETDAKLAKRYIDHSFVLRLLDLFDSEDPREREYLKMILHRVYGKFMVHRPYIRKAINNIFYQFIYETEKHNGIAELLEILGSIINGFALPLKEEHKLFLVRALIPLHKPKGISMYHQQLSYCITQFVEKDCKLADTVIRGLLKYWPITNSSKEVMFLGELEEILEATQPAEFQKCMVPLFRQIARCLNSSHFQVAERALFLWNNDHIESLIKQNSRVILPIIFPALERNTNGHWNQAVQSLTLNVRKLFSDHDAGLFTECLRKYEEEKAKEKEVKLKQEATWKRLEEIASAKATSGTAVLVSRPLPRQSSAV

SEQ ID NO: 97174 - protein, 64 aa, Setaria italica
  Transcript Sequence Number=SeqID_31200
MRDEAYGTCRVPIINGLKNINITGNGYLEQRLQAGLSGLQFMGYLPQIPVESGGNITNLIHNHM

SEQ ID NO: 97175 - protein, 97 aa, Setaria italica
  Transcript Sequence Number=SeqID_31201
  Subcellular localization annotation: CTP_CleavageSite=38; ConfidenceScore=5.16e-01
MQPVEVPASSWTSNGTQHVGPQNTISACPDVASDLRVSASMVPHFNSPDYSKLLSEQEMLLMNGLKNINITGNGYLEQRLQAGLSGLQFMGYLPQIT

SEQ ID NO: 97176 - protein, 79 aa, Setaria italica
  Transcript Sequence Number=SeqID_31202
LTCPMRDEAYGTCRVPIITGFESVSSNLCVCAFKTSYNSSHQTANRSIIFHSLFGPKTMAIPNLTAAIAMLQRPGVEDD

SEQ ID NO: 97177 - protein, 1037 aa, Setaria italica
  misc_feature (529)..(529): Xaa can be any naturally occurring amino acid
  Transcript Sequence Number=SeqID_31203
  Gene Ontology: Mol. function=telomeric DNA binding; Cellular component=telomerase holoenzyme complex; Biological process=nuclear -transcribed mRNA catabolic process, nonsense-mediated decay
  Homolog annotation: Hit_ID=B9SJ73; Match level="QueryCoverage=91%, HitCoverage=89%, E-value=0.0, Identity=48%"; Hit description=Smg-7, putative
  Pfam annotation: Domain name=EST1; Domain location=67-191; Score =108.8; E_value=1.8e-29; Accession=PF10374.1; Description=Telomerase activating protein Est1
MMTVPMDSATSASSSRDLAERLFNKNNELEDQLRKSVQSKLPSDPNTWIQMRDNFEKIILTDNDFSEQNEVEYLLWQLHYKRIEDFRRSISAASSAASQSGKNNANPDRVKRIKSAFKSFLSEATGFYHDLMLKIKSNCGLPLGYFPEGFENASNSDKKTAQLRKGLISCHRCLIYLGDLARYKSLHGDGDSASREYAAASSYYKEAASIYPSSGNPHHQLAILASYSGNEVVAVYRYFRSLAADTPFSTARDNLIILFEKNRQSYGQLPDNNKVPIAKILPPRSSGRGRGRGEVRFQPKDVNTETVARERECNIPDTLKTFYIRFVRLNGILFTRTSLETFGELFSSVSNDLQILLSSGLEEELNFGSDAAENALSVVRLTAILIFTVHNVKKEPDSQSYAEIVQRRVLLQSAFTAAFEFVGRILRRCSELRDVASSFYLPAILVYIEWLASHPELAVDSEMEEKHANARSFFWNQCIAFMNKLVLTNLAAVDGDDDEACFSNMSMYEEGETGNRLALWEDLELRGFXPLVPAHIILDFSSKHAFGNVGSTKEKKARVQRIFAAGKSLLNFVQIDQLRIFFDPSSKKFVMAKNPPVSKVDAPLHESPDVLKTNAIEMEHEAARRFDSVSGMSAIQSKVQLCPEGDDDEEIVFKPTASEKFPKAPSDLSVNGYTHPVPVSAPGWPTNANLVSVQSTASMSAAGNYNNTASVSVAGNYNINQSLPISSIGWAVNGEQKVIPSAASRFELMQPVEVPASSWTSNGTQHVGPQNTISACPDVASDLRVSASMVPHFNSPDYSKLLSEQEMLLMNGLKNINITGNGYLEQRLQAGLSGLQFMGYLPQIPVESGGNITNLIHNHMKITGETIPSTFDSVVPSIAPSGGVPLKFTETPLAASKKNPVSRPSKPVGPPPGFNHVTPKRQDDSISVEKLQSPQVDDYSWLDGYQPSMDHVHNLRAVYPGVSASSTAFTTTFPFAGKQQVSGVHPQGAIEQTWQDFHLFEPAKQNMFQNFPQRSQQSGQMAEQEPTNSIWSNSYHV

SEQ ID NO: 97178 - protein, 85 aa, Setaria italica
  Transcript Sequence Number=SeqID_31204
KAIKCGYQLVPLYAIYLRIKVRGTTSMCPSRFSSMITVSFYDFIMLCTVWKQRVGRTCCKLQLNIWNSLSWYLCGTYINGFRLSL

SEQ ID NO: 97179 - protein, 83 aa, Setaria italica
  Transcript Sequence Number=SeqID_31205
  Gene Ontology: Mol. function=protein binding
  Homolog annotation: Hit_ID=Q6Z103; Match level="QueryCoverage=80%, HitCoverage=9%, E-value=2e-12, Identity=53%"; Hit description=Myosin heavy chain homolog-like protein
ANVGRSEMAELKHLTSLRKLTITWSEIPSILDGDSDTVKGRRAELIEKWTSFELPQELLKLDLRCYPKNELKLKKHQNLKKLY

SEQ ID NO: 97180 - protein, 91 aa, Setaria italica
  Transcript Sequence Number=SeqID_31206
  Gene Ontology: Mol. function=protein kinase activity; Cellular component=integral to membrane; Biological process=protein amino acid phosphorylation
  Homolog annotation: Hit_ID=Q69MM9; Match level="QueryCoverage=100%, HitCoverage=11%, E-value=6e-38, Identity=78%"; Hit description =Putative receptor kinase 5
QDSRLKIIHRDLKASNILLDEDMRPKIADFGMARMFSDNQQNANTKRVAGTYGYMAPEYAMRGVFSAKSDVYSFGVLVLELVSGVKISSTD

SEQ ID NO: 97181 - protein, 106 aa, Setaria italica
  Transcript Sequence Number=SeqID_31207
MDEKEFRRMLELFPVVRSRDYCAEPGTSSRGTRQQSQVQEATKGNKKDLSGAEDLFMQKLKMAAEKKIGATKAEFFCKAFEEAHEKLVYKELNLDAAKKFLSAYES

SEQ ID NO: 97182 - protein, 110 aa, Setaria italica
  Transcript Sequence Number=SeqID_31208
  Gene Ontology: Mol. function=ATP-dependent helicase activity; Cellular component=intracellular; Biological process=cellular metabolic process
  Homolog annotation: Hit_ID=B9SXG0; Match level="QueryCoverage=100%, HitCoverage=9%, E-value=2e-18, Identity=42%"; Hit description=DNA helicase hus2, putative
KSDNIYGSISSVLKANHSKANELRSGKHSIVLKFPAPDKASKMGKLDASLFPQINKTVQQQSEVDENLSSMLFDALLSLREQIMDECNEGYHAYHIFKKDSLKEMSIRVP

SEQ ID NO: 97183 - protein, 80 aa, Setaria italica
  Transcript Sequence Number=SeqID_31209
TCCYMYDENGEEQQHPKIAGAATSYGVDTTWYMDSGASDHITGDLQAGRQWWCGGSTVKPAGHQRFHGANLLRSTMLVGR

SEQ ID NO: 97184 - protein, 127 aa, Setaria italica
  Transcript Sequence Number=SeqID_31210
MGSGMGAYGGAVRPVESAAGETMLLWGLGQPTAHRNNALVRQAAHSFELDACGRRLSLLQSPSSMSTPGVTGAVVWDSGVVLAKFLEHAVDSQQLLLRDARAVDLGSGCGLVGCVAALLGAHVVLTD

SEQ ID NO: 97185 - protein, 47 aa, Setaria italica
  Transcript Sequence Number=SeqID_31211
SLKDTYRYQFTTDTLEFVLLFSELPHVTTFESSLPSVKLLPYLKKKK

SEQ ID NO: 97186 - protein, 88 aa, Setaria italica
  Transcript Sequence Number=SeqID_31212
RRRVVEAAAPRRWGRKRNPMGSPAATGAPAGPCTRHAPAGRPSIAGHERGIQTDKEADLLDGSRRIDRHRRRQSAAGGIFGPVRSRRL

SEQ ID NO: 97187 - protein, 60 aa, Setaria italica
  Transcript Sequence Number=SeqID_31213
DEVVARVQALHIKAMTTANSSTANRYVVKFATKCFTDEEGGSLAIEGEAMAVVPTLELSS

SEQ ID NO: 97188 - protein, 182 aa, Setaria italica
  Transcript Sequence Number=SeqID_31214
  Homolog annotation: Hit_ID=O04624; Match level="QueryCoverage=65%, HitCoverage=13%, E-value=1e-21, Identity=46%"; Hit description=A _IG002N01.30 protein (Fragment)
AHHYVKTGNTEQFQKITYLSPYAEAKGLTPGSPEFDKRAVAVMHEILSFMLEKRLVTDHLTHFRREFVMPQKLMRLLLKHYGIFYVSERGKRFSVFLTEAYDGTELIEKCPLVRWREKLLQLTGYRGRMKNLGKFDASSDSEDYLLGGGDDAVLDIESENSDDILDGCSISYDSEMDFRGDT

SEQ ID NO: 97189 - protein, 229 aa, Setaria italica
  misc_feature (157)..(157): Xaa can be any naturally occurring amino acid
  misc_feature (215)..(215): Xaa can be any naturally occurring amino acid
  Transcript Sequence Number=SeqID_31215
  Gene Ontology: Mol. function=ATP-dependent helicase activity; Cellular component=intracellular
  Pfam annotation: Domain name=HRDC; Domain location=1-63; Score=39.7; E_value=1.2e-08; Accession=PF00570.15; Description=HRDC domain
LLNVRMKLAQDIGTAPYAICGDQTIRNFAKMRPSTGARLANIDGVNQHFISRFSGIFIQNITQLSKELNLPLDNSPLPPPTTTNPAVENIAGLPKPVQNNLPGILGDAKLTAWELWQKQEFSFLKIAYFRRAVPIKEQTVIAYILDAAREGCEVDWXRFCREVGLTPEIASGIQLAIAKAGSRDKLKPIKEELPENVTYDMIKTFLTIEGRGLSXQVFGSAPASSHANR

SEQ ID NO: 97190 - protein, 97 aa, Setaria italica
  Transcript Sequence Number=SeqID_31216
  Gene Ontology: Mol. function=helicase activity
  Homolog annotation: Hit_ID=Q7XUD5; Match level="QueryCoverage=98%, HitCoverage=10%, E-value=3e-34, Identity=71%"; Hit description =OSJNBa0088A01.10 protein
VLIGDECQLPATVKSKVCTDALFGRSLFERLSSLGHRKHLLNVQYRMHPSISIFPNTSFYDGKISDAPIVMQNGHQKMYLPGSMFGPYSFVNIGDGN

SEQ ID NO: 97191 - protein, 204 aa, Setaria italica
  Transcript Sequence Number=SeqID_31217
  Gene Ontology: Mol. function=metal ion binding; Cellular component =plasma membrane
  Homolog annotation: Hit_ID=B9SJF7; Match level="QueryCoverage=97%, HitCoverage=17%, E-value=2e-32, Identity=42%"; Hit description=Ran GTPase binding protein, putative
  Pfam annotation: Domain name=DZC; Domain location=155-190; Score =86.2; E_value=1.2e-22; Accession=PF08381.3; Description=Disease resistancezinc fingerchromosome co
MSERLPAGACDAKNGRLMGALPPEIGRENQMRYDPSSIQYPQTPASVASARFGGLPPQVHHASEYNETVMVPQEGRGEHLNGFREFSSVQQRANGGTIGYRHRPDDHDRKETDRFQINLNNLNMRSSGSPNNQVEAEWIEQYEPGVYLTLVSLRDGTKELKRVRFSRRRFGEHQAESWWNDNREKVYDKYNVCGTDRLSSVMTS

SEQ ID NO: 97192 - protein, 102 aa, Setaria italica
  Transcript Sequence Number=SeqID_31218
  Gene Ontology: Mol. function=nucleoside-triphosphatase activity; Cellular component=male germ cell nucleus; Biological process=double- strand break repair
  Homolog annotation: Hit_ID=B6U6B8; Match level="QueryCoverage=100%, HitCoverage=21%, E-value=9e-51, Identity=99%"; Hit description =Thyroid receptor-interacting protein 13
AISGSEPSDSIRVVNALLTQMDKLKSWPNVIILTTSNITTAIDIAFVDRADIKAYVGPPTLQARYEILRSCIQELLRVGILTYPQGGSVPCILNYSTLKEKK

SEQ ID NO: 97193 - protein, 69 aa, Setaria italica
  Transcript Sequence Number=SeqID_31219
CSRALYLPVAWFHFSFTNGGHVHSENNDTSSCICMQTLLYLSQNISTWFPLFHCFEDAFQHLRMQDREL

SEQ ID NO: 97194 - protein, 70 aa, Setaria italica
  Transcript Sequence Number=SeqID_31220
  Gene Ontology: Mol. function=metal ion binding
  Homolog annotation: Hit_ID=Q306K1; Match level="QueryCoverage=97%, HitCoverage=41%, E-value=7e-23, Identity=70%"; Hit description=LIM domain protein
  Pfam annotation: Domain name=LIM; Domain location=12-59; Score=42.2; E_value=2e-09; Accession=PF00412.14; Description=LIM domain
MNSNMLIATRPLILQVTVNNTMYHKSCFKCCHGGCTISPSNYIAHEGKLYCKHHHIQLIKEKGNFSQLEN

SEQ ID NO: 97195 - protein, 108 aa, Setaria italica
  misc_feature (21)..(21): Xaa can be any naturally occurring amino acid
  Transcript Sequence Number=SeqID_31221
  Gene Ontology: Mol. function=oxidoreductase activity, acting on paired donors, with incorporation or reduction of molecular oxygen, 2-oxoglutarate as one donor, and incorporation of one atom each of oxygen into both ...
  Gene Ontology: Mol. function=donors; Biological process=protein metabolic process
  Homolog annotation: Hit_ID=B6U853; Match level="QueryCoverage=100%, HitCoverage=26%, E-value=9e-42, Identity=80%"; Hit description =Oxidoreductase
LYFRGIRCENHVNSETQHEEXMYDYTHIPGQAVLHRGRHRHGARATSSGLRINLLLWCRSSVFREMKKYQKDFPSWCGECQREKRERQSQYVKATKMAFLRGAGGAMI

SEQ ID NO: 97196 - protein, 121 aa, Setaria italica
  misc_feature (81)..(81): Xaa can be any naturally occurring amino acid
  Transcript Sequence Number=SeqID_31222
  Gene Ontology: Mol. function=metal ion binding
  Homolog annotation: Hit_ID=Q9M7F3; Match level="QueryCoverage=77%, HitCoverage=89%, E-value=3e-43, Identity=67%"; Hit description=LIM transcription factor homolog
  Pfam annotation: Domain name=LIM; Domain location=36-92; Score=69.8; E_value=1e-17; Accession=PF00412.14; Description=LIM domain
SFVRVLPTKVVKPERNVENENAIKVSSVFAGTREKCVGCSKTVYPIERVTVNNTMYHKSCFKCCHGGCTISPSNYIAHEGXLYCKHHHIQLIKEKGNFSQLENDHEKTSQAGSLEDEEAEY

SEQ ID NO: 97197 - protein, 108 aa, Setaria italica
  Transcript Sequence Number=SeqID_31223
WRGRHLYCDISSIRVRQQLGIHCIFSFLLFFSCVINQSSMQRRQPCVVYRAAGRLVLLLCAATGQPLSYMNHHHLFVSCVYGCIIVLAYGPSVKTTPCLVTKRLSPAF

SEQ ID NO: 97198 - protein, 264 aa, Setaria italica
  misc_feature (101)..(101): Xaa can be any naturally occurring amino acid
  misc_feature (228)..(228): Xaa can be any naturally occurring amino acid
  Transcript Sequence Number=SeqID_31224
  Homolog annotation: Hit_ID=B6SY37; Match level="QueryCoverage=95%, HitCoverage=43%, E-value=1e-87, Identity=71%"; Hit description=VHS and GAT domain protein
LLRSARDGTVAQSNQPSAPRNERPYPSPLLPPPPASKRPVYTEASNIDYLSGDSYKSEKVSDDFINPTAPANISTSSHLKTEAYPPPSYGSRSESVPDDLXPTAPSFSAPSRPTSEEPTRTSVKQQESLPDDDFINPTALPSFSSSSATKGYEDSREDIPKAPWEPQAAAGSLPPPPARYGQRQQYFEQNVYSGGSNGGGYDGLVTQTENLSLNQNEKSTSRPTASRXLKPEDSLFKDLVDFAKTKPSSPSNPVFKCSYFTVII

SEQ ID NO: 97199 - protein, 130 aa, Setaria italica
  Transcript Sequence Number=SeqID_31225
  Gene Ontology: Mol. function=oxidoreductase activity, acting on paired donors, with incorporation or reduction of molecular oxygen, 2-oxoglutarate as one donor, and incorporation of one atom each of oxygen into both ...
  Gene Ontology: Mol. function=donors; Biological process=protein metabolic process
  Homolog annotation: Hit_ID=B6U853; Match level="QueryCoverage=100%, HitCoverage=33%, E-value=1e-59, Identity=85%"; Hit description =Oxidoreductase
DVELGFHVDDSEVTLNVCLGKQFSGGELYFRGIRCENHVNSETQHEEMYDYTHIPGQAVLHRGRHRHGARATSSGLRINLLLWCRREMKKYQKDFPSWCGECQRTHTERQSQYVKATKMAFLRGAGGAMI

SEQ ID NO: 97200 - protein, 394 aa, Setaria italica
  misc_feature (147)..(147): Xaa can be any naturally occurring amino acid
  Transcript Sequence Number=SeqID_31226
  Gene Ontology: Mol. function=heat shock protein binding; Biological process=protein folding
  Homolog annotation: Hit_ID=B4G111; Match level="QueryCoverage=100%, HitCoverage=100%, E-value=1e-179, Identity=77%"; Hit description =Chaperone protein dnaJ 10
  Pfam annotation: Domain name=DnaJ; Domain location=6-68; Score=121.5; E_value=2.8e-33; Accession=PF00226.23; Description=DnaJ domain
MVRETGYYDVLGVTPAATEAEIKKAYYIKARQVHPDKNPNDPLAAARFQELGEAYQVLSDPTQRQSYDSYGKSGISTEAIIDPAAIFAMLFGSELFEDYIGQLAMASMASLDGFSEDEQINERRLQEQMRVVQKEREEKLAEALKNXLHLYVQGNKEEFIQHAEAEVTRLSNAAYGVDMLSTIGYVYSRQAAKELGKKALYLGVPFIAEWFRNKGHFIKSQVTAATGAIALMQLQEDLKKHLSAECHYTEEELEAYMQTHKSVMVDSLWKLNVADIEATLSHVCQMVLQDSSIRKEELRARAKGLKTLGKIFQRVKLNATDGEPAAVKNTINNSDDNDGSSPDSSPKSPRDQIFDANPPYAQSPYVEAPQFGGYCSYNFPMPAAPPGAQRDPIP

SEQ ID NO: 97201 - protein, 198 aa, Setaria italica
  misc_feature (169)..(169): Xaa can be any naturally occurring amino acid
  Transcript Sequence Number=SeqID_31227
  Gene Ontology: Mol. function=metal ion binding
  Homolog annotation: Hit_ID=Q9M7F3; Match level="QueryCoverage=99%, HitCoverage=99%, E-value=1e-102, Identity=91%"; Hit description=LIM transcription factor homolog
  Pfam annotation: Domain name=LIM; Domain location=110-166; Score =72.9; E_value=1.2e-18; Accession=PF00412.14; Description=LIM domain
  Pfam annotation: Domain name=LIM; Domain location=12-68; Score=63.8; E_value=6.6e-16; Accession=PF00412.14; Description=LIM domain
  Pfam module annotation: Pfam domain module=LIM::LIM; Domain location =110-166::12-68
MATSFQGTTTKCTACDKTVYLVDKLTADNRVYHKACFRCHHCKGTLKLANYNSFEGVLYCRPHFDQLFKRTGSLDKSFEGTPKVVKPERNVENENAIKVSSVFAGTREKCVGCSKTVYPIERVTVNNTMYHKSCFKCCHGGCTISPSNYIAHEGKLYCKHHHIQLIKEXRGTSASSRMIMRRHHRLGRWRMKKQSINL

SEQ ID NO: 97202 - protein, 583 aa, Setaria italica
  Transcript Sequence Number=SeqID_31228
  Gene Ontology: Cellular component=intracellular; Biological process =intracellular protein transport
  Homolog annotation: Hit_ID=B6SY37; Match level="QueryCoverage=100%, HitCoverage=100%, E-value=0.0, Identity=82%"; Hit description=VHS and GAT domain protein
  Pfam annotation: Domain name=GAT; Domain location=184-281; Score =104.7; E_value=3.1e-28; Accession=PF03127.6; Description=GAT domain
  Pfam annotation: Domain name=VHS; Domain location=2-136; Score=108.0; E_value=3.1e-29; Accession=PF00790.11; Description=VHS domain
  Pfam module annotation: Pfam domain module=GAT::VHS; Domain location =184-281::2-136
MSAAVACAERATNDMLIGPDWAVNIELCDIINMDPGQAKDTIKLLKKRLGSKNSKVQILTLYVLETLSKNCGDVVHQLIVERDILSEMVKIVKKKPDLNVREKILSLIDTWQVAFGGPSGRYPQYHAAYQELRAAGVDFPPREENSVPLFTPPQTQPLRQPHLYPPPGQSYEDAAIEASLQSAPSVPALSLSEIQSARGIVDVLDEMLNALDHRHPEGVREEVIIDLVGQCRSYQSRVMDLVNSTGDESLLFQALGLNDELQRVVQRHDDIAKGIPPGTGATAPASANTNQGTAPPRSTAVSFSPLLNVHEDDEPEDEFSVLSRRSARDGTVAQSNQPSAPRNERPYPSPLLPPPPASKRPVYTEASNIDYLSGDSYKSEKVSDDFINPTAPANISTSSHLKTEAYPPPSYGSRSESVPDDFVNPTAPSFSAPSRPTSEEPTRTSVKQQESLPDDDFINPTALPSFSSSSATKGYEDSREDIPKAPWEPQAAAGSLPPPPARYGQRQQYFEQNVYSGGSNGGGYDGLVTQTENLSLNQNEKSTSRPTASRQAKPEDSLFKDLVDFAKTKPSSPSKPANSRRTR

SEQ ID NO: 97203 - protein, 76 aa, Setaria italica
  Transcript Sequence Number=SeqID_31229
  Gene Ontology: Mol. function=protein serine/threonine kinase activity; Biological process=protein amino acid phosphorylation
  Subcellular localization annotation: CTP_CleavageSite=43; ConfidenceScore=5.23e-01
MRARTLSSLLLLAALAAVSFTPSASTDTIYRNTTLTGNQTIVSAGGVYALGFFTPDGAAGRTYLGIWYASIPGPTT

SEQ ID NO: 97204 - protein, 61 aa, Setaria italica
  Transcript Sequence Number=SeqID_31230
TEENMDLFLRMNNNIRAISERMRETRGTMGQMPSLPVHVNEEHLSSLVHLHRGGKLDMKLS

SEQ ID NO: 97205 - protein, 267 aa, Setaria italica
  misc_feature (177)..(177): Xaa can be any naturally occurring amino acid
  Transcript Sequence Number=SeqID_31231
  Gene Ontology: Mol. function=DNA binding
  Homolog annotation: Hit_ID=O22705; Match level="QueryCoverage=70%, HitCoverage=69%, E-value=3e-25, Identity=36%"; Hit description =F8A5.19 protein
  Subcellular localization annotation: CTP_CleavageSite=53; ConfidenceScore=5.38e-01
VIITFSVITKLQGQGLPYTSSYNPPHHHNHMLSFTSSTPDPTLMPPATTSSLPSAPKKYKFVTASPADWTAHEVATLEEGLIRYAHEPNITKYIKIAAMLPAKTIRDVALRCCWTPGNETRRREPDDYYAGNMTYLKNKMAASTSAANVPMPPTNSAFLLPLSLHHPSQNSLVPMEXPVLDSAIQHLLEENNQLLSQIAANIKTFKTEENMDLFLRMNNNIRAISERMRETRGTMGQMPSLPVHVNEEHLSSLVHLHRGGKLDMKLS

SEQ ID NO: 97206 - protein, 67 aa, Setaria italica
  Transcript Sequence Number=SeqID_31232
  Subcellular localization annotation: CTP_CleavageSite=56; ConfidenceScore=5.68e-01
CSTAPPASSTAETTAGVPPPPPPQSPRTPPSLGFRPAPPPRGEKAPAPAPAGSNRRAATVWWVLSGV

SEQ ID NO: 97207 - protein, 183 aa, Setaria italica
  misc_feature (172)..(172): Xaa can be any naturally occurring amino acid
  Transcript Sequence Number=SeqID_31233
  Homolog annotation: Hit_ID=Q2HVT6; Match level="QueryCoverage=95%, HitCoverage=20%, E-value=3e-57, Identity=63%"; Hit description =Nuclear pore complex protein Nup205 , related (Fragment)
RFICPAGADSDAVTCLDIISSKQLPNAACNSLLFKLVMAILRNESSETLRRRQYALLLSYFQYCRSILDSDVPPSVLRFLLLEEQEADDDDFTLQKVLKEHNELARGNFSIIRKEAQAIVDLVTKDAIHGSEAGKAISFYVLDALISVDHEKYFLNQLQSRGILRSCLSDVXNLLSKDSSFTS

SEQ ID NO: 97208 - protein, 183 aa, Setaria italica
  misc_feature (86)..(86): Xaa can be any naturally occurring amino acid
  Transcript Sequence Number=SeqID_31234
  Homolog annotation: Hit_ID=Q2HVT6; Match level="QueryCoverage=80%, HitCoverage=16%, E-value=2e-44, Identity=62%"; Hit description =Nuclear pore complex protein Nup205 , related (Fragment)
QIGCNSLLFKLVMAILRNESSETLRRRQYALLLSYFQYCRSILDSDVPPSVLRFLLLEEQEADDDDFTLQVPVLKEHNELARGNFXSIIRKEAQAIVDLVTKDAIHGSEAGKAISFYVLDALISVDHEKYFLNQLQSRGILRSCLSDVTTYLSKDSSFTSESSQRFCKVDAQLSLLLRISHHY

SEQ ID NO: 97209 - protein, 1315 aa, Setaria italica
  misc_feature (59)..(59): Xaa can be any naturally occurring amino acid
  misc_feature (72)..(72): Xaa can be any naturally occurring amino acid
  Transcript Sequence Number=SeqID_31235
  Gene Ontology: Mol. function=protein binding; Cellular component =nuclear envelope
  Homolog annotation: Hit_ID=Q2HVT6; Match level="QueryCoverage=59%, HitCoverage=98%, E-value=0.0, Identity=53%"; Hit description=Nuclear pore complex protein Nup205 , related (Fragment)
CILPDFPEGDAQALVAYLSVLQKVVENGNPIERRKWFPDIEPLFKLLSYENVPPYLKGXLRNSIAAFIKVSXPLKDTIWNYLEQYDLPVVTAPLGHHTATQIYDMRFELNEVEARRESYPSTISFLKLINALIAEERNISDKGRRFMGIFKFVYEDVFGPFSQRAYADPQEKWELALACLEHFRMVLSMYDINDDDIYASVNTSAPSSIERQLPLLELLKDFMSGKAAFRNIMNIILVGVDSLINERTTQTYGILLEKTVHLSLEIFILVMERDLALADVFRPLYQPLDVVLAQNHRQIVALLEFVRYDYLPQIQQCSIKIMAILSSRIVGLVQLLLKADVGKTVIEDYAACLEFRFDDFQVIEDTKDDVGVLILQLLLDNICHPAPNITHLLLRFDVNGSIERTVLKPKSHYSCLKVILDNLEKVTKPDINALLHEFSFQLLYELCLDPLTCGPVMDLLSTKKYQFFSKHVGTIGVAPLPKRNTNQSLRISMLHERAWLLKMLALALHLSDVSSSVYREACVAILYHTFGQCANNFQSTSLFHSRDASTGISNESGNRNKVLDLLEVLQFRCPDTSMKYPQLLSNLGVEPKIEEILRNSATSEFGGVYYYSERGDRLIDLDAFHEKLLQITQELNSQLSESEKGEVKESVHHLLKWAWRYNKNLEEQAAQLHMLTGWSQIVEVAVSRRMSLLEDRSKLLFELLDASLSATTSPDCSVKMAYVLTNVSLTCMAKLRDERFICPAGADSDAVTCLDIISSKQLPNAACNSLLFKLVMAILRNESSETLRRRQYALLLSTSATESETVVLIQYCRSILDSDVPPSVLRFLLLEEQEADDDDFTLQKVLKEHNELARGNFSIIRKEAQAIVDLVTKDAIHGSEAGKAISFYVLDALISVDHEKYFLNQLQSRGILRSCLSDVTTYLSKDSSFTSESSQRFCKVDAQLSLLLRISHHYGKHGSQILLSMGALQNLSSCNLMGVQKKGNSRAISNIVKERAGEIDKKRSLIAPVLRIVTSFTSLVDSADFLEVKNKIVREIVDFTKQHQSVFNSILRENMSGANLFTLERLSLVVSVLSKVWAYEENEECSYIQDLFALMHSLFSLDFGSLNFMQSPNMIENQKSELRAFGLCFSLISYLYVLATKKNMRFQVSYDHNSDQQQPTLQMVSDLLSSITLAIERVAEEKYMLLNKVRDLNELSRKEVDEIIKLCMKQDCISPNDNIRKRRYIAMIDLCCMAGNRDQLITLLLQIAECAIIILLVHFQDESCAKDLSPFSDDLLPVLERLEHLKEDKVGRSSLKLFHRSVTTLKEMTIRCMTV

SEQ ID NO: 97210 - protein, 143 aa, Setaria italica
  Transcript Sequence Number=SeqID_31236
  Homolog annotation: Hit_ID=Q84NP6; Match level="QueryCoverage=46%, HitCoverage=13%, E-value=1e-25, Identity=72%"; Hit description=Leaf senescence related protein-like
APPAKGAESAPVEGTDRPEPPPHQQQVEKAEVEAVAKPGATAGSSLQDAPLIEEVVQSGGAAQGGGSAQEERQEGTCDLYKGHWVYDETRAPIYKESGCSFLTEQVTCTRNGRRDDDYQKWRWQPDGCDLPRFDAKLLLEKLR

SEQ ID NO: 97211 - protein, 124 aa, Setaria italica
  misc_feature (70)..(70): Xaa can be any naturally occurring amino acid
  Transcript Sequence Number=SeqID_31237
  Homolog annotation: Hit_ID=Q84NP6; Match level="QueryCoverage=95%, HitCoverage=24%, E-value=5e-37, Identity=59%"; Hit description=Leaf senescence related protein-like
MFQEYNATVEFYWAPFLVESNSDDPDIHSISDRMIKPTSIAKHAANWEGVDYLIFNTYIWWMNTPQMKTXHGGSFSRKHVKYDEVERVVAYRKVLKTWSRWVETHIDPKRTTVLFMSVSPVHMQ

SEQ ID NO: 97212 - protein, 380 aa, Setaria italica
  Transcript Sequence Number=SeqID_31238
  Homolog annotation: Hit_ID=Q84NP6; Match level="QueryCoverage=91%, HitCoverage=70%, E-value=1e-132, Identity=62%"; Hit description=Leaf senescence related protein-like
  Pfam annotation: Domain name=DUF231; Domain location=189-364; Score =242.5; E_value=1.1e-69; Accession=PF03005.7; Description=Arabidopsis proteins of unknown function
FTWDVTGGSAQEERQEGTCDLYKGHWVYDETRAPIYKESGCSFLTEQVTCTRNGRRDDDYQKWRWQPDGCDLPRFDAKLLLEKLRNKRLMFVGDSLNRNQWESMVCLVQAEAPWDKKSLVKNGSLNVFHLQEYNATVEFYWAPFLVESNSDDPDIHSISDRMIKPTSIAKHAANWEGVDYLIFNTYIWWMNTPQMKTVHGGSFSRKHVKYDEVERVVAYRKVLKTWSRWVETHIDPKRTTVLFMSVSPVHMQSEGWGSPNAVKCFSETQPAINYTKKLEVGTDWDLFATAQRVTRSMKKVPVHFINITALSEIRKDAHTSVHTLRQGKLLTAEQKANPRKFADCIHWCLPGVPDTWNEFVYGHIMSSPPQLQMPEDQPHR

SEQ ID NO: 97213 - protein, 164 aa, Setaria italica
  Transcript Sequence Number=SeqID_31239
  Gene Ontology: Mol. function=hydrogen ion transporting ATP synthase activity, rotational mechanism; Cellular component=chloroplast ribulose bisphosphate carboxylase complex; Biological process=carbon utilization by ...
  Gene Ontology: Biological process=fixation of carbon dioxide
  Homolog annotation: Hit_ID=Q0JIM3; Match level="QueryCoverage=62%, HitCoverage=6%, E-value=3e-11, Identity=33%"; Hit description =Photosystem I P700 chlorophyll A apoprotein
FSEDSYVLAQLQDEVSLPAKRRDFRKTDFLSNHKQDSLSPLSLPVPPCVDKSSSEDRRGADAARPQLVEDRWSALRAMRHAQGMCQCCAEKWSKDHGCANKVQLHALDEVLDVLLLEEESIQNQHSKSVDDHLFLTLSVVAMYGVLALRTMSMQGTREQKINKG

SEQ ID NO: 97214 - protein, 97 aa, Setaria italica
  misc_feature (25)..(25): Xaa can be any naturally occurring amino acid
  Transcript Sequence Number=SeqID_31240
  Gene Ontology: Cellular component=cytosol
  Homolog annotation: Hit_ID=C0H968; Match level="QueryCoverage=82%, HitCoverage=28%, E-value=7e-17, Identity=51%"; Hit description=MEMO1
SHSRIRFNYTYYEKKHGAIHKSCEXYRMGMEIIETGDPVAFKQYLQEYENTICGRHPISVFLHMLKHCSTKIKIGFVRYEQSSRCIAHTAVSHVLAL

SEQ ID NO: 97215 - protein, 299 aa, Setaria italica
  Transcript Sequence Number=SeqID_31241
  Gene Ontology: Cellular component=cytosol
  Homolog annotation: Hit_ID=C0H968; Match level="QueryCoverage=91%, HitCoverage=93%, E-value=2e-87, Identity=55%"; Hit description=MEMO1
  Pfam annotation: Domain name=Memo; Domain location=6-286; Score =291.7; E_value=1.6e-84; Accession=PF01875.9; Description=Memo-like protein
MERVRRAVHAGSWYTNNARKLEEELDGWLGAAGLTKSPDVRAVIAPHAGYSYSGRCAAYAFGNIDPTNISRVFLLGPSHHYYTPKCALTRATVYSTPIGDLPVDQEVIEELSATGKFEFMDLRVDEAEHSMEMHLPYLSKVFQGHTVKVVPILVGALSSQSEAMFGQLLSKYVDDPNNFFSVSSDFCHWGSRFNYTYYEKKHGAIHKSIEALDRMGMEIIETGDPVAFKQYLQEYENTICGRHPISVFLHMLKHCSTKIKIGFVRYEQSSQCKNMRDSSVSYASAAAKVDPSGEEENKD

SEQ ID NO: 97216 - protein, 315 aa, Setaria italica
  misc_feature (94)..(94): Xaa can be any naturally occurring amino acid
  Transcript Sequence Number=SeqID_31242
  Gene Ontology: Mol. function=ribose phosphate diphosphokinase activity; Cellular component=mitochondrion; Biological process =nucleotide biosynthetic process
  Homolog annotation: Hit_ID=Q8S2E5; Match level="QueryCoverage=100%, HitCoverage=77%, E-value=1e-173, Identity=93%"; Hit description =Ribose-phosphate pyrophosphokinase 3
  Pfam annotation: Domain name=Pribosyltran; Domain location=150-255; Score=18.7; E_value=0.00018; Accession=PF00156.19; Description =Phosphoribosyl transferase domain
THKSILLFYCEEMRNLAKQVVARNDDIELRSISWRTFADGFPNLFISNAHSIRGRHVAFLASFSSPNVIFEQLSIIYALPKLFISSFTLILPFXPTGTSERMEDEGDVATAFTLARILSHIPISRGGPSSLVIFDIHALQERFYFGDSVLPCFESGIPLLKSRLQELPDSHNITIAFPDDGAWKRFYKQLQHFPMVVCNKVREGDQRIVRIKEGDPSGRHVVIVDDLVQSGGTLIECQKVLAAHGAAKVSAYVTHGIFPNNSWEKFQHDNGEGPEHGLSHFWLTDSCPLTVEAVKDRRPFEILSLAGPIASALQI

SEQ ID NO: 97217 - protein, 198 aa, Setaria italica
  misc_feature (190)..(190): Xaa can be any naturally occurring amino acid
  Transcript Sequence Number=SeqID_31243
  Gene Ontology: Mol. function=protein serine/threonine kinase activity; Biological process=protein amino acid phosphorylation
  Homolog annotation: Hit_ID=B9RIV9; Match level="QueryCoverage=91%, HitCoverage=19%, E-value=2e-30, Identity=44%"; Hit description=ATP binding protein, putative
  Subcellular localization annotation: CTP_CleavageSite=80; ConfidenceScore=5.33e-01
NVRKEHPGAITTKNTKETSKPTASAFLNNHTLSTSPRGIAADNNQPNLQNLRPVVLESAPNSLMSSPSRSPRRICPDHIPTSAFWAVKPHADVTFLGSGQCSSPGSGQTSGHNSVGGDMLAQLFWQPSRGSPECSPIPSPRMTSPGPSSRVHSGSVSPLHPRSGGVAPESPTSRHDDGKKKQTHKLPLPXPLSISNSS

SEQ ID NO: 97218 - protein, 308 aa, Setaria italica
  Transcript Sequence Number=SeqID_31244
  Gene Ontology: Mol. function=hydrolase activity
  Homolog annotation: Hit_ID=B9SJW6; Match level="QueryCoverage=93%, HitCoverage=48%, E-value=1e-131, Identity=76%"; Hit description =Catalytic, putative
  Pfam annotation: Domain name=Abhydrolase_1; Domain location=26-289; Score=-13.1; E_value=0.067; Accession=PF00561.12; Description =alphabeta hydrolase fold
FILSLLCNFKVTLPLVVKILGEGQQTVSPRLFGWQERLSATIEDLQKQLELIISYDWDFDHYLEEDVPAAMDYIRKQSVPKDGKLLAIGHSMGGILLYAMVSKCGFEGAEPELAAIVTLASSVDYTTSNSSLKMLLPLADPAEILRVPAIPLGVLLSTTYPISSRAPYILSLLRSQISAKEMMDPELLSKLILNNFCTVPAKVLLQLTTAFRDGGLCNRTGTFFFKEHLHKIKVPVLALAGDEDLICPPEAVYETVKLIPQHLVTYKVFGEPEGPHYAHYDLVGGRKAVHEVYPCIIEFLSQHDKVSS

SEQ ID NO: 97219 - protein, 49 aa, Setaria italica
  Transcript Sequence Number=SeqID_31245
FATWKELFCTSIVITDAELYPKKLRLIRIIHVHHLLAKRMFADLNDPQL

SEQ ID NO: 97220 - protein, 66 aa, Setaria italica
  Transcript Sequence Number=SeqID_31246
RSLDSKGGSIIFSNFWSNLWATSHSLLLGGWEGVVQQPNIVLMHSSFFGHAHYFQPPFSQMLKLHF

SEQ ID NO: 97221 - protein, 76 aa, Setaria italica
  Transcript Sequence Number=SeqID_31247
ILIIPILLFPSFPCHSNTLYGDAIDLWGRQVAAAQRRAPWRSHLSTSIPCSHPQPPRFFFCMEQPPRPFTAHLRRT

SEQ ID NO: 97222 - protein, 77 aa, Setaria italica
  Transcript Sequence Number=SeqID_31248
MYPKAEEGAPLRAFPMSGGGGYYQAGGATAALAVQAKAPVAAWSTGLCDCFDDCSNCKQAPRSRVPSRFTCGPGSPI

SEQ ID NO: 97223 - protein, 92 aa, Setaria italica
  Transcript Sequence Number=SeqID_31249
  Gene Ontology: Mol. function=oxidoreductase activity, acting on the CH-OH group of donors, NAD or NADP as acceptor; Biological process =metabolic process
  Homolog annotation: Hit_ID=B4FA28; Match level="QueryCoverage=66%, HitCoverage=19%, E-value=1e-21, Identity=88%"; Hit description =Glyoxylate reductase
  Pfam annotation: Domain name=2-Hacid_dh; Domain location=2-92; Score=- 14.3; E_value=0.04; Accession=PF00389.22; Description=D-isomer specific 2-hydroxyacid dehydr
DAAAAAEARVLLVPGLKVVTAELIDRLPALELVVATSVGVDHVDLDACRRRGLAVTNAGGAFSVDSADYAVGLVVAVLRRVAAAEAYLRRGR

SEQ ID NO: 97224 - protein, 114 aa, Setaria italica
  Transcript Sequence Number=SeqID_31250
  Gene Ontology: Cellular component=nucleus; Biological process =regulation of transcription, DNA-dependent
  Homolog annotation: Hit_ID=B9GYX5; Match level="QueryCoverage=72%, HitCoverage=17%, E-value=2e-27, Identity=73%"; Hit description=GRAS family transcription factor
  Subcellular localization annotation: CTP_CleavageSite=44; ConfidenceScore=5.08e-01
LGLFLDVGAPRARPWPGSFPTPASKISLGNLNSTSCMEQLLVHCANAIEANDATLTQQILWVLNNIAPPDGDSNQRLTAAFLCALVARASRTGACKAVTAAVAAAVESAALHVH

SEQ ID NO: 97225 - protein, 189 aa, Setaria italica
  Transcript Sequence Number=SeqID_31251
  Gene Ontology: Mol. function=nucleic acid binding
MSNQIEHATGRKGKAKRRLDTYIDEEVEVSEDADVSEDEDDNQSEDKYEGSFIDDEATPTGEFTQTEQGRRISGDMMGFYRQSLLTQSPVLLPSRYLDVSDNSASWTGNASCSSEVGHNSIETPKELQTHHTMDPSPSYQQSLLGKASFVKDQCGTTFANSESSTKLDCRKRKLSFQQPATIPVINLEP

SEQ ID NO: 97226 - protein, 83 aa, Setaria italica
  misc_feature (77)..(77): Xaa can be any naturally occurring amino acid
  Transcript Sequence Number=SeqID_31252
  Gene Ontology: Mol. function=hydroperoxide dehydratase activity; Cellular component=chloroplast; Biological process=fatty acid biosynthetic process
  Homolog annotation: Hit_ID=Q6Z6L1; Match level="QueryCoverage=93%, HitCoverage=15%, E-value=5e-29, Identity=83%"; Hit description =Allene oxide synthase 3
HAAGSPLISGDSRVVALLDARSFRVLLDDSRVDKAGTLDGTYMPSLALFGGHLPLAFLDAADPRHAALKRVMIRLAXARMHHV

SEQ ID NO: 97227 - protein, 87 aa, Setaria italica
  Transcript Sequence Number=SeqID_31253
  Gene Ontology: Mol. function=transcription termination factor activity; Biological process=transcription termination
  Homolog annotation: Hit_ID=B6U3Y3; Match level="QueryCoverage=98%, HitCoverage=47%, E-value=8e-24, Identity=67%"; Hit description=Rho termination factor, N-terminal domain containing protein
  Pfam annotation: Domain name=Rho_N; Domain location=49-85; Score =23.8; E_value=0.0007; Accession=PF07498.4; Description=Rho termination factor, N-terminal dom
  Pfam annotation: Domain name=SAP; Domain location=50-86; Score=14.2; E_value=0.045; Accession=PF02037.19; Description=SAP domain
  Pfam module annotation: Pfam domain module=Rho_N::SAP; Domain location=49-85::50-86
SESSPKASRRTRKPPPDPFEEVDKRKQSYGMDGDGGADDFSEEQRRMVNLEDMKVADLRELARARRMRGYSKLKKGELIDRLKGVVM

SEQ ID NO: 97228 - protein, 101 aa, Setaria italica
  Transcript Sequence Number=SeqID_31254
  Gene Ontology: Mol. function=protein binding; Biological process=iron- sulfur cluster assembly
PLLRFRRSASPVTASLARAAPAVSDDLVLRIAEQLEDSVTSSSPLLDPLRSASALSLLSTPWPTRRSNEAFRFTDISYLRSFPISLPSKAPDLAPPASPFP

SEQ ID NO: 97229 - protein, 225 aa, Setaria italica
  misc_feature (133)..(133): Xaa can be any naturally occurring amino acid
  Transcript Sequence Number=SeqID_31255
  Gene Ontology: Mol. function=DNA-directed RNA polymerase activity; Cellular component=nucleus; Biological process=transcription
  Homolog annotation: Hit_ID=Q7X881; Match level="QueryCoverage=98%, HitCoverage=15%, E-value=1e-120, Identity=91%"; Hit description=DNA -directed RNA polymerase
  Pfam annotation: Domain name=RNA_pol_Rpb1_2; Domain location=1-147; Score=276.0; E_value=8.3e-80; Accession=PF00623.12; Description=RNA polymerase Rpb1, domain 2
SEVAIPVLMARVLTYPERVSNYNLEKLRQCIRNGPYKHPGANFIITPDGTKLSLKYGDRRIHARDLKCGYTVERHLEDGDVVLFNRQPSLHRMSIMSHRARIMPWRTLRFNESVCNPYNADFDGDEMNLHVPXTEEARTEALMLMGVQNNLCTPKNGEILVASTQDFLTSSFLVTRKDAFYDRSSFALFCSYVGDAMENIDLPTPALIKPIELWTGKQLFSCCLV

SEQ ID NO: 97230 - protein, 64 aa, Setaria italica
  misc_feature (49)..(49): Xaa can be any naturally occurring amino acid
  Transcript Sequence Number=SeqID_31256
  Gene Ontology: Mol. function=protein tyrosine kinase activity; Biological process=protein amino acid phosphorylation
MRQWFCCNCHFDDEEDGHNKEQSKAQSNKIDPKQKSSKPPVTQPEPEIXPLLPIDVPELSLDDL

SEQ ID NO: 97231 - protein, 368 aa, Setaria italica
  Transcript Sequence Number=SeqID_31257
  Gene Ontology: Mol. function=protein tyrosine kinase activity; Cellular component=plasma membrane; Biological process=protein amino acid phosphorylation
  Homolog annotation: Hit_ID=B9SX32; Match level="QueryCoverage=94%, HitCoverage=86%, E-value=1e-151, Identity=74%"; Hit description =Serine/threonine-protein kinase PBS1, putative
  Pfam annotation: Domain name=Pkinase; Domain location=70-347; Score =91.9; E_value=2.2e-24; Accession=PF00069.17; Description=Protein kinase domain
  Pfam annotation: Domain name=Pkinase_Tyr; Domain location=58-347; Score=134.2; E_value=4e-37; Accession=PF07714.9; Description=Protein tyrosine kinase
  Pfam module annotation: Pfam domain module=Pkinase::Pkinase_Tyr; Domain location=70-347::58-347
MRQWFCCNCHFDDEEDGHNKEQSKAQSNKIDPKQKSSKPPVTQPEPEISPPTIDVPELSLDDLKEKTDNFGSSALIGEGSYGRVYHATLDDGRQAAVKKLDASENEPNDEFLKQVSLASKLKHDNLVEMLGYCVEGNYRILAYEFATMGSLHDVLHGRKGVQGAQPGPVLDWMQRVKIAIEAAKGIEYLHEKVQPSIIHRDIRSSNVLLFEDFKAKIADFNLLNQAPDMAARLHSTRVLGTFGYHAPEYAMTGQLTQKSDVYSFGVVLLELLTGRKPVDHTMPRGQQSLVTWATPRLSEDKVKQCVDPRLKGEYPPKGVAKLAAVAALCVQYEAEFRPNMSIVVKALSPLLQQRPAPTASEPAPEPAS

SEQ ID NO: 97232 - protein, 60 aa, Setaria italica
  Transcript Sequence Number=SeqID_31258
  Gene Ontology: Mol. function=triacylglycerol lipase activity; Biological process=lipid metabolic process
  Homolog annotation: Hit_ID=B9RTA9; Match level="QueryCoverage=68%, HitCoverage=6%, E-value=1e-13, Identity=80%"; Hit description =Triacylglycerol lipase, putative
SVGGGGGAGKRRRGRAARRPTQPPATWIEAVGTLAETLRFTYSETLGKWPIGDLAFGIKY

SEQ ID NO: 97233 - protein, 50 aa, Setaria italica
  Transcript Sequence Number=SeqID_31259
  Gene Ontology: Mol. function=protein disulfide oxidoreductase activity
GRGCEGCGGARFVPCWECGGSCKVVVEKGGEVERCAKCNENGLMMCPICH

SEQ ID NO: 97234 - protein, 81 aa, Setaria italica
  Transcript Sequence Number=SeqID_31260
  Gene Ontology: Mol. function=transferase activity, transferring glycosyl groups; Biological process=metabolic process
  Homolog annotation: Hit_ID=Q8LKT4; Match level="QueryCoverage=100%, HitCoverage=17%, E-value=5e-33, Identity=85%"; Hit description =Putative glucosyl transferase
MMELSHSLVEHGVKVTFVNTELNHGLILGALASRDSVLGGVDMVSVPDGLGCGEDRKDLARLTDSFSKVMPVELGKLVARI

SEQ ID NO: 97235 - protein, 145 aa, Setaria italica
  Transcript Sequence Number=SeqID_31261
  Gene Ontology: Mol. function=transferase activity
  Homolog annotation: Hit_ID=B6SYB6; Match level="QueryCoverage=92%, HitCoverage=24%, E-value=1e-62, Identity=88%"; Hit description =Glycosyltransferase
  Subcellular localization annotation: CTP_CleavageSite=38; ConfidenceScore=5.21e-01
VVRLLSLSVLRCPLVFVVFTNSYSVVTVLRIPSSSLVVTTADSERVERREDLEALKTHLPSNQNSLEAREETRSVASLPCSAFINGEAGYGEEGVMCCDRSHYRSDVCYLRGDVRTDPSTSSVLLYNAPRGSSPEKVRPYTRKFE

SEQ ID NO: 97236 - protein, 295 aa, Setaria italica
  misc_feature (225)..(225): Xaa can be any naturally occurring amino acid
  Transcript Sequence Number=SeqID_31262
  Gene Ontology: Mol. function=phosphatidylinositol phosphate kinase activity; Biological process=phosphatidylinositol metabolic process
  Homolog annotation: Hit_ID=Q9SLG9; Match level="QueryCoverage=98%, HitCoverage=39%, E-value=1e-121, Identity=70%"; Hit description =Phosphatidylinositol-4-phosphate 5-kinase 5
  Pfam annotation: Domain name=PIP5K; Domain location=1-288; Score =439.4; E_value=5.6e-129; Accession=PF01504.10; Description =Phosphatidylinositol-4-phosphate 5-Kinase
LSLCGDDALRELSSPGKSGSFFYLTNDDRYMIKTMKKAEVKMLLKMLPAYYNHVRAFEDTLVTKFFGLHCVKSGTHQKKVRFVIMGNLFCSDHPIHRRFDLKGSSLGRITDKPPAEIDEYTTLKDLDLNFTFRLQKQWYQEFQRQVDKDCEFLEQEKIMDYSLLVGVHFRGAIDVDGEKLATPRVSRWDRDHFRSDPNRWSKIKLGANMLSRAELTIRKNDGDVXGEPTGEYCDVILYFGIIDILQDYDIGKRLEHAYKSFQYDSASISAVDPKQYSRRFKDFIYKAFQEDKVDS

SEQ ID NO: 97237 - protein, 130 aa, Setaria italica
  Transcript Sequence Number=SeqID_31263
  Gene Ontology: Cellular component=plastoglobule
  Homolog annotation: Hit_ID=B6STS2; Match level="QueryCoverage=97%, HitCoverage=43%, E-value=4e-61, Identity=88%"; Hit description=SOUL heme-binding protein
  Pfam annotation: Domain name=SOUL; Domain location=1-124; Score=92.3; E_value=1.7e-24; Accession=PF04832.4; Description=SOUL heme-binding protein
VLLEGEASSETMEMTTPVITKKSAGENKWKMSFVMPAKYGSNLPRPKDPSVTIKEVPSKIVAVAAFSGLVTDDDISQRESKLRESLQKDAEFRVKHDSAVEVAQYNPPFTLPFTRRNEIALEVERNDIAF

SEQ ID NO: 97238 - protein, 114 aa, Setaria italica
  Transcript Sequence Number=SeqID_31264
  Gene Ontology: Cellular component=vacuole
ESWCKALRLASTTDKDKHKFHAMLAREFRSYISSLNAGYPCFLKPSMLSGLEQVLVDSTVKTDGSSKFRNLLKRLAKKAPVKASPDSKSPVTSKQDIKQPTTPSSSVSSNSQLS

SEQ ID NO: 97239 - protein, 98 aa, Setaria italica
  Transcript Sequence Number=SeqID_31265
  Gene Ontology: Mol. function=DNA binding
  Homolog annotation: Hit_ID=B6T5P4; Match level="QueryCoverage=100%, HitCoverage=30%, E-value=2e-35, Identity=77%"; Hit description =Dnajc2 protein
  Pfam annotation: Domain name=Myb_DNA-binding; Domain location=48-98; Score=16.6; E_value=0.063; Accession=PF00249.23; Description=Myb -like DNA-binding domain
RQNPASTPTKPSDPIAAPVQSAASLQPLQKAAAAGGAAVDGGEREENAGEWTDQELELLRRQMVKHPAGEPQRWEKIAAVFGGRRTPESVIHVAKSGA

SEQ ID NO: 97240 - protein, 44 aa, Setaria italica
  Transcript Sequence Number=SeqID_31266
FVIIGRFLHLSCYYFSKPCIQKRIRFLIHAALVATPYHNHNLQY

SEQ ID NO: 97241 - protein, 117 aa, Setaria italica
  misc_feature (86)..(86): Xaa can be any naturally occurring amino acid
  Transcript Sequence Number=SeqID_31267
  Gene Ontology: Mol. function=catalytic activity; Biological process =trehalose biosynthetic process
  Homolog annotation: Hit_ID=B6SH67; Match level="QueryCoverage=100%, HitCoverage=13%, E-value=1e-49, Identity=78%"; Hit description =Trehalose 6-phosphate synthase
WESSNGSNLIGSAPPCLTRKIVVANFLPLNCTKDEATREWSFAVDDNQLLVQLKDGFPIDSEVIYVGSLNVQVDPSEQDQVSQKLXFKEHKCIPTFLPADLQQQFYHSFCKQHLWPL

SEQ ID NO: 97242 - protein, 137 aa, Setaria italica
  misc_feature (123)..(123): Xaa can be any naturally occurring amino acid
  Transcript Sequence Number=SeqID_31268
  Gene Ontology: Mol. function=protein binding; Biological process =ethylene mediated signaling pathway
  Homolog annotation: Hit_ID=Q2R1Z8; Match level="QueryCoverage=97%, HitCoverage=14%, E-value=2e-64, Identity=90%"; Hit description=ETO1 -like protein 1, putative, expressed
MRKLFFSESACKETKLHSAPHSWLPLERGKLSKFSGHAAGGSSIESLMKMPEPAVLPHFKPADYVDKLAQIHEELESCPPDEKSCLYLLQFQVFRGLGEAKLSRRSLQSAWEKASTIHEKLIXFGAWLKYEKKGRSD

SEQ ID NO: 97243 - protein, 162 aa, Setaria italica
  Transcript Sequence Number=SeqID_31269
  Gene Ontology: Mol. function=hydrolase activity, hydrolyzing O -glycosyl compounds; Cellular component=anchored to membrane; Biological process=carbohydrate metabolic process
  Homolog annotation: Hit_ID=Q5NKR8; Match level="QueryCoverage=98%, HitCoverage=37%, E-value=8e-57, Identity=72%"; Hit description =Putative beta-1,3-glucanase
SETGWPSQGDDDEAGATPENAARYNGNLMRMVAEGKGTPAAPGEALQVYVFALFNEDQKPGPASERHYGLFKPDGTPAYDVGVKAPTISGWKGSGGGSGNGTGGGAGLVVAQGPGGADGVGPGTGFYTVSAASANKVKRRRRCVESLLVAAVLAMVSGLCWS

SEQ ID NO: 97244 - protein, 39 aa, Setaria italica
  Transcript Sequence Number=SeqID_31270
  Gene Ontology: Mol. function=phosphatidylcholine-sterol O -acyltransferase activity
GDPDQPYFRSILIPNTTHKGMISDELALKRVVSEILEAT

SEQ ID NO: 97245 - protein, 68 aa, Setaria italica
  Transcript Sequence Number=SeqID_31271
MFYKLYIQHLIQNWRPLADALLLYFRCYFVSASLTEKLYITGGLGLTDKSPNSWDIYDSATDSWCAHK

SEQ ID NO: 97246 - protein, 363 aa, Setaria italica
  misc_feature (6)..(6): Xaa can be any naturally occurring amino acid
  Transcript Sequence Number=SeqID_31272
  Gene Ontology: Mol. function=protein binding; Biological process =ubiquitin-dependent protein catabolic process
  Homolog annotation: Hit_ID=B9RDR1; Match level="QueryCoverage=90%, HitCoverage=94%, E-value=2e-84, Identity=44%"; Hit description =Protein AFR, putative
  Pfam annotation: Domain name=F-box; Domain location=26-73; Score =31.1; E_value=4.5e-06; Accession=PF00646.25; Description=F-box domain
  Pfam annotation: Domain name=Kelch_1; Domain location=116-162; Score =37.0; E_value=7.5e-08; Accession=PF01344.17; Description=Kelch motif
  Pfam annotation: Domain name=Kelch_1; Domain location=164-210; Score =29.3; E_value=1.6e-05; Accession=PF01344.17; Description=Kelch motif
  Pfam annotation: Domain name=Kelch_2; Domain location=116-162; Score =14.5; E_value=0.43; Accession=PF07646.7; Description=Kelch motif
  Pfam annotation: Domain name=Kelch_2; Domain location=164-210; Score =18.1; E_value=0.037; Accession=PF07646.7; Description=Kelch motif
  Pfam annotation: Domain name=Kelch_2; Domain location=303-346; Score =1.3; E_value=29; Accession=PF07646.7; Description=Kelch motif
  Pfam module annotation: Pfam domain module=F-box::Kelch_1::Kelch _1::Kelch_2::Kelch_2::Kelch_2; Domain location=26-73::116-162::164 -210::116-162::164-210::303-346
MINHHXIVHLGKLSIRVMESAPGHTPLIHGLPDEIALICLARVPRRFHNVLRCVSKRWRELLCSEEWRTCRKRNNLDESWIYVICRESGIKCYVLAPDPSSRSLRVMHIIEPPCSARQGVTIEALDKRLFFLGGCSWLNEPTDEVYCYDASSNCWSTAAPMPTPRCYFVSASLTEKLYITGGLGLTDKSPNSWDIYDSATDSWCAHKNPMLTPDIVKFVALDEELVTIHQAAWNRMYFAGIYDPLDRTWRGTENEIARCFSSPTVVVDETLYMLEQKLGTTLMMWQKDTKEWVMLGRLSDKVTRPPCQLVAIGRKIYVIGRGLSVVTIDMDTAARVDGFVVTSSTGPLVEQDLSPERSRVITI

SEQ ID NO: 97247 - protein, 108 aa, Setaria italica
  Transcript Sequence Number=SeqID_31273
  Homolog annotation: Hit_ID=B6TDX7; Match level="QueryCoverage=55%, HitCoverage=14%, E-value=1e-17, Identity=78%"; Hit description=F-box domain containing protein
  Pfam annotation: Domain name=F-box; Domain location=21-68; Score =35.1; E_value=2.8e-07; Accession=PF00646.25; Description=F-box domain
RSPLTGEHHPSPASSAATALGTLLLLPSELLHEILLRLAVPELLRVRSVARPLSSLISSPDFRRLYHLSSASSGPGPAAAWLLLFKKLPPRDAAIRGFHGPSGRLVPH

SEQ ID NO: 97248 - protein, 60 aa, Setaria italica
  Transcript Sequence Number=SeqID_31274
LKCASFYGLEKNFASLSDTNFNFHAFHSTAIYPLAYSVNLFLVPCQILDVRAKITSLSPG

SEQ ID NO: 97249 - protein, 55 aa, Setaria italica
  Transcript Sequence Number=SeqID_31275
AALHASKALPFTHCQEKRSMQIKHSITSWCQNLMHRQNRKGASQSHCARLKKNGL

SEQ ID NO: 97250 - protein, 79 aa, Setaria italica
  Transcript Sequence Number=SeqID_31276
LVMCDRMKTSTVVSGSTEVFFGIYFVIFVPRIHHAGSHMPALYVSGTRIISTTSVVYGATCRDPLEKNANPIRPSQYVG

SEQ ID NO: 97251 - protein, 68 aa, Setaria italica
  Transcript Sequence Number=SeqID_31277
SKRSDTTFANWVLRTNSINIVHKLVNKTRINACNLSLKILSSFPLTYLHPHTTNQNQIQYPQLFIANT

SEQ ID NO: 97252 - protein, 129 aa, Setaria italica
  Transcript Sequence Number=SeqID_31278
  Gene Ontology: Cellular component=cytoplasm; Biological process =response to stress
  Homolog annotation: Hit_ID=B6SRC0; Match level="QueryCoverage=97%, HitCoverage=76%, E-value=7e-33, Identity=64%"; Hit description =Hsp20/alpha crystallin family protein
  Pfam annotation: Domain name=HSP20; Domain location=38-129; Score =40.9; E_value=5.1e-09; Accession=PF00011.13; Description=Hsp20alpha crystallin family
IRDSGRRSCHGEWRLFSLLSPPAAAAAQQPRRPANHVSWEETAAAHLFSASLPGVRKEEIRVEVEDARYLVIRTELDGATAAGAEGDGGAVGLGRRSFDRKFRLPGMVDVDGISAEYTHGVLTVTVPRM

SEQ ID NO: 97253 - protein, 174 aa, Setaria italica
  Transcript Sequence Number=SeqID_31279
  Gene Ontology: Cellular component=cytoplasm; Biological process =response to stress
  Homolog annotation: Hit_ID=B6SRC0; Match level="QueryCoverage=90%, HitCoverage=90%, E-value=3e-43, Identity=64%"; Hit description =Hsp20/alpha crystallin family protein
  Pfam annotation: Domain name=HSP20; Domain location=59-158; Score =50.0; E_value=8.9e-12; Accession=PF00011.13; Description=Hsp20alpha crystallin family
ELHRPLDYYYPMEEEVVHQQQHPGLRAAQLPWQWRLFSLLSPPAAAAAQQPRRPANHVSWEETAAAHLFSASLPGVRKEEIRVEVEDARYLVIRTELDGATAAGAEGDGGAVGLGRRSFDRKFRLPGMVDVDGISAEYTHGVLTVTVPRMHTRARPVVGLLGAGPAADSAARAA

SEQ ID NO: 97254 - protein, 140 aa, Setaria italica
  misc_feature (7)..(7): Xaa can be any naturally occurring amino acid
  Transcript Sequence Number=SeqID_31280
  Homolog annotation: Hit_ID=Q1EPF1; Match level="QueryCoverage=55%, HitCoverage=10%, E-value=6e-22, Identity=62%"; Hit description =Transport protein-related
MMYDTPXCPHQQYEVESSSHTGGRSTHKVTASFQTAFQVDMEVSAAVKKAFVQLANSSDSAKREEFKELLWKISQNPVLTEADVNSEDKTQLGDCSDEGTSLKLNKENLTGNSAPSDFNTTKVQESIDVVSIMLEKAKSS

SEQ ID NO: 97255 - protein, 760 aa, Setaria italica
  misc_feature (71)..(71): Xaa can be any naturally occurring amino acid
  misc_feature (428)..(428): Xaa can be any naturally occurring amino acid
  misc_feature (466)..(466): Xaa can be any naturally occurring amino acid
  Transcript Sequence Number=SeqID_31281
  Gene Ontology: Mol. function=aminoacyl-tRNA ligase activity; Cellular component=cytoplasm; Biological process=tRNA aminoacylation for protein translation
  Homolog annotation: Hit_ID=Q7G2B1; Match level="QueryCoverage=100%, HitCoverage=73%, E-value=0.0, Identity=80%"; Hit description=Valyl -tRNA synthetase
  Pfam annotation: Domain name=Anticodon_1; Domain location=480-634; Score=167.0; E_value=5.5e-47; Accession=PF08264.5; Description =Anticodon-binding domain
  Pfam annotation: Domain name=Val_tRNA-synt_C; Domain location=693 -758; Score=11.0; E_value=0.00019; Accession=PF10458.1; Description =Valyl tRNA synthetase tRNA binding ar
  Pfam annotation: Domain name=tRNA-synt_1; Domain location=1-436; Score=391.3; E_value=1.6e-114; Accession=PF00133.14; Description =tRNA synthetases class I (I, L, M and V)
  Pfam module annotation: Pfam domain module=Anticodon_1::Val_tRNA-synt_ C::tRNA-synt_1; Domain location=480-634::693-758::1-436
LEVPGYRSPVQFGVLISFAYPLEEGLYGIIVATTRIETMLGDTAIAVHPQDERYKHLHGKYALHPFNGRKXLKIICDAELVDPSFGTGAVKITPAHDPNDFKVGEQHNLEFINIFTDDGKINEMGGSQFEGMPRFAARTAVIDALKNKGLYRDTKSNVMSLSLCSRSKDVVEPMMKPQWFVNCNSMAKEALDAVKSKKIEIIPPQYEQDWYRWLENIRDWCISRQLWWGHRIPAWYVTLEDDKDKDMGSYSDHWIIARDENDAILEAKQRYPGKKYQLYQDPDVLDTWFSSGLFPLSVLGWPDDKPDLSTFYPSSVLETGSDILFFWVARMVMMGMQLGGDVPFQKVYLHPIIRDAHGRKMAKSLGNVIDPIDVINGISLENLQKKLEDGNLDPKEVEKAKEGQRKDFPNGIPECGTDALRFALISYXQSDKINLDIKRVHGYRQWCNKLWNAIRFAMNKLGDQYXPPATIAVCSLPPVCKWILSVLNKAVGKIESSLEAYKFSEATSSIYSWWQYQLCDVYIEAIKPYFNESQEFESARGASRDTLWVCLDTGLRLLHPFMPYITEELWQRLPQPKEACTKDSIMISEYPAAVHEWTNDQIENEMEIVLDTVNKLRSLRPSTDTYERRPAFVLCRGLETAATMRSYQSYITTLASVSSLQILAEDDPTPLDCATHIVNKDLSVFLQLRGALDTKAEREKLRRKREEIQRQHDALSQKMNASGYREKAPQSKQDEDARKLAALLGELEIVDEAESKLDAN

SEQ ID NO: 97256 - protein, 101 aa, Setaria italica
  Transcript Sequence Number=SeqID_31282
  Subcellular localization annotation: CTP_CleavageSite=27; ConfidenceScore=5.03e-01
PTSAGNPKSPDWRGTNPRGRRRHEAVRVEAPRPCATSPAGGGRGAGESAGARLSPLRRPPPDGGDGGYPQGARQVGGDGDAVFSPQALIPFGGRLLADPLS

SEQ ID NO: 97257 - protein, 77 aa, Setaria italica
  Transcript Sequence Number=SeqID_31283
MLVDFAYFLLILSMPFFPLLCHIHSEKDFVHGMFIFWIFSHFATFWTLMKALWIRKECPGTFTTMLEIFHIEVASVF

SEQ ID NO: 97258 - protein, 56 aa, Setaria italica
  Transcript Sequence Number=SeqID_31284
MSQRAGRHQRRASQSVFVLPENFALEDVPAAVAEGGAEQRKPAAADASELQAARQA

SEQ ID NO: 97259 - protein, 56 aa, Setaria italica
  Transcript Sequence Number=SeqID_31285
YFVILKKIKKSKPFVISRGKFLESYTVTVLHHFVCKSDFKKISLPRFTWVIIPCPI

SEQ ID NO: 97260 - protein, 215 aa, Setaria italica
  Transcript Sequence Number=SeqID_31286
  Gene Ontology: Mol. function=nucleoside-triphosphatase activity; Cellular component=microtubule
  Homolog annotation: Hit_ID=Q7XXR9; Match level="QueryCoverage=99%, HitCoverage=55%, E-value=1e-117, Identity=95%"; Hit description =Katanin
  Pfam annotation: Domain name=AAA; Domain location=57-215; Score =188.1; E_value=2.4e-53; Accession=PF00004.21; Description=ATPase family associated with various cellular activities (AAA)
  Pfam annotation: Domain name=AAA_5; Domain location=57-189; Score =0.2; E_value=0.00091; Accession=PF07728.6; Description=ATPase family associated with various
  Pfam module annotation: Pfam domain module=AAA::AAA_5; Domain location=57-215::57-189
RRNIAETLLRDIIRGSPDVKWESIKGLENAKRLLKEAVVMPIKYPKYFTGLLSPWKGILLFGPPGTGKTMLAKAVATECKTTFFNISASSIVSKWRGDSEKLVKVLFELARHHAPSTIFLDEIDAIISQRGEARSEHEASRRLKTELLIQMDGLTKTDELVFVLAATNLPWELDAAMLRRLEKRILVPLPEPDARHAMFEELLPSTTGTMEIPYD

SEQ ID NO: 97261 - protein, 380 aa, Setaria italica
  misc_feature (207)..(207): Xaa can be any naturally occurring amino acid
  Transcript Sequence Number=SeqID_31287
  Gene Ontology: Mol. function=nucleoside-triphosphatase activity; Cellular component=microtubule
  Homolog annotation: Hit_ID=Q7XXR9; Match level="QueryCoverage=83%, HitCoverage=91%, E-value=1e-150, Identity=80%"; Hit description =Katanin
  Pfam annotation: Domain name=AAA; Domain location=161-321; Score =169.1; E_value=1.3e-47; Accession=PF00004.21; Description=ATPase family associated with various cellular activities (AAA)
  Pfam annotation: Domain name=AAA_5; Domain location=161-268; Score= -20.8; E_value=0.051; Accession=PF07728.6; Description=ATPase family associated with various
  Pfam annotation: Domain name=Vps4_C; Domain location=318-375; Score= -9.3; E_value=0.048; Accession=PF09336.2; Description=Vps4 C terminal oligomerisation domain
  Pfam module annotation: Pfam domain module=AAA::AAA_5::Vps4_C; Domain location=161-321::161-268::318-375
MADDGEPSITRWTFEDFEVYYEVRLGIRREPAEGDGDDRDDGRPPLRGSDQLSGRPAVSRANGGADLAVFEQFERMERKVEMRNGAIEDGPPQKPLLPSFESAETRNLAETLLRDIIRGSPDVKWESIKGLENAKRLLKEAVVMPIKYPKYFTGLLSPWKGILLFGPPGTGKTMLAKAVATECKTTFFNISASSIVSKWRGDSEKLXQRGEARSEHEASRRLKTELLIQMDGLTKTDELVFVLAATNLPWELDAAMLRRLEKRILVPLPEPDARHAMFEELLPSTTGTMEIPYDVLVEKTEGYSGSDIRLVCKEAAMQPLRRLMTVLERNQEVPEDELPEVGPVTTEDIELALRNTRPSAHLHAHRYEKFNQDYGSHVHG

SEQ ID NO: 97262 - protein, 99 aa, Setaria italica
  Transcript Sequence Number=SeqID_31288
  Gene Ontology: Mol. function=nucleotide binding; Cellular component =membrane; Biological process=defense response
  Homolog annotation: Hit_ID=Q6Z574; Match level="QueryCoverage=100%, HitCoverage=7%, E-value=1e-16, Identity=48%"; Hit description =Putative disease resistance protein
MVGVTASALMGVMDPLLGRLGSLLEREDVNLQGVHRQVIFLREELRSMSTTLEMVSESEEASLQVKEWMGQLRELSYDVEDCIDIFMHRLGHVATIDGL

SEQ ID NO: 97263 - protein, 85 aa, Setaria italica
  Transcript Sequence Number=SeqID_31289
  Subcellular localization annotation: CTP_CleavageSite=62; ConfidenceScore=5.13e-01
AAECAKEDVRCSTSPQPSLCQYSSPARHGGRSDEATSSRNGGRFLANRHRKRSPSDFLGSGSAQSGSGTPGRNCSNAGIGRNGFT

SEQ ID NO: 97264 - protein, 78 aa, Setaria italica
  Transcript Sequence Number=SeqID_31290
  Gene Ontology: Mol. function=RNA-directed DNA polymerase activity; Biological process=RNA-dependent DNA replication
  Homolog annotation: Hit_ID=Q2QUY9; Match level="QueryCoverage=100%, HitCoverage=13%, E-value=5e-14, Identity=43%"; Hit description =Retrotransposon protein, putative, LINE subclass
FWNSSWLDGKAPRDIAPNLYNLAWRKNKTVHEEIIEHNWTRGLWRMNSVTEMAEFLLLWDSVQNITLNDQPDAITWRW

SEQ ID NO: 97265 - protein, 128 aa, Setaria italica
  Transcript Sequence Number=SeqID_31291
  Gene Ontology: Mol. function=3-deoxy-7-phosphoheptulonate synthase activity; Cellular component=chloroplast; Biological process =aromatic amino acid family biosynthetic process
  Homolog annotation: Hit_ID=B6UAK5; Match level="QueryCoverage=100%, HitCoverage=25%, E-value=4e-69, Identity=98%"; Hit description =Phospho-2-dehydro-3-deoxyheptonate aldolase 2
  Pfam annotation: Domain name=DAHP_synth_2; Domain location=1-128; Score=-89.3; E_value=7.4e-13; Accession=PF01474.8; Description=Class- II DAHP synthetase family
FLWVGERTRQLDGAHVEFLRGIANPLGIKVSDKMDPAELVRLIDILNPENRAGRITIITRMGPENMRVKLPHLIRAVRGAGQIVTWVTDPMHGNTMKAPCGLKTRSFDRILAEVRAFFDVHEQEGSYP

SEQ ID NO: 97266 - protein, 455 aa, Setaria italica
  Transcript Sequence Number=SeqID_31292
  Gene Ontology: Mol. function=3-deoxy-7-phosphoheptulonate synthase activity; Cellular component=chloroplast; Biological process =aromatic amino acid family biosynthetic process
  Homolog annotation: Hit_ID=B6UAK5; Match level="QueryCoverage=97%, HitCoverage=87%, E-value=0.0, Identity=90%"; Hit description=Phospho- 2-dehydro-3-deoxyheptonate aldolase 2
  Pfam annotation: Domain name=DAHP_synth_2; Domain location=4-429; Score=1016.0; E_value=1.5e-302; Accession=PF01474.8; Description =Class-II DAHP synthetase family
GRIRLLLGSLYKAELDEVLRTVEAFPPIVFAGEARTLEERLAEAAVGRAFLLQGGDCAESFKEFNANNIRDTFRVLLQMSVVLMFGGQMPIVKVGRMAGQFAKPRSDGIEERDGVKLPSYRGDNINGDTFDEKSRLPDPHRLIRAYSQSAATLNLLRAFATGGYAAMQRVTQWNLDFTQNCEQGDRYMELAHRVDEALGFMSAAGLTLDHPIMTTTEFWTSHECLLLPYEQALTREDSTTGLYYDCSAHFLWVGERTRQLDGAHVEFLRGIANPLGIKVSDKMDPAELVRLIDILNPENRAGRITIITRMGPENMRVKLPHLIRAVRGAGQIVTWVTDPMHGNTMKAPCGLKTRSFDRILAEVRAFFDVHEQEGSYPGGVHLEMTGQNVTECIGGSRTVTFDDLTSRYHTHCDPRLNASQSLEMAFIIAERLRKRRIASWNLNGNQLGSIPSLGL

SEQ ID NO: 97267 - protein, 199 aa, Setaria italica
  misc_feature (6)..(6): Xaa can be any naturally occurring amino acid
  Transcript Sequence Number=SeqID_31293
  Gene Ontology: Mol. function=nucleoside-triphosphatase activity; Cellular component=nuclear origin of replication recognition complex; Biological process=DNA replication initiation
  Homolog annotation: Hit_ID=Q945C5; Match level="QueryCoverage=100%, HitCoverage=47%, E-value=1e-101, Identity=91%"; Hit description =Origin recognition complex subunit 4
LFAQGXQRLLYSLLDAMQSLTSQAVVIGVSCRLDADQLLEKRVRSRFSHRKLLFVPSSLEDTQRLVEHLLILAKDSGLPAKYITDYNSRLTNIFSDKKFKGILNSLMDADATTSNILRFLFRAVSYMDMESGFLSMESFLKALSSLQRQPKMDSLQDLSILELYILVCMHRLEDKEQSSYNFTSIMKEYRSIQDAYKTS

SEQ ID NO: 97268 - protein, 77 aa, Setaria italica
  Transcript Sequence Number=SeqID_31294
  Gene Ontology: Mol. function=extracellular-glutamate-gated ion channel activity; Cellular component=integral to membrane; Biological process=G-protein coupled receptor protein signaling pathway
  Homolog annotation: Hit_ID=Q69L09; Match level="QueryCoverage=94%, HitCoverage=7%, E-value=7e-23, Identity=67%"; Hit description =Putative Avr9/Cf-9 rapidly elicited protein 141
RLRRNQFTGATKATGLSVDVFEEAVKILPYAVPYEYVLFGSPEDTSSGSYDDFVYQVHLKVYDIVIGDITIRYNRTF

SEQ ID NO: 97269 - protein, 450 aa, Setaria italica
  Transcript Sequence Number=SeqID_31295
  Gene Ontology: Mol. function=serine-type carboxypeptidase activity; Cellular component=extracellular region; Biological process =proteolysis
  Homolog annotation: Hit_ID=B6U0V5; Match level="QueryCoverage=100%, HitCoverage=95%, E-value=0.0, Identity=87%"; Hit description=Serine carboxypeptidase 1
  Pfam annotation: Domain name=Peptidase_S10; Domain location=44-450; Score=539.8; E_value=3.3e-159; Accession=PF00450.14; Description =Serine carboxypeptidase
MAMPTPASCSGRPLALVLVLAAAALCCRLGSCDGAAADRIRRLPGQPEVSFGQYSGYVGVDDVGKRALFYYFVEAEVDPASKPLVLWLNGGPGCSSLGVGAFSENGPFRPSGQVLVKNEYSWNKEANVIYLETPAGVGYSYSADAAYYQGVDDKMTATDNMVFLQRWLQKFPQYKGRDLYIAGESYAGHYIPQLAEVMVEFNKKDKIFNLKGIALGNPVLEFTTDFNSRAEYFWSHGLISDGTYRVFTSVCNYSRYVAEYYGGALSPLCARVMNQVTRETSRFVDKYDVTLDVCLSSVLSQSKVLTPHQQAGNRIDVCVEDETVRYLNRRDVQAAMHARLVGVDKWAVCSSVLEYELLNLQIPTINIVGSLVKSGIRVLVYSGDQDSVIPLTGSRTLVQNLAHDMGLKTTTPYRVWFEGQQVGGWTQVYGGGTLSFATIRGASHEAPFSQ

SEQ ID NO: 97270 - protein, 400 aa, Setaria italica
  Transcript Sequence Number=SeqID_31296
  Gene Ontology: Mol. function=protein binding; Cellular component=GPI -anchor transamidase complex; Biological process=regulation of protein metabolic process
  Homolog annotation: Hit_ID=Q2R4C3; Match level="QueryCoverage=100%, HitCoverage=60%, E-value=1e-169, Identity=73%"; Hit description =Gpi16 subunit, GPI transamidase component family protein, expressed
  Pfam annotation: Domain name=Gpi16; Domain location=1-397; Score =131.0; E_value=3.8e-36; Accession=PF04113.6; Description=Gpi16 subunit, GPI transamidase component
WGFKLNEGNLRYGALPREAVCTENLTPWLKLLPCRDKAGIASLLYRPSIYKGYYHSQKLKLRSSQSLGIILDQTLTVVLQPNTINDKQLHSNLGQLQPSWSMRHLFNRKLSGKCLVSKYSRIFIEFDKGIVDKVNKSGSDLSWNNEFFVLSNGPDRLIKGLNNLEVQSSFIYEYDVSNYSEEKPFDVGITWKLPLIWSCTPSPFHASRFLMGSGNERGSIALSFTSTNLQKIFGSPNDCSIKAVIFQMVPWYVKVYYHSLEIFIDGNRKTVSDVVDKIHVTPSEDKLLPGTLEMLLRFPCSMQSATLTLDFDKGFLHIDEYPPDANQGFDIPSALVSFPEFNSARNYPEIDPLLGSPLLENFQEDTVVKSYTEVLLVPLTTPDFSMPYNVITFLPCLLVF

SEQ ID NO: 97271 - protein, 59 aa, Setaria italica
  Transcript Sequence Number=SeqID_31297
MARASVLVVLPLVLATLLATANAQDYTAAAPSPLPDSPSPPPPPPQDYSPPPTSQPPVS

SEQ ID NO: 97272 - protein, 167 aa, Setaria italica
  Transcript Sequence Number=SeqID_31298
  Gene Ontology: Mol. function=structural constituent of ribosome; Cellular component=intracellular; Biological process=ribosome biogenesis
  Homolog annotation: Hit_ID=B9SP43; Match level="QueryCoverage=86%, HitCoverage=87%, E-value=1e-59, Identity=77%"; Hit description=60S ribosomal protein L24, putative
  Pfam annotation: Domain name=Ribosomal_L24e; Domain location=1-75; Score=138.1; E_value=2.8e-38; Accession=PF01246.12; Description =Ribosomal protein L24e
  Pfam annotation: Domain name=zf-FCS; Domain location=2-40; Score=7.9; E_value=0.1; Accession=PF06467.6; Description=MYM-type Zinc finger with FCS sequence mot
  Pfam module annotation: Pfam domain module=Ribosomal_L24e::zf-FCS; Domain location=1-75::2-40
MRLEKCWFCSSTIYPGHGIQFVRNDAKIFRFCRSKCHKNFKMKRNPRKVKWTKAYRRLHGKDMTQDSTFEFERKRNRPERYDRNVTEQTLKAIPIITKARHERLKKHISDRQKPGKKKELERDNKELEQDINMLPKKLISNEASAEKTKVKVKVKVVQQQTEDRMEE

SEQ ID NO: 97273 - protein, 473 aa, Setaria italica
  misc_feature (143)..(143): Xaa can be any naturally occurring amino acid
  Transcript Sequence Number=SeqID_31299
  Gene Ontology: Mol. function=hydrolase activity
  Homolog annotation: Hit_ID=B9RUZ0; Match level="QueryCoverage=89%, HitCoverage=95%, E-value=1e-100, Identity=46%"; Hit description =Hydrolase, putative
WAERVRRGVRTVWFMVVMVASLLVASAPALVAAGDVAVALWLEVRLGCLRGHGLRDQLQRYRFRSSLADIPLVSILRSLIITCVYLMSDTSGLSHGPYLGTATFCSLASLLILLIKASVYSPGQDIGPELSPSLPDHKLNLKXLWGMPVLFLSSLVFALGHVIVAYRTSCRARRKLLIHRIDPESILAYKNAFSGCYKVPRSPTPYGAKLFSRSESETKRKTIVHDDRDLPISFLADSDSMFIACQGITVHYKISDPSTCLSSPPDSFSERDTHHDVISSSISPRRQRHESPPSASSNTRRLLNRSFSHQYHQTSLYAPLLVEPVTSPTLSDEIPLMSLDDGSADVYLNPVGFDLVVGEHGKFAVVLVHGFGGGVFSWRHVSNLLARQVGCNVLAFDRPGWGLTSRPRRKDWEDKKLPNPYELESQVDLLISFCSEMGLRSVVLVGHDDGGLLALKAAEKLRTYGDHIKVEVK

SEQ ID NO: 97274 - protein, 85 aa, Setaria italica
  Transcript Sequence Number=SeqID_31300
  Gene Ontology: Mol. function=electron carrier activity; Cellular component=integral to membrane; Biological process=oxidation reduction
  Homolog annotation: Hit_ID=C0KHM0; Match level="QueryCoverage=92%, HitCoverage=15%, E-value=3e-22, Identity=59%"; Hit description =Putative ferulate 5-hydroxylase
AWRSTSAELFSFFANDIVCQAVTGRLPREQGRNQLFRELLETNAKLLGGFNLDDYFPSLARFDMVSAKAVKHRKIWDDLLDSLID

SEQ ID NO: 97275 - protein, 685 aa, Setaria italica
  misc_feature (10)..(10): Xaa can be any naturally occurring amino acid
  Transcript Sequence Number=SeqID_31301
  Gene Ontology: Mol. function=protein kinase activity; Cellular component=integral to membrane; Biological process=protein amino acid phosphorylation
  Homolog annotation: Hit_ID=Q6R2J8; Match level="QueryCoverage=98%, HitCoverage=94%, E-value=0.0, Identity=59%"; Hit description=Protein STRUBBELIG-RECEPTOR FAMILY 8
  Pfam annotation: Domain name=LRRNT_2; Domain location=1-38; Score =12.2; E_value=0.052; Accession=PF08263.4; Description=Leucine rich repeat N-terminal domain
  Pfam annotation: Domain name=LRR_1; Domain location=111-133; Score =13.3; E_value=0.85; Accession=PF00560.25; Description=Leucine Rich Repeat
  Pfam annotation: Domain name=LRR_1; Domain location=135-157; Score =16.7; E_value=0.099; Accession=PF00560.25; Description=Leucine Rich Repeat
  Pfam annotation: Domain name=LRR_1; Domain location=159-180; Score =10.8; E_value=2.6; Accession=PF00560.25; Description=Leucine Rich Repeat
  Pfam annotation: Domain name=LRR_1; Domain location=181-203; Score =12.8; E_value=1.1; Accession=PF00560.25; Description=Leucine Rich Repeat
  Pfam annotation: Domain name=LRR_1; Domain location=41-63; Score=3.0; E_value=83; Accession=PF00560.25; Description=Leucine Rich Repeat
  Pfam annotation: Domain name=LRR_1; Domain location=65-84; Score=6.4; E_value=18; Accession=PF00560.25; Description=Leucine Rich Repeat
  Pfam annotation: Domain name=LRR_1; Domain location=87-109; Score =14.1; E_value=0.6; Accession=PF00560.25; Description=Leucine Rich Repeat
  Pfam annotation: Domain name=Pkinase; Domain location=379-653; Score =116.1; E_value=1.2e-31; Accession=PF00069.17; Description=Protein kinase domain
  Pfam annotation: Domain name=Pkinase_Tyr; Domain location=379-653; Score=75.2; E_value=2.4e-19; Accession=PF07714.9; Description =Protein tyrosine kinase
  Pfam module annotation: Pfam domain module=LRRNT_2::LRR_1::LRR_1::LRR_ 1::LRR_1::LRR_1::LRR_1::LRR_1::Pkinase::Pkinase_Tyr; Domain location =1-38::111-133::135-157::159-180::181-203::41-63::65-84::87-109::379 -653::379-653
VAALGNLYSXWNSPAQLTGWSAAGGDPCGAAWAGVTCSGTAVTSIKLSGMELNGTLGYELSSLQALKTMDLSNNFLHDSIPYQLPSNLTYLNLAKNNLSGNLPYSISTMVSLEYLNLSHNSLFQEIGELFGSLNSLSELDISFNNLTGSLPISMGSLSKVSSLYMQNNQLSGTVDVLSNLSLATLNIANNNFSGTIPQELSSIPNLIVGGNSFANMPASPPPTLTPPPKNTRDQPNHPQGPISAPIVPETPIDQDDKKLQTGPLVGIAVGSIAVGSCVLFALVFCLHKTRKRNDDASSEPKDIVGSLAVNIERASNRETPIPNNSHENAVVATSDLQPSGKMTPERVYGTNGSTAKNAKVPVTATSYTVAALQVATNSFCQDSLLGEGSLGRVYKADFPNGKVLAVKKIDSASLSLYEEENFLEVISNISRLRHPNIVPLTGYCTEHGQRLLVYEYIGNGTLHDILHFSDGMSRKLTWNTRVRIALGTARALEYLHEVCMPPVVHRSFKSSNILLDEEYSPHLSDCGLAALSPNPEREVSAEVVGSFGYSAPEFAMSGTYTTKSDVYSFGVVMLELLTGRKPLDSSRERSEQSLVRWATPQLHDIDLLAKMVDPAMDGLYPAKSLSRFADIIAICVQSEPEFRPPMSEVVQQLVRLMQRASIIRRQSDDLGYSYRVPEGGTGDAI

SEQ ID NO: 97276 - protein, 234 aa, Setaria italica
  misc_feature (73)..(73): Xaa can be any naturally occurring amino acid
  Transcript Sequence Number=SeqID_31302
  Gene Ontology: Mol. function=metal ion binding; Cellular component =plasma membrane
  Homolog annotation: Hit_ID=B6SXK5; Match level="QueryCoverage=96%, HitCoverage=32%, E-value=2e-73, Identity=64%"; Hit description =Protein binding protein
  Pfam annotation: Domain name=PHD; Domain location=4-51; Score=10.2; E_ value=0.002; Accession=PF00628.21; Description=PHD-finger
  Pfam annotation: Domain name=zf-C3HC4; Domain location=5-48; Score =35.9; E_value=1.6e-07; Accession=PF00097.17; Description=Zinc finger, C3HC4 type (RING finger)
  Pfam module annotation: Pfam domain module=PHD::zf-C3HC4; Domain location=4-51::5-48
KQGKCAICFASMRSGHGQALFTAECSHMFHFHCISSNVKHGNYVCPVCRAKWKEIPCRSLSSTSPHGRIGGNXSQSPQQDPHMALRQQVSNRRREVRRLHTSEPAGYNDDEPLQRKEAFDNLNSGSGKTAQISSYPEFQAVPQSSCLNGFDILVHVKAPTSSSDHITGSLVNESSVRSSSRAPVDLVTVLDVSGSMAGTKLALLKQAMGFVVQHLRPSDRLSVIAFSSTAILLV

SEQ ID NO: 97277 - protein, 147 aa, Setaria italica
  Transcript Sequence Number=SeqID_31303
  Gene Ontology: Mol. function=protein binding; Biological process =defense response
  Homolog annotation: Hit_ID=Q84YE9; Match level="QueryCoverage=94%, HitCoverage=48%, E-value=7e-47, Identity=67%"; Hit description =Truncated Xa1-like protein
RGGKDQTMPAGSFQLVRLVVDSISAVLVAPICTRISATLRVLIFRNDWRVESFTEEQEQALQLLTSLQRLEFLSCRVLLSIPRGLHCLSALKILYIRGSPRIRSLPKKGLPDSLQELHISDCSAELYDECMKLRGTRPDMMTWGHRW

SEQ ID NO: 97278 - protein, 380 aa, Setaria italica
  Transcript Sequence Number=SeqID_31304
  Gene Ontology: Mol. function=RNA binding; Biological process=response to stress
KLTLAKILVKKSDPDASSLDVEKLIATKKDKLDDILREFMDANKKDQDFKTPESVSPQPTISKPVEGKSSLNISRPVMGKPKQDGPPLTLLRPAGSKPKQDEPSLAQLRPVGSKAKEDIPLLTLSRPIGSKPIVRGTVVQDSWPSKESLAAATDDSEVGSISRTSDVDVTLRKPTVYQSEDDDLKSKLKMKPNIDLKMRKDMNEDLTKISLLQKPDVAKDIANPDQDHASASSTTISSAEDNIEFEPETKGLDAKLVTENFHESSGLDDNSSAGPQPSSQTVMQETNTSAGSVDNQSATSNNFSMQAFLQGRPKRENQSAEVLPSPVDEKMNATGNRNYVDDGYNVLPSKLEDITESDWTRLEHYASTGEKVEVELIKLQ

SEQ ID NO: 97279 - protein, 37 aa, Setaria italica
  Transcript Sequence Number=SeqID_31305
EKPVFLLRNNGNLTFTFHAFDNVSLTHCSTKIFRMTR

SEQ ID NO: 97280 - protein, 157 aa, Setaria italica
  Transcript Sequence Number=SeqID_31306
  Gene Ontology: Mol. function=protein serine/threonine kinase activity; Cellular component=integral to membrane; Biological process=protein amino acid phosphorylation
  Homolog annotation: Hit_ID=Q9M6D8; Match level="QueryCoverage=98%, HitCoverage=16%, E-value=4e-45, Identity=64%"; Hit description=LRK1 protein
  Pfam annotation: Domain name=LRRNT_2; Domain location=1-36; Score =38.7; E_value=2.3e-08; Accession=PF08263.4; Description=Leucine rich repeat N-terminal domain
  Pfam annotation: Domain name=LRR_1; Domain location=112-134; Score =12.8; E_value=1.1; Accession=PF00560.25; Description=Leucine Rich Repeat
  Pfam annotation: Domain name=LRR_1; Domain location=136-155; Score =8.4; E_value=7.5; Accession=PF00560.25; Description=Leucine Rich Repeat
  Pfam annotation: Domain name=LRR_1; Domain location=40-62; Score=1.2; E_value=1.8e+02; Accession=PF00560.25; Description=Leucine Rich Repeat
  Pfam annotation: Domain name=LRR_1; Domain location=64-86; Score=7.7; E_value=10; Accession=PF00560.25; Description=Leucine Rich Repeat
  Pfam annotation: Domain name=LRR_1; Domain location=88-110; Score =12.9; E_value=1; Accession=PF00560.25; Description=Leucine Rich Repeat
  Pfam module annotation: Pfam domain module=LRRNT_2::LRR_1::LRR_1::LRR_ 1::LRR_1::LRR_1; Domain location=1-36::112-134::136-155::40-62::64 -86::88-110
  Subcellular localization annotation: CTP_CleavageSite=34; ConfidenceScore=5.15e-01
ALLAAKAELADPAGALASWTANATASPCAWSGVTCNARGAVIGVDLSGRNLSGPVPAALSRLPHLARLDLAANAFSGPIPTPLARLRYLTHLNLSNNVLNGTFPPPLARLRALRVVDLYNNNLTGPLPLGVAALPALRHLHLGGNFFSGEIPPSTAR

SEQ ID NO: 97281 - protein, 65 aa, Setaria italica
  misc_feature (10)..(10): Xaa can be any naturally occurring amino acid
  Transcript Sequence Number=SeqID_31307
  Gene Ontology: Mol. function=cyclin-dependent protein kinase activity; Biological process=protein amino acid phosphorylation
  Homolog annotation: Hit_ID=B6TI26; Match level="QueryCoverage=100%, HitCoverage=19%, E-value=6e-25, Identity=90%"; Hit description=Cell division cycle 2-related protein kinase 7
LREIKLLKKXLDHENIIRLKEIVVSPGSAHGTGGSDNNQMYRGDIYMVFEYMDHDLKKVLHHSTP

SEQ ID NO: 97282 - protein, 137 aa, Setaria italica
  misc_feature (14)..(14): Xaa can be any naturally occurring amino acid
  misc_feature (20)..(20): Xaa can be any naturally occurring amino acid
  misc_feature (36)..(36): Xaa can be any naturally occurring amino acid
  Transcript Sequence Number=SeqID_31308
  Gene Ontology: Mol. function=cyclin-dependent protein kinase activity; Cellular component=plasma membrane; Biological process =protein amino acid phosphorylation
  Homolog annotation: Hit_ID=B6TI26; Match level="QueryCoverage=100%, HitCoverage=41%, E-value=2e-51, Identity=78%"; Hit description=Cell division cycle 2-related protein kinase 7
  Pfam annotation: Domain name=Pkinase; Domain location=1-137; Score= -66.7; E_value=0.00016; Accession=PF00069.17; Description=Protein kinase domain
  Pfam annotation: Domain name=Pkinase_Tyr; Domain location=1-137; Score=-174.1; E_value=0.038; Accession=PF07714.9; Description =Protein tyrosine kinase
  Pfam module annotation: Pfam domain module=Pkinase::Pkinase_Tyr; Domain location=1-137::1-137
IITGERAALKKIKXLDDGKXGFPRQILREIKLLKKXLDHENIIRLKEIVVSPGSAHGTGGSDNNLMYRGDIYMVFEYMDHDLKKVLHHSTPSQVKVYMGQLLKGLHYCHVNNVLHRDIKGANLLISGGKLLKLADFG

SEQ ID NO: 97283 - protein, 252 aa, Setaria italica
  misc_feature (48)..(48): Xaa can be any naturally occurring amino acid
  misc_feature (76)..(76): Xaa can be any naturally occurring amino acid
  misc_feature (247)..(247): Xaa can be any naturally occurring amino acid
  Transcript Sequence Number=SeqID_31309
  Gene Ontology: Mol. function=cyclin-dependent protein kinase activity; Cellular component=cytoplasm; Biological process=protein amino acid phosphorylation
  Homolog annotation: Hit_ID=B6TI26; Match level="QueryCoverage=100%, HitCoverage=87%, E-value=1e-122, Identity=79%"; Hit description=Cell division cycle 2-related protein kinase 7
  Pfam annotation: Domain name=Pkinase; Domain location=1-252; Score =167.5; E_value=3.8e-47; Accession=PF00069.17; Description=Protein kinase domain
  Pfam annotation: Domain name=Pkinase_Tyr; Domain location=1-186; Score=-77.9; E_value=1.5e-08; Accession=PF07714.9; Description =Protein tyrosine kinase
  Pfam module annotation: Pfam domain module=Pkinase::Pkinase_Tyr; Domain location=1-252::1-186
RKIGEGTYGEVFEAVDIITGERAALKKIKLDDGKEGFPRQILREIKLXKKLDHENIIRLKEIVVSPGSAHGTGGSXVYMGQLLKGLHYCHVNNVLHRDIKGANLLISGGKLLKLADFGLARPFTREGTFTNHVITLWYRPPELLLGATNYAEAVDIRSVRQIFAEFLLKKPLFPGRTEQDQLSKIFELCGSPNEENWPGVSKLPLYKTMAIHPATPTKRRLRDMLQNFDYHAVDLIERMLILDPTKXISAKD

SEQ ID NO: 97284 - protein, 123 aa, Setaria italica
  Transcript Sequence Number=SeqID_31310
  Gene Ontology: Mol. function=ATP-dependent helicase activity; Cellular component=intracellular; Biological process=DNA recombination
  Homolog annotation: Hit_ID=Q2QZ07; Match level="QueryCoverage=65%, HitCoverage=11%, E-value=2e-45, Identity=97%"; Hit description=ATP -dependent DNA helicase, RecQ family protein, expressed
EPGKCLTSNFGHRSNYSFGICYCFLPNRLSKKYFFLVRFVIHHSLSKSMETYYQESGRAGRDGLPSECVLYYRPGDVPRQSSMVFYENCGLQNLYDIVRYCQSKRSCRRGAIFRHFGRRTTRQ

SEQ ID NO: 97285 - protein, 60 aa, Setaria italica
  Transcript Sequence Number=SeqID_31311
  Gene Ontology: Mol. function=ATP-dependent helicase activity; Cellular component=intracellular; Biological process=DNA recombination
  Homolog annotation: Hit_ID=Q53NW8; Match level="QueryCoverage=51%, HitCoverage=4%, E-value=6e-11, Identity=96%"; Hit description=DNA Helicase-related
HLTSAIDRITVLVFAIAFFPIDYLRNIFFLVRFVIHHSLSKSMETYYQESGRAGRDGLPS

SEQ ID NO: 97286 - protein, 178 aa, Setaria italica
  misc_feature (126)..(126): Xaa can be any naturally occurring amino acid
  Transcript Sequence Number=SeqID_31312
  Gene Ontology: Mol. function=ATP-dependent helicase activity; Cellular component=intracellular; Biological process=DNA recombination
  Homolog annotation: Hit_ID=Q2QZ07; Match level="QueryCoverage=96%, HitCoverage=24%, E-value=4e-94, Identity=91%"; Hit description=ATP -dependent DNA helicase, RecQ family protein, expressed
  Pfam annotation: Domain name=Helicase_C; Domain location=42-118; Score=95.4; E_value=2e-25; Accession=PF00271.23; Description =Helicase conserved C-terminal domain
KSPVGKVVIDEIANFISESYPNNESGIVYCFSRRECEQVAKELCDRGILAEHYHADMDIVAREKIHMRWSKGKSQVIVGTVAFGMGINKPDVRFVIHHSLSKSMETYYQESGRAGRDGLPSECVLXYRPGDVPRQSSMVFYENCGLQNLYDIVRYCQSKRSCRRGAIFRHFGSRSSCL

SEQ ID NO: 97287 - protein, 144 aa, Setaria italica
  misc_feature (62)..(62): Xaa can be any naturally occurring amino acid
  misc_feature (78)..(78): Xaa can be any naturally occurring amino acid
  Transcript Sequence Number=SeqID_31313
  Gene Ontology: Mol. function=ATP-dependent helicase activity; Cellular component=intracellular; Biological process=DNA recombination
  Homolog annotation: Hit_ID=Q1ERC6; Match level="QueryCoverage=95%, HitCoverage=20%, E-value=4e-46, Identity=59%"; Hit description=RecQ -like helicase 2
SDCSFFPCQSKRSCRRGAIFRHFGEALQDCNGMCDNCASSIELKEIDATRMMTLHQSRNYNXDHNLKFFIYFLFIFPXLISITCCSDHTKVVVSVLHDLQLNEQRATLLQLVDKFKAKWKGLGRSNQDVDLKREEIEQLIVQLI

SEQ ID NO: 97288 - protein, 111 aa, Setaria italica
  Transcript Sequence Number=SeqID_31314
PFLATLPRARTQGRWRRRAASHEALVREDSAPVGRAAEDAGGVGRQDAGPKGSAQDQVAASRRWWLGSRLGLWGKPGISTIRNFSSLKSQFFRKGKHANMLVDLRKKTEKN

SEQ ID NO: 97289 - protein, 42 aa, Setaria italica
  Transcript Sequence Number=SeqID_31315
TFGSSIFTEFFTGMCDNCASSIELKEIDATRMMTLHQSRNYN

SEQ ID NO: 97290 - protein, 82 aa, Setaria italica
  misc_feature (60)..(60): Xaa can be any naturally occurring amino acid
  Transcript Sequence Number=SeqID_31316
  Gene Ontology: Mol. function=ATP-dependent helicase activity; Cellular component=intracellular; Biological process=DNA recombination
  Homolog annotation: Hit_ID=Q2QZ07; Match level="QueryCoverage=100%, HitCoverage=12%, E-value=8e-26, Identity=69%"; Hit description=ATP -dependent DNA helicase, RecQ family protein, expressed
MEDEENIEDELFLVGSQLQDIQGQIRTLLDRQEELYERQSQLKALLEVSKKSRNNSTSVXSKDWSGSFPWDSRADDTRFNVF

SEQ ID NO: 97291 - protein, 110 aa, Setaria italica
  misc_feature (54)..(54): Xaa can be any naturally occurring amino acid
  misc_feature (64)..(64): Xaa can be any naturally occurring amino acid
  misc_feature (85)..(85): Xaa can be any naturally occurring amino acid
  Transcript Sequence Number=SeqID_31317
  Homolog annotation: Hit_ID=B6SI86; Match level="QueryCoverage=84%, HitCoverage=20%, E-value=1e-20, Identity=67%"; Hit description=TPR domain containing protein
  Subcellular localization annotation: CTP_CleavageSite=49; ConfidenceScore=5.86e-01
KVADGQRTASFTSSQMATLSNVSGSVMSTAATTRSTVTDLGVVGRGVKRASSLXVKVITAEPAXKKPAVDSAPVRGDSSNSSESXVLHTTQNGDDSVSKYSTSSLALPSR

SEQ ID NO: 97292 - protein, 694 aa, Setaria italica
  misc_feature (39)..(39): Xaa can be any naturally occurring amino acid
  misc_feature (445)..(445): Xaa can be any naturally occurring amino acid
  Transcript Sequence Number=SeqID_31318
  Gene Ontology: Mol. function=ATP-dependent helicase activity; Cellular component=intracellular; Biological process=DNA recombination
  Homolog annotation: Hit_ID=Q2QZ07; Match level="QueryCoverage=99%, HitCoverage=96%, E-value=0.0, Identity=79%"; Hit description=ATP -dependent DNA helicase, RecQ family protein, expressed
  Pfam annotation: Domain name=DEAD; Domain location=72-244; Score =110.8; E_value=4.5e-30; Accession=PF00270.21; Description=DEADDEAH box helicase
  Pfam annotation: Domain name=HRDC; Domain location=588-660; Score =32.6; E_value=1.6e-06; Accession=PF00570.15; Description=HRDC domain
  Pfam annotation: Domain name=Helicase_C; Domain location=313-389; Score=95.4; E_value=2e-25; Accession=PF00271.23; Description =Helicase conserved C-terminal domain
  Pfam annotation: Domain name=RQC; Domain location=464-566; Score =34.1; E_value=5.5e-07; Accession=PF09382.2; Description=RQC domain
  Pfam annotation: Domain name=ResIII; Domain location=68-238; Score= -23.8; E_value=0.0053; Accession=PF04851.7; Description=Type III restriction enzyme, res subunit
  Pfam module annotation: Pfam domain module=DEAD::HRDC::Helicase _C::RQC::ResIII; Domain location=72-244::588-660::313-389::464 -566::68-238
CFPGQIRTLLDRQEELYERQSQLKALLEVSKKSRNNSIXESSVTLEDWSGSFPWDSQADDTRFNVFGITSYRSNQREIINAVMSQKDVLVIMAAGGGKSLCYQLPAVLRNGIALVVSPLLSLIQDQVMGLAVLGIAAYMLTSTTNKEVEKFIYRALDKGEGELKILYVTPEKISKSKRFMSKLEKCHHAGRLSLIAVDEAHCCSQWGHDFRPDYKNLGILKIQFPSVPMIALTATATGKVQTDLIEMLHIPRCVKFVSTVNRPNLFYKVHEKSPVGKVVIDEIANFISESYPNNESGIVYCFSRRECEQVAKELCDRGILAEHYHADMDIVAREKIHMRWSKGKSQVIVGTVAFGMGINKPDVRFVIHHSLSKSMETYYQESGRAGRDGLPSECVLYYRPGDVPRQSSMVFYENCGLQNLYDIVRYCQSKRSCRRGAIFRHFGEXDCNGMCDNCASSIELKEIDATHHTKVVVSVLHDLQLNEQRATLLQLVDKFKAKWKGLGRSNQDVDLKREEIEQLIVQLILDHVLKEEFQHTAYSTNAYVTLGPLWKPALQGNRPVKLEIAAVQSCQDKGGGGRSSRGAKRSRMSDLEAKLDELRRELSSSSSNGGISIFPHAVLSSEQISLLSCQKPTTEAELEQVIGKVKTEKYGSRIIELIRSHVKDAGTGNAVDANKRHKNKKGKDVVCVESSDEE

SEQ ID NO: 97293 - protein, 124 aa, Setaria italica
  Transcript Sequence Number=SeqID_31319
PDFLPHGAEFNHHGADVMPNFRNPGMSGGPRKDQLGSGNLPGNVQHAFDGPEFPPHFLPGHMYPGDPNLFADYSRHGFPKEPVHFGLGGPLRNGDVGWCRICMFNCGSAENLDLHVQTREHQQF

SEQ ID NO: 97294 - protein, 164 aa, Setaria italica
  Transcript Sequence Number=SeqID_31320
LQSRISRSNCKSVLKRVERQTREPVPLSRQGACQVTSAGEVQCPHYNLQAFSRTNSLKHPLTARATVAIRTIPSNKLMVTKTLKKSFRNQNFWFSTVETSEASIILCNGRGRDEKRKTKTDFMPGSTDTVRDLCQVTNRHLITCATNFQSVTHANLVGARAETE

SEQ ID NO: 97295 - protein, 60 aa, Setaria italica
  Transcript Sequence Number=SeqID_31321
WPFCMVSLRSGLSSFSLLAVIIFLNAMTCVHHGIPREQGFLFSMYLFRNDVHSVPISTEK

SEQ ID NO: 97296 - protein, 172 aa, Setaria italica
  Transcript Sequence Number=SeqID_31322
PTKSNDKLASDSINTSCRDPVKFGKSSNEEVKKAQNIRSMYLKDIKESLGRIRAEPLNRVQATNFCYPSRHAVQESHSACKEIKVPLRDSGRDFGRDRALELVATSPAEESSRWRQEQYALQILEDVQNARIAEKTRMEMEIRILKAQIASMERQVMNLDHFSEVKSRSKRH

SEQ ID NO: 97297 - protein, 517 aa, Setaria italica
  Transcript Sequence Number=SeqID_31323
LIKLRKNGANITDALGVEQAAEGQATSLTKKSIHDHVEEITLVEELDEQSERATRIRAEDIPEEITQAHEKESDNNDMMKDSKNSTDSEMLCSSATVQFKGGMMEKQCIQNVEPNNQRELSSESDAAAMKVEGIYDHRTMDMEELALTQKHDHKIIGENKATAILERSHMLDSGVKSDLITLEVDEIHTAGGMQNQEILDLDKHKMVPKQKQDRIIIWENKETMVLEGSHMLDSRVKSDSVTLETDETHAGGGIRHQEILGLDKEMALKQKQDHIIACENKETTELRGIHMLDSRMKSDLATLEVDKTPPAEGNENQDILDVNKQQGTSGTQDLGTAIGNNKMNMSEDEDIPVCSGYQIGPTIESNKMNMSEDAGIPDCGEYQIDPTGIEVNEVESTKRLPNQELLDNREQLAMEEGQHLETTIENNKMNLPNEADALVCGEHQIDSTGTEVPEVKSSSVIQNQELLDNKEDQVTEKRMECHTAYESGIPLEEAYKFGDGVDTCVVAVNVSDSTQNK

SEQ ID NO: 97298 - protein, 513 aa, Setaria italica
  Transcript Sequence Number=SeqID_31324
LDAGIPDCGEYQIDPTGIEVNEVESTKRLPNQELLDNREQLAMEEGQHLETTIENNKMNLPNEADALVCGEHQIDSTGTEVPEVKSSSVIQNQELLDNKEDQVTEKRMECHTAYESGIPLEEAYKFGDGVDTCVVAVNDQITEKRMECEIAYESRISLEEAYTLGGADTCGVAVNVSDSTQNKETCTTEEAMEDKQHHEVEHVNEERILEDTTMIDSSELKSDVTHVEVDMAGSKEGTLNQHATDVEVGMAGSKEGTLNQYALSVETEAAVQEKQDHEMAGEDNRDVADVNALECRVKPDGVVKLSHETLLTTQSVSSEDKENAPSFEEHNITEVAGFESNQTTGMEPEGALPLEPKNMVEVKQENLESETERSIFRENDEVTCKDQTSACVVISPSNVDDQCDDDNGWAEEPTKSNDKLASDSINTSCRDPVKFGKSSNEEVKKAQNIRSMYLKDIKESLGRIRAEPLNRVQATNFCYPSRHAVQESHSACKEIKVPLRDSGRDFGRDRCNY

SEQ ID NO: 97299 - protein, 49 aa, Setaria italica
  Transcript Sequence Number=SeqID_31325
TSGCSFAAICGPDVSFKSDLLAGKAQPVISDLKDTSGPQIAANEQPLGH

SEQ ID NO: 97300 - protein, 109 aa, Setaria italica
  misc_feature (88)..(88): Xaa can be any naturally occurring amino acid
  Transcript Sequence Number=SeqID_31326
  Gene Ontology: Mol. function=electron carrier activity; Biological process=oxidation reduction
  Homolog annotation: Hit_ID=B9SY12; Match level="QueryCoverage=96%, HitCoverage=21%, E-value=2e-18, Identity=49%"; Hit description =Cytochrome P450, putative
  Subcellular localization annotation: CTP_CleavageSite=57; ConfidenceScore=5.52e-01
TRNIFSSNKFTVNSAVYGPEWRSLRRNMVSGMLSASRLREFGRARRRAMDRFVARMRAEAAASPDGASVWVLRNARFAVFCILLDMTXLLDLDEEHIVRIDAVMKRVLL

SEQ ID NO: 97301 - protein, 100 aa, Setaria italica
  Transcript Sequence Number=SeqID_31327
  Subcellular localization annotation: CTP_CleavageSite=75; ConfidenceScore=5.83e-01
TPSFPSARPTTPLAAAAPRFPSPRPQLAAAATTSRPATTLPMSIPVPSARPAAAPGTAASARFPIPRSTLDPGAVAATGRHVARHLQPQLRPATPSVSRP

SEQ ID NO: 97302 - protein, 54 aa, Setaria italica
  Transcript Sequence Number=SeqID_31328
MDGEWSDGAAASSPTVSGGEGKAGPRGVPAEDSPGSPVSPAAAPSTAAPAASRR

SEQ ID NO: 97303 - protein, 102 aa, Setaria italica
  Transcript Sequence Number=SeqID_31329
KRPVIRNSRCSPRVYFHPEAKLHCLHLILPSEIQRINERKHLFNIIIGKKFLHRQAFAEKLLSIPEKEDVREGMCGGVHLLSSPSRLPCCNLFPDTCIVPCP

SEQ ID NO: 97304 - protein, 57 aa, Setaria italica
  Transcript Sequence Number=SeqID_31330
VTSSDYKDVLRPAFGIKIQITMYLGRIIIFIWHFYKQRTGMVSCGGRCLFCGTRTIV

SEQ ID NO: 97305 - protein, 91 aa, Setaria italica
  Transcript Sequence Number=SeqID_31331
NHCHYTQPRHLTTLLGNILNCVHDTVKISGTTTEPFSGCVYVCWVSMALFSSINTMIAVLLRVRGKKKEKKQSLLILCKVRGARDGTQQEP

SEQ ID NO: 97306 - protein, 38 aa, Setaria italica
  Transcript Sequence Number=SeqID_31332
  Homolog annotation: Hit_ID=Q8GLD2; Match level="QueryCoverage=94%, HitCoverage=8%, E-value=4e-12, Identity=94%"; Hit description=Mob1
MPMSKFMVCHMQKFKMTDVKGLQIHNQREKESHSNLAI

SEQ ID NO: 97307 - protein, 88 aa, Setaria italica
  Transcript Sequence Number=SeqID_31333
LGVFQSNIGGRVLEINCTYRYETAPFFNGPATVRLASPGSGAPEPGPAVKLGAGTPAAAGGGGRKYRVFAVVLAVVLPTLAALNLVFC

SEQ ID NO: 97308 - protein, 42 aa, Setaria italica
  Transcript Sequence Number=SeqID_31334
YTVSNVLLGKDTFGVTVFPHVDYVFVAALVVILDEIHRERSD

SEQ ID NO: 97309 - protein, 78 aa, Setaria italica
  Transcript Sequence Number=SeqID_31335
GAVLMNNYLSEHPETVKECSVIELGSGIGITGILCSRFCKKVVLTDHNDEVLEIIKKNVELQCSENTQAVLTAEKLEW

SEQ ID NO: 97310 - protein, 71 aa, Setaria italica
  Transcript Sequence Number=SeqID_31336
KKYMAHIKTCLHTNIMDCSEESIFVLQKQYMDSTSWYSESYKRWALAAKFHGPTRQWLLDRALSCRCLNRE

SEQ ID NO: 97311 - protein, 65 aa, Setaria italica
  Transcript Sequence Number=SeqID_31337
AEVSGPAPPLDDPLVFIDSCYFLLHRVESIDRRGYLSCSSVNLFVSWIVLVTVVLSGVSCCWSRL

SEQ ID NO: 97312 - protein, 71 aa, Setaria italica
  Transcript Sequence Number=SeqID_31338
QPGIMDTLCSSSGKRFFFCLLIFGGGKFYDFCVSFCFLISFFWMTLIPFVKHMGTCSCSQLSIPAWLGKNK

SEQ ID NO: 97313 - protein, 159 aa, Setaria italica
  Transcript Sequence Number=SeqID_31339
  Homolog annotation: Hit_ID=B6U6A3; Match level="QueryCoverage=64%, HitCoverage=24%, E-value=6e-12, Identity=40%"; Hit description=F-box domain containing protein
LDVDHDEFRTAAGSAPNNHPAPNPDYSDSDLDSYEDSDDENNSISNNDREWEDFEDFTENLMHRCNISQLDSLRLHVNTSRAPNFADKQAGGWLRRAMKYCNPDPPRQCEGLSSGSWQLKRLYLCNVALDNRFAKHVSSVCHSLEELELEIAHVRFLQS

SEQ ID NO: 97314 - protein, 76 aa, Setaria italica
  Transcript Sequence Number=SeqID_31340
LVGIMSTIHHDRKASCRPEKEEVKEVPIQEEGGLFSSIPMVQHQNFWLSPKLLESIELVQEQFVPRADDIILATFP

SEQ ID NO: 97315 - protein, 84 aa, Setaria italica
  Transcript Sequence Number=SeqID_31341
  Gene Ontology: Mol. function=asparagine synthase (glutamine -hydrolyzing) activity
PAAAAAEIHRSGEGKGVSVDELKEALRRRGPDNLGCVRRHLCADGTVLGDDGCNGGEGKAGAGDGGVAELLFIGATLHLRGAEP

SEQ ID NO: 97316 - protein, 99 aa, Setaria italica
  Transcript Sequence Number=SeqID_31342
NQCTFNVGRWYGVLGIIDVAIKHLLEVIACSHQSLVTQNMFLNDFFHYVQSMGKKFDVYKLQLPVFNMSSLRVIHEDHRTYASDADVGVSESTWHELGG

SEQ ID NO: 97317 - protein, 80 aa, Setaria italica
  Transcript Sequence Number=SeqID_31343
  Gene Ontology: Mol. function=transcription factor activity; Cellular component=nucleus; Biological process=regulation of transcription, DNA-dependent
  Homolog annotation: Hit_ID=B6U166; Match level="QueryCoverage=100%, HitCoverage=36%, E-value=6e-29, Identity=80%"; Hit description=DNA binding protein
DSLPVDLPKPIENEKPVEVVHSNVKTFSVHPLPPTSDVLTKSSNGSDDSKEEKTQYYPGKEIKRRKRHRRKQYVDQEPCI

SEQ ID NO: 97318 - protein, 78 aa, Setaria italica
  Transcript Sequence Number=SeqID_31344
HNTDGTYVVKHVCDTGCWSDSCQLFGSGNCLNCCLPLHPLVMLMSIIFFPLLCRLGCWHQSIFRTNNALERHAVFLLV

SEQ ID NO: 97319 - protein, 118 aa, Setaria italica
  Transcript Sequence Number=SeqID_31345
  Gene Ontology: Mol. function=molecular_function; Cellular component =cellular_component; Biological process=biological_process
  Homolog annotation: Hit_ID=B6SMU9; Match level="QueryCoverage=100%, HitCoverage=94%, E-value=6e-60, Identity=93%"; Hit description =Nucleus protein
  Pfam annotation: Domain name=YL1_C; Domain location=73-102; Score =64.7; E_value=3.4e-16; Accession=PF08265.3; Description=YL1 nuclear protein C-terminal domain
MESEVVRTEMVLAPTLSFKKVQTADKYPKGQSRGRQWKHLRHLLQAADASSMPPDRPNYLNIQSPPSIYPPKRYCDITGFEAPYVDPRTKLRYADPEVFKQIRMLPNEYVQRYLALRN

SEQ ID NO: 97320 - protein, 68 aa, Setaria italica
  Transcript Sequence Number=SeqID_31346
  Homolog annotation: Hit_ID=B6SMU9; Match level="QueryCoverage=66%, HitCoverage=36%, E-value=4e-15, Identity=88%"; Hit description =Nucleus protein
  Pfam annotation: Domain name=YL1_C; Domain location=24-46; Score =28.9; E_value=2e-05; Accession=PF08265.3; Description=YL1 nuclear protein C-terminal domain
SCLIYLPLPHFLAAKPASELNFPLQAPYVDPRTKLRYADPEVFKQIRMLPNEYVQRYLALRNAAVILR

SEQ ID NO: 97321 - protein, 49 aa, Setaria italica
  Transcript Sequence Number=SeqID_31347
HTRYITVLPIFSSNVLETSAVASTLSSRLHLESGMWQQGKQKYTPDGYA

SEQ ID NO: 97322 - protein, 48 aa, Setaria italica
  Transcript Sequence Number=SeqID_31348
  Gene Ontology: Mol. function=enzyme regulator activity; Cellular component=proteasome complex; Biological process=regulation of protein catabolic process
  Homolog annotation: Hit_ID=Q5Z854; Match level="QueryCoverage=85%, HitCoverage=4%, E-value=3e-15, Identity=97%"; Hit description =Putative 26S proteasome regulatory subunit S2
EELGAEMAVRSLERLLQYGEQNIRRAVPLALGILCISNPKVCGSGLIY

SEQ ID NO: 97323 - protein, 45 aa, Setaria italica
  Transcript Sequence Number=SeqID_31349
MAPSPPGKGKGKKKDDIDDLPEEDLALKEQLELYVLRAQDADPGV

SEQ ID NO: 97324 - protein, 42 aa, Setaria italica
  Transcript Sequence Number=SeqID_31350
TGDRKTGSLEITGFLHHAIAHCIQGTRTLNSDIQSSSHLKPS

SEQ ID NO: 97325 - protein, 117 aa, Setaria italica
  Transcript Sequence Number=SeqID_31351
  Gene Ontology: Mol. function=enzyme regulator activity; Cellular component=proteasome complex; Biological process=regulation of protein catabolic process
  Homolog annotation: Hit_ID=Q5Z854; Match level="QueryCoverage=91%, HitCoverage=13%, E-value=3e-50, Identity=91%"; Hit description =Putative 26S proteasome regulatory subunit S2
PLQTCKCFQFCLQVQKLLGICSQHLEKGETHQGPAVLGIALIAMAEELGAEMAVRSLEHLLQYGEQNIRWAVPLALGILCISNPKVNVMDTLSRLSHDADADVSMAAIISLGLIGAG

SEQ ID NO: 97326 - protein, 47 aa, Setaria italica
  Transcript Sequence Number=SeqID_31352
  Gene Ontology: Mol. function=enzyme regulator activity; Cellular component=proteasome complex; Biological process=regulation of protein catabolic process
  Homolog annotation: Hit_ID=Q5Z854; Match level="QueryCoverage=93%, HitCoverage=5%, E-value=2e-11, Identity=79%"; Hit description =Putative 26S proteasome regulatory subunit S2
LGVSAIALGLVFVGSCSEEIAQPIIFALMERSEAELGEPIIRLLPVA

SEQ ID NO: 97327 - protein, 67 aa, Setaria italica
  Transcript Sequence Number=SeqID_31353
SHAWLCDDIPVGYACRGTQVLSVAVYFYHQLYLCTGITEGMFRTETDSLMRWHIDTAGGKHSLGNSG

SEQ ID NO: 97328 - protein, 111 aa, Setaria italica
  misc_feature (72)..(72): Xaa can be any naturally occurring amino acid
  Transcript Sequence Number=SeqID_31354
  Gene Ontology: Mol. function=enzyme regulator activity; Cellular component=proteasome complex; Biological process=regulation of protein catabolic process
  Homolog annotation: Hit_ID=Q5Z854; Match level="QueryCoverage=81%, HitCoverage=11%, E-value=4e-44, Identity=92%"; Hit description =Putative 26S proteasome regulatory subunit S2
PGVQKLALESMRQEIRSATSSMTSVPKPLKFLRPHYGTLKSYFETMPESELKKYMADILSVLALTMSLEGEXESLKYRLLGSEGDIGSWGHEYVRNLAGEIDTSGSPFLLQ

SEQ ID NO: 97329 - protein, 108 aa, Setaria italica
  misc_feature (30)..(30): Xaa can be any naturally occurring amino acid
  Transcript Sequence Number=SeqID_31355
  Gene Ontology: Mol. function=enzyme regulator activity; Cellular component=proteasome complex; Biological process=regulation of protein catabolic process
  Homolog annotation: Hit_ID=Q5Z854; Match level="QueryCoverage=93%, HitCoverage=12%, E-value=1e-45, Identity=89%"; Hit description =Putative 26S proteasome regulatory subunit S2
KQFDEKIGKYCDVTRMSLVYAGTGNVLKVXKLLGICSQHLEKGETHQGPAVLGIALIAMAEELGAEMAVRSLEHLLQYGEQNIRWAVPLALGILCISNPKVCGSGLIY

SEQ ID NO: 97330 - protein, 203 aa, Setaria italica
  Transcript Sequence Number=SeqID_31356
  Gene Ontology: Mol. function=zinc ion binding
  Homolog annotation: Hit_ID=Q7X9C0; Match level="QueryCoverage=83%, HitCoverage=18%, E-value=1e-14, Identity=33%"; Hit description=NIN -like protein 2
SLKYRLLGSEGDIGSWGHEYVSPMGPSDDPFGVAAMMNFDGYSEVCSPSVADQIFSMLNDPSAAQQMFAMWSSLGSSPCTSAVREDMPFDTYSEPVDMTAAPAQRINSASALGPTGVNRELKVSDELVPNNGSQQGTNIIPRSVGNVLADKMLMALSLFRKSLSDGVLAQVWMPIEHNGRIVLSTFEQPFLLDQDLCKVNRRK

SEQ ID NO: 97331 - protein, 879 aa, Setaria italica
  misc_feature (401)..(401): Xaa can be any naturally occurring amino acid
  Transcript Sequence Number=SeqID_31357
  Gene Ontology: Mol. function=enzyme regulator activity; Cellular component=proteasome complex; Biological process=regulation of protein catabolic process
  Homolog annotation: Hit_ID=Q5Z854; Match level="QueryCoverage=93%, HitCoverage=100%, E-value=0.0, Identity=77%"; Hit description =Putative 26S proteasome regulatory subunit S2
  Pfam annotation: Domain name=PC_rep; Domain location=402-435; Score =26.7; E_value=9.7e-05; Accession=PF01851.14; Description =Proteasomecyclosome repeat
  Pfam annotation: Domain name=PC_rep; Domain location=436-472; Score =27.3; E_value=6.4e-05; Accession=PF01851.14; Description =Proteasomecyclosome repeat
  Pfam annotation: Domain name=PC_rep; Domain location=473-507; Score =32.4; E_value=1.8e-06; Accession=PF01851.14; Description =Proteasomecyclosome repeat
  Pfam annotation: Domain name=PC_rep; Domain location=511-545; Score =1.2; E_value=9.4; Accession=PF01851.14; Description=Proteasomecycloso me repeat
  Pfam annotation: Domain name=PC_rep; Domain location=659-693; Score =13.3; E_value=0.21; Accession=PF01851.14; Description=Proteasomecyclo some repeat
  Pfam annotation: Domain name=PC_rep; Domain location=694-728; Score =27.7; E_value=4.7e-05; Accession=PF01851.14; Description =Proteasomecyclosome repeat
  Pfam module annotation: Pfam domain module=PC_rep::PC_rep::PC_rep::PC_ rep::PC_rep::PC_rep; Domain location=402-435::436-472::473-507::511 -545::659-693::694-728
MAPPEASQPPPPGKGKEKKKDDIDDLPEEDLALKEQLELYVLRAQDADPGVQKLALESMRQEIRSATSSMTSVPKPLKFLRPHYGALKSYFETMPESELKKYMADILSVLALTMSVEGERESLKYRLLGSEGDIGSWGHEYVRNLAGEIAQEFHKRQDDDLPIDALMELVQQIISFHMKHNAEPEAVDLVMEVEDLDLLVEHVDTTNYKRACLYLTSSSKFLPAPDDMLALDIAYTIYMKFGDLASALKIALQLEKSMQYVKQVYTSTDDFLLKKQFSYIIARHGLAMEIDDEIAADDNDKEVLQEIVNNTKLSEGYLTLARDIEVMEPKSPEDIYKVHLIDGRGASSSLDSARQNLAATFVNAFVNAGFGQDKLMTAPSDSSSSGSSGNWLFKNKEHGKXSAAASLGMILLWDTDSGLAQLDKYLHSNDTHVVAGALLGIGIVTCSVKNDCDPALAILMEYIGKDDSNIRIGAILGLGIAYAGSQKEELKTHLSAVLGDPQSPLEVLVFSAIALGLVFVGSCSEEIAQPIIFALMERSEAELGEPIIRLLPVALGLLYLGKQESVEATAEVSKTFDEKIGKYCDVTLMSLAYAGTGNVLKVQKLLGICSQHLEKGETHQGPAVLGIALIAMAEELGAEMAVRSLERLLQYGEQNIRRAVPLALGILCISNPKVNVMDTLSRLSHDADADVSMAAIISLGLIGAGTNNARIAGMLRNLSSYYYKEAAHLFCVRIAQGLVHLGKGLLTLSPYHSDRFLLSPMALGGLVTVLHACLDMKSTILGKYHYILYIIVLAMQPRMLLTVDEDLKPLPVPVRVGQAVDVVGQAGRPKTITGFQTHSTPVLLAAGERAELATEKYIPLTPVLEGFVILKKNPEYHEE

SEQ ID NO: 97332 - protein, 890 aa, Setaria italica
  misc_feature (345)..(345): Xaa can be any naturally occurring amino acid
  Transcript Sequence Number=SeqID_31358
  Gene Ontology: Mol. function=enzyme regulator activity; Cellular component=proteasome complex; Biological process=regulation of protein catabolic process
  Homolog annotation: Hit_ID=Q5Z854; Match level="QueryCoverage=92%, HitCoverage=100%, E-value=0.0, Identity=79%"; Hit description =Putative 26S proteasome regulatory subunit S2
  Pfam annotation: Domain name=PC_rep; Domain location=413-446; Score =26.7; E_value=9.7e-05; Accession=PF01851.14; Description =Proteasomecyclosome repeat
  Pfam annotation: Domain name=PC_rep; Domain location=447-483; Score =27.3; E_value=6.4e-05; Accession=PF01851.14; Description =Proteasomecyclosome repeat
  Pfam annotation: Domain name=PC_rep; Domain location=484-518; Score =33.5; E_value=8.7e-07; Accession=PF01851.14; Description =Proteasomecyclosome repeat
  Pfam annotation: Domain name=PC_rep; Domain location=522-556; Score =7.1; E_value=1.5; Accession=PF01851.14; Description=Proteasomecycloso me repeat
  Pfam annotation: Domain name=PC_rep; Domain location=670-704; Score =13.3; E_value=0.21; Accession=PF01851.14; Description=Proteasomecyclo some repeat
  Pfam annotation: Domain name=PC_rep; Domain location=705-739; Score =27.7; E_value=4.7e-05; Accession=PF01851.14; Description =Proteasomecyclosome repeat
  Pfam module annotation: Pfam domain module=PC_rep::PC_rep::PC_rep::PC_ rep::PC_rep::PC_rep; Domain location=413-446::447-483::484-518::522 -556::670-704::705-739
MAPEQPNPAAPSEHSQPPPPAAVKGKEKAKKKEEDDLSEEDQALKEQLELYVLRAQDSDPGVQKLALESMRQEIRSATSSMTSVPKPLKFLRPHYGTLKSYFETMPESELKKYMADILSVLALTMSLEGERESLKYRLLGSEGDIGSWGHEYVRNLAGEIAQEFQKRQDDDLPIDALMELVQQIISFHMKHNAEPEAVDLLMEVEDLDLLVEHVDATNYKRACLYLTSSSKYLPAPDDMLALDIAYTIYMKFGDLASALRIALQLDKPMQYVKQVYTSTDDFLLKKQFSYIIARHGLAMEIDDEIASDDNDKEVLQEIVNNTKLSEGYLTLARDIEVMEPKSPEXIYKVHLIDGRGASSSLDSARQNLAATFVNAFVNAGFGQDKLMTAPSDSSSSGSSGNWLFKNKEHGKASAAASLGMILLWDTDSGLAQLDKYLHSNDTHVVAGALLGIGIVTCSVKNDCDPALAILMEYIGKDDSNIRIGAILGLGIAYAGSQKEELKMHLSAVLGDSQSPLEVLVFSAIALGLVFVGSCNEEIAQSIIFALMERSEAELSEPIIRLLPVALGLLYLGKQESVEATAEVSKTFDEKIGKYCDVTLMSLAYAGTGNVLKVQKLLGICSQHLEKGETHQGPAVLGIALIAMAEELGAEMAVRSLERLLQYGEQNIRRAVPLALGILCISNPKVNVMDTLSRLSHDADADVSMAAIISLGLIGAGTNNARIAGMLRNLSSYYYKEAAHLFCVRIAQGLVHLGKGLLTLSPYHSDRFLLSPMALGGLVTVLHACLDMKSTILGKYHYILYIIVLAMQPRMLLTVDEDLKPLPVPVRVGQAVDVVGQAGRPKTITGFQTHSTPVLLAAGERAELATEKYIPLTPVLEGFVILKKNPEYHEE

SEQ ID NO: 97333 - protein, 204 aa, Setaria italica
  Transcript Sequence Number=SeqID_31359
  Homolog annotation: Hit_ID=B6TYE1; Match level="QueryCoverage=88%, HitCoverage=56%, E-value=2e-82, Identity=84%"; Hit description =Myosin-like protein
RALAEQAAHIEAEARAVAAARAEVDQVHADIQVLARARAELVSRLQVLRDHLARKKAEASKTDSVRAQIETMRREIQKGRAAVDFEKKAHSDNLEQSKAMEKNMIAVASEIERLRGELLNAEKGTTAVNSAAAVPNSGYPAAYGNSEATYPGMYGNPDPTYAAHSYPDAYSTNQAHMHTEGNSHYMSQPVSYGQYESQHTNVQR

SEQ ID NO: 97334 - protein, 81 aa, Setaria italica
  Transcript Sequence Number=SeqID_31360
EPPLAPTGGGTGSGKREKLCRSTHSEIEMAESLDVAPDDANGSAAVQIEPSHEDVLCHDLDSMASLYDEVIAGLNYSKFMT

SEQ ID NO: 97335 - protein, 86 aa, Setaria italica
  misc_feature (5)..(5): Xaa can be any naturally occurring amino acid
  misc_feature (15)..(15): Xaa can be any naturally occurring amino acid
  Transcript Sequence Number=SeqID_31361
  Gene Ontology: Mol. function=RNA-directed DNA polymerase activity; Cellular component=chromatin; Biological process=chromatin assembly or disassembly
  Homolog annotation: Hit_ID=Q7Y006; Match level="QueryCoverage=95%, HitCoverage=7%, E-value=5e-29, Identity=63%"; Hit description =Putative polyprotein
DGQTXRVNQCMETFXLRCFVNACPSKWVDWIYLAEFWYNSSWHSALGFSPFQVLYGYAPKHFGIDSLSACPIPSLEEWLQEKICCI

SEQ ID NO: 97336 - protein, 117 aa, Setaria italica
  misc_feature (45)..(45): Xaa can be any naturally occurring amino acid
  misc_feature (59)..(59): Xaa can be any naturally occurring amino acid
  Transcript Sequence Number=SeqID_31362
  Gene Ontology: Mol. function=zinc ion binding; Cellular component =intracellular
  Homolog annotation: Hit_ID=B6TD07; Match level="QueryCoverage=93%, HitCoverage=39%, E-value=3e-34, Identity=67%"; Hit description=TRAF type zinc finger domain containing 1
  Pfam annotation: Domain name=zf-TRAF; Domain location=1-42; Score =0.6; E_value=0.06; Accession=PF02176.10; Description=TRAF-type zinc finger
TLCKETIERESWDLHKSEKCPQRMVACEYCEFELPAVDLKEHQVXFVPLKPCNLEISFXMFSSHHFEMQDVCGNRTEYCQTCRKYIRLREWIGHEIQCHTNSNGSAETSRYGQTSLF

SEQ ID NO: 97337 - protein, 206 aa, Setaria italica
  Transcript Sequence Number=SeqID_31363
  Gene Ontology: Mol. function=zinc ion binding; Cellular component =intracellular; Biological process=RNA processing
  Homolog annotation: Hit_ID=B6TD07; Match level="QueryCoverage=91%, HitCoverage=91%, E-value=8e-83, Identity=79%"; Hit description=TRAF type zinc finger domain containing 1
  Pfam annotation: Domain name=zf-TRAF; Domain location=35-86; Score =19.3; E_value=0.00047; Accession=PF02176.10; Description=TRAF-type zinc finger
  Pfam annotation: Domain name=zf-TRAF; Domain location=88-139; Score =3.4; E_value=0.029; Accession=PF02176.10; Description=TRAF-type zinc finger
  Pfam module annotation: Pfam domain module=zf-TRAF::zf-TRAF; Domain location=35-86::88-139
MAAAGADSDPASAVPAVSTCAHCQREIPSSNIDLHSVHCARNLQKCQHCGEMVPRKLMDEHYDENHAPMNCTLCKETIERESWDLHKSEKCPQRMVACEYCEFELPAVDLKEHQDVCGNRTEYCQTCRKYIRLREWIGHEIQCHTNSNGSAETSRTIPEREVRPPPPVRPARPAHGSQHKRLLFTIAVTGIAVMVGSILFQRDEGF

SEQ ID NO: 97338 - protein, 122 aa, Setaria italica
  Transcript Sequence Number=SeqID_31364
  Gene Ontology: Mol. function=transferase activity, transferring groups other than amino-acyl groups
  Homolog annotation: Hit_ID=Q9SND7; Match level="QueryCoverage=95%, HitCoverage=24%, E-value=8e-12, Identity=33%"; Hit description =Anthranilate N-hydroxycinnamoyl/benzoyltransferase-like protein
RGSPGLFMNYIQKGLLFAQPPLPTTELVDHLPAALAGALASYYPVAGRFVTEQHRDDQGDVVGCSFAIDCGGQGVDILHAVADGVAVADVIPPDTDVPRIVQALFPLNGAVNYDGHELPVFV

SEQ ID NO: 97339 - protein, 96 aa, Setaria italica
  Transcript Sequence Number=SeqID_31365
  Gene Ontology: Mol. function=transferase activity, transferring groups other than amino-acyl groups; Cellular component=cytoplasm; Biological process=biosynthetic process
  Homolog annotation: Hit_ID=Q5ZBB6; Match level="QueryCoverage=100%, HitCoverage=27%, E-value=3e-31, Identity=75%"; Hit description =Chalcone synthase-like
  Pfam annotation: Domain name=ACP_syn_III; Domain location=1-79; Score= -6.9; E_value=0.0049; Accession=PF08545.2; Description=3-Oxoacyl -[acyl-carrier-protein (ACP)]
GGCTALGLSKDLAENNPGARVLVVCSEVCTLSLRGPSESHTGDLVGQAILGDAAGAVVVGSRPAADEHAMFELVLTCQETVPGTEEALVSKLREEG

SEQ ID NO: 97340 - protein, 161 aa, Setaria italica
  misc_feature (15)..(15): Xaa can be any naturally occurring amino acid
  Transcript Sequence Number=SeqID_31366
  Gene Ontology: Mol. function=nucleic acid binding
  Homolog annotation: Hit_ID=Q337N7; Match level="QueryCoverage=99%, HitCoverage=10%, E-value=2e-76, Identity=84%"; Hit description=SNF2 domain-containing protein, putative, expressed
SSILLEQLDAAGIEXPRLYKSIESQVPNVCETEAWKSRAHWAGSKVPEEANQSIKKADEYLQSCRPVRRKHGRLLEEGASGFLAGKIPVGDGDSIQCHERSWSSFNELIKSKESAENTFGSSNWASVYLASTPQEAAALGLQFPGVDEVEEISEVDGVFDD

SEQ ID NO: 97341 - protein, 117 aa, Setaria italica
  Transcript Sequence Number=SeqID_31367
  Gene Ontology: Mol. function=protein binding
  Homolog annotation: Hit_ID=B9MT35; Match level="QueryCoverage=82%, HitCoverage=58%, E-value=2e-29, Identity=61%"; Hit description=SAUR family protein
  Pfam annotation: Domain name=Auxin_inducible; Domain location=59-117; Score=110.9; E_value=4.2e-30; Accession=PF02519.6; Description=Auxin responsive protein
LGANKQQREDEVPDVDEEMVASAIPPFVLRRLRRADTADSVLSDDESCHSPEPPPDVPRGYCPVYVGPEQRRFVIPTTYLAHPVFRLLLEKAEEEFGFRHEGALAIPCETEAFKYIL

SEQ ID NO: 97342 - protein, 64 aa, Setaria italica
  Transcript Sequence Number=SeqID_31368
VTAAAAWGGTLGIGATSEQALAGDGRQRIARREGGHAAGRLRPLRLAQRSGGCVASGLARRVGA

SEQ ID NO: 97343 - protein, 573 aa, Setaria italica
  Transcript Sequence Number=SeqID_31369
  Homolog annotation: Hit_ID=Q7XKB6; Match level="QueryCoverage=84%, HitCoverage=72%, E-value=1e-109, Identity=41%"; Hit description =OSJNBa0064G10.15 protein
  Pfam annotation: Domain name=DUF639; Domain location=1-568; Score =756.3; E_value=2.1e-224; Accession=PF04842.4; Description=Plant protein of unknown function (DUF639)
GYLADKNFRRLSFDMMLAWDAPSSSSQHSVKVEVDSTVSLEAFTRIAPAIPTIVDVVTCSNLFDVLSCSSGGRLPFSVYDKYLSELDRAVKKMKTQSESSLLSNLRSQRGERILEVDGTLTTQPVLEHVGISTWPGRLILTDHALYFEALRVVTYDKPKAYELAEDVKQVVKPELTGPWGSRLFDKAVMYKSTTLTEPVIIEFPELAGHSRRDYWLAIISEVLYAHRFVRKFDISGVDKEETILKAVLGILRLQAIEQLGFPVPNRYESLLMFNLCDKVPGGDLILETLASVISSRTSDRTNQPGTSRGMHAVLSNLGVVSPVNNGERIFVGEMVVGEISSLQKAVIDSMNNYKKVELAQASVDGVKVDGLDTNLAVMKELLSPVSELWRILLLLTSWDEPLKSMVFCLLFSYIIIRGWVVYFMVMVLLFSAAFMFLTRLTNQGKPMTEVKVVSPPPMNTMEQLLAVQNAISKIEELVQDANIVLLKIRALLLAFPSQATDRAILALVLMALSLAIVPTRVLMLLMFLEVCTNNSPPRRASTERWTRRLREWWFSIPAAPVVVEKETEDKKTR

SEQ ID NO: 97344 - protein, 89 aa, Setaria italica
  misc_feature (47)..(47): Xaa can be any naturally occurring amino acid
  misc_feature (55)..(55): Xaa can be any naturally occurring amino acid
  Transcript Sequence Number=SeqID_31370
  Gene Ontology: Mol. function=protein serine/threonine kinase activity; Biological process=protein amino acid phosphorylation
  Homolog annotation: Hit_ID=B8QUJ2; Match level="QueryCoverage=56%, HitCoverage=10%, E-value=6e-15, Identity=84%"; Hit description=NPKL3
  Subcellular localization annotation: CTP_CleavageSite=43; ConfidenceScore=5.01e-01
WSPRAAAGECQLFLEFAPSGSARGRRAPGRARRPSVMAPEVARGEEXQGPAADVXALGCTVIEMATGCAPWSDVGDLLAAVHRIGWPRK

SEQ ID NO: 97345 - protein, 305 aa, Setaria italica
  Transcript Sequence Number=SeqID_31371
  Gene Ontology: Mol. function=protein serine/threonine kinase activity; Biological process=protein amino acid phosphorylation
  Homolog annotation: Hit_ID=B8QUJ2; Match level="QueryCoverage=99%, HitCoverage=62%, E-value=1e-101, Identity=67%"; Hit description=NPKL3
  Pfam annotation: Domain name=Pkinase; Domain location=1-153; Score =24.5; E_value=6e-10; Accession=PF00069.17; Description=Protein kinase domain
  Pfam annotation: Domain name=Pkinase_Tyr; Domain location=1-153; Score=-95.2; E_value=2.1e-07; Accession=PF07714.9; Description =Protein tyrosine kinase
  Pfam module annotation: Pfam domain module=Pkinase::Pkinase_Tyr; Domain location=1-153::1-153
DIRAYAGDVARGLAYLHARALVHGDVKARNVVIGADGRARLADFGCARPVESARPIGGTPAFMAPEVARGDEQGPAADVWALGCTVVEMATGRAPWSDMDDLLAAVHRIGYTDAVPEVPAWLSAEAKDFLASCFKRRASARPTAAQLLAHPFLASAAAVRDLPAKQEFPSPKSTLHDAFWDSDTEDEADEMSTGAAERIGALACAASALPDWDSDEGWIDLQGDDRSETVDDAPPATAEASAAAEDYFVWAEPSDAAEFEQFFATAATDVSDLLHLPRIAGVTVSTAAISQASYLPMYLGVHENK

SEQ ID NO: 97346 - protein, 112 aa, Setaria italica
  Transcript Sequence Number=SeqID_31372
NGSGGSATRDEPADEDTRGVSCGAWPCLCPKTPDDDNDEQEEDASRGVLCRAVWPCGRASSKPPMPPADRGDQEVASGCMSRLATAATAKIPGFSKCSRGSADHSQSHERKR

SEQ ID NO: 97347 - protein, 73 aa, Setaria italica
  Transcript Sequence Number=SeqID_31373
  Gene Ontology: Mol. function=kinase activity; Cellular component =plasma membrane
  Homolog annotation: Hit_ID=C3SA48; Match level="QueryCoverage=69%, HitCoverage=12%, E-value=2e-16, Identity=82%"; Hit description =Autophagy-related protein 10
  Pfam annotation: Domain name=CaM_binding; Domain location=2-69; Score= 5.3; E_value=9.9e-05; Accession=PF07839.3; Description=Plant calmodulin-binding domain
LRRRGVGGSGGAGAGFVVPAVVLRHQKTLDKKKSQRLYNNVIEETASKLVKTRKSRVKALVGAFESVISKIAK

SEQ ID NO: 97348 - protein, 308 aa, Setaria italica
  Transcript Sequence Number=SeqID_31374
  Gene Ontology: Mol. function=protein serine/threonine kinase activity; Cellular component=nucleus; Biological process=protein amino acid phosphorylation
  Homolog annotation: Hit_ID=Q94CU5; Match level="QueryCoverage=99%, HitCoverage=33%, E-value=1e-101, Identity=65%"; Hit description =Serine/threonine-protein kinase Nek5
ELLADIPYGFKSDIWSLGCCMYEMAAHRPAFKAFDMAGLISKINRSSIGPLPTCYSSSMKTLIKSMLRKSPEHRPTASEILKSPYLQPYVNQYRPFADILHPGRSPEKPVTSSRSSQRSMSGSQCSSISGSDMDSISIQSSERNTSGPASSSNNTIDTEGAENTDLQSHNDTAHPELERQDSSKSVHNNQHPRHEHKQPKIIKKILTTLREESKFRESSSPVRASRVKLNSPSNRERSSDDSKHSDVSSSSRSSEVVTHEPVRLSYEEPVKRGQASPLLKHLSPIVEHSPTVKNKLDERLHPDPAKQF

SEQ ID NO: 97349 - protein, 494 aa, Setaria italica
  Transcript Sequence Number=SeqID_31375
  Gene Ontology: Mol. function=protein serine/threonine kinase activity; Biological process=protein amino acid phosphorylation
  Homolog annotation: Hit_ID=Q94CU5; Match level="QueryCoverage=98%, HitCoverage=51%, E-value=1e-129, Identity=53%"; Hit description =Serine/threonine-protein kinase Nek5
PVRLSYEEPVKRGQASPLLKHLSPIVEHSPTVKNKLDERLHPDPAKQFGEDADATAGKAKNKTPPSFIRCTSIPARRQGAASPSRQHTGIKRAHNKVVAEHAKSPSRPPHSPNNAFVELPAFPMIPPGHLDGIQRKPASSRAKSAPPRAVTTKEESSACSSSTVGYAENSNQSEPSEPDSPTYLPPSCKCSIPDTTIQAHGVTIKPSSEVKTTSFQKKMTSNGDISPISYMQPSSDITEEEFVCKDDMPSSKVGLDSDTVTVQGDEDKFTVQELLSSIPDAAFFAPTTSIAPDRGSFPLQSSEKSTATRLIPPVEDVIHVISHSSSHVNGEQAEKETEAQSTDVGKLLNVVREERDVRSMQPSLIPSGPIDSATQKLSVVDANTTIHKPAGTDVLKLPTIPEGNFSTPETNNGYKEEAAPAKEILDVTSFRQRAEALEGLLELSADLLESSRLEELAIVLKPFGKAKVSPRETAIWLAKSFKGMMNDEASRSST

SEQ ID NO: 97350 - protein, 118 aa, Setaria italica
  misc_feature (96)..(96): Xaa can be any naturally occurring amino acid
  Transcript Sequence Number=SeqID_31376
  Gene Ontology: Mol. function=metal ion binding; Cellular component =intrinsic to membrane; Biological process=innate immune response
  Homolog annotation: Hit_ID=B9SJF7; Match level="QueryCoverage=98%, HitCoverage=32%, E-value=1e-50, Identity=55%"; Hit description=Ran GTPase binding protein, putative
  Pfam annotation: Domain name=RCC1; Domain location=36-85; Score=23.2; E_value=0.001; Accession=PF00415.10; Description=Regulator of chromosome condensation (RCC1)
TGRCDILLPKPLESSLVLDVYHVDCGVKHAALVTKSGEVFTWGEDSGGRLGHGTREDSVHPRLVESLTVSNIDFVACGEFHTCAVTTTGELYTWGXGTHNVGLLGHGNDVGHWIPKRI

SEQ ID NO: 97351 - protein, 70 aa, Setaria italica
  misc_feature (13)..(13): Xaa can be any naturally occurring amino acid
  Transcript Sequence Number=SeqID_31377
  Gene Ontology: Mol. function=transferase activity, transferring glycosyl groups; Cellular component=plasma membrane
  Homolog annotation: Hit_ID=Q7XZZ4; Match level="QueryCoverage=100%, HitCoverage=6%, E-value=9e-20, Identity=72%"; Hit description=C2 domain-containing protein, putative, expressed
  Pfam annotation: Domain name=PRT_C; Domain location=1-70; Score=14.7; E_value=2.5e-09; Accession=PF08372.2; Description=Plant phosphoribosyltransferase C-ter
LLSWRDPRATGVXFAVVTLLAALVLYAVPFKVLLLGMGFYYLRHPRFRGDMPSAGFNFFRRLPSLSDRVL

SEQ ID NO: 97352 - protein, 103 aa, Setaria italica
  Transcript Sequence Number=SeqID_31378
  Subcellular localization annotation: CTP_CleavageSite=82; ConfidenceScore=5.44e-01
RLCGHAAPALLLLLLLGRRSQIHRAAPPARPPPRSRPAKTPTASQAVVRGRTLTAGGVRAREAGRPLSSGVPRGVPGTRRVVARYSRRCRCKCSPQIRHEPPF

SEQ ID NO: 97353 - protein, 102 aa, Setaria italica
  Transcript Sequence Number=SeqID_31379
  Gene Ontology: Mol. function=protein binding; Biological process =defense response
  Homolog annotation: Hit_ID=Q2R0A3; Match level="QueryCoverage=97%, HitCoverage=13%, E-value=8e-19, Identity=45%"; Hit description =Leucine Rich Repeat family protein, expressed
EEMMIFCYSKLSTQQKGCLQYLTAFLQESSISRTSIVRRWVAEGLIGREQGTTHEEAGESCFHELQLRCFVRPKAIGDSGTVKSCIMDKSVREFIINISKRR

SEQ ID NO: 97354 - protein, 69 aa, Setaria italica
  Transcript Sequence Number=SeqID_31380
  Subcellular localization annotation: CTP_CleavageSite=51; ConfidenceScore=5.60e-01
VQFSSPSPSPSPSSKFSTVWLWPFAAPPASHGQVHLGLQLPGPPLLSAITTAAALARRLRLAFLVGICR

SEQ ID NO: 97355 - protein, 89 aa, Setaria italica
  Transcript Sequence Number=SeqID_31381
  Homolog annotation: Hit_ID=B6T3N5; Match level="QueryCoverage=96%, HitCoverage=24%, E-value=1e-38, Identity=86%"; Hit description =Protein-tyrosine phosphatase mitochondrial 1
MRCSESDLEGYNADALALNMGSGLWEISLIYRAQFASKAAFAGFSYLWLRCRACKEALPENVATETCSLEAEQIATGHPCLLQGVVVNP

SEQ ID NO: 97356 - protein, 347 aa, Setaria italica
  Transcript Sequence Number=SeqID_31382
  Gene Ontology: Mol. function=protein tyrosine/serine/threonine phosphatase activity; Biological process=protein amino acid dephosphorylation
  Homolog annotation: Hit_ID=B6T3N5; Match level="QueryCoverage=100%, HitCoverage=100%, E-value=1e-170, Identity=86%"; Hit description =Protein-tyrosine phosphatase mitochondrial 1
  Pfam annotation: Domain name=DSPc; Domain location=82-223; Score =47.4; E_value=5.5e-11; Accession=PF00782.12; Description=Dual specificity phosphatase, catalytic domain
MRIEELPGDSGGGGGGEGGEELPQLRRGDCGAAAGEGGVVMRVAVDAKRAAVGVGARMLFYPTLCYNVVRNRLESHFHWWDQVDEHVLLGAVPFPSDVLRLKELGVSGVVTLNESYERLVPRSLYEAHGIENLVLPTRDYLYAPSFVNLCEATDFIHRNALSGKLTYVHCKAGRGRSTTVVICYLVQYKNMTPAEAYEHVRLRRPRVLLASAQWQAVQEFYQLRVKKTGRSTCLDNPIIKPPLFLATRNLVAFDDSAFVMVSESDLEGYNADALALNMGSGLWEISLIYRAQFASKAAFAGFSYLWLRCRACKEALPENVATETCSLEAEQIATGHPCLLQGVVVNP

SEQ ID NO: 97357 - protein, 216 aa, Setaria italica
  misc_feature (194)..(194): Xaa can be any naturally occurring amino acid
  misc_feature (214)..(214): Xaa can be any naturally occurring amino acid
  Transcript Sequence Number=SeqID_31383
  Gene Ontology: Cellular component=intracellular; Biological process =RNA processing
  Homolog annotation: Hit_ID=B9RXI9; Match level="QueryCoverage=86%, HitCoverage=25%, E-value=3e-61, Identity=62%"; Hit description =Hepatocellular carcinoma-associated antigen, putative
  Pfam annotation: Domain name=U3_assoc_6; Domain location=9-61; Score=- 6.1; E_value=0.0041; Accession=PF08640.3; Description=U3 small nucleolar RNA-associated protein
GFGVRNRSHRRRRRRDFEFRIRRHSPLRQDFLDYIAYELRLDSLRNLRKRAIIRAADSESDDDDRGSDDEGGSKKRKRKRGKKWKKSISDVAGVLRVLDIYRMATVRFKGDLDLWFRYLEFCRDKRHGRMKQVLAQAIRFHPKVPGLWIYAAAWEFDQNLNVAAARALMQSGLRSCPDSEDMWIEYLRMELTYXNKLKARKVALGEDVKMLQKXDN

SEQ ID NO: 97358 - protein, 171 aa, Setaria italica
  Transcript Sequence Number=SeqID_31384
  Gene Ontology: Mol. function=structural constituent of cell wall
  Homolog annotation: Hit_ID=B6TV36; Match level="QueryCoverage=100%, HitCoverage=47%, E-value=1e-60, Identity=72%"; Hit description=Root cap protein 2
  Pfam annotation: Domain name=Root_cap; Domain location=79-136; Score =114.7; E_value=3.2e-31; Accession=PF06830.3; Description=Root cap
  Subcellular localization annotation: CTP_CleavageSite=48; ConfidenceScore=5.30e-01
ITFDGAPVPLDAAAGASWSPTAAPALSIFRTGAANGVVVRLDGRFRIVADAVPVTEEDSRVHGYGIRPEDGSLAHLNVAFKFYAISADVHGVLGQTYRPDYVSAGVDAGARVPVMGGAARYQVSDILATDCEVARFAGDDAGLAGPMDIIEEPTDALCGSGKGGAGLVCKK

SEQ ID NO: 97359 - protein, 70 aa, Setaria italica
  Transcript Sequence Number=SeqID_31385
MKKRIYLFVVSRNSWIQVLRPICNKMRLNFKKHNSNVRSICSDIQVQASKPLICIIFRCCRLLLIIGATC

SEQ ID NO: 97360 - protein, 116 aa, Setaria italica
  Transcript Sequence Number=SeqID_31386
  Gene Ontology: Mol. function=transferase activity
  Homolog annotation: Hit_ID=B9SM34; Match level="QueryCoverage=100%, HitCoverage=72%, E-value=5e-34, Identity=37%"; Hit description =Pentatricopeptide repeat-containing protein, putative
  Pfam annotation: Domain name=PPR; Domain location=10-44; Score=43.7; E_value=7.2e-10; Accession=PF01535.12; Description=PPR repeat
  Pfam annotation: Domain name=PPR; Domain location=45-79; Score=47.6; E_value=4.9e-11; Accession=PF01535.12; Description=PPR repeat
  Pfam annotation: Domain name=PPR; Domain location=80-114; Score=43.5; E_value=8.6e-10; Accession=PF01535.12; Description=PPR repeat
  Pfam module annotation: Pfam domain module=PPR::PPR::PPR; Domain location=10-44::45-79::80-114
RQDNILPDLITFNTLIYGYVKEEKMDEAFNVFNIMEKEMVQPDVVTYNMLINGFSEHGNVQEAGWIFKKMGERGIEPDRYTYMSMINGHVAAGNSKEAFQLHDEMIHRGFAPDDKF

SEQ ID NO: 97361 - protein, 192 aa, Setaria italica
  Transcript Sequence Number=SeqID_31387
NAASRRTNTGVAVSGHQLPTTSPEIWLYTVAPSNLASSRKAGCWQGIWQPSEDHLHAGLFSEADLSATSYHASHMPNSWSQLAHGSSLPSPSCQAEVLPSRHRFKHLLPVAFRHRGHPHLKSLTRPPPIPPRGPNPPWSELRIDTAAALRDRSPPNKQGSYRGAAHHHQNSEDDTFKKDTMLAALSPPAQKT

SEQ ID NO: 97362 - protein, 63 aa, Setaria italica
  misc_feature (39)..(39): Xaa can be any naturally occurring amino acid
  Transcript Sequence Number=SeqID_31388
MGLLSNRIGKESLKAGDHIYSWRAAWVYAHHGPKSRVEXDGIYVGDDKVIHFTRGRDQEVGTG

SEQ ID NO: 97363 - protein, 99 aa, Setaria italica
  Transcript Sequence Number=SeqID_31389
  Gene Ontology: Mol. function=ARF guanyl-nucleotide exchange factor activity; Cellular component=intracellular; Biological process =regulation of ARF protein signal transduction
  Homolog annotation: Hit_ID=Q7F8R6; Match level="QueryCoverage=96%, HitCoverage=5%, E-value=4e-47, Identity=91%"; Hit description =Putative guanine nucleotide-exchange protein GEP2
TSVMCMQTQRDAFVTSVAKFTYLHCAADMKQKNVDAVKAIISIAIEDGDYLQEAWEHILTCLSRFEHLHLLGEGAPTDASFLTVPLVDSERKNNKSPPL

SEQ ID NO: 97364 - protein, 116 aa, Setaria italica
  misc_feature (101)..(101): Xaa can be any naturally occurring amino acid
  Transcript Sequence Number=SeqID_31390
  Gene Ontology: Cellular component=integral to peroxisomal membrane; Biological process=peroxisome organization and biogenesis
  Homolog annotation: Hit_ID=B6SVD8; Match level="QueryCoverage=93%, HitCoverage=23%, E-value=2e-48, Identity=83%"; Hit description=LHT1
PYNKPKWLIALANMMVVVHLLGGYQIYAMPVFDMLETVLVRKFWFPPGLMLRLIARTAYVAFTMFVAITFPFFNELLSFFGGFAFAPTTYFLPCIMWLTVXKPKRFSLSWFQPTWG

SEQ ID NO: 97365 - protein, 163 aa, Setaria italica
  misc_feature (10)..(10): Xaa can be any naturally occurring amino acid
  misc_feature (54)..(54): Xaa can be any naturally occurring amino acid
  Transcript Sequence Number=SeqID_31391
  Gene Ontology: Mol. function=GTP binding; Cellular component =intracellular; Biological process=small GTPase mediated signal transduction
  Homolog annotation: Hit_ID=B9S055; Match level="QueryCoverage=98%, HitCoverage=25%, E-value=2e-60, Identity=70%"; Hit description=GTP -binding protein enga, putative
  Pfam annotation: Domain name=MMR_HSR1; Domain location=31-158; Score =116.6; E_value=8.4e-32; Accession=PF01926.15; Description=GTPase of unknown function
HLIDGLNQEXPTAGFETEAHEDEGDESKLPLQLAIVGRPNVGKSTLLNTLLQEXRVLVGPEAGLTRDSIRAQFQFDNRTVYLVDTAGWMERSGKEKGPASLSVVQSRKNLMRAHIVALVLDAEKIAKSKSSMNHPEVVIARQAIEEGRGLVVIVNKMDLLRDN

SEQ ID NO: 97366 - protein, 77 aa, Setaria italica
  misc_feature (35)..(35): Xaa can be any naturally occurring amino acid
  misc_feature (52)..(52): Xaa can be any naturally occurring amino acid
  Transcript Sequence Number=SeqID_31392
  Subcellular localization annotation: CTP_CleavageSite=37; ConfidenceScore=5.79e-01
SRSTRTPPPPLPPLQLSSPSPCPPLPSPARSQRTXPRGRSPAGPPLSGFPVXPWAPRPPPASIQVRGPPPPPLPLLQ

SEQ ID NO: 97367 - protein, 100 aa, Setaria italica
  Transcript Sequence Number=SeqID_31393
  Subcellular localization annotation: CTP_CleavageSite=46; ConfidenceScore=5.44e-01
SRKSSFGRKQRAASGGGGNSHIRKSRSAQLKLDVEDLVSNSAALSRASSASLGFSFTFTGFTPPPQYMHSADPATFSDDDTPLDIEAGTRRRKKLMTEPT

SEQ ID NO: 97368 - protein, 39 aa, Setaria italica
  Transcript Sequence Number=SeqID_31394
LRLTDMIKGPIEISRSRRLTLYGVLACLHGLRRRCPLVF

SEQ ID NO: 97369 - protein, 51 aa, Setaria italica
  Transcript Sequence Number=SeqID_31395
RPRNKIWFISSIFIPLPRTFKWIVVFHYSQNHYITIYYSCRLSVEPSLLNK

SEQ ID NO: 97370 - protein, 74 aa, Setaria italica
  Transcript Sequence Number=SeqID_31396
EYGAFTPAEAPHINHGDQVSTALQAFLQKILGRFFVCLSTCHRVADCRDPVHCFRCRRSSHLYYSCRLLLSLHS

SEQ ID NO: 97371 - protein, 69 aa, Setaria italica
  Transcript Sequence Number=SeqID_31397
GFDDGRTQPFIYRGIKVMGIYMYPEGGYIRFGFERCLYYILYLHLLVFQVSCRCIDMNAWFVNSNDKLC

SEQ ID NO: 97372 - protein, 60 aa, Setaria italica
  Transcript Sequence Number=SeqID_31398
NIYRGIKVMGIYMYPEGGYIRFGFERCLYYILYLHLLVFQVSCRCIDMNAWFVNSNDKLC

SEQ ID NO: 97373 - protein, 41 aa, Setaria italica
  Transcript Sequence Number=SeqID_31399
ENSNEEFTINSAPGYDGIARIVKCTRFLQVYLLTYRRVYNQ

SEQ ID NO: 97374 - protein, 145 aa, Setaria italica
  Transcript Sequence Number=SeqID_31400
  Homolog annotation: Hit_ID=B6T285; Match level="QueryCoverage=60%, HitCoverage=50%, E-value=2e-20, Identity=52%"; Hit description =Membrane protein
MAGYRALGVLLAAAALLAAAARAADDDHMHQWRCFKSCARDCQEEDAAEDGAPGDGGGVSRRCKTGCLHECFEDLPALCYEQCVVSTCLCLPPYSKEKVTCMKNCCDKCFHHGPPAPGPGPKPPKLPLPPPLTKIAAAFSTNLSL

SEQ ID NO: 97375 - protein, 135 aa, Setaria italica
  Transcript Sequence Number=SeqID_31401
  Homolog annotation: Hit_ID=B6T476; Match level="QueryCoverage=61%, HitCoverage=49%, E-value=9e-25, Identity=60%"; Hit description =Membrane protein
MAGYRAVGILLAAAALLAAAASGAADDEHMYHLKCFKSCTNNCHGEEDALDAGVSAGRCKTGCLHECFEELPALCYQQCVVKTCLCLPPYSKEKVTCMKKCCGKCFHHGPKPGPSPKPPGSKSKPCPCPPPGSKP

SEQ ID NO: 97376 - protein, 189 aa, Setaria italica
  misc_feature (176)..(176): Xaa can be any naturally occurring amino acid
  Transcript Sequence Number=SeqID_31402
  Gene Ontology: Mol. function=dihydrolipoyllysine-residue succinyltransferase activity; Cellular component=oxoglutarate dehydrogenase complex; Biological process=tricarboxylic acid cycle
  Homolog annotation: Hit_ID=B6SJN5; Match level="QueryCoverage=87%, HitCoverage=37%, E-value=6e-76, Identity=85%"; Hit description =Dihydrolipoyllysine-residue succinyltransferase component of 2 -oxoglutarate dehydrogenase complex
  Pfam annotation: Domain name=Biotin_lipoyl; Domain location=74-147; Score=75.2; E_value=2.3e-19; Accession=PF00364.14; Description =Biotin-requiring enzyme
  Subcellular localization annotation: CTP_CleavageSite=55; ConfidenceScore=5.10e-01
MASRIASGLLRRRAGANLGLLRSYTHVRNYSSQLSALIPATSQCSKLTRRYYMPNASPYQVWSRSFASDNEDKVEAVVPFMGESVTDGTLANFLKKPGDRVEADEPIAQIETDKVTIDVASPEAGVIEKFIASEGDTVTPGTKIAIISKSAQSAETHVAPSEEATPKESSPPKLKXETKVEEKAPKVEP

SEQ ID NO: 97377 - protein, 293 aa, Setaria italica
  Transcript Sequence Number=SeqID_31403
  Gene Ontology: Mol. function=dihydrolipoyllysine-residue succinyltransferase activity; Cellular component=oxoglutarate dehydrogenase complex; Biological process=tricarboxylic acid cycle
  Homolog annotation: Hit_ID=B6SJN5; Match level="QueryCoverage=94%, HitCoverage=63%, E-value=4e-94, Identity=65%"; Hit description =Dihydrolipoyllysine-residue succinyltransferase component of 2 -oxoglutarate dehydrogenase complex
  Pfam annotation: Domain name=2-oxoacid_dh; Domain location=209-293; Score=-72.8; E_value=4e-08; Accession=PF00198.15; Description=2 -oxoacid dehydrogenases acyltransferase (catalytic domain)
  Pfam annotation: Domain name=Biotin_lipoyl; Domain location=69-142; Score=75.0; E_value=2.7e-19; Accession=PF00364.14; Description =Biotin-requiring enzyme
  Pfam module annotation: Pfam domain module=2-oxoacid_dh::Biotin _lipoyl; Domain location=209-293::69-142
MASRLASRLLLRRPTATMCILRSCSHVRHFSTQLLEGVHKYSKPTRGRNFLPNYQLWSRSFASENGDLVEAVVPFMGESVTDGTLANFLKKPGDRVEADEPIAQIETDKVTIDVSSPEAGVIEKFIASEGDTVTPGTKVAVISKSAIPNEAHVSPPEEASQKETPPPPPAEKNKVEEKSPKVEPVKKQEPKLTMPPLKSSPSEPLLPPKERERRVPMPRLRKRIANRLKDSQNTFAMLTTFNEVDMTNMMKLRSDYKDKFVEKHGVKLGLMSCFVKASVSALQNQPVVNAVID

SEQ ID NO: 97378 - protein, 221 aa, Setaria italica
  Transcript Sequence Number=SeqID_31404
  Gene Ontology: Mol. function=dihydrolipoyllysine-residue succinyltransferase activity; Cellular component=oxoglutarate dehydrogenase complex; Biological process=tricarboxylic acid cycle
  Homolog annotation: Hit_ID=B6SJN5; Match level="QueryCoverage=68%, HitCoverage=35%, E-value=8e-55, Identity=70%"; Hit description =Dihydrolipoyllysine-residue succinyltransferase component of 2 -oxoglutarate dehydrogenase complex
  Pfam annotation: Domain name=Biotin_lipoyl; Domain location=93-166; Score=75.0; E_value=2.7e-19; Accession=PF00364.14; Description =Biotin-requiring enzyme
  Subcellular localization annotation: CTP_CleavageSite=25; ConfidenceScore=5.25e-01
LKSSIRLVVLFGPFVPILPVVILVLASRLASRLLLRRPTATMCILRSCSHVRHFSTQLLEGVHKYSKPTRGRNFLPNYQLWSRSFASENGDLVEAVVPFMGESVTDGTLANFLKKPGDRVEADEPIAQIETDKVTIDVSSPEAGVIEKFIASEGDTVTPGTKVAVISKSAIPNEAHVSPPEEASQKETPPPPPAEKNKVEEKSPKVEPVKKQEPKFNHATT

SEQ ID NO: 97379 - protein, 239 aa, Setaria italica
  misc_feature (174)..(174): Xaa can be any naturally occurring amino acid
  Transcript Sequence Number=SeqID_31405
  Gene Ontology: Mol. function=dihydrolipoyllysine-residue succinyltransferase activity; Cellular component=oxoglutarate dehydrogenase complex; Biological process=tricarboxylic acid cycle
  Homolog annotation: Hit_ID=B6SJN5; Match level="QueryCoverage=100%, HitCoverage=53%, E-value=1e-105, Identity=79%"; Hit description =Dihydrolipoyllysine-residue succinyltransferase component of 2 -oxoglutarate dehydrogenase complex
  Pfam annotation: Domain name=2-oxoacid_dh; Domain location=7-237; Score=463.2; E_value=3.8e-136; Accession=PF00198.15; Description=2 -oxoacid dehydrogenases acyltransferase (catalytic domain)
KPLLPPKERERRVPMPRLRKRIANRLKDSQNTFAMLTTFNEVDMTNMMKLRSDYKDKFVEKHGVKLGLMSCFVKASVSALQNQPVVNAVIDGDDIIYRDYIDISVAVGTSKGLVVPVIRDTDRMNFADIEKGINNLAKKANAGALSIDEMAGGTFTISNGGVYGSLISTPIINXPQSAILGMHSIVQRPMVVDGKITARPMMYLALTYDHRLVDGREAVLFLRRIKDVVEDPRRLLLDI

SEQ ID NO: 97380 - protein, 104 aa, Setaria italica
  Transcript Sequence Number=SeqID_31406
MTPHQYFSILCMFVYCVCYSIYRINMKKSCSDYKDKWTNMMKLCSNYKDNFVERHGVKLGLMSCFVKIATTSVNSFVHCVSALLSSPFFFYLVCVLVSFPRVLF

SEQ ID NO: 97381 - protein, 425 aa, Setaria italica
  Transcript Sequence Number=SeqID_31407
  Gene Ontology: Mol. function=S-methyl-5-thioribose kinase activity; Biological process=methionine biosynthetic process
  Homolog annotation: Hit_ID=B6TDT6; Match level="QueryCoverage=100%, HitCoverage=100%, E-value=0.0, Identity=91%"; Hit description =Methylthioribose kinase
  Pfam annotation: Domain name=APH; Domain location=41-301; Score=31.8; E_value=2.8e-06; Accession=PF01636.15; Description=Phosphotransferase enzyme family
MAAEAEQGFRPLAEASLVAYIKATPALASRLGGGGSLDSVEIKEVGDGNLNFVYIVKSSSGTIVIKQALPYVRCVGDSWPMTRERAYFEASTLREHGRLCPEHTPEVYHFDRAMSLMGMRYIEPPHIILRKGLIAGVEYPLLADHMSNYMAKTLFFTSLLYNNTTDHKKGVAQYCANVEMCRLTEQVVFSDPYRVSKFNRWTSPYLDKDAEAVREDDELKLEVAELKSMFIERAQALIHGDLHTGSIMVTPDSTQVIDPEFGFYGPMGFDIGAFLGNLILAYYAQNGHADQANDRKAYKKWILKTIEESWNLFQNKFVGLWNEHKEGNGEAYLPDIYNNSNLLSLAQKKYMTNLFHDSLGFGSAKMIRRIVGIAHVEDLESIKDASKRAECERAALNCAKTILKGRRQFETIEQVIEHIQSFDRN

SEQ ID NO: 97382 - protein, 77 aa, Setaria italica
  Transcript Sequence Number=SeqID_31408
  Subcellular localization annotation: CTP_CleavageSite=71; ConfidenceScore=5.25e-01
TDSRLPLRIHYRINLVLVPRCETTMSSSSPSGSPHAGSRAKGRPPENPPSPSRRTVLPSPPPTKIQVERSLAFKRWA

SEQ ID NO: 97383 - protein, 170 aa, Setaria italica
  misc_feature (160)..(160): Xaa can be any naturally occurring amino acid
  Transcript Sequence Number=SeqID_31409
  Gene Ontology: Mol. function=protein serine/threonine kinase activity; Biological process=protein amino acid phosphorylation
  Homolog annotation: Hit_ID=B9SFF2; Match level="QueryCoverage=95%, HitCoverage=19%, E-value=3e-56, Identity=64%"; Hit description=S -locus-specific glycoprotein S6, putative
  Pfam annotation: Domain name=Pkinase; Domain location=38-170; Score= -97.9; E_value=0.012; Accession=PF00069.17; Description=Protein kinase domain
  Pfam annotation: Domain name=Pkinase_Tyr; Domain location=39-170; Score=-100.7; E_value=5e-07; Accession=PF07714.9; Description =Protein tyrosine kinase
  Pfam module annotation: Pfam domain module=Pkinase::Pkinase_Tyr; Domain location=38-170::39-170
KAKSTSAADDNIYEDDSVKGSILSSPLVEFSTVYSATNNFSDKLGEGGFGSVYKGILPDGQEIAIKRLSKSSGQGLEEFKNEVTVLSKLQHRNLVRLFGCCIHVEEKMMLYEYMPNKSLDSFIFNESKRLVLGWKLRYKIIQGIGRGLLYLHQDSRLKIXHRDLKASNYF

SEQ ID NO: 97384 - protein, 505 aa, Setaria italica
  Transcript Sequence Number=SeqID_31410
  Gene Ontology: Mol. function=electron carrier activity; Biological process=oxidation reduction
  Homolog annotation: Hit_ID=Q10S01; Match level="QueryCoverage=96%, HitCoverage=95%, E-value=0.0, Identity=76%"; Hit description =Cytochrome P450 family protein, expressed
  Pfam annotation: Domain name=p450; Domain location=22-492; Score =104.4; E_value=3.9e-28; Accession=PF00067.14; Description=Cytochrome P450
TTLVLCFLTLYYHHLQSKKTSPLEPTEWPIVGQLPGLVANIHHFHDWATGVLRGASYNFEARGGRTGLRYFITCDPSNVRHIFTSNFANYPKGDEFAVIFDVLGGGIFNADGESWRRQRVKAQMLMTGSRFRTFTARCSRDKVERSLLPFLAHAADEGAPCDLHNVFLRLTFDMTCTLVFGVDPGCLAIGLPVVPFARAMDDALETLFLRHITPMPCWKLMNRLKVGQEKKMAAARRTIDCFVAATVAKRRADKIEQGITESADLLSSFICHEKDSSHNDDVFLRDTTVNLLLAGRDTTGAALSWFFYLLCKNPRVEQKILDELAPVASRKVTDAAGMVTFEASELGNLVYLHAALCECLRLYPSVPFEHKAVVADDVLPSGKEMKAGDKVLVFSYSMGRMEGVWGKDCAEFRPERWLGDEAGTKLRYEPSYKFISFNAGPRTCLGKEMAFVQMKTAAAAVLWNFAVELVPGHVVEPKLSIILHMKNGLAVRVRRRDDVARHGCC

SEQ ID NO: 97385 - protein, 128 aa, Setaria italica
  Transcript Sequence Number=SeqID_31411
TIITDTGDEPEHLEVNGGLEYTVALESDKMLNIKVENTSINFQFVHGDTQSTTDEVDEQTFVEATIVSWGNIEGRTRPGRIIKEVPCLVEVIKTVSGHLTVVYTIGDAMSFTEFIMVLRRILADHIDR

SEQ ID NO: 97386 - protein, 541 aa, Setaria italica
  Transcript Sequence Number=SeqID_31412
  Gene Ontology: Mol. function=protein serine/threonine kinase activity; Cellular component=plasma membrane; Biological process =protein amino acid phosphorylation
  Homolog annotation: Hit_ID=B9RQT0; Match level="QueryCoverage=84%, HitCoverage=73%, E-value=0.0, Identity=84%"; Hit description =Serine/threonine-protein kinase, putative
  Pfam annotation: Domain name=Pkinase; Domain location=113-420; Score =278.1; E_value=1.9e-80; Accession=PF00069.17; Description=Protein kinase domain
  Pfam annotation: Domain name=Pkinase_C; Domain location=438-487; Score=48.9; E_value=1.9e-11; Accession=PF00433.16; Description =Protein kinase C terminal domain
  Pfam annotation: Domain name=Pkinase_Tyr; Domain location=113-398; Score=-7.2; E_value=3e-13; Accession=PF07714.9; Description=Protein tyrosine kinase
  Pfam module annotation: Pfam domain module=Pkinase::Pkinase _C::Pkinase_Tyr; Domain location=113-420::438-487::113-398
ESEMADAPAAAAIPAAAEPLPAVAEEGEGEAAEAVGSTLTMERVAATKKFIENHYRSQMKNIQERKERRFKLERQLASSQVPKEQQINLIKDLERKETEYMRLKRHKICVDDFELLTIIGRGAFGEVRLCREKTSGHIYAMKKLKKSDMVVRGQVEHVRAERNLLAEVASHCIVKLYYSFQDAEYLYLIMEYLPGGDIMTLLMREDTLTEHVARFYIAETILAIESIHKHNYIHRDIKPDNLLLDKNGHMKLSDFGLCKPIDCSKLSTLNEDEPMGDDNLRESMDVDSSLSDTANGRRWRSQHEQLQHWQMNRRKLAFSTVGTPDYIAPEVLLKKGYGMECDWWSLGAIMYEMLVGYPPFYADDPITTCRKIVHWRNHLKFPEDAKLSNEARDLICRLLCDVDHRIGSAGADQIKAHPWFRGVAWDKLYEMEAAFKPQVNDELDTQNFMKFEELENPPARTGSGPSRKMMLNSKDLSFVGYTYKNFDAVKAIKISDLQRNSSLTRPSIGSIFGPPGMDSPMEPNGRDTHMHTVSSGDPMIP

SEQ ID NO: 97387 - protein, 148 aa, Setaria italica
  Transcript Sequence Number=SeqID_31413
GRGAFAGKRPEREPRRPPRGGVGGGGGGFGMVDENGLDAIYWREFEKDGDGRGRKSWRPPQPPPPRQQQQQRVEMWPEPQQTSSPPSPPRRSRRNKIDQEPLIPVGSLDSASDVFNESLRPPSAGSSSSSFSVDATRPYARPPARRSP

SEQ ID NO: 97388 - protein, 52 aa, Setaria italica
  misc_feature (51)..(51): Xaa can be any naturally occurring amino acid
  Transcript Sequence Number=SeqID_31414
PRTAAAASTLPPARQPTDQPTYSPAAANLRIPSLSLPRDPPLWWWLLFPAXS

SEQ ID NO: 97389 - protein, 71 aa, Setaria italica
  Transcript Sequence Number=SeqID_31415
RAPPPRAQEVQSGVQDAQKQAKALPADQKASGTSPLQVESEEDTQGGIDEDERFSTKRLRRMFDPDAPDSQ

SEQ ID NO: 97390 - protein, 257 aa, Setaria italica
  misc_feature (73)..(73): Xaa can be any naturally occurring amino acid
  Transcript Sequence Number=SeqID_31416
  Gene Ontology: Mol. function=binding
  Homolog annotation: Hit_ID=UPI0001A7B242; Match level="QueryCoverage =89%, HitCoverage=8%, E-value=3e-16, Identity=25%"; Hit description =binding
FTTIHDKFPTGTSTIHEVMTGLIQRLCDEVDPKELPLIYTCLFEEINDCLKDGCLEHLKCLIDFFHLLYIRNXSNVFDKVKIIELVELLVSRYVLPGNNIVEAASSEVLGSILDFLLCVLDVPIISGNLSIVSPFYVPVFELTNLSVIVFIKKLLAKGPQITQYFESQILSAMCNFLSSSPEEVLFILLNFFKGSQKQIILHSTDANHLDSVEKVCKFCESKFSFWIEFLDDTVNISNQSSNQISEKEAAILWDLFV

SEQ ID NO: 97391 - protein, 145 aa, Setaria italica
  misc_feature (43)..(43): Xaa can be any naturally occurring amino acid
  Transcript Sequence Number=SeqID_31417
  Gene Ontology: Mol. function=protein binding
  Homolog annotation: Hit_ID=B6SP96; Match level="QueryCoverage=83%, HitCoverage=20%, E-value=6e-43, Identity=77%"; Hit description =Regulatory subunit
  Pfam annotation: Domain name=LRR_1; Domain location=108-130; Score =3.1; E_value=78; Accession=PF00560.25; Description=Leucine Rich Repeat
  Pfam annotation: Domain name=LRR_1; Domain location=11-33; Score=5.8; E_value=24; Accession=PF00560.25; Description=Leucine Rich Repeat
  Pfam annotation: Domain name=LRR_1; Domain location=35-57; Score=0.6; E_value=2.3e+02; Accession=PF00560.25; Description=Leucine Rich Repeat
  Pfam annotation: Domain name=LRR_1; Domain location=59-82; Score=7.1; E_value=13; Accession=PF00560.25; Description=Leucine Rich Repeat
  Pfam annotation: Domain name=LRR_1; Domain location=84-106; Score =2.8; E_value=89; Accession=PF00560.25; Description=Leucine Rich Repeat
  Pfam module annotation: Pfam domain module=LRR_1::LRR_1::LRR_1::LRR _1::LRR_1; Domain location=108-130::11-33::35-57::59-82::84-106
MHVVDNAGLTGLTHLDLFGARITDYGANCFRCFKNLKSLEVCXGFITDAGVKNIKDLKALTQLNLSQNINLTDKTLELISGLTALVNLNVSNSRVSNAGLKHLKDMQNLRSLSLDSTRVTANEMKKLRANERLDLNTRIQDNRRT

SEQ ID NO: 97392 - protein, 108 aa, Setaria italica
  misc_feature (11)..(11): Xaa can be any naturally occurring amino acid
  misc_feature (18)..(18): Xaa can be any naturally occurring amino acid
  Transcript Sequence Number=SeqID_31418
  Gene Ontology: Mol. function=protein binding
  Homolog annotation: Hit_ID=Q7XQW8; Match level="QueryCoverage=59%, HitCoverage=11%, E-value=2e-20, Identity=81%"; Hit description =OSJNBa0014K14.7 protein
  Pfam annotation: Domain name=LRR_1; Domain location=1-24; Score=4.0; E_value=53; Accession=PF00560.25; Description=Leucine Rich Repeat
  Pfam annotation: Domain name=LRR_1; Domain location=26-48; Score=9.2; E_value=5.4; Accession=PF00560.25; Description=Leucine Rich Repeat
  Pfam annotation: Domain name=LRR_1; Domain location=50-72; Score =11.5; E_value=1.9; Accession=PF00560.25; Description=Leucine Rich Repeat
  Pfam module annotation: Pfam domain module=LRR_1::LRR_1::LRR_1; Domain location=1-24::26-48::50-72
SLISLNLNRCXGIYDDGXENFEGLRKLKVLNLGFNCITDACLVHLKELINLESLNLDSCKIGDEGLQYLKGLVLLQLNPKFKTFNFLRPSKFSHPSHLYQTSLQCQSH

SEQ ID NO: 97393 - protein, 332 aa, Setaria italica
  Transcript Sequence Number=SeqID_31419
  Gene Ontology: Mol. function=protein binding
  Homolog annotation: Hit_ID=B6SP96; Match level="QueryCoverage=99%, HitCoverage=56%, E-value=1e-146, Identity=84%"; Hit description =Regulatory subunit
  Pfam annotation: Domain name=LRR_1; Domain location=137-159; Score =1.2; E_value=1.8e+02; Accession=PF00560.25; Description=Leucine Rich Repeat
  Pfam annotation: Domain name=LRR_1; Domain location=186-209; Score =0.3; E_value=2.6e+02; Accession=PF00560.25; Description=Leucine Rich Repeat
  Pfam annotation: Domain name=LRR_1; Domain location=211-233; Score =7.0; E_value=14; Accession=PF00560.25; Description=Leucine Rich Repeat
  Pfam annotation: Domain name=LRR_1; Domain location=235-258; Score =6.9; E_value=15; Accession=PF00560.25; Description=Leucine Rich Repeat
  Pfam annotation: Domain name=LRR_1; Domain location=260-282; Score =13.2; E_value=0.89; Accession=PF00560.25; Description=Leucine Rich Repeat
  Pfam annotation: Domain name=LRR_1; Domain location=284-306; Score =9.0; E_value=5.8; Accession=PF00560.25; Description=Leucine Rich Repeat
  Pfam annotation: Domain name=LRR_1; Domain location=308-330; Score =5.2; E_value=31; Accession=PF00560.25; Description=Leucine Rich Repeat
  Pfam module annotation: Pfam domain module=LRR_1::LRR_1::LRR_1::LRR _1::LRR_1::LRR_1::LRR_1; Domain location=137-159::186-209::211 -233::235-258::260-282::284-306::308-330
  Subcellular localization annotation: CTP_CleavageSite=40; ConfidenceScore=5.00e-01
MGGVCSRKRSQLVDEGDSLQTSPRFSKTSSLKWLLLSLPRTNSDVSRKGQGEGPGRCPSLMDLCVARVCKDIDKYSTFTMLPRDLSQQIFNKLVESNCLTEASLQTFRDCALQDICLGEYPGVKDAWMEVVASQRKSLLSVDVSCSEVTDSGIDLLRDCSSIQSLACNYCDQISEHSLGMLSGLSNLTSLSFKRSNGVTAEGMRAFTNLINLVKLDLEGCLKIHGGLIHLKDLTKLESLNLRYCNYIADSDIKYLTDLTNLKDLQLSCCRITDLGVSYLRGLSKLTHLNLEGCTVTAACLEAISGLASLISLNLNRCGIYDDGCENFEGLRN

SEQ ID NO: 97394 - protein, 52 aa, Setaria italica
  Transcript Sequence Number=SeqID_31420
MPAVSAAACCAAATPANEVVEDLFGFLQVLSDGTVFRSPAEPVFCPTTFPAK

SEQ ID NO: 97395 - protein, 187 aa, Setaria italica
  Transcript Sequence Number=SeqID_31421
  Gene Ontology: Mol. function=transferase activity, transferring glycosyl groups; Cellular component=cell wall
  Homolog annotation: Hit_ID=Q9M2R0; Match level="QueryCoverage=100%, HitCoverage=24%, E-value=6e-59, Identity=57%"; Hit description =Anthranilate phosphoribosyltransferase-like protein
  Pfam annotation: Domain name=PRT_C; Domain location=34-187; Score =364.3; E_value=2.2e-106; Accession=PF08372.2; Description=Plant phosphoribosyltransferase C-ter
GKWFELVCSWQRPVHSCLAVFTFLVFVTMPELILPTAFLAMAFTGLWRYRVRPRNPPHMEMRLSHADGATADELDEEFDTFPSSRGDVVRFRYDRLRSVAGRVQTVVGDIATQGERMQGLLSWRDPRATLLFSIACVLAAVIAYCVPMKVMIGLWGLYAMRPPRFRSRMPSPLMNFFRRLPSRADIL

SEQ ID NO: 97396 - protein, 225 aa, Setaria italica
  Transcript Sequence Number=SeqID_31422
  Gene Ontology: Mol. function=4 iron, 4 sulfur cluster binding; Cellular component=molybdopterin synthase complex; Biological process=Mo-molybdopterin cofactor biosynthetic process
  Homolog annotation: Hit_ID=B6T8G4; Match level="QueryCoverage=99%, HitCoverage=100%, E-value=2e-99, Identity=81%"; Hit description =Molybdopterin biosynthesis CNX3 protein
  Pfam annotation: Domain name=MoaC; Domain location=82-217; Score =266.1; E_value=7.9e-77; Accession=PF01967.13; Description=MoaC family
MMSIFSVLPRVTRSNGWRCFSTGIPYDTVAELNKEMESIFGESPSPSPLGSSPPQQPAQPAYEAEDSQPVLTHTDSNGQAKMVDVSPKEDTKRVAIASCRVLLGQKVFNLVASNEIAKGDVLTVAKIAGITGAKQTSNLIPLCHNINISHVRVDLTLNEEDSSVVIEGEATTSGKTGVEMEAMTAVAIAGLTVYDMCKAASKDICITDVCLQHKSGGKSGSWSRN

SEQ ID NO: 97397 - protein, 188 aa, Setaria italica
  Transcript Sequence Number=SeqID_31423
  Gene Ontology: Mol. function=phospholipase D activity; Cellular component=membrane; Biological process=phosphatidylcholine metabolic process
  Homolog annotation: Hit_ID=P93844; Match level="QueryCoverage=98%, HitCoverage=22%, E-value=3e-86, Identity=82%"; Hit description =Phospholipase D alpha 2
  Pfam annotation: Domain name=C2; Domain location=10-114; Score=30.3; E_value=7.7e-06; Accession=PF00168.22; Description=C2 domain
MAHLLLHGTLDATILEADHLTNPTRATGGAPGIFRKFVEGFEDSLGLGQGATRLYATVDIGRARVGRTRVIAGDPVNPRWYEAFHIYCAHFASDVVFSVKAAQPIGATLIGRAYLPVRDLLGGHEIDRWLDVLDAARKRLPHGPKIRVRLRFQDVAADPRGWGRGVGGARCPGVPYTFFSQRPGCRSR

SEQ ID NO: 97398 - protein, 79 aa, Setaria italica
  Transcript Sequence Number=SeqID_31424
SGHCAGKSCLHHDVIYTSCVATTLTVNLVCSILFKHSGPLPKYACKYISTFVGLLSSSISLRRYSGVVSVSLAAHQLNL

SEQ ID NO: 97399 - protein, 207 aa, Setaria italica
  Transcript Sequence Number=SeqID_31425
  Gene Ontology: Cellular component=intracellular; Biological process =signal transduction
  Homolog annotation: Hit_ID=Q10NV4; Match level="QueryCoverage=67%, HitCoverage=22%, E-value=3e-50, Identity=75%"; Hit description=PH domain containing protein, expressed
ARKDLSTEEANCCGGDDDEAHIVKLENNKSHLQSKITMEVKENTVLQASLERRKEALHERRVALEKEVENLRDQLQKERNLRASLESGLMNMRRGQVSFPSTIDSKTKADLEEVAAAEADIMNLKQKVSDLRGQLNNQAQLSSTSLCESCNNKRLLNTDKIVDGEQNAALSTEISSSVKAPTVPDMFWATNQMVQKMLVSKDGQDGS

SEQ ID NO: 97400 - protein, 102 aa, Setaria italica
  Transcript Sequence Number=SeqID_31426
  Gene Ontology: Cellular component=intracellular; Biological process =signal transduction
  Homolog annotation: Hit_ID=Q10NV4; Match level="QueryCoverage=83%, HitCoverage=13%, E-value=8e-16, Identity=61%"; Hit description=PH domain containing protein, expressed
  Subcellular localization annotation: CTP_CleavageSite=55; ConfidenceScore=5.58e-01
GATNQMVQKMLVSKDGQDGSLTTRWNFAQRQNSNNAVTNKAQGSSTKAEESGMAPSSALAKLTSRLNFLKERRALLASEMQNLDLGRPQAQGPTAPPKGDSS

SEQ ID NO: 97401 - protein, 328 aa, Setaria italica
  Transcript Sequence Number=SeqID_31427
  Homolog annotation: Hit_ID=B6T5W0; Match level="QueryCoverage=100%, HitCoverage=100%, E-value=1e-109, Identity=63%"; Hit description =Receptor expression-enhancing protein 3
  Pfam annotation: Domain name=TB2_DP1_HVA22; Domain location=2-98; Score=47.0; E_value=7.5e-11; Accession=PF03134.11; Description =TB2DP1, HVA22 family
MMGGFLSRVLLLAFGYAYPAYECYKTVELNKPEIEQLIFWCQYWILVALLTVLERFGDFTISWLPFYSEAKLMFFVYLWYPKTKGTTYIYGTFFRPYISQHENEIDRNLLELRARATDTVVLYFQKAASKGQNTFFDVLKYVAAQSPSQKSRQPPHQEPQQPQQHQPQVQQQQPQKQAAPVMRRAASIAARQAAMAQQSQETKPVPSSPKIKRQASAKSSSVASTKPVTSASTPKSGGSPKKSESKPAIEPVRTPATSADSPKSEPSAKLLPEAEEVDKMAIDEAGGDAAEGTDELDPSLDESPMEETIRVTRAKLRRRTTPEDPAGN

SEQ ID NO: 97402 - protein, 82 aa, Setaria italica
  misc_feature (70)..(70): Xaa can be any naturally occurring amino acid
  Transcript Sequence Number=SeqID_31428
WRRGRPSRLPGCRGHGVGGGRIHGSATVGSRSLVAVCIVSPRCVPDCETFFYVLVRFADASDCSESVLFXCSDINLLLFLCV

SEQ ID NO: 97403 - protein, 56 aa, Setaria italica
  Transcript Sequence Number=SeqID_31429
  Gene Ontology: Mol. function=endonuclease activity
  Homolog annotation: Hit_ID=B6U703; Match level="QueryCoverage=100%, HitCoverage=31%, E-value=7e-21, Identity=85%"; Hit description =Endonuclease/ nucleic acid binding protein
DIKFTDKELDIIEMAAYGDVIRPGKQCRCRTVAEMLGQVKSKNRVAACELPDKSTS

SEQ ID NO: 97404 - protein, 68 aa, Setaria italica
  Transcript Sequence Number=SeqID_31430
MRMCKAPELLKKAVTVFKSKTDALRTKLLVLARLRRKMAMVRAISDRIHALVSSDREKQARLEYGGKT

SEQ ID NO: 97405 - protein, 81 aa, Setaria italica
  Transcript Sequence Number=SeqID_31431
MAAAVSRDDELVIKSPNDQRSYRLLRLANGLCALLVHDPEIYADGYLSQASKAHEDEEMQEEEGEDDEESDEDDEEYSDEE

SEQ ID NO: 97406 - protein, 87 aa, Setaria italica
  Transcript Sequence Number=SeqID_31432
  Subcellular localization annotation: CTP_CleavageSite=45; ConfidenceScore=5.46e-01
FSILSSSPADISSTGFSTRLSWRSSSSAVTQKQQQQQQAEKPAPRQQEKKAAEQQAGSRPAAAAERKQARFAPEFDGINCFESIVSF

SEQ ID NO: 97407 - protein, 45 aa, Setaria italica
  Transcript Sequence Number=SeqID_31433
SGIINLTSKSRQTRHLAWKSKNCCSKKIAHDCRFFCSEKDINKFG

SEQ ID NO: 97408 - protein, 99 aa, Setaria italica
  Transcript Sequence Number=SeqID_31434
RPVSVASCVHGQPEVNRCLQRYRIKSARIPAIVTTTNNPDNMHSKFSIMHDPDEPGNPTGQGSNLDVTYLGFHSSEIELRLGPDEFRQGNANSLFWLYR

SEQ ID NO: 97409 - protein, 85 aa, Setaria italica
  Transcript Sequence Number=SeqID_31435
  Gene Ontology: Mol. function=signal transducer activity; Cellular component=plasma membrane; Biological process=response to light stimulus
  Homolog annotation: Hit_ID=Q9SA69; Match level="QueryCoverage=100%, HitCoverage=12%, E-value=8e-22, Identity=61%"; Hit description =F10O3.17
MGVATVTELKQSISGKRTFRPSLISRHANEWPPTDVSSDLTVEVGTSSFALHKFPLVSRSGKIRRLVAEAKDAKLARLSLHGTPG

SEQ ID NO: 97410 - protein, 110 aa, Setaria italica
  Transcript Sequence Number=SeqID_31436
  Pfam annotation: Domain name=efhand; Domain location=42-70; Score =31.7; E_value=2.9e-06; Accession=PF00036.24; Description=EF hand
  Subcellular localization annotation: CTP_CleavageSite=14; ConfidenceScore=5.42e-01
LLLSAPAGAAASSSARPGSSLQQTQRQGPCDGGRQRRLESLRLRRVFDLFDRDGDGVITPTELSGALGRLGLALDHAAVPAPPAPAQTAPAGTGALEAVVAPYVAPGMTG

SEQ ID NO: 97411 - protein, 112 aa, Setaria italica
  misc_feature (62)..(62): Xaa can be any naturally occurring amino acid
  Transcript Sequence Number=SeqID_31437
  Subcellular localization annotation: CTP_CleavageSite=82; ConfidenceScore=5.25e-01
MAKNRNKKNKAKKGAGGVAAMDTSEGGPVASTTASAPQPMDTSEGNQPSSTSMALGSINKKXKKGVQMKRSQNARKMKAIARAVSNNEQSEEKIQKAKSKKTRIQSAKSLYD

SEQ ID NO: 97412 - protein, 56 aa, Setaria italica
  Transcript Sequence Number=SeqID_31438
  Gene Ontology: Mol. function=hydrolase activity
  Homolog annotation: Hit_ID=B6U1Q8; Match level="QueryCoverage=89%, HitCoverage=16%, E-value=6e-13, Identity=75%"; Hit description =Hydrolase
MGFGVVSLLDAAFRRAFTSAGLRPGSAAVDADTTVHFWAHRSLLLPSSTAAATTDQ

SEQ ID NO: 97413 - protein, 117 aa, Setaria italica
  Transcript Sequence Number=SeqID_31439
  Gene Ontology: Mol. function=transporter activity; Cellular component= integral to membrane; Biological process=transport
  Homolog annotation: Hit_ID=B9SGI0; Match level="QueryCoverage=100%, HitCoverage=24%, E-value=2e-37, Identity=72%"; Hit description =Carbohydrate transporter, putative
DRPTVLAIGTVFWALSTGAVGVSQHFGQVAFWRAVNGLGLAIVIPALQSFIADSYKDGTRGAGFGLLSLIGAVGGIGGSILATIMAGKDFWGFPGWRVAFMMVALVSLIIGILVYLY

SEQ ID NO: 97414 - protein, 156 aa, Setaria italica
  misc_feature (47)..(47): Xaa can be any naturally occurring amino acid
  misc_feature (98)..(98): Xaa can be any naturally occurring amino acid
  Transcript Sequence Number=SeqID_31440
  Gene Ontology: Mol. function=transferase activity, transferring glycosyl groups; Cellular component=integral to membrane; Biological process=protein amino acid glycosylation
  Homolog annotation: Hit_ID=B6TEC2; Match level="QueryCoverage=78%, HitCoverage=35%, E-value=1e-63, Identity=91%"; Hit description=Beta -1,3-galactosyltransferase sqv-2
  Pfam annotation: Domain name=Galactosyl_T; Domain location=1-112; Score=-54.7; E_value=0.0071; Accession=PF01762.13; Description =Galactosyltransferase
YAKVNDDIYINVDTLSAMLETHWDKPRVYIGCMKSGEVFSDSTHKWXEPDWWKFGDGKSYFRHASGEMFVISRAVAQFISINKSVLRTYAHDDVSVGXSWMVGLAVKHVNEAKLCCSSWPSGASGSCMASIDLDIDSFLFAYCQLPSLTLDDAIMH

SEQ ID NO: 97415 - protein, 258 aa, Setaria italica
  Transcript Sequence Number=SeqID_31441
  Gene Ontology: Mol. function=transferase activity, transferring glycosyl groups; Cellular component=integral to membrane; Biological process=protein amino acid glycosylation
  Homolog annotation: Hit_ID=B6TEC2; Match level="QueryCoverage=100%, HitCoverage=74%, E-value=1e-145, Identity=93%"; Hit description=Beta- 1,3-galactosyltransferase sqv-2
  Pfam annotation: Domain name=Galactosyl_T; Domain location=44-242; Score=110.1; E_value=7.3e-30; Accession=PF01762.13; Description =Galactosyltransferase
LEMELAAAKHEGFVGKYSPETNGTHSRKKPLIVIGIMSSFGRKNYRDAVRKSWLPTGSMLRKLEEEKGIVVRFIVGRSANRGDTFDREIDDENRSTRDFLILDDHIESDEELPKKTKSFFANAAETFDAAFYAKVNDDIYINVDTLSAMLETHWDKPRVYIGCMKSGEVFSDSTHKWYEPDWWKFGDGKSYFRHASGEMFVISRAVAQFISINKSVLRTYAHDDVSVGSWMVGLAVKHVNEAKLCCSSWPSGAMCSAL

SEQ ID NO: 97416 - protein, 134 aa, Setaria italica
  Transcript Sequence Number=SeqID_31442
  Gene Ontology: Mol. function=protein serine/threonine kinase activity; Cellular component=integral to membrane; Biological process=protein amino acid phosphorylation
  Homolog annotation: Hit_ID=P43298; Match level="QueryCoverage=100%, HitCoverage=13%, E-value=1e-20, Identity=41%"; Hit description =Putative receptor protein kinase TMK1
  Pfam annotation: Domain name=LRR_1; Domain location=50-69; Score=8.1; E_value=8.5; Accession=PF00560.25; Description=Leucine Rich Repeat
  Pfam annotation: Domain name=LRR_1; Domain location=73-95; Score=6.0; E_value=22; Accession=PF00560.25; Description=Leucine Rich Repeat
  Pfam annotation: Domain name=LRR_1; Domain location=97-118; Score =6.9; E_value=14; Accession=PF00560.25; Description=Leucine Rich Repeat
  Pfam module annotation: Pfam domain module=LRR_1::LRR_1::LRR_1; Domain location=50-69::73-95::97-118
NVLRLSYNYLTGGLPMVLEGLGSLESLQLNNQKSGEKLSGPIDVVAKLPSLKTLWLQSNSFTGPIPEFSPDSQLVDFNVRDNSLTGVVPPSLIGIASLQVVKLSNNKFQGPKPKFTATTVDSNSGNGFCLKDPG

SEQ ID NO: 97417 - protein, 102 aa, Setaria italica
  Transcript Sequence Number=SeqID_31443
ISGGIGKERGKSRARLLLRSCLPPMARAVSPCHVPVQACDANQVSKQEVAVARAVKVCTNYRSRRPELSFHRAAPFYRTSVTGEFRHRPATAGHFPPPEPPP

SEQ ID NO: 97418 - protein, 104 aa, Setaria italica
  Transcript Sequence Number=SeqID_31444
  Gene Ontology: Mol. function=hydrolase activity, hydrolyzing O -glycosyl compounds; Cellular component=extracellular region; Biological process=cell wall organization and biogenesis
  Homolog annotation: Hit_ID=Q6Z715; Match level="QueryCoverage=58%, HitCoverage=12%, E-value=5e-26, Identity=88%"; Hit description =Endoglucanase 4
TAGGLRLLRRRRRRRAPSALVAVARRQVDYILGANPAATSYMVGFGARFPRRVHHRGASMPSVRDHPARIGCDEGFRYLHAAEPDANVLVGAVVGGPDGGDAYT

SEQ ID NO: 97419 - protein, 130 aa, Setaria italica
  Transcript Sequence Number=SeqID_31445
  Gene Ontology: Mol. function=protein serine/threonine kinase activity; Biological process=protein amino acid phosphorylation
  Homolog annotation: Hit_ID=Q5BQ31; Match level="QueryCoverage=100%, HitCoverage=39%, E-value=2e-43, Identity=63%"; Hit description =Serine/threonine protein kinase
WGTQFQIVKGICQGLHFLHKELDGPLIHMNLVPNSIWLDDNWVPKIADFGLSRLFGQEQTRMYTVNVKGHNGYIAPEYLYRGEISTMSDIYSLGMLILEITTGEKNSSVSDDKSARKFVDRVHQNWKTEE

SEQ ID NO: 97420 - protein, 152 aa, Setaria italica
  Transcript Sequence Number=SeqID_31446
  Gene Ontology: Mol. function=protein serine/threonine kinase activity; Biological process=protein amino acid phosphorylation
  Homolog annotation: Hit_ID=Q8GUR2; Match level="QueryCoverage=74%, HitCoverage=99%, E-value=9e-51, Identity=83%"; Hit description =Serine/threonine protein kinase (Fragment)
LVPNSIWLDDNWVPKIADFGLSRLFGEEADFLASPVNGYMAPEYLYRGEISTMLDIYSLGMLILEITTGEKNCAVSEDRSARLFVDNVHQNWKTNEQIIYKYPSLDPNGLQQVKACIVIGLMCVEADRNRRPSIADIVDKLNGKRVPIFEQV

SEQ ID NO: 97421 - protein, 65 aa, Setaria italica
  Transcript Sequence Number=SeqID_31447
YKNKCEKQQIVMGRQRYAKHYYRYGDGSASGTTVFLGELNLTSNSRGKAVGHYISREEAKVSDGF

SEQ ID NO: 97422 - protein, 341 aa, Setaria italica
  misc_feature (48)..(48): Xaa can be any naturally occurring amino acid
  Transcript Sequence Number=SeqID_31448
  Gene Ontology: Mol. function=sequence-specific DNA binding; Cellular component=nucleus; Biological process=regulation of transcription, DNA-dependent
  Homolog annotation: Hit_ID=Q94D89; Match level="QueryCoverage=65%, HitCoverage=65%, E-value=1e-73, Identity=61%"; Hit description=WRKY8
  Pfam annotation: Domain name=WRKY; Domain location=14-74; Score =133.0; E_value=9.3e-37; Accession=PF03106.7; Description=WRKY DNA -binding domain
  Pfam annotation: Domain name=WRKY; Domain location=169-228; Score =121.6; E_value=2.6e-33; Accession=PF03106.7; Description=WRKY DNA -binding domain
  Pfam module annotation: Pfam domain module=WRKY::WRKY; Domain location=14-74::169-228
MLLGSNTLSECRSSDDGYSWRKYGQKLVKGIREHPRSYYRCTFPNCPXKKRVERSALDGQIIEIVYNGTHNHDKPQNTSRGGSSMAAQPMQSGGSEAFEGKFGGMSGRNDEVGVSSSRAGNSEFDEHEEDFKRLRKDNEGEGISMSGSRTTMVHEPRVALVTRSAIDILDDGFRWRKYGKKMVKENGDHRSYYKCLMAGCSVRKHVERSSRDPSTVITTYKGKHNHGPLYPPPAMANQSSGAGQQQHAHGFGGQGWKGVSGSASGQGTVGGSFVASTPDGVELELTPRALAKEEPKEDALSRCSPSILEHEENQGSPLPSVHETWSFQREIDVQDEVKPAV

SEQ ID NO: 97423 - protein, 329 aa, Setaria italica
  Transcript Sequence Number=SeqID_31449
  Gene Ontology: Mol. function=protein serine/threonine kinase activity; Biological process=protein amino acid phosphorylation
  Homolog annotation: Hit_ID=A3FPG3; Match level="QueryCoverage=96%, HitCoverage=96%, E-value=1e-107, Identity=60%"; Hit description =Serine/threonine protein kinase
  Pfam annotation: Domain name=Pkinase; Domain location=30-315; Score =43.8; E_value=4.2e-11; Accession=PF00069.17; Description=Protein kinase domain
  Pfam annotation: Domain name=Pkinase_Tyr; Domain location=30-315; Score=-1.4; E_value=1.2e-13; Accession=PF07714.9; Description =Protein tyrosine kinase
  Pfam module annotation: Pfam domain module=Pkinase::Pkinase_Tyr; Domain location=30-315::30-315
MANLQSQQSLVSTLPKELPATFMKEITSDFAAGRELGRSVFGIVYKGVLPEGGTIAVKRLAENAPVAPGKTFDTEVTNLMVLQHDNIVQLVGYCHEAQKKVVQHNGRYVIVDMVESCLCYKYLPNGTLDKYLYADTRSINWDTQFQIVKGICQGLHFLHKELDGPLIHMNLVPNSIWLDDNWVPKIADFGLARLFGQEQTRMYTVNVKGHNGYIAPEYLYRGEISTMSDIYSLGMLILEITTGEKNSSVSDDKSARKFVDRVHQNWKTEEQIIYKYPSLDPNGLQQVKTCIVIGLMCVEADRNKRPSIVDIVDKLNGKRVPIFDQVSPS

SEQ ID NO: 97424 - protein, 78 aa, Setaria italica
  Transcript Sequence Number=SeqID_31450
  Pfam annotation: Domain name=MAP1_LC3; Domain location=6-75; Score= -47.8; E_value=0.1; Accession=PF02991.8; Description=Microtubule associated protein 1A1B, light chain 3
PFVTERRQAEANRIREKYPDRIPVSICSYSCILLLFHDQLVLSQAGFLVIQVIVEKAERSDIPDIDKKKSVSSYPFLN

SEQ ID NO: 97425 - protein, 99 aa, Setaria italica
  Transcript Sequence Number=SeqID_31451
TDPVQSAAARSTHPSVRPGLLLPAPRAVEEEEEGGRWPGARSSWSTPSVRPPPPTHPSRSSLIGSLSSSWRWILGRDRGTDRSDRSVEFKRSFVVGGGW

SEQ ID NO: 97426 - protein, 124 aa, Setaria italica
  Transcript Sequence Number=SeqID_31452
  Gene Ontology: Mol. function=protein binding; Cellular component =cytoplasmic vesicle; Biological process=ubiquitin-dependent protein catabolic process
  Homolog annotation: Hit_ID=Q6Z1D5; Match level="QueryCoverage=49%, HitCoverage=50%, E-value=1e-28, Identity=100%"; Hit description =Autophagy-related protein 8C
  Pfam annotation: Domain name=MAP1_LC3; Domain location=14-106; Score =59.2; E_value=1.5e-14; Accession=PF02991.8; Description=Microtubule associated protein 1A1B, light chain 3
MARSSFKLEHPLERRQAEANRIREKYPDRIPVIVEKAERSDIPDIDKKKYLVPADLTVGQFDNSIAFLIVRIVFLVLEFSFSCASESIAIFVIDFVKLLIVQNCWLPLPWVLLLCQPCLKVVYL

SEQ ID NO: 97427 - protein, 367 aa, Setaria italica
  misc_feature (22)..(22): Xaa can be any naturally occurring amino acid
  misc_feature (107)..(107): Xaa can be any naturally occurring amino acid
  misc_feature (325)..(325): Xaa can be any naturally occurring amino acid
  Transcript Sequence Number=SeqID_31453
  Gene Ontology: Mol. function=ubiquitin-protein ligase activity; Biological process=multicellular organismal development
  Homolog annotation: Hit_ID=A2Q2P3; Match level="QueryCoverage=98%, HitCoverage=17%, E-value=3e-82, Identity=45%"; Hit description=Zinc finger, N-recognin; WD40-like
  Pfam annotation: Domain name=zf-UBR; Domain location=202-272; Score =19.5; E_value=2.6e-05; Accession=PF02207.12; Description=Putative zinc finger in N-recognin (UBR b
KDKNTNGTAGPATRELAVDFLXNLICPSPEAVTKELQHHLFNSMLLLLDRAFLSHDLQTAKAYFHFLVQLSSEESHFKHLFEKTLILMETMVEDKGKLHTLKFLFSXVEAVFGDTGLNRSALKRLSSKTSGSSFGSGSLIPKQLKNSENLVIRTNQVSNPAVDCDASSGEEDEDDATSDGELGSIDRDEEDDGDSDRALASKVCTFTSSGSNFMEQHWYFCYTCDLTVSKGCCSVCAKVCHRGHRVVYSRSSRFFCDCGAGGVRGSSCQCLKPRKFTGSSTVPPAASSFHPILAYHEDVEQVADSSSDFEDDISTDADSSNRKTXSVPNEFSSGLPLFLKNLDIEVKVLEICKKLLPAILDRRELNL

SEQ ID NO: 97428 - protein, 301 aa, Setaria italica
  Transcript Sequence Number=SeqID_31454
  Homolog annotation: Hit_ID=Q9SA28; Match level="QueryCoverage=95%, HitCoverage=89%, E-value=8e-84, Identity=45%"; Hit description =F3O9.9 protein
  Pfam annotation: Domain name=SLT; Domain location=163-285; Score= -2.7; E_value=0.0057; Accession=PF01464.12; Description =Transglycosylase SLT domain
LGRELGYKKYDIEDDTNLLYWPLVNVYFGAAYAKWLFSCDDKQRTEEFVVRAYKGGKKKASHKSTSPIFQRYLYVKESLLSIRQPEICNEITPDLENLSSTEAQLIYWDSKVSEADMDAMWKHPDVYKEWTKSGERRGNVRFSHDAKKRPYLSRVEVKAVAEIIISRHLTTRGSKPEALAALAEVCSMRFVHGVSTRTGLMGIDYPTAAWLSRDCGYRAYTVISVDDLYNPFASMYFGASYLAWLSHYEGREQSYEFIVQAYLGGPENVNLQETGPLWNQFLEALTQYQDPKKDNNSCCIL

SEQ ID NO: 97429 - protein, 223 aa, Setaria italica
  Transcript Sequence Number=SeqID_31455
  Gene Ontology: Mol. function=protein dimerization activity
  Homolog annotation: Hit_ID=B6SSW7; Match level="QueryCoverage=98%, HitCoverage=31%, E-value=1e-115, Identity=88%"; Hit description =Transposon protein
  Pfam annotation: Domain name=hATC; Domain location=111-191; Score =87.8; E_value=3.8e-23; Accession=PF05699.6; Description=hAT family dimerisation domain
NSSHQEWLKNVASNMSETADNFISEAYSIYTFTAAILDPRIKGELIPETLNSASNLEDARNHFVRDYSNTFQAVGNGHGAQDTTEEAGAFSFAEEIIRKRRRVSMTTAADELSQYLAEPPAPISTDALEWWRGHSSRYPRLSLMARDFLAIQGTSMDPEELFTSKGDNIHKQQYCLPLSSMQATMCVKSWMQSGYHFNFQSTIIDFESLVKSATAPGDIDGHN

SEQ ID NO: 97430 - protein, 187 aa, Setaria italica
  Transcript Sequence Number=SeqID_31456
  Gene Ontology: Mol. function=oxidoreductase activity; Biological process=oxidation reduction
  Homolog annotation: Hit_ID=Q658E2; Match level="QueryCoverage=97%, HitCoverage=52%, E-value=4e-65, Identity=64%"; Hit description =Putative iron/ascorbate-dependent oxidoreductase
  Pfam annotation: Domain name=2OG-FeII_Oxy; Domain location=132-187; Score=6.6; E_value=0.037; Accession=PF03171.12; Description=2OG -Fe(II) oxygenase superfamily
NFVDQVTGHGMPESLLDGLRDAGLEFFHLPPEEKLKHANRTEAGEFQPEGYGIDRVDTDEQVLDWCDRLYLTVQPEEERRMQFWPTRPPSLSKLLHEYTLGSEKVARRVLAAMARALGFDEGFFLDHVGENVATYARFTYYPPCPRPDLVYGLKPHTDNSVVTVLLLDRDVGGLQVLRDGRWVDVPV

SEQ ID NO: 97431 - protein, 91 aa, Setaria italica
  Transcript Sequence Number=SeqID_31457
FCCCCKMCTQDAKFRIWMCTPEVNRSNYAMQWQTANGPELWTYLPTEFVMLHGPIPRSKQFQTWYAMLVLQQTLHKTLSNTWHAMLVLHGM

SEQ ID NO: 97432 - protein, 49 aa, Setaria italica
  Transcript Sequence Number=SeqID_31458
  Subcellular localization annotation: CTP_CleavageSite=57; ConfidenceScore=5.02e-01
MDTEPFDEAELLALPASPAASPPRRLKRLKKSSSQTTATTSTTVATTTS

SEQ ID NO: 97433 - protein, 140 aa, Setaria italica
  Transcript Sequence Number=SeqID_31459
  Gene Ontology: Mol. function=aspartic-type endopeptidase activity; Biological process=proteolysis
  Homolog annotation: Hit_ID=B6TNN1; Match level="QueryCoverage=89%, HitCoverage=27%, E-value=1e-25, Identity=53%"; Hit description =Aspartic proteinase nepenthesin-2
QLDGVPGPWPTPCYGNGCSKRRQCQYIVNYGDGSNTTGTYSTDKLTLTPAYAVDDFQFGCSHAAQLFSDKADGLMALGGGSLSLVSQMAEKAFSYCLPPTASHSGFLTLGVPRVSSSRFVVTPMHSIGNIKTYYGVLLQG

SEQ ID NO: 97434 - protein, 49 aa, Setaria italica
  Transcript Sequence Number=SeqID_31460
SSVKLKVQFLLCPFCERCFPNGDKLPRKGKYLNLSDSSDHEKLRTQHLF

SEQ ID NO: 97435 - protein, 120 aa, Setaria italica
  Transcript Sequence Number=SeqID_31461
  Homolog annotation: Hit_ID=UPI0001A7B04F; Match level="QueryCoverage =86%, HitCoverage=8%, E-value=2e-11, Identity=40%"; Hit description =REF4 (REDUCED EPIDERMAL FLUORESCENCE 4)
LVPAGPGDLERRVMAAVKASEARGDPPLLRAVELARVVAGEGAGIPSADLAGILVSNLCFAHNSPSLWKLVGQAMASRLLCPLHVLALLTPRVLPQRRAQPEAYRLYLELVKCNITSSSL

SEQ ID NO: 97436 - protein, 84 aa, Setaria italica
  misc_feature (2)..(2): Xaa can be any naturally occurring amino acid
  misc_feature (21)..(21): Xaa can be any naturally occurring amino acid
  Transcript Sequence Number=SeqID_31462
VXFARAAGDMRSNARVDVDIXYVLLGGAIFLETYAILLMVISPWTFADLRASERLRPAAGAVFWLIQLFQPETRPRWSNRMSQY

SEQ ID NO: 97437 - protein, 86 aa, Setaria italica
  Transcript Sequence Number=SeqID_31463
LILHSNRNKNIDGLQVDQFELGHNMGNQAPNQRMDRPGISKLGAYQTSKAALPPLQNSSKRQRSPSCKLLSRANCFHPFESLFGSG

SEQ ID NO: 97438 - protein, 186 aa, Setaria italica
  Transcript Sequence Number=SeqID_31464
  Homolog annotation: Hit_ID=B6SZA7; Match level="QueryCoverage=93%, HitCoverage=94%, E-value=6e-44, Identity=65%"; Hit description =Membrane protein
  Pfam annotation: Domain name=DUF588; Domain location=6-160; Score =50.0; E_value=9.2e-12; Accession=PF04535.4; Description=Domain of unknown function (DUF588)
MVAAARASEVKAEGFLRGACAALAAASALLVGLSTQTETVLLVRKKATVRDVQALWVLAMAAAVAAGYHLLQLLRCFYLGRVGGVNPCRRSSRALAWICLLLDKACAYTTFATTVAAAQACVIALDGAHALQWTKLCNIYTRFCEQIAGSLVLGILAAAGTAVLSAVSARNVVRLYPAPPPPYAAH

SEQ ID NO: 97439 - protein, 104 aa, Setaria italica
  Transcript Sequence Number=SeqID_31465
  Gene Ontology: Mol. function=protein tyrosine kinase activity; Cellular component=integral to membrane; Biological process=protein amino acid phosphorylation
  Homolog annotation: Hit_ID=B6SS30; Match level="QueryCoverage=100%, HitCoverage=15%, E-value=1e-42, Identity=81%"; Hit description=ATP binding protein
LLLVHEHFAGGTLEEHLRQMKGRVLSWYHRVNVAIELASALTYLQAHEAAPTFLHDLRSSEIFLDTDFTAKIAGYKLTRPATYYSASHDQDVVCNFGHLLIELL

SEQ ID NO: 97440 - protein, 98 aa, Setaria italica
  misc_feature (12)..(12): Xaa can be any naturally occurring amino acid
  Transcript Sequence Number=SeqID_31466
  Gene Ontology: Mol. function=electron carrier activity; Biological process=response to oxidative stress
  Homolog annotation: Hit_ID=Q9FEQ8; Match level="QueryCoverage=77%, HitCoverage=22%, E-value=1e-36, Identity=89%"; Hit description =Peroxidase 2
PTTSGSGDDPTXVVQDVVTPNDMDSQYYRNVLSHTVLFTSDAALLTSPETAKMVVENAKIPGWWEDRFEKAMVKMASIEVKTGYQGQVRKNCRAINHY

SEQ ID NO: 97441 - protein, 51 aa, Setaria italica
  Transcript Sequence Number=SeqID_31467
DYLIECFVLGVKTLPKYSDLSSTLFEIVFLVKYESICCLPTPGGFWLMSID

SEQ ID NO: 97442 - protein, 98 aa, Setaria italica
  misc_feature (55)..(55): Xaa can be any naturally occurring amino acid
  misc_feature (70)..(70): Xaa can be any naturally occurring amino acid
  Transcript Sequence Number=SeqID_31468
  Subcellular localization annotation: CTP_CleavageSite=72; ConfidenceScore=5.15e-01
RSQSNGDEKSTAVSSSHPGIRRARPPTHPLRHDQTEGVFVPPSLFELRSPPPPPXSPLPSPSPAPQNPSXPRSNAVTSRIPNSPSLAMEDPRPPPPPP

SEQ ID NO: 97443 - protein, 149 aa, Setaria italica
  Transcript Sequence Number=SeqID_31469
  Gene Ontology: Mol. function=zinc ion binding; Cellular component =intracellular
  Homolog annotation: Hit_ID=B9RF68; Match level="QueryCoverage=91%, HitCoverage=7%, E-value=3e-09, Identity=28%"; Hit description=DNA polymerase
LRRLHEGRYLPGPDFSSAPHAVSPDVVKAAAERFGHDNQVVAKWLSGSDLKKLALFGCPTVERRTVFASKRLRAFFNIQEDKICSSCKLRSSCKFANQEVLRHNKVILSDTMRIISLLVLDACPKELQVTAELKASICKVLKDTINLSS

SEQ ID NO: 97444 - protein, 172 aa, Setaria italica
  Transcript Sequence Number=SeqID_31470
  Gene Ontology: Mol. function=hydrolase activity; Cellular component =anchored to membrane
  Homolog annotation: Hit_ID=B6UBU7; Match level="QueryCoverage=83%, HitCoverage=83%, E-value=1e-58, Identity=82%"; Hit description =Glucan endo-1,3-beta-glucosidase 3
  Pfam annotation: Domain name=X8; Domain location=25-109; Score=159.6; E_value=9.4e-45; Accession=PF07983.5; Description=X8 domain
MADAARLFLLLVAVAAALAGRSDGAWCVCRPELGDSALQKTLDYACGDGADCKPILQNGPCFAPDTVRAHCSYAVNSFYQRNNQNAQACVFSGTATLVSTDPSGNGCTYPATPSAAGTSNGGSPGVYSPPTMGMGPSALNDNSGANVLPVAGVAARLVILAFCSLMALYLCA

SEQ ID NO: 97445 - protein, 89 aa, Setaria italica
  Transcript Sequence Number=SeqID_31471
  Gene Ontology: Mol. function=transferase activity, transferring groups other than amino-acyl groups
  Homolog annotation: Hit_ID=Q00M86; Match level="QueryCoverage=85%, HitCoverage=16%, E-value=4e-21, Identity=64%"; Hit description=N -hydroxycinnamoyl/benzoyltransferase 4
RGVFPTNCVVMGSSPRFDMYGCDFGWGKALAARSGMANKMDGKVSLYPGRDGGFDVEVSMLPEYMAALEQDEEFWAAVSPDAVPPGMKE

SEQ ID NO: 97446 - protein, 101 aa, Setaria italica
  misc_feature (7)..(7): Xaa can be any naturally occurring amino acid
  misc_feature (14)..(14): Xaa can be any naturally occurring amino acid
  Transcript Sequence Number=SeqID_31472
  Subcellular localization annotation: CTP_CleavageSite=46; ConfidenceScore=5.64e-01
RMGRESXTGNVGRXRGASTAKRLQRPKRQRRPKGARRGEQASSSPVAATVSLRSRNPSSSGSRSRCHVTVVNRSNYSPTQATLSALSRRRVHCCSLLPSSS

SEQ ID NO: 97447 - protein, 74 aa, Setaria italica
  Transcript Sequence Number=SeqID_31473
  Gene Ontology: Mol. function=protein serine/threonine kinase activity; Cellular component=extracellular region; Biological process=protein amino acid phosphorylation
  Homolog annotation: Hit_ID=Q38769; Match level="QueryCoverage=64%, HitCoverage=21%, E-value=3e-11, Identity=62%"; Hit description =Permatin
MASVAKPSVVLLLAVALAAASAADAITFNVINRCRDTLWPAALPGGGARLDPGKTWTVEVPAGTSSARMWARTG

SEQ ID NO: 97448 - protein, 116 aa, Setaria italica
  Transcript Sequence Number=SeqID_31474
  Gene Ontology: Mol. function=protein tyrosine kinase activity; Cellular component=plasma membrane; Biological process=protein amino acid phosphorylation
  Homolog annotation: Hit_ID=Q2QVC3; Match level="QueryCoverage=87%, HitCoverage=20%, E-value=3e-34, Identity=68%"; Hit description =Leucine Rich Repeat family protein
  Subcellular localization annotation: CTP_CleavageSite=62; ConfidenceScore=5.10e-01
LSHNRFSGVVPPELGRLPATVTLDLRFNNLSGAIPQTGSLASQGPTAFLNNPGLCGFPLQVPCRAVPPPTQSPTPPATTTPLPSTASDHHQPIKTSLIALISVADAAGVALVGVIL

SEQ ID NO: 97449 - protein, 79 aa, Setaria italica
  Transcript Sequence Number=SeqID_31475
CKAKKVNVGRRKYKICKMRRRLSLSCNCWYSFVDMPLYYLSCCSCLTTRQAMEQSFAITKFHCCLIKHCIFTCVLPEIN

SEQ ID NO: 97450 - protein, 78 aa, Setaria italica
  Transcript Sequence Number=SeqID_31476
SGVGWAGRRPPALPLCATPPDVLQEAIAENHGSPVNRPHVLCCLLACPDFMGGFRRDDSGKLCFLLRAYLAARVQLFA

SEQ ID NO: 97451 - protein, 183 aa, Setaria italica
  misc_feature (12)..(12): Xaa can be any naturally occurring amino acid
  misc_feature (149)..(149): Xaa can be any naturally occurring amino acid
  misc_feature (155)..(155): Xaa can be any naturally occurring amino acid
  Transcript Sequence Number=SeqID_31477
  Gene Ontology: Mol. function=protein tyrosine kinase activity; Biological process=protein amino acid phosphorylation
  Homolog annotation: Hit_ID=Q5QNM3; Match level="QueryCoverage=98%, HitCoverage=27%, E-value=2e-63, Identity=68%"; Hit description =Leucine-rich receptor-like protein kinase-like
SLLLPKNNFRGXPKEFVGLSALEVLDLSSNNLDGTIPEELRAMPLLKQLSLHDNQFQEGVSSFAIQDIADDQAGCLSRKLGCWSDFKDLISFNGLREKYYTNVPSFSEARIMQNLQTFASAMRRKLLSEADNLPALLGNDAKSSVPENXNEIQNXADVLSLGSGSFPAFPNTYGQTLTPLVPE

SEQ ID NO: 97452 - protein, 124 aa, Setaria italica
  misc_feature (51)..(51): Xaa can be any naturally occurring amino acid
  Transcript Sequence Number=SeqID_31478
  Gene Ontology: Mol. function=histone-lysine N-methyltransferase activity; Cellular component=nucleus; Biological process=ubiquitin -dependent protein catabolic process
  Homolog annotation: Hit_ID=B4FF77; Match level="QueryCoverage=91%, HitCoverage=22%, E-value=3e-41, Identity=74%"; Hit description =Ubiquitin carboxyl-terminal hydrolase
MGKFMHDSPLVSHSEVNRRHYNLAAVAVGLGLGVAGLCKALHSGLSIPWVXSPRNLFLGSGRVYYVGGLRNLGNNCFLNVILQALASCDSFVSFLDNLLATDGLLPEEKVERMPLLLALSSLLE

SEQ ID NO: 97453 - protein, 321 aa, Setaria italica
  misc_feature (308)..(308): Xaa can be any naturally occurring amino acid
  Transcript Sequence Number=SeqID_31479
  Gene Ontology: Mol. function=DNA binding; Cellular component=nucleus; Biological process=regulation of transcription
  Homolog annotation: Hit_ID=Q52PH1; Match level="QueryCoverage=91%, HitCoverage=63%, E-value=6e-86, Identity=60%"; Hit description =Golden2-like transcription factor
  Pfam annotation: Domain name=Myb_DNA-binding; Domain location=159 -209; Score=41.5; E_value=3.2e-09; Accession=PF00249.23; Description =Myb-like DNA-binding domain
MEMVEIGPVSDLDFDFTVDDIDFGDFFLRLEDGDALPDLEVDPAEIFTDFEAIATGSDGVMDQEVPSVQPLTDAVHLDALDPCSVVLGEDNTTRADVEEGKGECNHAEEVVPGNGDFGGGGGTVLAEEKSPSSTTSSSQEAESRHKSSSKHSHGKKKAKVDWTPELHRRFVQAVEQLGIDKAVPSRILEIMGIDSLTRHNIASHLQKYRSHRKHMLAREAEAASWTQRRQMYAAGGASTAVKRPDSNAWTVPTIGFPPPPPPPPPPHPMQHFGRPLHVWGHPTPGVESPRVPMWPRHLVPRAPTPPWXAPPPPSDPAFWHH

SEQ ID NO: 97454 - protein, 158 aa, Setaria italica
  Transcript Sequence Number=SeqID_31480
  Gene Ontology: Cellular component=cytoplasm
  Homolog annotation: Hit_ID=B9SJW7; Match level="QueryCoverage=81%, HitCoverage=15%, E-value=6e-41, Identity=61%"; Hit description =Nucleotide binding protein, putative
  Pfam annotation: Domain name=WD40; Domain location=60-109; Score =34.3; E_value=4.8e-07; Accession=PF00400.24; Description=WD domain, G-beta repeat
MSPAAGELAGARGEGGGMEVQRVFIGAGCNRVVNNVSWGACGLVAFGAQNAVALFSPERGEIVTTLPGHKAPVNCTLWLPTKKDVLQVRGRETYYLLSGSADGAIMSWKIGSGKGDWSHVLQLPGMHKKGITCLAGRMVSDTVAIVLAKEIGLMCCSS

SEQ ID NO: 97455 - protein, 53 aa, Setaria italica
  Transcript Sequence Number=SeqID_31481
YSCTFSLHMNSMGTKLQSSIMQQHLVIDLKQLLLYTQGCNHTTQITELKAEVY

SEQ ID NO: 97456 - protein, 55 aa, Setaria italica
  Transcript Sequence Number=SeqID_31482
  Gene Ontology: Mol. function=oxidoreductase activity
  Homolog annotation: Hit_ID=B6T5A5; Match level="QueryCoverage=100%, HitCoverage=54%, E-value=2e-21, Identity=92%"; Hit description=Allyl alcohol dehydrogenase-like protein
RQAADATVFEFGSAAESGVAVTLAGYCPVSDDLEPCRWELVPAAGEGAPQFRIVF

SEQ ID NO: 97457 - protein, 130 aa, Setaria italica
  misc_feature (109)..(109): Xaa can be any naturally occurring amino acid
  misc_feature (129)..(129): Xaa can be any naturally occurring amino acid
  Transcript Sequence Number=SeqID_31483
  Gene Ontology: Mol. function=ATPase activity, coupled to transmembrane movement of ions, phosphorylative mechanism; Cellular component=integral to membrane; Biological process=phospholipid transport
  Homolog annotation: Hit_ID=Q2R575; Match level="QueryCoverage=100%, HitCoverage=12%, E-value=3e-65, Identity=87%"; Hit description =Phospholipid-translocating P-type ATPase, flippase family protein, expressed
IIIFAVSATKEAWDDYNRYISDKQANEKEVWIVKNGARKHIQAQDIRVGNIVWIRENEEVPCDLVLLGTSEPQGLCHVETAALDGETDLKTRVSPPPCVGLEFEQLHKXKGVIECPIPDKDIRRFDANXR

SEQ ID NO: 97458 - protein, 212 aa, Setaria italica
  Transcript Sequence Number=SeqID_31484
  Gene Ontology: Mol. function=nucleic acid binding; Cellular component= ribonucleoprotein complex; Biological process=rRNA processing
  Homolog annotation: Hit_ID=B9S0S6; Match level="QueryCoverage=89%, HitCoverage=33%, E-value=3e-64, Identity=62%"; Hit description=U3 small nucleolar RNA-interacting protein, putative
  Pfam annotation: Domain name=WD40; Domain location=110-148; Score =24.6; E_value=0.00041; Accession=PF00400.24; Description=WD domain, G-beta repeat
  Pfam annotation: Domain name=WD40; Domain location=152-190; Score =42.8; E_value=1.3e-09; Accession=PF00400.24; Description=WD domain, G-beta repeat
  Pfam annotation: Domain name=WD40; Domain location=51-89; Score=19.3; E_value=0.016; Accession=PF00400.24; Description=WD domain, G-beta repeat
  Pfam module annotation: Pfam domain module=WD40::WD40::WD40; Domain location=110-148::152-190::51-89
DASKREEDDEDEDEEEAGGRRVAEILQRRQLEESGRKRWELAARVLPPEPQDGFKVIVKHRQPVTAVALSKDNDKGFSASKDGVIVHWDVETGKSEKYLWPSENVLISHHAKPPLSARRSKHVLALAVSSDGRYLASGGLDRHIHLWDVRSREHIQAFSGHRGPVSCLAFGPDSSELFSGSFDRSIMQWNAEDRTYMNCLYGHQNEILPMYA

SEQ ID NO: 97459 - protein, 578 aa, Setaria italica
  Transcript Sequence Number=SeqID_31485
  Gene Ontology: Mol. function=transporter activity; Cellular component= membrane; Biological process=oligopeptide transport
  Homolog annotation: Hit_ID=B6U6P2; Match level="QueryCoverage=90%, HitCoverage=100%, E-value=0.0, Identity=80%"; Hit description =Peptide transporter PTR2
  Pfam annotation: Domain name=MFS_1; Domain location=30-498; Score =0.7; E_value=0.027; Accession=PF07690.8; Description=Major Facilitator Superfamily
  Pfam annotation: Domain name=PTR2; Domain location=91-490; Score =266.3; E_value=7.2e-77; Accession=PF00854.13; Description=POT family
  Pfam module annotation: Pfam domain module=MFS_1::PTR2; Domain location=30-498::91-490
MGGSSGLVDWRGRPVNTKKHGGVRASIFIHALVLLSNAANIANILNLVSYLRNEMHMDVARASTMASNFFAALQMFSIPAAFLADSYVKRFYTVLIFGPIEILGYILLAVQAHVPSLQPPPCTPGHQATTCESVHGSNLSLLLLGLYLIPIGDGAARACLPALGGEQFDTSDPVEQTQEASFFNWYTFAVSTGGFVGLVFVVWVENSKGWDIGFFVCAICVLLGMLIWIAGFPFYRNQLPTGSPITRLLQVLVAAFQKRKVKLPENPSELKQINKDEASAIEMLHKTEGFHCLDKAAVDTGKTGAWSLCSITQVEETKIILRMVPIFLSAVLGYIPVPLILNFTVQQGNTMDTRLGAIHISPATLFVIPTVFQMVILIVYDRFIVPFLRRITGYVGGVTHLQRIGIGFLSATVATGIAALVEIKRKKVAEENGLMDATTGIPISVFWLTVQFFLLGIVDVTSFVGLLEFFYSEASMGMKSIGSSIFYCILGVSAWLGSLLIQLANRVTRHSDGTGGWLDGTNLNRGKLDRFYGLLAVLELVSLFIYMFFARRYVYRNDQKVVIDGDNKTASEGAINVI

SEQ ID NO: 97460 - protein, 118 aa, Setaria italica
  Transcript Sequence Number=SeqID_31486
  Homolog annotation: Hit_ID=A2PZE4; Match level="QueryCoverage=49%, HitCoverage=9%, E-value=1e-10, Identity=58%"; Hit description=Ataxin- 2 related protein
  Pfam annotation: Domain name=LsmAD; Domain location=1-61; Score=62.2; E_value=2e-15; Accession=PF06741.5; Description=LsmAD domain
DEYLWYLLPHMRELEKHASRIAREIEGEDTKDIHLAEERGLFLGDDLDHDEEIKYSAVRRDTDNSKYKPFTNVPSSTRHVDSFNRTVNIDPKDSLACSSTMDEQSPSYMFDDTDSSSK

SEQ ID NO: 97461 - protein, 411 aa, Setaria italica
  misc_feature (11)..(11): Xaa can be any naturally occurring amino acid
  Transcript Sequence Number=SeqID_31487
  Gene Ontology: Cellular component=barrier septum
  Homolog annotation: Hit_ID=A2PZE4; Match level="QueryCoverage=62%, HitCoverage=45%, E-value=1e-64, Identity=49%"; Hit description =Ataxin-2 related protein
  Pfam annotation: Domain name=LsmAD; Domain location=194-265; Score =136.5; E_value=8.4e-38; Accession=PF06741.5; Description=LsmAD domain
LDRESSGRHDXTNLVRSSSGGLGGAENGINLGHASHSRDRLVYVLTQLIGHHVDVHVKNGSIISGIFHATNSDKDFGVVLKMAQVIKDGSARGQRYATDVVKKPETMIIPARELVQVFAKDVALGGDELPKGPGHDKRKDLLIDSAISRTHYLEERELERWAPDEGDSECIELEKYDRKGNRSWDQFETNAALFGVKSTFNEEIYTTKLERGPHMRELEKHASRIAREIEGEDTKDIHLAEERGLFLGDDLDHDEEIKYSAVRRDTDNSKYKPFTNVPSSTRHVDSFNRTVNIDPKDSLACSSTMDEQSPSYMFDDTDSSSNIQTNNVSQPTSDDPSNKPFSVDENRLDKKLSKDSNENLDNRKLQPENNLSGGGRPLISEGLDGPPSSSHAYEPSSSGQGFKSPETSFLS

SEQ ID NO: 97462 - protein, 244 aa, Setaria italica
  Transcript Sequence Number=SeqID_31488
  Homolog annotation: Hit_ID=A2PZE4; Match level="QueryCoverage=46%, HitCoverage=18%, E-value=6e-09, Identity=40%"; Hit description =Ataxin-2 related protein
  Pfam annotation: Domain name=PAM2; Domain location=136-153; Score =25.2; E_value=0.00027; Accession=PF07145.7; Description=Ataxin-2 C -terminal region
REKIPKIVDENRLDKKLSKDSNENLDNRKLQPENNLSGGGRPLISEGLDGPPSSSHAYEPSSSGQGFKSPETLDSTLSVKYPSTMEPVTSSQRPGSSASSTSERIAANSVASAPGLSPSSSIGSLTSEKSTLNPNAKEFKLNPNAKSFTPSASLRPPHPPASDASYYYPNNMPAAPLGPGLPVGMGFPPAYGGQPVMYNTQPGTPPQGYMHPAGPQYGQQMMMGQNRPVYYYAPEMQQYRGRNF

SEQ ID NO: 97463 - protein, 49 aa, Setaria italica
  Transcript Sequence Number=SeqID_31489
ELLSIIIHIYQKEKLIFHTVDGWGTVSGCKPSTRTTFETMNQGYKMLIQ

SEQ ID NO: 97464 - protein, 166 aa, Setaria italica
  misc_feature (23)..(23): Xaa can be any naturally occurring amino acid
  misc_feature (154)..(154): Xaa can be any naturally occurring amino acid
  Transcript Sequence Number=SeqID_31490
  Subcellular localization annotation: CTP_CleavageSite=2; ConfidenceScore=5.36e-01
TQGESESGRLLPSPTPPLPPPPXPFFPSFSTAPPPPPPHPLLFLLPSPGSGSHQQPAISCLSLSPPLPVRPPDRLPSLNKSLPAPAVPPFRWPPRPRPPPRRPTGATSATASSAPRRRAATAAPRPPLPLPPLPAPPAAAASSRRWARPPPRAXLPPPPARAPPPP

SEQ ID NO: 97465 - protein, 75 aa, Setaria italica
  misc_feature (3)..(3): Xaa can be any naturally occurring amino acid
  Transcript Sequence Number=SeqID_31491
FCXISAAGGLCGSNGRMEPAVRPNLQEQIKQSEMRMELKLQGLGVYICARAANARGGSPSISAAHSGEHAEATGC

SEQ ID NO: 97466 - protein, 442 aa, Setaria italica
  Transcript Sequence Number=SeqID_31492
  Gene Ontology: Mol. function=serine-type endopeptidase activity; Cellular component=plasma membrane; Biological process=negative regulation of catalytic activity
  Homolog annotation: Hit_ID=B3TZE7; Match level="QueryCoverage=99%, HitCoverage=76%, E-value=1e-142, Identity=58%"; Hit description =Subtilisin protease (Fragment)
  Pfam annotation: Domain name=PA; Domain location=36-131; Score=87.7; E_value=4.1e-23; Accession=PF02225.14; Description=PA domain
  Pfam annotation: Domain name=Peptidase_S8; Domain location=10-274; Score=-77.1; E_value=0.014; Accession=PF00082.14; Description =Subtilase family
  Pfam module annotation: Pfam domain module=PA::Peptidase_S8; Domain location=36-131::10-274
MVLFTVGASTINRRFPATVVLGNGETFTGFSLYAGAPLSEAKIPLVYGGDVGSEVCEAGKLNASLVAGKIVVCDPGVNGRVEKGEVVRLAGGAGAILVGNEVFGEQVITSPHILPATAVTFAAAEKIKKYMRTKNASPVATIVFQGTVVGRKPSSPRMASFSSRGPNFRAPVILKPDVTAPGVDILAAWTGANSPTELDSDKRRVHFNIISGTSMSCPHVSGIAALLRQAHPDWSPAAIKSALMTTAYNVDNAGDIIRDMSTGQASTPFVRGAGHVDPNRAADPGLVYDAGADDYMSFLCAIGYTDEQIAKFTTKGDPAVNCSTRRATAGDLNYPAFSVVFVNSTKNEVTQRRVVRNVGSNVRAKYRVAVTRPAGVRVTVKPRILRFNRRQRTQEYAVTFMPLVGANVTEKYTDGSIVWSDGKHRVTSPLAITWPVSQVAAM

SEQ ID NO: 97467 - protein, 91 aa, Setaria italica
  Transcript Sequence Number=SeqID_31493
  Subcellular localization annotation: CTP_CleavageSite=69; ConfidenceScore=5.86e-01
MTTATAIVAGHGLALRRSLPLPNPPGRPTSVSLSARPLPHARRRTIVPVSPSPRRPCRCRSISSESSTAASAASDTVEEEAEPAETYDEDE

SEQ ID NO: 97468 - protein, 409 aa, Setaria italica
  Transcript Sequence Number=SeqID_31494
  Gene Ontology: Mol. function=oxidoreductase activity, acting on the CH-OH group of donors, NAD or NADP as acceptor; Cellular component =cytoplasm; Biological process=malate metabolic process
  Homolog annotation: Hit_ID=O50015; Match level="QueryCoverage=98%, HitCoverage=61%, E-value=0.0, Identity=92%"; Hit description=Malic enzyme
  Pfam annotation: Domain name=Malic_M; Domain location=165-407; Score =429.4; E_value=5.8e-126; Accession=PF03949.7; Description=Malic enzyme, NAD binding domain
  Pfam annotation: Domain name=malic; Domain location=1-163; Score =319.3; E_value=7.9e-93; Accession=PF00390.11; Description=Malic enzyme, N-terminal domain
  Pfam module annotation: Pfam domain module=Malic_M::malic; Domain location=165-407::1-163
VGEACQKYGSIFRRPQGSYISLKEKGRILEVLRNWPEKSIQVIVVTDGERILGLGDLGCQGMGIPVGKLALYTALGGVRPSACLPITIDVGTNNENLLKDEFYIGLKQRRATGQEYSELLDEFMTAVRQNYGQKVLVQFEDFANHNAFTLLEKYRENHLVFNDDIQGTAAVVLGGLIAALKSVGGTLADHTFLFFGAGEAGTGIAELVALEISGQAKVSVEEARKKIWLVDSKGLIVTSRNETLQPFKKRYAHEHEPVKDLLGAVKAIRPTALIGSAGVGQSFTKEVIEAMSSINERPIILALSNPTSQSECTAEQAYTWSRGRAIFGSGSPFDPVKYNDKLFVPAQANNAYIFPGFGLGVVISGAVRVTDDMVLAAAEGLADQVTPEHIDKGLIYPPFSIIRKYYSSQ

SEQ ID NO: 97469 - protein, 144 aa, Setaria italica
  Transcript Sequence Number=SeqID_31495
  Gene Ontology: Mol. function=oxidoreductase activity, acting on the CH-OH group of donors, NAD or NADP as acceptor; Cellular component =cytoplasm; Biological process=malate metabolic process
  Homolog annotation: Hit_ID=Q5JKW5; Match level="QueryCoverage=95%, HitCoverage=23%, E-value=3e-71, Identity=90%"; Hit description=Malic enzyme
  Pfam annotation: Domain name=Malic_M; Domain location=1-113; Score= -15.7; E_value=6.3e-10; Accession=PF03949.7; Description=Malic enzyme, NAD binding domain
QQVLEIVTAEQAYTWSRGRAIFGSGSPFDPVKYNDKLFVPAQANNAYIFPGFGLGVVISGAVRVTDDMVLAAAEGLADQVTPEHIDKGLIYPPFSIIRKISANIAARVAAKAYDLGLASQLPRPKNLVKYAESCMYTPVYRSYR

SEQ ID NO: 97470 - protein, 80 aa, Setaria italica
  misc_feature (26)..(26): Xaa can be any naturally occurring amino acid
  misc_feature (29)..(29): Xaa can be any naturally occurring amino acid
  misc_feature (47)..(47): Xaa can be any naturally occurring amino acid
  Transcript Sequence Number=SeqID_31496
  Homolog annotation: Hit_ID=B6T080; Match level="QueryCoverage=100%, HitCoverage=18%, E-value=1e-20, Identity=62%"; Hit description=MtN19- like protein
WYHDIASPAGHLALKSFNAEVVDDHXVPXPLHETYLHHWLVEPYYAXTDGAAGEARNRSKMIRHRNSGVCSQTLGQYYGL

SEQ ID NO: 97471 - protein, 45 aa, Setaria italica
  Transcript Sequence Number=SeqID_31497
LKSIIKSVMAKGVREKTIRQMTRWSIILAVLMDRQADDTLEHYSS

SEQ ID NO: 97472 - protein, 90 aa, Setaria italica
  Transcript Sequence Number=SeqID_31498
  Homolog annotation: Hit_ID=B6T080; Match level="QueryCoverage=88%, HitCoverage=18%, E-value=2e-22, Identity=70%"; Hit description=MtN19- like protein
MILARRLFVQVEYLVEECSSENRAKNDCVHVQVAKQILPRGGDIVFGVAHLHSGGIAASLHGEDGRLLCESTATYGDGQEAGNEADYIVG

SEQ ID NO: 97473 - protein, 248 aa, Setaria italica
  misc_feature (116)..(116): Xaa can be any naturally occurring amino acid
  Transcript Sequence Number=SeqID_31499
  Homolog annotation: Hit_ID=B6T080; Match level="QueryCoverage=91%, HitCoverage=39%, E-value=2e-39, Identity=67%"; Hit description=MtN19- like protein
  Pfam annotation: Domain name=SURNod19; Domain location=5-220; Score= -191.8; E_value=0.00098; Accession=PF07712.4; Description=Stress up -regulated Nod 19
MPTCFRCRSRNVRSDSRWFMILARRLFVQVEYVVEECSSENRAKNDCVHVQVAKQILPRGGDIVFGVAHLHSGGIAASLHGEVAATTNSIDLFAFLCCRAQYLSSSETLHNPSSKXRTMDLKQLVASLDADELHALDSVTQDGRLLCESTATYGDGQEAGNEADYIVGMSTCYPKPGAVTVRDGEVLTVVSKYSSHQQHTGVMGLVYILVAEHGQPHPQQLPAAAGKPGLCFSFPVSWCLPSWLSSNL

SEQ ID NO: 97474 - protein, 275 aa, Setaria italica
  Transcript Sequence Number=SeqID_31500
  Homolog annotation: Hit_ID=B6T080; Match level="QueryCoverage=86%, HitCoverage=56%, E-value=7e-82, Identity=65%"; Hit description=MtN19- like protein
  Pfam annotation: Domain name=SURNod19; Domain location=32-275; Score =205.7; E_value=1.2e-58; Accession=PF07712.4; Description=Stress up -regulated Nod 19
KWRWRWLLVLLIVALSSAIIAELPSAEAALDVRGHRRLKSMTVLSPPFFLRPGAVANKYYHDIAFPRGHVALKSFNGEVVDDRGAPVPLHEAYLHHWVVHPYYAATNATAAGRPATLPARNSGVCEGDTHGQYYGLGSETRRTATWVPDPYGVEAGDPAAPPEGYEERWMLNVHAIDTRGAADRMGCTECRCDLYNVTVDEHGRRIADDYAGGLLCCYDQTRCRVEEGFVDGEARKLFFRYTVTWLDWSDAVVPVKIYIFDATHRPLPVGCKVEY

SEQ ID NO: 97475 - protein, 434 aa, Setaria italica
  misc_feature (371)..(371): Xaa can be any naturally occurring amino acid
  Transcript Sequence Number=SeqID_31501
  Homolog annotation: Hit_ID=B6T080; Match level="QueryCoverage=93%, HitCoverage=92%, E-value=1e-142, Identity=65%"; Hit description =MtN19-like protein
  Pfam annotation: Domain name=SURNod19; Domain location=27-405; Score =569.0; E_value=5.5e-168; Accession=PF07712.4; Description=Stress up -regulated Nod 19
MKMSAFVRLIVTLLSAAAALPSEALNVRGQLLKSQTFLSPPIFLRPGSVSNKWYHDVAFPRGHIALKSFNAEVVDDHGVPVPLHETYLHHWVVEPYYALKDDAAGEARNRSKMIQHRNSGVCSKTLPQYYGLGSETRHTATWVPDPYGIEIGDPAAAPEGYEERLRVNVHAIDTRGAVDKLGCTECRCDLYNLTVDESGRPVADDYVGGLLCCYDETRCMVEEGFVDVEARKVFLRYTVVWQDWSDAVLPVKIYIFDATDRALLEGKTETACRVEYVVEECSSENRAKNDCVHVQMAKQILPRGGDIVFGVAHLHSGGIAASLHGEDGRLLCESTATYGDGQEAGNEAGYVVGMSTCYPKPGAVTVRDGEXVLTVVSNYSSHQQHTGAMGQFYILVAEHGQPQQQQLPAAAGKPGLCFSFPVSWCLPSWLSSNL

SEQ ID NO: 97476 - protein, 432 aa, Setaria italica
  misc_feature (109)..(109): Xaa can be any naturally occurring amino acid
  misc_feature (180)..(180): Xaa can be any naturally occurring amino acid
  Transcript Sequence Number=SeqID_31502
  Homolog annotation: Hit_ID=B6T080; Match level="QueryCoverage=89%, HitCoverage=87%, E-value=1e-135, Identity=66%"; Hit description =MtN19-like protein
  Pfam annotation: Domain name=SURNod19; Domain location=19-404; Score =556.3; E_value=3.5e-164; Accession=PF07712.4; Description=Stress up -regulated Nod 19
  Subcellular localization annotation: CTP_CleavageSite=29; ConfidenceScore=5.36e-01
RCLRSFRCSSLSYLQPPHFHRRRSACEASCSSPRRSCRRPSSCRPGSVSNKWYHDIAFPRGHLALKSFNAEVVDDHGVPVPLHETYLHHWLVEPYYAPNGRRRRRGAEXSKMIRHRNSGVCSQTLGQYYGLGSETRHTATWVPDPYGIEIGDPAAAPEGYEERWLVNVHAIDTRGAVDKXGCTECRCDLYNLTVDEFGRRIADDYAGGLLCCYDETRCKVEEGFVDVEARKVFLRYTVVWQDWSDAVLPVKIYIFDVTDRALLEGKTETACRVEYLVEECSSENRAKNDCVHVQVAKQILPRGGDIVFGVAHLHSGGIAASLHGEDGRLLCESTATYGDGQEAGNEADYIVGMSTCYPKPGAVTVRDGEVLTVVSKYSSHQQHTGVMGLVYILVAEHGQPQPQQLPAAAGKPGLCFSFPVSWCLPSWLSSNL

SEQ ID NO: 97477 - protein, 48 aa, Setaria italica
  Transcript Sequence Number=SeqID_31503
  Subcellular localization annotation: CTP_CleavageSite=41; ConfidenceScore=5.07e-01
MAAPYNDGAPAQAPTPVAVVSPPQFCAPYAVPLTVVKKAISLSGRASS

SEQ ID NO: 97478 - protein, 112 aa, Setaria italica
  Transcript Sequence Number=SeqID_31504
  Gene Ontology: Biological process=penicillin biosynthetic process
  Homolog annotation: Hit_ID=B6THR2; Match level="QueryCoverage=100%, HitCoverage=30%, E-value=3e-48, Identity=84%"; Hit description =Peptidase C45, acyl-coenzyme A/6-aminopenicillanic acid acyl -transferase
LPDGLSFTAYTYAGELPSCAFGFNSNGVAFTLDSVPPVNDEIVAGAIARFFVPRDLLEAKNLDDAMHRICSPSVSVGHSYNLMNVRGRRIVNVETASRNRSAVLEAGAAPFF

SEQ ID NO: 97479 - protein, 195 aa, Setaria italica
  Transcript Sequence Number=SeqID_31505
  Gene Ontology: Mol. function=beta-alanyl-histamine hydrolase activity; Biological process=penicillin biosynthetic process
  Homolog annotation: Hit_ID=B6THR2; Match level="QueryCoverage=100%, HitCoverage=52%, E-value=4e-74, Identity=76%"; Hit description =Peptidase C45, acyl-coenzyme A/6-aminopenicillanic acid acyl -transferase
MGAGGELDVFNAGLCADGYALGLAVGRRFADAIGSRMRQDLVLREQLLPFASTAEARRLLAALQAANSERYPRYWDELVGTADGSGVPLLHVILVNFRKEILPFVPKAGGDHDREKEEEEPDGDCSDVLLVSDSTAIAAHNEDGNVALLGHTYLVRATLPDGLSFTAYTYAGELPSCAFGFNSNGVVSDHHSRMP

SEQ ID NO: 97480 - protein, 105 aa, Setaria italica
  misc_feature (46)..(46): Xaa can be any naturally occurring amino acid
  Transcript Sequence Number=SeqID_31506
MEKEVGVNEEAVAAPEEATPTLTATPTLTAPEKEPEAREKCYKKTXGEEATFLESAKDYFNQFKAMPAHKHWICVKNYFSQKCSSVFGKQKVEPVVKDKTPEVVK

SEQ ID NO: 97481 - protein, 60 aa, Setaria italica
  misc_feature (20)..(20): Xaa can be any naturally occurring amino acid
  Transcript Sequence Number=SeqID_31507
ESAKGTNFNQFKAMPAQKHXRNKETNFSQNRLQVFGKQKVEPVVKDKTPEVVKPAAVETH

SEQ ID NO: 97482 - protein, 78 aa, Setaria italica
  Transcript Sequence Number=SeqID_31508
AGPERVRWRPKGPGAGEFRYDALSYALNFDEGGGDDDEACAADPAAAFRYRNFNARLPPSPAAAAARTHQRATAIAIA

SEQ ID NO: 97483 - protein, 184 aa, Setaria italica
  Transcript Sequence Number=SeqID_31509
  Gene Ontology: Cellular component=plasma membrane
  Homolog annotation: Hit_ID=Q9LPM5; Match level="QueryCoverage=97%, HitCoverage=45%, E-value=4e-37, Identity=49%"; Hit description =F2J10.8 protein
  Pfam annotation: Domain name=DUF1005; Domain location=1-180; Score =36.6; E_value=6.6e-20; Accession=PF06219.4; Description=Protein of unknown function (DUF1005)
  Subcellular localization annotation: CTP_CleavageSite=38; ConfidenceScore=5.57e-01
IHDLSGSPVAAASMVTPFVPSPGSGRVSRANPGSWLILQATGAGPSSWKPWARLEAWRERGPVDALGYRLELVFDSGPHECAVPIAESSISTKRGGQFVIDPATFPEATAGAAWPFAGGFVMGSTVEGEGRASRPTVQVGVQRVTCMGDVAVFVALSAAVDLCMDACKLFSQRLRKELCQDQDD

SEQ ID NO: 97484 - protein, 96 aa, Setaria italica
  Transcript Sequence Number=SeqID_31510
  Homolog annotation: Hit_ID=B0I503; Match level="QueryCoverage=59%, HitCoverage=12%, E-value=6e-22, Identity=84%"; Hit description =Putative nicotianamine aminotransferase
MATLHQNGGARAAEDVNGNGNGHAAAPAAEWQFARAVKDGALAAAGDRMSIRAVRFKISASVDARDPRPVLPLAHGDPSTFPAFRTAAEAEAAVAA

SEQ ID NO: 97485 - protein, 161 aa, Setaria italica
  Transcript Sequence Number=SeqID_31511
  Gene Ontology: Mol. function=ubiquitin-protein ligase activity; Cellular component=ubiquitin ligase complex; Biological process =ubiquitin-dependent protein catabolic process
  Homolog annotation: Hit_ID=B6SVK1; Match level="QueryCoverage=98%, HitCoverage=24%, E-value=5e-56, Identity=66%"; Hit description =Ubiquitin-protein ligase
ELFIRKVDDEPVNSMASAATVLANIVDSGIDPDTTVVNKEGHVLTSKYSIYNFVHMLKCFMPDDLNLSIIRVLLVLTELTKPLATVVSVIRENHRSHAIVELMSSPMEALSLAATRLLITLSPHIGHTIVERLCKTQGQPRKLVKSISHTGRITERQAALA

SEQ ID NO: 97486 - protein, 112 aa, Setaria italica
  Transcript Sequence Number=SeqID_31512
  Subcellular localization annotation: CTP_CleavageSite=69; ConfidenceScore=5.71e-01
NQKATKLTAAPRTQRKGSLPCFLSATAAAAARSASSSPARDAATRPSCLPPFLFLAGVSVPPSAATLCLAWSADPPGRTWIDLLVCWSLSSHKINLPVVRLHFLSQEFEGFS

SEQ ID NO: 97487 - protein, 48 aa, Setaria italica
  Transcript Sequence Number=SeqID_31513
  Gene Ontology: Cellular component=plasma membrane
AWCFSDPEMKRRRRVASYKAYSVEGKVKASLRRGFRWIKAKCSELIHG

SEQ ID NO: 97488 - protein, 82 aa, Setaria italica
  misc_feature (21)..(21): Xaa can be any naturally occurring amino acid
  Transcript Sequence Number=SeqID_31514
  Gene Ontology: Mol. function=nucleic acid binding; Cellular component= endoplasmic reticulum membrane; Biological process=GPI anchor biosynthetic process
  Homolog annotation: Hit_ID=Q33AB1; Match level="QueryCoverage=98%, HitCoverage=7%, E-value=2e-26, Identity=70%"; Hit description =Retrotransposon protein, putative, unclassified
  Pfam annotation: Domain name=RVT_2; Domain location=2-82; Score= -124.7; E_value=1.1e-07; Accession=PF07727.6; Description=Reverse transcriptase (RNA-dependent DNA pol
ALLVGIYVDDLVITGTKDEEXEAFKEEMKAAFQMSNLGPLSFYLGIEVHQDDSDITLRKTTYTKRIIELGGLTDCNPCGTPT

SEQ ID NO: 97489 - protein, 100 aa, Setaria italica
  Transcript Sequence Number=SeqID_31515
  Gene Ontology: Mol. function=substrate-specific transmembrane transporter activity; Cellular component=integral to membrane; Biological process=transmembrane transport
  Homolog annotation: Hit_ID=B6TDG1; Match level="QueryCoverage=97%, HitCoverage=18%, E-value=4e-37, Identity=80%"; Hit description =Proton myo-inositol cotransporter
PLTMASAKLEEAVEPKKKSNVKYASFCAILASMASIILGYDIGVMSGAALYIKKDLKITDVQLEILMGILNVYSLIGSFAAGRTSDWIGRRFTVVFAAAI

SEQ ID NO: 97490 - protein, 179 aa, Setaria italica
  misc_feature (10)..(10): Xaa can be any naturally occurring amino acid
  misc_feature (163)..(163): Xaa can be any naturally occurring amino acid
  Transcript Sequence Number=SeqID_31516
  Gene Ontology: Mol. function=asparagine synthase (glutamine -hydrolyzing) activity
  Homolog annotation: Hit_ID=B6SVT7; Match level="QueryCoverage=91%, HitCoverage=22%, E-value=4e-64, Identity=74%"; Hit description =Asparagine synthase family protein
STIKGPWALXYIYWQMDSNTIWFSRDAFGRRSLLVHWPTSDDPRFVLSSVAPPSFATNNSDATVNDFVSDPDMSDCTKASYWEELPCGIYSIHMKGIGKDGTCVKEGWIVEVNTHDWMDSSLNKLIQWERKLTVPTVENNSVNGGNHHLSQNFISSGKSERKXNKNGLSKIDLLSDSSL

SEQ ID NO: 97491 - protein, 144 aa, Setaria italica
  misc_feature (122)..(122): Xaa can be any naturally occurring amino acid
  Transcript Sequence Number=SeqID_31517
  Gene Ontology: Mol. function=binding; Cellular component=nuclear pore; Biological process=intracellular protein transport
  Homolog annotation: Hit_ID=B6TJW5; Match level="QueryCoverage=97%, HitCoverage=29%, E-value=5e-69, Identity=90%"; Hit description =Importin alpha-1b subunit
  Pfam annotation: Domain name=Arm; Domain location=32-73; Score=32.8; E_value=1.4e-06; Accession=PF00514.15; Description=Armadillobeta -catenin-like repeat
  Pfam annotation: Domain name=Arm; Domain location=74-113; Score=44.4; E_value=4.5e-10; Accession=PF00514.15; Description=Armadillobeta -catenin-like repeat
  Pfam annotation: Domain name=HEAT; Domain location=38-75; Score=2.2; E_value=26; Accession=PF02985.14; Description=HEAT repeat
  Pfam annotation: Domain name=HEAT; Domain location=78-115; Score =23.2; E_value=0.0011; Accession=PF02985.14; Description=HEAT repeat
  Pfam module annotation: Pfam domain module=Arm::Arm::HEAT::HEAT; Domain location=32-73::74-113::38-75::78-115
GLSELVDKVCSDDSTSQLEATVQFRKLLSDGKNSTVIKIIRADVLPRFAEFLSRHGLPQLQLEAAWVLTNIAASDYTLLVAECGAVPRLVELLESPNANIRHQAIWCLGNIAADLPSCRDIXFDHGVMTPLLSQFREDIENSKF

SEQ ID NO: 97492 - protein, 59 aa, Setaria italica
  Transcript Sequence Number=SeqID_31518
  Gene Ontology: Mol. function=structural constituent of ribosome; Cellular component=intracellular; Biological process=translation
  Homolog annotation: Hit_ID=B6U998; Match level="QueryCoverage=59%, HitCoverage=26%, E-value=4e-12, Identity=91%"; Hit description=60S ribosomal protein L22-2
  Pfam annotation: Domain name=Ribosomal_L22e; Domain location=1-59; Score=21.4; E_value=4.5e-08; Accession=PF01776.9; Description =Ribosomal L22e protein family
SDGIILCFISKRYLKYLTKKYLKKHNVRDWLRVIASNKDRSVYELRYFNIAENEGEEED

SEQ ID NO: 97493 - protein, 74 aa, Setaria italica
  Transcript Sequence Number=SeqID_31519
  Gene Ontology: Mol. function=structural constituent of ribosome; Cellular component=intracellular; Biological process=translation
  Homolog annotation: Hit_ID=B4FCK9; Match level="QueryCoverage=71%, HitCoverage=40%, E-value=1e-19, Identity=84%"; Hit description=60S ribosomal protein L22-2
  Pfam annotation: Domain name=Ribosomal_L22e; Domain location=17-74; Score=9.4; E_value=5.8e-07; Accession=PF01776.9; Description =Ribosomal L22e protein family
MARGVAAGAKGGAAGGKKKGAVTFTIDCTKPVEDKIMEIATLEKFLQERIKVAGGKAGNLGEGVTVTRDKTKVT

SEQ ID NO: 97494 - protein, 24 aa, Setaria italica
  Transcript Sequence Number=SeqID_31520
SNKDRSVYELRYFNIAENEGEEED

SEQ ID NO: 97495 - protein, 130 aa, Setaria italica
  Transcript Sequence Number=SeqID_31521
  Gene Ontology: Mol. function=structural constituent of ribosome; Cellular component=intracellular; Biological process=translation
  Homolog annotation: Hit_ID=B4FCK9; Match level="QueryCoverage=100%, HitCoverage=100%, E-value=5e-47, Identity=72%"; Hit description=60S ribosomal protein L22-2
  Pfam annotation: Domain name=Ribosomal_L22e; Domain location=16-130; Score=222.0; E_value=1.5e-63; Accession=PF01776.9; Description =Ribosomal L22e protein family
MARGVVAAKGGAAAGKKKGSVTFTIDCTKPVEDKIMEIASLEKFLQERIKVAGGKAGSLGDSVTVSREKTKVTVTSDGPFSKRYLKYLTKKYLKKHNVRDWLRVIAANKDRTVYELRYFNIAENEGEEED

SEQ ID NO: 97496 - protein, 273 aa, Setaria italica
  misc_feature (37)..(37): Xaa can be any naturally occurring amino acid
  misc_feature (45)..(45): Xaa can be any naturally occurring amino acid
  Transcript Sequence Number=SeqID_31522
  Gene Ontology: Mol. function=translation initiation factor activity; Cellular component=eukaryotic translation initiation factor 3 complex; Biological process=regulation of translational initiation
  Homolog annotation: Hit_ID=B6U0Y0; Match level="QueryCoverage=82%, HitCoverage=100%, E-value=1e-121, Identity=93%"; Hit description =Eukaryotic translation initiation factor 3 subunit 12
  Pfam annotation: Domain name=SAC3_GANP; Domain location=66-211; Score= 156.9; E_value=6e-44; Accession=PF03399.8; Description=SAC3GANP family
  Subcellular localization annotation: CTP_CleavageSite=46; ConfidenceScore=5.32e-01
QIQQPPSPSPWKPFHRLSSAPPLPLSSELPTVSREIXARVRVLDXAAMATEQAAENYTVEDLVALNPYNPDILNDLEKFVNEQVSSQTYNLDANLSLLRLYQFEPERMSIQIVARILIKALMAMPAPDFSLCLFLIPEHVQMEEQFKTLIVLSHYLETARFRQFWDEAAKNRHILEVVPGFEQAIQSYAIHVLSLTYQKVPRPVLAEAINIEGLALDKFLEYHAANAGWVIEKGGQSQVIVLPRNEFNHPELKKNTADTVPFEHVTRIFPVLS

SEQ ID NO: 97497 - protein, 80 aa, Setaria italica
  misc_feature (1)..(1): Xaa can be any naturally occurring amino acid
  Transcript Sequence Number=SeqID_31523
  Gene Ontology: Mol. function=binding
XKMACTDLLKAALLSTPLFAVPLEALAETCQPPNSFANMPIFIAVALIGAAVGGLLARRRKEELKRLNNQLRQINTALRR

SEQ ID NO: 97498 - protein, 83 aa, Setaria italica
  Transcript Sequence Number=SeqID_31524
  Gene Ontology: Mol. function=oxidoreductase activity; Biological process=oxidation reduction
  Homolog annotation: Hit_ID=Q75KC1; Match level="QueryCoverage=100%, HitCoverage=14%, E-value=3e-13, Identity=46%"; Hit description =Oxidoreductase, 2OG-Fe oxygenase family protein, expressed
VLTNGAYGSVEHRVVPDAERGRTTVATFHDACVRGQVAPLPELLGVGGGEVAARYRSIGKLEFRKGSARATAQGTRFLDTIRM

SEQ ID NO: 97499 - protein, 77 aa, Setaria italica
  Transcript Sequence Number=SeqID_31525
  Gene Ontology: Mol. function=heat shock protein binding
  Homolog annotation: Hit_ID=B9SDL9; Match level="QueryCoverage=89%, HitCoverage=25%, E-value=5e-10, Identity=49%"; Hit description=Co -chaperone protein HscB, mitochondrial, putative
  Pfam annotation: Domain name=HSCB_C; Domain location=1-75; Score =43.9; E_value=6.4e-10; Accession=PF07743.5; Description=HSCB C -terminal oligomerisation domai
MIDGAHNVQMMEIREAVNDVSDSQTLEKIQSQVKKKLETWSGSFQEAFDQKDFDRAIEATQRMRYYERAVEETVKKL

SEQ ID NO: 97500 - protein, 214 aa, Setaria italica
  misc_feature (187)..(187): Xaa can be any naturally occurring amino acid
  Transcript Sequence Number=SeqID_31526
  Gene Ontology: Mol. function=heat shock protein binding; Cellular component=mitochondrion; Biological process=protein folding
  Homolog annotation: Hit_ID=B9SDL9; Match level="QueryCoverage=82%, HitCoverage=65%, E-value=5e-57, Identity=59%"; Hit description=Co -chaperone protein HscB, mitochondrial, putative
  Pfam annotation: Domain name=DnaJ; Domain location=55-124; Score =45.0; E_value=3e-10; Accession=PF00226.23; Description=DnaJ domain
  Pfam annotation: Domain name=HSCB_C; Domain location=138-212; Score =67.8; E_value=3.9e-17; Accession=PF07743.5; Description=HSCB C -terminal oligomerisation domai
  Pfam module annotation: Pfam domain module=DnaJ::HSCB_C; Domain location=55-124::138-212
FTGVYPIGAPSGSRCLSNQAGGGGGGGACWSCGATGAFLSCGSCGSVQPVDPAVDYFQIFGLEREYNIKDNNLERRYKEWQKKLHPDLVHSKSEKERGYAAEQSALVIDAYRTLSNPLSRALYLLKLEGVHVDEEKTINDPELLMEMMEIREAVNDVSDSQTLEKIQSQVKKKLETWSGSFQEAFDXKDFDRAIEATQRMRYYERAVEETVKKL

SEQ ID NO: 97501 - protein, 123 aa, Setaria italica
  misc_feature (14)..(14): Xaa can be any naturally occurring amino acid
  Transcript Sequence Number=SeqID_31527
  Gene Ontology: Mol. function=ubiquitin-protein ligase activity; Cellular component=ubiquitin ligase complex; Biological process =ubiquitin-dependent protein catabolic process
  Homolog annotation: Hit_ID=B6SXP3; Match level="QueryCoverage=96%, HitCoverage=28%, E-value=1e-62, Identity=95%"; Hit description =Ubiquitin-protein ligase
  Pfam annotation: Domain name=U-box; Domain location=17-91; Score =91.9; E_value=2.3e-24; Accession=PF04564.7; Description=U-box domain
MPGSVPLALGLDTXGVQVPWYFRCPISLELMRDPVTVSTGQTYDRASIESWVATGNTTCPVTRAPLADFTLIPNHTLRRLIQEWCVAHRSMGVERIPTPKQPADADLVRSLVAQGPGLPALRR

SEQ ID NO: 97502 - protein, 176 aa, Setaria italica
  Transcript Sequence Number=SeqID_31528
  Subcellular localization annotation: CTP_CleavageSite=42; ConfidenceScore=5.53e-01
SAARRHSASHLAGAHGFPAPCARAGRRPRPVPPRLAPDAGVPAVAPRGEHLDSRSFRRSAGRPWPSPSAAAGNAGSPPSSPEAAVPPSTTRSGCDAYASSSPRPRHQPCQRRLAAHFTCGACQLERPRRLTRSCPRPPTPLDGREAPPPPLRSESSVAACAVAVLRSTASEHLAVA

SEQ ID NO: 97503 - protein, 147 aa, Setaria italica
  Transcript Sequence Number=SeqID_31529
  Gene Ontology: Mol. function=transferase activity, transferring glycosyl groups; Biological process=metabolic process
  Homolog annotation: Hit_ID=Q6ESW8; Match level="QueryCoverage=100%, HitCoverage=31%, E-value=2e-60, Identity=75%"; Hit description =Putative Hydroquinone glucosyltransferase
FPPAYPVGPCVRPSSDEDGALACLDWLDRQPAGSVVYVSFGSAGSLSVEHTAELAAGLEDSGHRFLWVVRMPSLDGENSDWGKSHRRAEDDPLAWLPEGFLERTSGHGLAVAAWAPQVRVLSHPATAAFVSHCGWNSTLESVAAGVP

SEQ ID NO: 97504 - protein, 308 aa, Setaria italica
  Transcript Sequence Number=SeqID_31530
  Gene Ontology: Cellular component=mitochondrion
  Homolog annotation: Hit_ID=B9SFI2; Match level="QueryCoverage=95%, HitCoverage=37%, E-value=1e-100, Identity=58%"; Hit description =Pentatricopeptide repeat-containing protein, putative
  Pfam annotation: Domain name=PPR; Domain location=192-226; Score =22.0; E_value=0.0025; Accession=PF01535.12; Description=PPR repeat
  Pfam annotation: Domain name=PPR; Domain location=265-299; Score =12.2; E_value=0.32; Accession=PF01535.12; Description=PPR repeat
  Pfam module annotation: Pfam domain module=PPR::PPR; Domain location =192-226::265-299
FLSPQLNVGSHGTFFSTITETILVQARDPSQLSLEIENAIDERRFDDAWRAYEKHVHMDGLPRKSVLSKLITGLAETCDAHWLNQSYNVVSHAFEEKHELLGKEPLIYLSLTLARCALPNLAINVVRKLVKMEAYPPVSAWSAIVAHMCQTNTGAFLAADLVMELGYLFQNNRVDPRKKSNRPLLSMKPNSFTFNIVLTAALLFGTTRKAEQLLELMPRIGVKPEVNLLIVMARIYERNGHRDEIQKLKRHVDEAYGLSESEFRQFYDCLLSCHLKFGDLDSAVDMVLDMLRKGKNAKRSLEAAKAVL

SEQ ID NO: 97505 - protein, 237 aa, Setaria italica
  Transcript Sequence Number=SeqID_31531
  Gene Ontology: Cellular component=plasma membrane
  Pfam annotation: Domain name=DUF632; Domain location=1-236; Score =318.7; E_value=1.2e-92; Accession=PF04782.4; Description=Protein of unknown function (DUF632)
LSWTEKSETKSDIFEDYGGMKSGSHSQTLGRLYAWEKKLYEEVKAIDQIRQTYEKKCVQLRNQDAKGSELRSAEKTRTTVRDLYTRIWVSLRAAESISDRIQKLRDEELQPQLVELLQGFTKSWKLMVDSHETQRQIMFEVNSFTCPAYGKFCNDAQRHATLKLEVQLRNWRSCFVSYVNAQKAYIEALDGWLSKFILTDTIRYSRGISSIAPDRAGAPILVVICHDWYTTLFLSIS

SEQ ID NO: 97506 - protein, 51 aa, Setaria italica
  Transcript Sequence Number=SeqID_31532
QVPWIQVSRSRSLILSVQVKALAAAITIGVLLHFALLAFNAAMLQILSRLE

SEQ ID NO: 97507 - protein, 330 aa, Setaria italica
  misc_feature (311)..(311): Xaa can be any naturally occurring amino acid
  Transcript Sequence Number=SeqID_31533
  Gene Ontology: Mol. function=bile acid:sodium symporter activity; Cellular component=membrane; Biological process=sodium ion transport
  Homolog annotation: Hit_ID=B6TYA0; Match level="QueryCoverage=98%, HitCoverage=80%, E-value=1e-138, Identity=79%"; Hit description=Bile acid sodium symporter
  Pfam annotation: Domain name=SBF; Domain location=55-238; Score=10.0; E_value=4.2e-05; Accession=PF01758.8; Description=Sodium Bile acid symporter family
GGKGAVPPPALGAVLLGFARSNFLPLALVAGVILGLLNPTLGCLAHKCSLSKYSTFGIFLISGLTLRTEELGAALEAWPAGLYGIGSILLITPFLAQFIMQVQLLPREFITGLAMFCCMPTTLSSGVTLTQIVGGNSALALAMTVVSNLLGIITVPLSLAKFIGAGAGLSLPTEQLFRSLVTRLLIPLIIGKVARETVKGIADFVDRNKQGFSVASAVLLSLVPWIQVSRSRSLILSVQVKALAAAITIGVLLHFALLAFNAAMLQILSRLEQKGEPVFAKKEYARAVILVASQKTLPVLIAVVDQLGGAXGESAFLVIPCIAAHINQII

SEQ ID NO: 97508 - protein, 48 aa, Setaria italica
  Transcript Sequence Number=SeqID_31534
GLVIRPDWIPVSLPYILHTSTFRNPIRQIARSTPSYCCTFRGWLAPTC

SEQ ID NO: 97509 - protein, 99 aa, Setaria italica
  Transcript Sequence Number=SeqID_31535
SATSLSCSFLNILARGYETIIHVRLCIMQDSCSILFCSGLMERALLHRDSRGRFRRLLELIPGGWSDVCLTEKTIKFPRHTGDASLKSRMPDFDICLKN

SEQ ID NO: 97510 - protein, 157 aa, Setaria italica
  Transcript Sequence Number=SeqID_31536
  Gene Ontology: Mol. function=transferase activity, transferring glycosyl groups; Cellular component=membrane
  Homolog annotation: Hit_ID=Q7XJ98; Match level="QueryCoverage=100%, HitCoverage=24%, E-value=9e-52, Identity=59%"; Hit description =Xyloglucan galactosyltransferase KATAMARI1
NADIIRDCRKTEDHWGDMCGFVSNAGLGRPLADRADGVITGEAGWYGTHQFALDFIFHNRMRQYECLTNHSAVANAVFVPFYAGFDFARYHWGYDNTTRDAASVDLAEWLMARPQWRRMGGCDHFLVAGRTGWDFRRSNNVDPDWGNDLLAMPAGRN

SEQ ID NO: 97511 - protein, 87 aa, Setaria italica
  misc_feature (35)..(35): Xaa can be any naturally occurring amino acid
  Transcript Sequence Number=SeqID_31537
ASFNEWRPEVDGTVKDICLEVRKLSKHWEHTVSSXSPPLLSTTPPAAEHPPATSEADGPHGHRVDNFHQEDGFGSVTIVVHPPVTGA

SEQ ID NO: 97512 - protein, 75 aa, Setaria italica
  Transcript Sequence Number=SeqID_31538
  Homolog annotation: Hit_ID=B6UIC4; Match level="QueryCoverage=53%, HitCoverage=16%, E-value=7e-11, Identity=78%"; Hit description=Ring domain containing protein
MEAGRMDQPCMAAINSQPLVADVEAVKKSSGDMPTTMGSGCFDCNNISHQRLAIDSSHARLIHSPSFHDNQDTCS

SEQ ID NO: 97513 - protein, 48 aa, Setaria italica
  Transcript Sequence Number=SeqID_31539
  Homolog annotation: Hit_ID=B6UIC4; Match level="QueryCoverage=97%, HitCoverage=18%, E-value=1e-15, Identity=85%"; Hit description=Ring domain containing protein
LTLSPDTLVPLYGRGGSSKKSLNGVAIPRRPMVHRETVEHQNAQSNVD

SEQ ID NO: 97514 - protein, 446 aa, Setaria italica
  misc_feature (21)..(21): Xaa can be any naturally occurring amino acid
  misc_feature (351)..(351): Xaa can be any naturally occurring amino acid
  Transcript Sequence Number=SeqID_31540
  Gene Ontology: Mol. function=DNA binding; Cellular component=plasma membrane
  Homolog annotation: Hit_ID=Q7XS35; Match level="QueryCoverage=99%, HitCoverage=83%, E-value=0.0, Identity=73%"; Hit description =OSJNBa0058K23.18 protein
  Pfam annotation: Domain name=Remorin_C; Domain location=325-436; Score=115.4; E_value=1.9e-31; Accession=PF03763.5; Description =Remorin, C-terminal region
  Subcellular localization annotation: CTP_CleavageSite=28; ConfidenceScore=5.19e-01
SRRKDSALDVNKVQSTSKSSXSQPATSNASMIHPVRPVEEDSTECDSGLDNASTSSFEFHGGEKTSTQNPGVGYFSRQASSKWNDAEKWIVNRQNVNQNIPKGTSQNQTVHQMNSAAARGVIVPKISGRPVQKMKRVNPTLSAPRSILERLSFASYQPKLVRHADVCPVSSSSATPEYHKATDTGSSIEVKPCNDPKAIPTVQSVSLRDVGTEMTPIPSQEPSRTGTPLGSMTPTRSPNCSIPSTPVGGRSVASPGEENTDDGPYFNRKGVTHGNELSDTEMRLKTRQEIAALGIQLGKMNIATWASKEELELVSAAPSIADLERMKKEYAARAASYEEAENTKHTARFKXEEVKIEAWESRQRAKIESEMRKIEEHAERMRSEAMAKMAEKLEMTHRIAEVKRASANAKMNQQAAIAVQKAEKIRQTGRVPRSNILCCSGCFCEP

SEQ ID NO: 97515 - protein, 194 aa, Setaria italica
  Transcript Sequence Number=SeqID_31541
  Homolog annotation: Hit_ID=Q7NNC0; Match level="QueryCoverage=62%, HitCoverage=100%, E-value=1e-18, Identity=48%"; Hit description =Glr0491 protein
  Pfam annotation: Domain name=Lin0512_fam; Domain location=75-193; Score=237.9; E_value=2.5e-68; Accession=PF09585.2; Description =Conserved hypothetical protein (Lin0512_f
  Subcellular localization annotation: CTP_CleavageSite=53; ConfidenceScore=5.89e-01
MGASAAPFTGGFLCPTKPRTPPLPSSTSRSSHSRLHFRIRSPKPKNPAAAPVSSRMEASLPQARDAQGGAESAMKLLFVEMGVGYDQHGQDITAAAVRACKDAISSNSIPAFRGGSIPGVNTDQMKLQIKLGVPRSTQHLLDAERVKAVFPYGEIISFEVVDGGMICSSGVCLEAMGDKNDDCYIVNAAVYVGY

SEQ ID NO: 97516 - protein, 32 aa, Setaria italica
  Transcript Sequence Number=SeqID_31542
LCPIIELEGLGKGIRLISFLFDSIYYIVNPYG

SEQ ID NO: 97517 - protein, 115 aa, Setaria italica
  misc_feature (7)..(7): Xaa can be any naturally occurring amino acid
  Transcript Sequence Number=SeqID_31543
  Gene Ontology: Mol. function=protein binding; Cellular component =plasma membrane
  Homolog annotation: Hit_ID=Q2QN32; Match level="QueryCoverage=95%, HitCoverage=22%, E-value=4e-40, Identity=71%"; Hit description =Lipase, putative, expressed
  Pfam annotation: Domain name=DUF620; Domain location=1-71; Score= -38.8; E_value=3.5e-09; Accession=PF04788.4; Description=Protein of unknown function (DUF620)
YWETTIXAPALEDYRPVEGVMIAHSGRSAVTLFRFGEAAMSHTKTRMEEAWSIEEVAFNVPGLSVDCFIPPADIRSGSVGEACELPSQSHGERARAGAVHPSRVAAVERAHAHYP

SEQ ID NO: 97518 - protein, 87 aa, Setaria italica
  Transcript Sequence Number=SeqID_31544
  Pfam annotation: Domain name=TPR_4; Domain location=17-42; Score =16.7; E_value=0.099; Accession=PF07721.6; Description=Tetratricopepti de repeat
APQLHSLAVRADRARDPHVACALVDLLARLGRGASSRRLLEEASDAEDGKDAVLWNKHVAMLAEAEEWGEAIDVFGEMQARGVNGVR

SEQ ID NO: 97519 - protein, 113 aa, Setaria italica
  misc_feature (22)..(22): Xaa can be any naturally occurring amino acid
  Transcript Sequence Number=SeqID_31545
  Gene Ontology: Mol. function=hydrolase activity, acting on ester bonds; Biological process=lipid metabolic process
  Homolog annotation: Hit_ID=B6TLI6; Match level="QueryCoverage=100%, HitCoverage=31%, E-value=6e-52, Identity=88%"; Hit description =Anther-specific proline-rich protein APG
QYNAVARTFNAKLQDLVAKLNXDLRGLRLVFADTYQLLATVVSKPADYGGFDNAVQGCCGTGLFEAGYFCSFSTSMLCGNANKYVFFDAIHPTEKMYKLLADTVINTTLHVFL

SEQ ID NO: 97520 - protein, 351 aa, Setaria italica
  misc_feature (225)..(225): Xaa can be any naturally occurring amino acid
  Transcript Sequence Number=SeqID_31546
  Gene Ontology: Mol. function=hydrolase activity, acting on ester bonds; Biological process=lipid metabolic process
  Homolog annotation: Hit_ID=B6TLI6; Match level="QueryCoverage=100%, HitCoverage=100%, E-value=1e-176, Identity=87%"; Hit description =Anther-specific proline-rich protein APG
  Pfam annotation: Domain name=Lipase_GDSL; Domain location=30-342; Score=195.8; E_value=1.2e-55; Accession=PF00657.14; Description=GDSL- like LipaseAcylhydrolase
MSSLQRYLPWLIFFLLHGGRGAAAGKVPAIIVFGDSSVDTGNNNFIPTIARSNFWPYGRDYANGLPTGRFSNGRLATDFISEAFGLPPSIPAYLDTNCSIDQLATGVSFASAATGLDNATAGVLSVITLDEQLAYFKEYTDRLKVAKGDAAAKEIISEALYIWSIGTNDFIENYYNLPERRMQYTVGEYEAYLLGLAEAAIRRVHAVGGRKMDFTGLTPMGCLPXERIGNRGDPGECNEQYNAVARTFNAKLQDLVAKLNKDLRGLRLVFADTYQLLATVVSKPADYGFDNAVQGCCGTGLFEAGYFCSFSTSMLCGNANKYVFFDAIHPTEKMYKLLADTVINTTLHVFL

SEQ ID NO: 97521 - protein, 49 aa, Setaria italica
  Transcript Sequence Number=SeqID_31547
RSRARKQAYTNELENKIALLEQENERLRKLKVKSINRSILKVTEKKLVP

SEQ ID NO: 97522 - protein, 58 aa, Setaria italica
  Transcript Sequence Number=SeqID_31548
  Gene Ontology: Mol. function=transferase activity, transferring glycosyl groups; Cellular component=integral to membrane
  Homolog annotation: Hit_ID=B6SS28; Match level="QueryCoverage=96%, HitCoverage=9%, E-value=4e-17, Identity=67%"; Hit description =Xyloglucan galactosyltransferase KATAMARI 1
SRRGTTMTRRSAFDAIMAGCVPVFFHPDSAHTQYRWHLPEAHETYSVLIPEADVRAGN

SEQ ID NO: 97523 - protein, 109 aa, Setaria italica
  Transcript Sequence Number=SeqID_31549
  Gene Ontology: Mol. function=protein tyrosine kinase activity; Cellular component=integral to membrane; Biological process=protein amino acid phosphorylation
  Homolog annotation: Hit_ID=B9RYA1; Match level="QueryCoverage=94%, HitCoverage=13%, E-value=3e-31, Identity=59%"; Hit description =Interleukin-1 receptor-associated kinase, putative
DGGAELELETLLKASAYILGASGGSIVYKAVLADGAALAVRRIGSDDAGVRRFSELDAQMRAVARLRHGNILRLRGFYWGPDEMLIIHDFAVNGNLANLSVKRSRGLAD

SEQ ID NO: 97524 - protein, 179 aa, Setaria italica
  Transcript Sequence Number=SeqID_31550
  Gene Ontology: Mol. function=histone acetyltransferase activity; Cellular component=nucleus; Biological process=regulation of transcription, DNA-dependent
  Homolog annotation: Hit_ID=Q6YXY2; Match level="QueryCoverage=60%, HitCoverage=6%, E-value=9e-25, Identity=57%"; Hit description =Probable histone acetyltransferase HAC-like 1
  Subcellular localization annotation: CTP_CleavageSite=28; ConfidenceScore=5.24e-01
HASQEQPSSSPPPRPRPPPPSSPSPDHRGSSGVGVAGADGEDQLVEDMAAPSGVDRQFVMLRTTLRGKIFELTVRKQMSVQWRKRLPELAKRLEEILYRKFPNRNDYYNMMKGPIEPQVLCAVKTLKNRVNQQNPQMTRETASSSSTMTVDENHGDPCEKSASLPADVQNNADEPDRTE

SEQ ID NO: 97525 - protein, 108 aa, Setaria italica
  Transcript Sequence Number=SeqID_31551
  Gene Ontology: Mol. function=protein binding
  Homolog annotation: Hit_ID=Q53LG2; Match level="QueryCoverage=93%, HitCoverage=18%, E-value=5e-15, Identity=42%"; Hit description =Leucine Rich Repeat family protein
  Pfam annotation: Domain name=LRRNT_2; Domain location=24-60; Score =17.0; E_value=0.017; Accession=PF08263.4; Description=Leucine rich repeat N-terminal domain
  Subcellular localization annotation: CTP_CleavageSite=58; ConfidenceScore=5.31e-01
FVCLFHHAPVAAGADAPSSQPSLNKAQEAIMKDLLRIVGSSSWSNTTTSNPCRWSGVNCTRSGSSWVVTNITLPNCGISNSSIFASICRLESLLALDLSRNSLTNLTT

SEQ ID NO: 97526 - protein, 140 aa, Setaria italica
  Transcript Sequence Number=SeqID_31552
  Gene Ontology: Mol. function=receptor activity; Cellular component =nucleus
  Homolog annotation: Hit_ID=B8K1X3; Match level="QueryCoverage=95%, HitCoverage=34%, E-value=3e-24, Identity=44%"; Hit description =Putative receptor kinase
  Pfam annotation: Domain name=F-box; Domain location=12-59; Score =33.6; E_value=8e-07; Accession=PF00646.25; Description=F-box domain
MAEQPREKTANTAAASLTDDLIVDILSRLPVKSLCRCKCVSPHWRDLISHPDHRRRLPQTLAGFFRDDFNDGREVWRFTNLCEARQPPLISTPFAFMPGYEDAAIVDACNGLLLCRPPKGSPHHLSRYVVCNPAAKSWVV

SEQ ID NO: 97527 - protein, 63 aa, Setaria italica
  Transcript Sequence Number=SeqID_31553
TQLISGCALHDPPPPQYSPSLHISMFHILCALVRNEKGQRSSSNGFNDCTAAAASSHTTTTCI

SEQ ID NO: 97528 - protein, 57 aa, Setaria italica
  Transcript Sequence Number=SeqID_31554
IPCSLSTYTSILNPQGFCIPLTDVNCMNWLTARSLLLDPYRTNNKLRAVSQFMQLTS

SEQ ID NO: 97529 - protein, 88 aa, Setaria italica
  Transcript Sequence Number=SeqID_31555
  Gene Ontology: Cellular component=nucleus; Biological process=cell division
  Homolog annotation: Hit_ID=Q8S524; Match level="QueryCoverage=100%, HitCoverage=24%, E-value=7e-27, Identity=71%"; Hit description=D -type cyclin
MLPGYDCAASVLLCAEDNAAILGLDDEGEESSWAGATPPRDTVVAAAAAAAGIAADGFLTEFPLQSDECVAALVERETEHMPVEGYPQ

SEQ ID NO: 97530 - protein, 352 aa, Setaria italica
  misc_feature (38)..(38): Xaa can be any naturally occurring amino acid
  Transcript Sequence Number=SeqID_31556
  Gene Ontology: Mol. function=protein binding; Cellular component =nucleus; Biological process=cell division
  Homolog annotation: Hit_ID=Q8S524; Match level="QueryCoverage=95%, HitCoverage=95%, E-value=1e-168, Identity=84%"; Hit description=D -type cyclin
  Pfam annotation: Domain name=Cyclin_C; Domain location=198-327; Score= 15.2; E_value=0.0024; Accession=PF02984.11; Description=Cyclin, C -terminal domain
  Pfam annotation: Domain name=Cyclin_N; Domain location=61-196; Score =124.7; E_value=2.9e-34; Accession=PF00134.15; Description=Cyclin, N -terminal domain
  Pfam module annotation: Pfam domain module=Cyclin_C::Cyclin_N; Domain location=198-327::61-196
MLPGYDCAASVLLCAEDNAAILGLDDEGEESSWAGATXPPAAAAGIAADGFLTEFPLQSDECVAALVERETEHMPVEGYPQKLQRRYGGLDLAAVRRDAVDWIWKVIDHYNFAPLTAVLSVNYLDRFLSTYELPEGNPWMTQLLAVACLSLASKMEETFAPLPLDLQVPEAKFVFEGRTIKRMELVVLSTLKWRMHAVTACSFIEYFLHKLSDLGVPSLLARSRSADLILSTAKGAEFVVFRPSEIAASVALAAIGECRSSVIERAATSCKYLDKERVLRCHEMIKEKITMGSIILKSAGSSISSVPQSPIGVLDAAACLSQQSDDATVGSPATCYHSSSTSKRRRITRRLL

SEQ ID NO: 97531 - protein, 334 aa, Setaria italica
  misc_feature (12)..(12): Xaa can be any naturally occurring amino acid
  misc_feature (23)..(23): Xaa can be any naturally occurring amino acid
  Transcript Sequence Number=SeqID_31557
  Gene Ontology: Mol. function=positive transcription elongation factor activity; Cellular component=chromosome; Biological process =regulation of transcription, DNA-dependent
  Homolog annotation: Hit_ID=Q8H6B1; Match level="QueryCoverage=99%, HitCoverage=31%, E-value=1e-171, Identity=87%"; Hit description=FACT complex subunit SPT16
  Pfam annotation: Domain name=SPT16; Domain location=57-208; Score =279.7; E_value=6.6e-81; Accession=PF08644.3; Description=FACT complex subunit (SPT16CDC68)
RRQHQAELARQXNEETARRLAGXGSGSGEGRGPARASNELVAYKNVNDVPFVRELVIQVDQKNEAVLLPIYGSMVPFHVSTVKSVTSHQDNRTCTIRIFFNVPGMPFSNDSKLNSQGAIYLKEITFRSKDPRHSSEVVQQIKTLRRQVASRESERAERATLVTQEKLQVGNNRMKMMRLSDVWIRPAFGGRGRKLTGNLEAHFNGFRYSTSRADERVDIMYGNIKHAFFQPAEKEMITLLHFHLHNHIMVGNKKTKDVQFYVEVMDVVQTLGGSRRSALDPDEIEEEQRERDRKNRINMDFQNFVNKVNDHWSQPQFKGLDLEFDVPLRELGFQ

SEQ ID NO: 97532 - protein, 50 aa, Setaria italica
  Transcript Sequence Number=SeqID_31558
EASNADREHGAESDSEEERRRRKAKSFGKSRAPERSSFKGGPPSKKPKFR

SEQ ID NO: 97533 - protein, 321 aa, Setaria italica
  Transcript Sequence Number=SeqID_31559
  Gene Ontology: Mol. function=positive transcription elongation factor activity; Cellular component=chromosome; Biological process =regulation of transcription, DNA-dependent
  Homolog annotation: Hit_ID=Q8H6B1; Match level="QueryCoverage=95%, HitCoverage=29%, E-value=1e-117, Identity=71%"; Hit description=FACT complex subunit SPT16
  Pfam annotation: Domain name=Rtt106; Domain location=100-259; Score =78.6; E_value=2.2e-20; Accession=PF08512.4; Description=Histone chaperone Rttp106-like
MVGNKKTKDVQFYVEVMDVVQTLGGSRRSALDPDEIEEEQRERDRKNRINMDFQNFVNKVNDHWSQPQFKGLDLEFDVPLRELGFHGVPYKASAFIIPTSTCLVELIETPFLVVSLSEIEIVNLERVGFGTKNFDMAIVFKDFKKDVLRIDSIPSTSLDAIKEWLDTTDLKYYESRLNLNWRPILKTIIDDPQKFIDDGGWEFLNMEASDSETEETEESDQGYEPSDAEPESESEDDDSDSESLVESDDDDEESDDDSEEEKGKTWEELEREASNADREHGAESDSEEERRRRKAKSFGKSRAPERSSFKGGPPSKKPKFR

SEQ ID NO: 97534 - protein, 176 aa, Setaria italica
  Transcript Sequence Number=SeqID_31560
  Gene Ontology: Mol. function=hydrolase activity, hydrolyzing O -glycosyl compounds; Cellular component=chloroplast; Biological process=carbohydrate metabolic process
  Homolog annotation: Hit_ID=Q53MQ1; Match level="QueryCoverage=100%, HitCoverage=22%, E-value=9e-70, Identity=70%"; Hit description =Glycosyl hydrolase family 3 C terminal domain containing protein, expressed
GYPGQAGGLAIAKVLFGEKNPSGKLPVTWYPEEFTKIPMTDMRMRAAGGYPGRSYRFYNGKTVYKFGYGLSYSMFSQRPVTGRKNPAYNTSLVAAAGLTATTEDRASYYVDAIGDEVCEQLKFPAVVKVRNHGPMDGKHTVLVFLRWPNATDGRPARQLVGFQGQHLKVGEKANLR

SEQ ID NO: 97535 - protein, 100 aa, Setaria italica
  Transcript Sequence Number=SeqID_31561
  Gene Ontology: Mol. function=binding
  Homolog annotation: Hit_ID=B9SEL3; Match level="QueryCoverage=73%, HitCoverage=11%, E-value=8e-15, Identity=55%"; Hit description =Transcription initiation factor ia, putative
NNTIQYNTKYLKLHVKYTFVQEGTKALFGGNVCAEKLDGLMVVVCEHLKSCNRDRLFKEFGILKTIFRKSVLKVHKSKFAQFIMFYACSLDPEICGVDFA

SEQ ID NO: 97536 - protein, 145 aa, Setaria italica
  misc_feature (105)..(105): Xaa can be any naturally occurring amino acid
  Transcript Sequence Number=SeqID_31562
  Gene Ontology: Mol. function=translation initiation factor activity; Cellular component=nucleoplasm; Biological process=transcription initiation from RNA polymerase I promoter
  Homolog annotation: Hit_ID=B9SEL3; Match level="QueryCoverage=88%, HitCoverage=19%, E-value=6e-34, Identity=52%"; Hit description =Transcription initiation factor ia, putative
DILAIGSSSFLVKISAVSYVGSYLSRARFISADTVVAVLKRLVEWCIDYIKRDRDPVNQAKATKPKDHQIFYASCQAVMYVLCFRLRSIMDYPNLKSQLFQMPIXVILMDTLEPLKVCLPSIVNEFLRQSRAARLFNASVEFRPT

SEQ ID NO: 97537 - protein, 71 aa, Setaria italica
  Transcript Sequence Number=SeqID_31563
LNEDNTFSNCSTPKQVVFTIHPPRAAYKYTLAKPSFTRFPGTHILYISPQMVKTYCFGVEQLLKVLSPSST

SEQ ID NO: 97538 - protein, 168 aa, Setaria italica
  misc_feature (15)..(15): Xaa can be any naturally occurring amino acid
  misc_feature (30)..(30): Xaa can be any naturally occurring amino acid
  Transcript Sequence Number=SeqID_31564
  Gene Ontology: Mol. function=translation initiation factor activity
  Homolog annotation: Hit_ID=B9SEL3; Match level="QueryCoverage=69%, HitCoverage=18%, E-value=2e-34, Identity=61%"; Hit description =Transcription initiation factor ia, putative
MYVLCFRLRSIMDYXNLKSQLFQMPIESIXMDTLEPLKVCLPSIVNEFLRQSRAARLFNASVDLPLEDIVESDLSKAFGGPNRLDMFFPFDPYLLRESDRYIRPNFEFWSLVKTTYSDGEDDELGDLDAPGMNVDSLDDHVEIDLNDDEGIEYSQPGSPRLSQELIYY

SEQ ID NO: 97539 - protein, 319 aa, Setaria italica
  Transcript Sequence Number=SeqID_31565
  Gene Ontology: Mol. function=binding
  Homolog annotation: Hit_ID=B9SEL3; Match level="QueryCoverage=91%, HitCoverage=48%, E-value=5e-37, Identity=35%"; Hit description =Transcription initiation factor ia, putative
  Pfam annotation: Domain name=RRN3; Domain location=1-318; Score= -211.4; E_value=0.053; Accession=PF05327.3; Description=RNA polymerase I specific transcription initiation factor RRN3
MGADQWCDDMELNFSDSHMFRQVQHVLQSVRMDPFLIDLRDKDHYDFLLLAVDPTKKRSKDEMAVLVTILKALSEAVSKIDVMYHHALLHNIFTTCIWYLDLDTRDALLHLITRLAAVADQYLRECLQMLVNNFTPPGPYVPLMEQPRMLAKKKEIYSQLHETLKMISDTVPLASRMLKDVLNRSMPKLFDNKAKMLSFVECMLGLDTDRLGDLIGTTLFEKVVDLLTELDVNITWEDILQEEHNKGIFDMELEDLDDDDDNFGQEGTKALFGGNVCAEKLDGLMVVVCEHLKSCNRDRLFKVNLANLIKPNRTNGLYS

SEQ ID NO: 97540 - protein, 185 aa, Setaria italica
  Transcript Sequence Number=SeqID_31566
  Gene Ontology: Mol. function=translation initiation factor activity
  Homolog annotation: Hit_ID=Q9SA74; Match level="QueryCoverage=95%, HitCoverage=28%, E-value=2e-32, Identity=45%"; Hit description =T5I8.4 protein
MYGKDNLFRCRTVAENCSIESILMDTLEPLKVCLPSIVNEFLRQSRAARLFNASVDLPLEDIVESDLSKAFGGPNRLDMFFPFDPYLLRESDRYIRPNFEFWSLVKTTYSDGEDDELGDLDAPGMNVDSLDDHVEIDLNDDEGIEYSMNKMSITPHRSFYHPMAMSSDSGLSMPARIRPSVSPPS

SEQ ID NO: 97541 - protein, 515 aa, Setaria italica
  Transcript Sequence Number=SeqID_31567
  Gene Ontology: Mol. function=translation initiation factor activity; Cellular component=nucleoplasm; Biological process=transcription initiation from RNA polymerase I promoter
  Homolog annotation: Hit_ID=B9SEL3; Match level="QueryCoverage=97%, HitCoverage=81%, E-value=1e-107, Identity=42%"; Hit description =Transcription initiation factor ia, putative
  Pfam annotation: Domain name=RRN3; Domain location=1-439; Score =203.5; E_value=5.5e-58; Accession=PF05327.3; Description=RNA polymerase I specific transcription initiation factor RRN3
LKKGKNRIPNRLAAVADQYLRECLQMLVNNFTPPGPYVPLMEQPRMLAKKKEIYSQLHETLKMISDTVPLASRMLKDVLNRSMPKLFDNKAKMLSFVECMLGLDTDRLGDLIGTTLFEKVVDLLTELDVNITWEDILQEEHNKGIFDMELEDLDDDDDNFGQEGTKALFGGNVCAEKLDGLMVVVCEHLKSCNRDRLFKEFGILKTIFRKSVLKVHKSKFAQFIMFYACSLDPEICGVDFALFLTDIFTKKEDDPIARMSAVSYVGSYLSRARFISADTVVAVLKRLVEWCIDYIKRDRDPVNQAKATKPKDHQIFYASCQAVMYVLCFRLRSIMDYPNLKSQLFQMPIESILMDTLEPLKVCLPSIVNEFLRQSRAARLFNASVDLPLEDIVESDLSKAFGGPNRLDMFFPFDPYLLRESDRYIRPNFEFWSLVKTTYSDGEDDELGDLDAPGMNVDSLDDHVEIDLNDDEGIEYSMNKMSITPHRSFYHPMAMSSDSGLSMPARIRPSVSPPS

SEQ ID NO: 97542 - protein, 112 aa, Setaria italica
  Transcript Sequence Number=SeqID_31568
  Gene Ontology: Mol. function=chromatin binding; Cellular component =chromatin
  Homolog annotation: Hit_ID=B6TBH1; Match level="QueryCoverage=77%, HitCoverage=65%, E-value=1e-37, Identity=90%"; Hit description =SAUR56-auxin-responsive SAUR family member
  Pfam annotation: Domain name=Auxin_inducible; Domain location=18-83; Score=110.3; E_value=6.6e-30; Accession=PF02519.6; Description=Auxin responsive protein
MHGKQQQQQQQMVPVAPKGCVTVRVGAEGEEQRRFAVPLGHLKHPLFGALLEEAEREYGFRHQGAIAIPCRVDRFVQVEHLIDQDLHGSCAQHLVDLDSAAAPPHHHHHHHH

SEQ ID NO: 97543 - protein, 80 aa, Setaria italica
  Transcript Sequence Number=SeqID_31569
  Gene Ontology: Mol. function=transferase activity; Cellular component= chloroplast
  Homolog annotation: Hit_ID=B9S1N6; Match level="QueryCoverage=100%, HitCoverage=37%, E-value=4e-19, Identity=45%"; Hit description =Pentatricopeptide repeat-containing protein, putative
  Pfam annotation: Domain name=PPR; Domain location=1-34; Score=21.0; E_ value=0.005; Accession=PF01535.12; Description=PPR repeat
  Pfam annotation: Domain name=PPR; Domain location=35-69; Score=57.9; E_value=3.8e-14; Accession=PF01535.12; Description=PPR repeat
  Pfam module annotation: Pfam domain module=PPR::PPR; Domain location =1-34::35-69
TSNALIHGLCEGNNMKEATKVLRAMMNNRVELDNITYNIMIQGCCKDGKMEEAIQLRDDMIKRGFKPDLFTYNTFLCAYC

SEQ ID NO: 97544 - protein, 72 aa, Setaria italica
  Transcript Sequence Number=SeqID_31570
  Gene Ontology: Mol. function=DNA binding; Biological process =regulation of transcription
  Homolog annotation: Hit_ID=B6T0Y4; Match level="QueryCoverage=87%, HitCoverage=24%, E-value=3e-20, Identity=78%"; Hit description =ANAC030
  Pfam annotation: Domain name=NAM; Domain location=13-72; Score=2.5; E_ value=1.1e-07; Accession=PF02365.7; Description=No apical meristem (NAM) protein
MDHHQQQQPAPCVPPGFRFHPTEEELVGYYLARKVAAQKIDLDIIGEVDLYRIEPWDLQERCSYVRRRRRQD

SEQ ID NO: 97545 - protein, 104 aa, Setaria italica
  misc_feature (20)..(20): Xaa can be any naturally occurring amino acid
  Transcript Sequence Number=SeqID_31571
  Gene Ontology: Mol. function=catalytic activity; Cellular component =plasma membrane; Biological process=metabolic process
  Homolog annotation: Hit_ID=Q56UL5; Match level="QueryCoverage=87%, HitCoverage=56%, E-value=1e-48, Identity=98%"; Hit description =Neutral/alkaline invertase 8 (Fragment)
  Pfam annotation: Domain name=Invertase_neut; Domain location=1-101; Score=-281.0; E_value=0.0086; Accession=PF04853.4; Description=Plant neutral invertase
ICYPAIENHEWRIVTGCDPXNTRWSYHNGGSWPVLLWLLTAACIKTGRPQIARRAIDLAERRLLKDGWPEYYDGKLGRYVGKQARKFQTWSSSREIMPRCEGSS

SEQ ID NO: 97546 - protein, 56 aa, Setaria italica
  misc_feature (7)..(7): Xaa can be any naturally occurring amino acid
  misc_feature (51)..(51): Xaa can be any naturally occurring amino acid
  Transcript Sequence Number=SeqID_31572
  Gene Ontology: Mol. function=catalytic activity; Cellular component =plasma membrane
  Homolog annotation: Hit_ID=Q1HG99; Match level="QueryCoverage=100%, HitCoverage=18%, E-value=2e-20, Identity=78%"; Hit description =Neutral invertase 2 (Fragment)
GVYGYPXEIQALFFMALRCALQMLKHDNEGKEFVEKIATRLHALSYHMRSXYFWLD

SEQ ID NO: 97547 - protein, 61 aa, Setaria italica
  Transcript Sequence Number=SeqID_31573
  Gene Ontology: Mol. function=catalytic activity; Cellular component =plasma membrane; Biological process=metabolic process
  Homolog annotation: Hit_ID=Q56UL5; Match level="QueryCoverage=100%, HitCoverage=37%, E-value=3e-29, Identity=100%"; Hit description =Neutral/alkaline invertase 8 (Fragment)
PAIENHEWRIVTGCDPKNTRWSYHNGGSWPVLLWLLTAACIKTGRPQIARRAIDLAERRLL

SEQ ID NO: 97548 - protein, 88 aa, Setaria italica
  Transcript Sequence Number=SeqID_31574
  Homolog annotation: Hit_ID=B6SRX0; Match level="QueryCoverage=100%, HitCoverage=24%, E-value=3e-19, Identity=63%"; Hit description=DNA binding protein
SSESFLADEQPSWLDDLLDEPETPARGHGRPGHRRSSSDSFALFEGGGGAAAGMYDNVLDGMRGGGGGGQVASWAGAPEFFPEPSSFG

SEQ ID NO: 97549 - protein, 130 aa, Setaria italica
  Transcript Sequence Number=SeqID_31575
  Gene Ontology: Mol. function=binding; Cellular component=nucleus
  Homolog annotation: Hit_ID=B9ST43; Match level="QueryCoverage=91%, HitCoverage=8%, E-value=7e-38, Identity=64%"; Hit description =Condensin, putative
HSILGTHLQDIIDIGFGRWAKEEPLLARTACLALQRLSEEDRSKLISTNSRVFAALISLTTSFSLPEKIWYGAADKAISTIYTLHPAPEIFATEIAKKCLSSVFSVLRTEDVSNGDETQNDAFLSSLPPS

SEQ ID NO: 97550 - protein, 43 aa, Setaria italica
  Transcript Sequence Number=SeqID_31576
CLLLSCSLQLGYMRNKYDIVSTRFMIYYFPCNFRFKYMAELIA

SEQ ID NO: 97551 - protein, 152 aa, Setaria italica
  Transcript Sequence Number=SeqID_31577
  Gene Ontology: Mol. function=transcription factor activity; Cellular component=nucleus
  Homolog annotation: Hit_ID=A5JTT1; Match level="QueryCoverage=100%, HitCoverage=51%, E-value=5e-33, Identity=54%"; Hit description =Pathogen-inducible transcription factor ERF3
MLLNPACEAAALDSIRHHVLDEPAAAAAAARPVYRRSTSFGSLVADQWSESLPFRPDDADDMVVFGALRDAFSRGWLPDGSFAAVKPEPPASPDSPYEFGSCLGVGGLLASHEEEPETPTAGAASPATAPGSSEEAAAVARGKHYRGVRQRP

SEQ ID NO: 97552 - protein, 94 aa, Setaria italica
  Transcript Sequence Number=SeqID_31578
  Gene Ontology: Mol. function=drug transporter activity; Cellular component=membrane; Biological process=multidrug transport
  Homolog annotation: Hit_ID=B6TU04; Match level="QueryCoverage=77%, HitCoverage=15%, E-value=3e-32, Identity=93%"; Hit description =Antiporter/ drug transporter/ transporter
GGAIAGVAGGLVMLAARRPWARMYTRSPEVRDGVARAMKVMALLEVVNFPLNVCGGIVRATARPLLGMYAVVAGFYLVALPVGVALGFKARLGL

SEQ ID NO: 97553 - protein, 113 aa, Setaria italica
  misc_feature (92)..(92): Xaa can be any naturally occurring amino acid
  Transcript Sequence Number=SeqID_31579
  Gene Ontology: Mol. function=transferase activity, transferring glycosyl groups; Cellular component=integral to membrane; Biological process=cell wall organization and biogenesis
  Homolog annotation: Hit_ID=Q2QNS6; Match level="QueryCoverage=100%, HitCoverage=9%, E-value=1e-62, Identity=92%"; Hit description =Cellulose synthase-like protein D4
AESGGLIDTTGVDIRLPMLVYVSREKRPGYDHNKKAGAMNALVRTSAIMSNGPFILNLDCDHYVHNSAALREGMCFMLDRGGDRICYVQFPXRFEGIDPNDRYANHNLVFFDV

SEQ ID NO: 97554 - protein, 83 aa, Setaria italica
  Transcript Sequence Number=SeqID_31580
  Gene Ontology: Mol. function=protein binding; Biological process =protein amino acid phosphorylation
  Homolog annotation: Hit_ID=Q5Z670; Match level="QueryCoverage=100%, HitCoverage=33%, E-value=6e-14, Identity=52%"; Hit description =Leucine-rich receptor-like protein kinase-like
TDCCQWDGITCTNSVVTEIMLASKGLQGKISPSLGNLTGLLHLNLSRNSLYGSLPANLLFSSSIIILDVSFNHLSGPLLEQRS

SEQ ID NO: 97555 - protein, 145 aa, Setaria italica
  Transcript Sequence Number=SeqID_31581
  Gene Ontology: Mol. function=electron carrier activity
  Homolog annotation: Hit_ID=Q7XSQ6; Match level="QueryCoverage=98%, HitCoverage=27%, E-value=1e-65, Identity=83%"; Hit description =OSJNBa0084K11.8 protein
IYNASQLIPLDDDDIVSEASLHLIKCIQDFEGASVIQKSVRRSPKSVINFLPGSYKYTPRGSTSFPNLFIAGDWIVNRHGSFSKEKAYVTGLEAANRVVDYFGTGDFAKIIAVEGDEPYIETLRNLSRRANELKSQIPFSEFFLQ

SEQ ID NO: 97556 - protein, 74 aa, Setaria italica
  Transcript Sequence Number=SeqID_31582
  Gene Ontology: Mol. function=protein serine/threonine kinase activity; Cellular component=cell wall; Biological process=protein amino acid phosphorylation
  Homolog annotation: Hit_ID=Q53P83; Match level="QueryCoverage=100%, HitCoverage=7%, E-value=5e-30, Identity=84%"; Hit description =Leucine Rich Repeat family protein, expressed
RGDLHLLLYSTCEDENTSNHITLAQRLSILVDIADALEYLHHYSQGTIVHCDVKPSNILLDDEMTAHVGDFGLA

SEQ ID NO: 97557 - protein, 421 aa, Setaria italica
  Transcript Sequence Number=SeqID_31583
  Gene Ontology: Mol. function=transferase activity, transferring glycosyl groups; Biological process=metabolic process
  Homolog annotation: Hit_ID=B6SSE4; Match level="QueryCoverage=92%, HitCoverage=79%, E-value=1e-161, Identity=75%"; Hit description =Hydroquinone glucosyltransferase
  Pfam annotation: Domain name=Glyco_tran_28_C; Domain location=219 -398; Score=-23.1; E_value=0.0031; Accession=PF04101.8; Description =Glycosyltransferase family 28 C-terminal domain
  Pfam annotation: Domain name=UDPGT; Domain location=4-420; Score= -63.9; E_value=6e-08; Accession=PF00201.10; Description=UDP -glucoronosyl and UDP-glucosyl transferase
  Pfam module annotation: Pfam domain module=Glyco_tran_28_C::UDPGT; Domain location=219-398::4-420
TQRAFLSSLPPAVSSLSLPPVDLSDLPRGAAIETLMSEECARSVPALTDILLGLKRTTGRLAAFVADLFGADSFDAARDAGVDRRYLFIPSNLHVLTLILHLPELDASVPGEFRDLAEPLRLPGCVPIPGPDVLMPLQDKTNPCYKWMVHHGSKYREADAILVNSFDAVEPGPAKILRQPAPWRPVVYPIGPLIQADTGGSKNDAACLEWLDRQPDRSVIFVSFGSGGALPTEQMRELALGLELSGQRFLWVVRSPSDEGAVNDNYYDAESKKDPFAYLPEGFVERTKEVGLVVPSWAPQIKVLAHRATGGFLTHCGWNSVLESLVHGVPMVAWPLYAEQRQNAVMLSAEGVGAAIRVPESKGREKIAAAVRELMEGEGSGAAVRAKVAELQKAAAEGLQEGGAAAAALAEVVEKWTGGEN

SEQ ID NO: 97558 - protein, 335 aa, Setaria italica
  misc_feature (15)..(15): Xaa can be any naturally occurring amino acid
  misc_feature (114)..(114): Xaa can be any naturally occurring amino acid
  Transcript Sequence Number=SeqID_31584
  Gene Ontology: Mol. function=P-P-bond-hydrolysis-driven protein transmembrane transporter activity; Cellular component=membrane; Biological process=protein transport
  Homolog annotation: Hit_ID=B6U7Q0; Match level="QueryCoverage=97%, HitCoverage=62%, E-value=1e-169, Identity=89%"; Hit description =Preprotein translocase secY subunit
  Pfam annotation: Domain name=SecY; Domain location=4-316; Score=-6.3; E_value=6.5e-13; Accession=PF00344.12; Description=eubacterial secY protein
YVCLVVYLEQWWLSXFLSTVAAFTVSCYSLQYSVYAASYRVKHVVITSLLLVLGAMSMTWICDTISESGFGHGSSLIICVGILTGYTETLHKMITQFSGNFSKCWPYILGVAGXFMMLTMGAVLVTEGCRKIKLQYYGFKLASGAGKESTPVTEVEPYIPFNINPTGMQPLLTTSYLLAFPSIMASIFGSPFWENLKEILNPRTSGGGSPWVYYLTYAFLVFVFNIFDIANLPKEISDYLNKMSARVPRIKPGRATVDYLTKIQTSTRFWGGLLLSLLATSSLLLDRYLRHINEGFSIGFTSVLIIVGSIIELRRSYQAYNVMPALSKVLRRYGA

SEQ ID NO: 97559 - protein, 281 aa, Setaria italica
  misc_feature (55)..(55): Xaa can be any naturally occurring amino acid
  Transcript Sequence Number=SeqID_31585
  Gene Ontology: Mol. function=RNA-directed DNA polymerase activity; Cellular component=integral to membrane; Biological process=RNA -dependent DNA replication
  Homolog annotation: Hit_ID=B6SWF1; Match level="QueryCoverage=100%, HitCoverage=37%, E-value=1e-154, Identity=93%"; Hit description=Type II intron maturase family protein
  Pfam annotation: Domain name=Intron_maturas2; Domain location=33-170; Score=10.9; E_value=2.1e-06; Accession=PF01348.13; Description=Type II intron maturase
IMFLDHVLCRRVVYPTLRYTATGGKIISEKGVGTLLSVTASLKQCIKQFRKLEFXKGDREPDPQPCFRMFHATQAHTNSQMNKLLLTMAEWYRYADNRKKVVNFCSYIIRGSLAKLYAAKYKLRSRAKVYKIASRNLSRPLKDKKGQSPEYHNLLRMGLLDSIDGLQYTRMSMVPDPDYTPLPSGWRPDHEKILLEYIKLTDQQTLEEQRTCIREEGLITPQDYISMLVWGYKKNAVLLPSSKGSDTQGSTEDIGSDTDELGEKELGNEGRQGFPKFAEMS

SEQ ID NO: 97560 - protein, 263 aa, Setaria italica
  Transcript Sequence Number=SeqID_31586
  Gene Ontology: Mol. function=homoserine dehydrogenase activity; Cellular component=chloroplast; Biological process=methionine biosynthetic process
  Homolog annotation: Hit_ID=Q6ZD10; Match level="QueryCoverage=97%, HitCoverage=27%, E-value=1e-142, Identity=93%"; Hit description =Putative aspartate kinase, homoserine dehydrogenase
  Pfam annotation: Domain name=Homoserine_dh; Domain location=55-253; Score=396.3; E_value=5.1e-116; Accession=PF00742.11; Description =Homoserine dehydrogenase
DNLTINDWLKRGIHVITPNKKANSGPLERYLKLRTLQRASYTHYFYEATVGAGLPIISTLRGLLETGDKILRIEGIFSGTLSYIFNNFEGARTFSDVVTEAKEAGYTEPDPRDDLSGTDVARKVIILARESGLRLELSDIPVRSLVPESLRSCTSADEYMQKLPSFDQDWASERNDAEAAGEVLRYVGVVDVVNKKGQVELRRYKRDHPFAQLSGSDNIIAFTTSRYKEQPLIVRGPGAGAEVTAGGVFSDILRLASYLGAPS

SEQ ID NO: 97561 - protein, 918 aa, Setaria italica
  Transcript Sequence Number=SeqID_31587
  Gene Ontology: Mol. function=homoserine dehydrogenase activity; Cellular component=chloroplast; Biological process=aspartate family amino acid biosynthetic process
  Homolog annotation: Hit_ID=P49080; Match level="QueryCoverage=96%, HitCoverage=97%, E-value=0.0, Identity=92%"; Hit description =Homoserine dehydrogenase
  Pfam annotation: Domain name=AA_kinase; Domain location=91-374; Score= 195.0; E_value=2e-55; Accession=PF00696.20; Description=Amino acid kinase family
  Pfam annotation: Domain name=ACT; Domain location=412-473; Score =21.4; E_value=0.0037; Accession=PF01842.17; Description=ACT domain
  Pfam annotation: Domain name=ACT; Domain location=494-554; Score =34.8; E_value=3.4e-07; Accession=PF01842.17; Description=ACT domain
  Pfam annotation: Domain name=Homoserine_dh; Domain location=710-908; Score=393.3; E_value=4.1e-115; Accession=PF00742.11; Description =Homoserine dehydrogenase
  Pfam annotation: Domain name=NAD_binding_3; Domain location=566-702; Score=159.6; E_value=9.2e-45; Accession=PF03447.8; Description =Homoserine dehydrogenase, NAD binding domain
  Pfam module annotation: Pfam domain module=AA_kinase::ACT::ACT::Homose rine_dh::NAD_binding_3; Domain location=91-374::412-473::494-554::710- 908::566-702
  Subcellular localization annotation: CTP_CleavageSite=22; ConfidenceScore=5.31e-01
MRGLAVASPLPPAAAAALRRTRAPSSSGREVSSQCWKYDLSQDRSLGGSLRIGQSQGSLHRHRPTNLLRPAAAAISVEQDEVNTYLPKGDMWSVHKFGGTCMGTPQRIQSVADIVLGDSSERKLIIVSAMSKVTDMMYNLVHKAQSRDDSYTIALEEVFEKHMAAAKDLLDGEDLARFLSQLHSDVSNLRAMLRAIYIAGHATESFSDFVVGHGELWSAQMLSYAIKKSGAPCSWMDTREVLVVKPSGSNLVDPDYLESEKRFQKWFSRQPAETIVATGFIASTAENVPTTLKRDGSDFSAAIIGSLVRARQVTIWTDVDGVFSADPRKVSEAVILSTLSYQEAWEMSYFGANVLHPRTIIPVMKDNIPIVIRNMFNISAPGTMICRQPANDNGDLDACVKSFATIDNLALVNVEGTGMAGVPGTSSAIFSAVKDVGANVIMISQASSEHSVCFAVPEKEVAAVSAALHVRFREALAAGRLSKVEVINGCSILAAVGLRMASTPGVSAILFDALAKANINVRAIAQGCSEYNITVVLKQEDCVRALRAAHSRFFLSKTTLAVGIIGPGLIGGTLLNQLKDQAAVLKENMNIDLRVIGITGSSTMLLSDTGIDLTQWKELLRKEGEPADVANFVRHLSDNHVFPNKVLVDCTADTSVASHYYDWLKKGIHVITPNKKANSGPLDRYLKLRTLQRASYTHYFYEATVGAGLPIISTLRGLLETGDKILRIEGIFSGTLSYIFNNFEGTRTFSNVVAEAKEAGYTEPDPRDDLSGTDVARKVIILARESGLRLELSDIPVKSLVPEALASCSSADEFMQKLPSFDEDWARQRSDAEAAGEVLRYVGVVDVVNKEGQVELQRYKRDHPFAQLSGSDNIIAFTTSRYKEQPLIVRGPGAGAEVTAGGVFCDILRLASYLGAPS

SEQ ID NO: 97562 - protein, 65 aa, Setaria italica
  Transcript Sequence Number=SeqID_31588
DRVHTLLQAKQISSISIKYYRVKYLLLQTQTHAKCPQCETKNDFAMSNNISISTLGCSLSQLAKE

SEQ ID NO: 97563 - protein, 36 aa, Setaria italica
  Transcript Sequence Number=SeqID_31589
IRQVSCFLSLALNQLVLWTYIIKEHILALFLRNLLP

SEQ ID NO: 97564 - protein, 48 aa, Setaria italica
  Transcript Sequence Number=SeqID_31590
TASSGGLGIGGSSSAGDPSQMMMLSKIQDLLKNVRSMPSSKSDGPHSK

SEQ ID NO: 97565 - protein, 590 aa, Setaria italica
  Transcript Sequence Number=SeqID_31591
  Gene Ontology: Mol. function=zinc ion binding
  Homolog annotation: Hit_ID=B6SW18; Match level="QueryCoverage=99%, HitCoverage=94%, E-value=0.0, Identity=77%"; Hit description =Potyvirus VPg interacting protein
  Pfam annotation: Domain name=DUF1423; Domain location=83-573; Score =971.9; E_value=2.8e-289; Accession=PF07227.3; Description=Protein of unknown function (DUF1423)
  Pfam annotation: Domain name=PHD; Domain location=239-301; Score =12.8; E_value=0.001; Accession=PF00628.21; Description=PHD-finger
  Pfam module annotation: Pfam domain module=DUF1423::PHD; Domain location=83-573::239-301
GAAAAAATSPEQVGSPPDAQEPLSNSDGGHDSATESASSRETWPGEPSTGKSGGGGGPPVAAAPITAVRMAGSKDKEVVVCNGVHDLQAVRGRIIPGAGWVTLREIARDRVDVVAEKMKVIGEEVLDEVKTELRSILEGTGGSHHVEEFLYLQKLVQGRVDLTPAALSVAHHVQLEVLVAIKTGIQAFLHPSVNIPQSRLAEVFLYKRCRNIACQSTLPAEECRCGICSSRNGFCNLCMCVICNKFDFEVNTCRWIGCDVCSHWTHTDCAIRDGRIGTGQTIKNGVSHAEMLFRCQACQRTSELLGWVRDVFQQCAPGWDRDALLRELDYVCKIFRLSEDSKGNKLFRKCVELVDRLRSASAESVSPRMLLQALQELDIASPKSFENEEPGRSITPQEACNRIAEVVQEAVKKMEIVAEEKMRMYKRARLAVDACDRELEEKAREAQELKAERLQKLQQAEELESIIRLKQVEAEMFQLKASEARQEAERLRSVALAKKSEEAGQDYASMYLKRRLEEAEAEKQYIFEKIKLQENQRPPPPQAASSGGLGIGGSSSAGDPSQMMMLSKIQDLLKNVRSMPSSKSDGPHSK

SEQ ID NO: 97566 - protein, 91 aa, Setaria italica
  misc_feature (10)..(10): Xaa can be any naturally occurring amino acid
  Transcript Sequence Number=SeqID_31592
ICREDGSSKXLEISMILTTSQKCQTLTRRIKSSRIRTTPSVFICFFYHADNHVLSIEPTIEYLNHFFTNTAVTRISLVINVDNVTSLLVIK

SEQ ID NO: 97567 - protein, 61 aa, Setaria italica
  Transcript Sequence Number=SeqID_31593
  Gene Ontology: Mol. function=hydrolase activity, acting on acid anhydrides, catalyzing transmembrane movement of substances; Cellular component=integral to membrane; Biological process=metal ion transport
  Homolog annotation: Hit_ID=Q10QZ2; Match level="QueryCoverage=86%, HitCoverage=6%, E-value=4e-15, Identity=79%"; Hit description=Copper- translocating P-type ATPase family protein, expressed
TCLLLLIIRLQQESITTFLLSGDREEAVTSIGRIVGIRNENIKSSLTPQDKASIISTLQGE

SEQ ID NO: 97568 - protein, 272 aa, Setaria italica
  Transcript Sequence Number=SeqID_31594
  Gene Ontology: Mol. function=hydrolase activity, acting on acid anhydrides, catalyzing transmembrane movement of substances; Cellular component=integral to membrane; Biological process=metal ion transport
  Homolog annotation: Hit_ID=Q10QZ3; Match level="QueryCoverage=100%, HitCoverage=28%, E-value=1e-113, Identity=74%"; Hit description =Copper-translocating P-type ATPase family protein, expressed
  Pfam annotation: Domain name=E1-E2_ATPase; Domain location=87-268; Score=129.1; E_value=1.4e-35; Accession=PF00122.12; Description=E1 -E2 ATPase
SLGIHVAHGTFLDLLHNSYVKCGVATTALFGPGRDILFDGFRAFKQGSPNMNSLVGFGSAAAFAISAMSLLNPELEWNSTFFDEPVMLLGFVLLGRSLEESARLKASSDMNELISLLSPQSRLIVTSSSDDPSSDTILNSDAITVEVPVDDVRVGDSILVLPGETIPVDGNVIGGSSFVDESMLTGESLPVAKETGLPVFAGTVNWDGPLKIRATCTGPSSTIAKIVRMVEDAQAREAPVQRLADSIAGPFVYTVMTLAAATFSFWYYIWLH

SEQ ID NO: 97569 - protein, 546 aa, Setaria italica
  Transcript Sequence Number=SeqID_31595
  Gene Ontology: Mol. function=hydrolase activity, acting on acid anhydrides, catalyzing transmembrane movement of substances; Cellular component=integral to membrane; Biological process=metal ion transport
  Homolog annotation: Hit_ID=Q10QZ3; Match level="QueryCoverage=98%, HitCoverage=60%, E-value=0.0, Identity=83%"; Hit description=Copper -translocating P-type ATPase family protein, expressed
  Pfam annotation: Domain name=E1-E2_ATPase; Domain location=1-192; Score=155.8; E_value=1.3e-43; Accession=PF00122.12; Description=E1 -E2 ATPase
  Pfam annotation: Domain name=Hydrolase; Domain location=196-437; Score=109.7; E_value=1e-29; Accession=PF00702.18; Description =haloacid dehalogenase-like hydrolase
  Pfam module annotation: Pfam domain module=E1-E2_ATPase::Hydrolase; Domain location=1-192::196-437
LVTVSLGRTTILVLPGETIPVDGNVIGGSSFVDESMLTGESLPVAKETGLPVFAGTVNWDGPLKIRATCTGPSSTIAKIVRMVEDAQAREAPVQRLADSIAGPFVYTVMTLAAATFSFWYYIGTHLFPEVLLNDIAGPDGDSLLLSIKLAVDVLVVSCPCALGLATPTAILIGTSLGAKRGLLIRGGDVLERLAGIDALVLDKTGTLTEGKPVVTSIASLAYEEAEVLRLAAAVEKTALHPIANAIMNKAELLKLDIPITSGQLTEPGFGCLAEVDGCLVAVGTLDWVHNRFETKASPTELRDLRNHLEFMLSSEASSSNQSKSIAYVGREGEGIIGAIAISDILREDAKLTVDRLQQESITTFLLSGDREEAVTSIGRIVGIRNENIKSSLTPQDKASIISTLQGEGHRVAMVGDGINDAPSLAAADVGIAMRTHSKENAASDAASVVLLGNRLSQVVDALSLSKATMAKVQQNLAWAVAYNIVAIPIAAGVLLPQFDFAMTPSLSGGLMALSSIFVVSNSLLLQLHGSFQNTEKRQSDLSSRLN

SEQ ID NO: 97570 - protein, 89 aa, Setaria italica
  Transcript Sequence Number=SeqID_31596
IDHGRPAVVIPREKNSRGFGALSGVVSYGAWKMLPTCCYPQHPTTSKGPRAYSSLASHGISVAQLSVTFGKRMCAGLALLKLLTEMQTR

SEQ ID NO: 97571 - protein, 122 aa, Setaria italica
  Transcript Sequence Number=SeqID_31597
MKQSAAAPVLVAALLAAAATVAVVAALSPPPGYTTQEDINSYFIQQVGKFAVNVYKIAHMIPMSYVSTSQCWSAPAGGGANNYWMVLTATNGSGAAGQYVSTVWGIPGSESKTWKLLSFNST

SEQ ID NO: 97572 - protein, 62 aa, Setaria italica
  misc_feature (45)..(45): Xaa can be any naturally occurring amino acid
  misc_feature (52)..(52): Xaa can be any naturally occurring amino acid
  misc_feature (62)..(62): Xaa can be any naturally occurring amino acid
  Transcript Sequence Number=SeqID_31598
  Gene Ontology: Mol. function=transferase activity, transferring glycosyl groups; Cellular component=chloroplast
  Homolog annotation: Hit_ID=Q575Z6; Match level="QueryCoverage=98%, HitCoverage=7%, E-value=8e-23, Identity=86%"; Hit description =Alkaline alpha galactosidase 3
ALEASITRNFPDNGIISCMSHNTDNLYSSKRSAVVRASDDFGPRXDPASHTXIHIASVAYNX

SEQ ID NO: 97573 - protein, 139 aa, Setaria italica
  Transcript Sequence Number=SeqID_31599
  Gene Ontology: Mol. function=transferase activity, transferring glycosyl groups; Cellular component=chloroplast
  Homolog annotation: Hit_ID=Q575Z6; Match level="QueryCoverage=100%, HitCoverage=18%, E-value=2e-63, Identity=80%"; Hit description =Alkaline alpha galactosidase 3
IWNLNEHSGVVGAFNCQGAGWCRVGKKNLVHDEQPGTVTGVIRARDVDYLAKVADQSWNGDVIVYSHIGGEVVYLPKNASLPVTLRSREYEVFTVVPVKHLPNSASFAPIGLISMFNSGGAVREVRYGENADVELKVRG

SEQ ID NO: 97574 - protein, 42 aa, Setaria italica
  Transcript Sequence Number=SeqID_31600
  Gene Ontology: Mol. function=phosphotransferase activity, alcohol group as acceptor; Cellular component=chloroplast; Biological process=phosphoinositide-mediated signaling
  Homolog annotation: Hit_ID=Q53RI7; Match level="QueryCoverage=100%, HitCoverage=2%, E-value=9e-20, Identity=100%"; Hit description =Phosphatidylinositol 3-and 4-kinase, putative
FHPEMNEREAANFMVRTCVDAYNKWTTAGYDLIQYLQQGIEK

SEQ ID NO: 97575 - protein, 92 aa, Setaria italica
  Transcript Sequence Number=SeqID_31601
  Gene Ontology: Mol. function=phosphotransferase activity, alcohol group as acceptor; Cellular component=chloroplast; Biological process=phosphoinositide-mediated signaling
  Homolog annotation: Hit_ID=Q53RI7; Match level="QueryCoverage=76%, HitCoverage=3%, E-value=1e-34, Identity=95%"; Hit description =Phosphatidylinositol 3-and 4-kinase, putative
GGDYGGARERSSSKQAVGLNLYLFPYGVLPTGPGRGIIEVVPNTRSRNQMGETTDGGLLEIFQQDFGPVGSPSFEAAREKFMISVGRLGIID

SEQ ID NO: 97576 - protein, 101 aa, Setaria italica
  Transcript Sequence Number=SeqID_31602
  Gene Ontology: Mol. function=phosphotransferase activity, alcohol group as acceptor; Cellular component=chloroplast; Biological process=phosphoinositide-mediated signaling
  Homolog annotation: Hit_ID=Q53RI7; Match level="QueryCoverage=90%, HitCoverage=4%, E-value=3e-47, Identity=94%"; Hit description =Phosphatidylinositol 3-and 4-kinase, putative
MIEEIALLFLVLFPLPKEERRAGIRRELEKISIPGDDLYLPTATNKFVRGIQLDSGTPLQSAAKVPIMITFNVVDRDGDPNDVKPQACIFKVGDDCRQDVL

SEQ ID NO: 97577 - protein, 635 aa, Setaria italica
  Transcript Sequence Number=SeqID_31603
  Gene Ontology: Mol. function=phosphotransferase activity, alcohol group as acceptor; Cellular component=Golgi-associated vesicle; Biological process=phosphoinositide-mediated signaling
  Homolog annotation: Hit_ID=Q53RI7; Match level="QueryCoverage=99%, HitCoverage=33%, E-value=0.0, Identity=81%"; Hit description =Phosphatidylinositol 3-and 4-kinase, putative
  Pfam annotation: Domain name=PI3Ka; Domain location=462-630; Score =35.1; E_value=2.3e-10; Accession=PF00613.12; Description =Phosphoinositide 3-kinase family, accessory domain (PIK domain)
KWERIDWNGIRTANIPAVMDSAAAASGAKKEAPDFSLEVLSTAVVSATVKCNHAGEIAGMRRLFSTMGGVNMGMAPHGMQSAQPHQSFDEVFVSKFVSLLQNFVVAAEKQPIDNSQFRETCSQATALLLDHMMSDSRANLEGFSQLIRLLCWCPAYISTPDAMETGIYIWTWLVSAAPSLGPLVLAELVDAWLWTIDTKRGLFASDMNYCGPDAKLRPHLIPGEPEAPPEKDPVEAIIAHRLWLGFFIDRFEVVRHDSIEQLLLLGRMLQGTMKSPAHFSHHPAATGTFFTAMLLGLKFCSCQSQSNLQKCNMGLQLLEDRVYRAALGWFSYAPEWYESQNKAYAQKEAQSASVFVHFLQNERSGSPVDSALKSQGREGEHNTADQIHPVWGCVDNYATAREKRKQLLVTLSQTEADRLEVWAQPVNTKDTTTFRGKISSDKWIDHVRTAFAVDPRIALSMPLRFPTNTTMQSEITQLVQTRLLELRTIPEALPFFITPKAVDENSVLLQQLPHWAPCSVTQALEFLTPPYKGHPRVMAYVLRVLETYPPETVTFFMPQLVQSLRYDEGKLVEGYLLGATQRSNIFAHILIWHLQGEYVDESEKDAAAQKGSAFQSLLPAVKDKIIESFTPEARN

SEQ ID NO: 97578 - protein, 438 aa, Setaria italica
  Transcript Sequence Number=SeqID_31604
  Gene Ontology: Mol. function=phosphotransferase activity, alcohol group as acceptor; Cellular component=chloroplast; Biological process=phosphoinositide-mediated signaling
  Homolog annotation: Hit_ID=Q53RI7; Match level="QueryCoverage=100%, HitCoverage=22%, E-value=0.0, Identity=91%"; Hit description =Phosphatidylinositol 3-and 4-kinase, putative
  Pfam annotation: Domain name=PI3_PI4_kinase; Domain location=176-386; Score=155.6; E_value=1.5e-43; Accession=PF00454.19; Description =Phosphatidylinositol 3- and 4-kinase
VVTFFMPQLVQSLRYDEGKLVEGYLLGATQRSNIFAHILIWHLQGEYVDESEKDAAAQKGSAFQSLLPAVKDKIIESFTPEARNMFEREFDFFDKVTSISGVLFPLPKEERRAGIRRELEKISIPGDDLYLPTATNKFVRGIQLDSGTPLQSAAKVPIMITFNVVDRDGDPNDVKPQACIFKVGDDCRQDVLALQVISLLRDVFQAVGLNLYLFPYGVLPTGPGRGIIEVVPNTRSRNQMGETTDGGLLEIFQQDFGPVGSPSFEAAREKFMISSAGYAVASLLLQPKDRHNGNLLFDNQGRLVHIDFGFILEISPGGNMGFESAHFKLSHEMTQLLDPSGTMKSDTWIQFLRLCVKGYLAARRHMNGILSTVNLMVDSGLPCFSRGDPINNLRKRFHPEMNEREAANFMVRTCVDAYNKWTTAGYDLIQYLQQGIEK

SEQ ID NO: 97579 - protein, 218 aa, Setaria italica
  misc_feature (100)..(100): Xaa can be any naturally occurring amino acid
  Transcript Sequence Number=SeqID_31605
  Homolog annotation: Hit_ID=B6TJS6; Match level="QueryCoverage=93%, HitCoverage=36%, E-value=6e-85, Identity=80%"; Hit description =MAC/Perforin domain containing protein
EEEEERRGAGPSAMSLAGSALEAALQAVGRGLDAAGDHRLLYCKGAGRLVDLDEDRARDIPLISGGVLSSVPPDVEVEQCPSNPVRIRPPAPHGAPPQPXDEPFVCSYPQMAEFFNRKSCLLETVPLGSFNSLFSFTGSWKNDAAATKALAIDGYSLPLFRVIITSQELTLLESVKRAIPNVWDPSALASFIENYGTHIITSVTVGGKDEVYIKQHSS

SEQ ID NO: 97580 - protein, 133 aa, Setaria italica
  Transcript Sequence Number=SeqID_31606
MLRWRSQGSLLHSLGSFVPNLESSRERRGETESRERLMSPQTETKASVGFQAGVKDSKLTYYTYDYETKDTDILDSSTLPSPLKKQEKKELKEKQKQELKDQRDRMKLEKKELKEKQKQEQKEKRNKKQEGSV

SEQ ID NO: 97581 - protein, 229 aa, Setaria italica
  misc_feature (80)..(80): Xaa can be any naturally occurring amino acid
  Transcript Sequence Number=SeqID_31607
  Gene Ontology: Mol. function=tRNA (guanine-N7-)-methyltransferase activity; Cellular component=chloroplast; Biological process =glycolysis
  Homolog annotation: Hit_ID=C0PGS2; Match level="QueryCoverage=89%, HitCoverage=51%, E-value=2e-73, Identity=60%"; Hit description =Phosphoglycerate kinase
  Pfam annotation: Domain name=PGK; Domain location=6-224; Score= -285.8; E_value=0.055; Accession=PF00162.11; Description =Phosphoglycerate kinase
SPAGIHFFNLIIQRLNQLLFAEYLSSLLQVEVIPVDGAPGLTSFKKEEWVQNSIILFENLLNFRGEVANCNDFSQKLASXIGGSNFLRKAPALRMLTSLCDGLFFVGKLSFQIMKGLGMPVPSQFIETNAVMEVLQIIQVARDRNVPIYYPTDLWCLNNDGGTLGVISSTGQLDGWTPADIGPSTLEKISSIIPLYKKILWIGPTNYDLAEEFSVGATRLGQILEKSKL

SEQ ID NO: 97582 - protein, 124 aa, Setaria italica
  misc_feature (22)..(22): Xaa can be any naturally occurring amino acid
  Transcript Sequence Number=SeqID_31608
  Homolog annotation: Hit_ID=B9R9Y4; Match level="QueryCoverage=80%, HitCoverage=26%, E-value=4e-23, Identity=57%"; Hit description =Catalytic, putative
VVSALQAFRRRVAYSNACYDRXSSIRQDSELPKWVDSTNKIYPHIVYEELSKAEAPNQCVDTDNCTLEERLLRGLKRVSWEKVDVSFHNSKVRSAAHSVIQVKDPVMHCEGADVIQHMIDHFTL

SEQ ID NO: 97583 - protein, 345 aa, Setaria italica
  Transcript Sequence Number=SeqID_31609
  Homolog annotation: Hit_ID=B9R9Y4; Match level="QueryCoverage=85%, HitCoverage=74%, E-value=1e-112, Identity=66%"; Hit description =Catalytic, putative
  Pfam annotation: Domain name=DUF676; Domain location=22-246; Score =294.6; E_value=2.1e-85; Accession=PF05057.6; Description=Protein of unknown function (DUF676)
GGGDRREAAAEEDPAAAPAPAGAGPDHLVVMVHGIVGSTADWKFGAEQFDKLLSDKVIVHCSNRNMRKLTLDGIDVMGERLAQEVIEEINRRPYIKKISFVAHSVGGLVARYAIGRLYRPPKQTSENAPQSLSDNNRGTIHGLEAVNFITVASPHLGSRGNKQVPFLFGVTAIENFACCIIHLIFGRTGKHLFLTDYDDGKPPLLQRMVDNWGDLQFMSALQAFRRRVAYSNACYDHIVGWRTSSIRQDSELPKWVDSTNKIYPHIVYEELSKAEAPNQCVDTDNCTLEERLLRGLKRVSWEKVDVSFHNSKVRSAAHSVIQVKDPVMHCEGADVIQHMIDHFTL

SEQ ID NO: 97584 - protein, 83 aa, Setaria italica
  Transcript Sequence Number=SeqID_31610
SCQRRRHRARLRQPAPLPLVAPAPIGLPNCTTSCGDVQVPYPFGLGPPRCSWPGFNLTCDDTGRPGGAPRLLLGDGTLEVADI

SEQ ID NO: 97585 - protein, 135 aa, Setaria italica
  Transcript Sequence Number=SeqID_31611
  Subcellular localization annotation: CTP_CleavageSite=24; ConfidenceScore=5.40e-01
GQLLLRHVPLLRCQPMPSTIVDATASSVSRRQRPASIVSACFCHSPSASWFVEAWSAHGRARALNADGCLSFLWSRCTAHTRGHACPRPAVPACLAASWLVVRARGQPVSVLWAPTGCSSADLDFRTYNNLPRPD

SEQ ID NO: 97586 - protein, 110 aa, Setaria italica
  Transcript Sequence Number=SeqID_31612
LGHLPSRLLVSVGDPRAGRAVWRVRRRVRYVEEDEGEDDEAEWGHNEDVARMERYTEDARDQALLVKARVDDEVEVVLVFRGFSSSLSGGTATDPARSILPERAIVQSVD

SEQ ID NO: 97587 - protein, 214 aa, Setaria italica
  misc_feature (86)..(86): Xaa can be any naturally occurring amino acid
  Transcript Sequence Number=SeqID_31613
  Gene Ontology: Mol. function=phosphatidylinositol phosphate kinase activity; Biological process=phosphatidylinositol metabolic process
  Homolog annotation: Hit_ID=Q94LF4; Match level="QueryCoverage=96%, HitCoverage=12%, E-value=1e-106, Identity=88%"; Hit description =Putative phosphoinositide kinase
  Pfam annotation: Domain name=PIP5K; Domain location=4-181; Score =51.2; E_value=9.3e-14; Accession=PF01504.10; Description =Phosphatidylinositol-4-phosphate 5-Kinase
SIYTGSPTCIAKILGIYQVKSLKGGKEMRMDVLVMENLLFERNVTTLYDLKGSARSRYNPDSNGSDKVLLDQNLIEAMPTSPIFVXGNKAKRLLERAVWNDTSFLASIDVMDYSLLVGVDEKRHELVMGIIDFMRQYTWDKHLETWVKASGILGGPKNVSPTVISPKQYKKRFRKAMSAYFLVVPDQWSPPAIIPNPQVAESGQDSDQVLLTEL

SEQ ID NO: 97588 - protein, 92 aa, Setaria italica
  Transcript Sequence Number=SeqID_31614
  Gene Ontology: Mol. function=oxidoreductase activity, acting on single donors with incorporation of molecular oxygen, incorporation of two atoms of oxygen; Biological process=L-phenylalanine catabolic process
  Homolog annotation: Hit_ID=Q5VRH4; Match level="QueryCoverage=98%, HitCoverage=19%, E-value=4e-39, Identity=85%"; Hit description =Homogentisate 1,2-dioxygenase
GFLPGGASLHSCMTPHGPDTKTYEATISRADASTEPFRLSGTLAFMFESSLIPRVCRWALDSPCRDLDYYQCWIGLKSHFSHDNNAGLDEKD

SEQ ID NO: 97589 - protein, 419 aa, Setaria italica
  Transcript Sequence Number=SeqID_31615
  Gene Ontology: Mol. function=oxidoreductase activity, acting on single donors with incorporation of molecular oxygen, incorporation of two atoms of oxygen; Biological process=L-phenylalanine catabolic process
  Homolog annotation: Hit_ID=B6SUH2; Match level="QueryCoverage=99%, HitCoverage=92%, E-value=0.0, Identity=88%"; Hit description =Homogentisate 1,2-dioxygenase
  Pfam annotation: Domain name=HgmA; Domain location=11-419; Score =857.8; E_value=6.4e-255; Accession=PF04209.5; Description =homogentisate 1,2-dioxygenase
MAASDEIESVSLRYLSGLGNSFSSEAVAGSLPVGQNSPLVCPLGLYAEQLSGTSFTTPRASNLRTWLYRIKPSVTHEPFHPREDKGRLVGEFDRATTVATPTQLRWRPTEVPLDRPLDFIDGLYTVCGAGSAFLRHGYAIHMYAANKSMDGCAFCNADGDFLIVPQQGRLFITTECGKMLVSPGEIVVIPQGFRFAVDLPDGPSRGYVSEIFGAHFQLPDLGPIGANGLASPRDFLSPTAWFEQAHRPGYMIVQKYGGELFTATQDFSPFNVVAWHGNYVPYKYDLSRFCPFNTVLFDHGDPSVNTVLTAPTDKPGVALLDFVIFPPRWLVAENTFRPPYYHRNCMSEFMGLIYGMYEAKADGFLPGGASLHSCMTPHGPDTKTYEATISRADASTEPFRLSGTLAFMFESSLIPRVCR

SEQ ID NO: 97590 - protein, 95 aa, Setaria italica
  Transcript Sequence Number=SeqID_31616
  Gene Ontology: Mol. function=nucleotide binding; Biological process =defense response
  Homolog annotation: Hit_ID=Q2QW61; Match level="QueryCoverage=93%, HitCoverage=18%, E-value=1e-14, Identity=45%"; Hit description=NB -ARC domain containing protein
ATKVFGRRKESEEAIGWLTKPSVGDAEIEVSKVSVVSIVGHGGMGKTTLAQLIHNDDTIRRHFDKVIWACVSTTFNATTVIRNILENATWPTNGA

SEQ ID NO: 97591 - protein, 108 aa, Setaria italica
  Transcript Sequence Number=SeqID_31617
DGLGRLGSWSLRKLRWASNQRGFGDDMVEMVVKDSVGGIYRQSHHGATHGGRLFVGSPDQEQDGNAGTQRHKIYTCSGHQISVIPYVLLVWIVLRPALKYFGVLGSKS

SEQ ID NO: 97592 - protein, 72 aa, Setaria italica
  Transcript Sequence Number=SeqID_31618
SESSKRTSKEAITTSSSISVQNWPLCPGTTVALIWWPEHVIKFFVVLPVLPSCSWSGDPTNNLPPWVAPWWD

SEQ ID NO: 97593 - protein, 216 aa, Setaria italica
  Transcript Sequence Number=SeqID_31619
  Gene Ontology: Mol. function=structural constituent of ribosome; Cellular component=ribonucleoprotein complex; Biological process =translation
  Homolog annotation: Hit_ID=Q8H8H8; Match level="QueryCoverage=97%, HitCoverage=94%, E-value=1e-79, Identity=76%"; Hit description =Putative plastid ribosomal protein L11
  Pfam annotation: Domain name=Ribosomal_L11; Domain location=135-203; Score=147.3; E_value=4.7e-41; Accession=PF00298.11; Description =Ribosomal protein L11, RNA binding domain
  Pfam annotation: Domain name=Ribosomal_L11_N; Domain location=72-130; Score=125.5; E_value=1.7e-34; Accession=PF03946.6; Description =Ribosomal protein L11, N-terminal domain
  Pfam module annotation: Pfam domain module=Ribosomal_L11::Ribosomal _L11_N; Domain location=135-203::72-130
  Subcellular localization annotation: CTP_CleavageSite=55; ConfidenceScore=5.86e-01
MNTAMATTSLSLQGRPSQAPAKKLSSPFLGAPASFLRPLAPASSAAPSRRTLAVRAMAPPKPGGKPKKVVGMIKLALEAGKATPAPPVGPALGAKGVNIMAFCKEYNAKTAEKAGYIIPVEITVFDDKSFTFILKTPPASVLLLKAAGVEKGSKEPQREKVGKVTADQVRTIAQEKLPDLNCKSIESAMRIIAGTAANMGIDVDPPILQKKEKVIL

SEQ ID NO: 97594 - protein, 54 aa, Setaria italica
  Transcript Sequence Number=SeqID_31620
GKMFLFASLLMAPDLNRQYERMHAPLFCYCNLCFSVNDSHFGSLASHSRNASKR

SEQ ID NO: 97595 - protein, 144 aa, Setaria italica
  misc_feature (11)..(11): Xaa can be any naturally occurring amino acid
  Transcript Sequence Number=SeqID_31621
  Gene Ontology: Mol. function=hydrolase activity, acting on ester bonds; Cellular component=vacuole; Biological process=lipid metabolic process
  Homolog annotation: Hit_ID=B6TB52; Match level="QueryCoverage=100%, HitCoverage=35%, E-value=1e-35, Identity=54%"; Hit description=Alpha- L-fucosidase 2
PLGCMPRYLTXFQSDNPGDYDAAGCIRWLNDFAEEHNRALRRMLGQLRPRDDHPGVAVVYADYYGAILEITRNPLKHGFRKDVALTACCGDGGPHNSGTLIACNATSVLCPDPSRHISWDGVHLTEAAYQFVAGGVLDGPYAAP

SEQ ID NO: 97596 - protein, 46 aa, Setaria italica
  Transcript Sequence Number=SeqID_31622
  Homolog annotation: Hit_ID=B6TCN8; Match level="QueryCoverage=100%, HitCoverage=12%, E-value=5e-10, Identity=63%"; Hit description =NAD(P)H-dependent oxidoreductase
FDWELSDEDRLKISQMPQHKMARVTGILCPEGVSSVDITEVDVVEM

SEQ ID NO: 97597 - protein, 198 aa, Setaria italica
  Transcript Sequence Number=SeqID_31623
  Homolog annotation: Hit_ID=B9RDF9; Match level="QueryCoverage=100%, HitCoverage=6%, E-value=3e-56, Identity=55%"; Hit description =Nucleotide binding protein, putative
LCWTFAPELLSRVLHYLLQALSKVESGEEALTDEELVAAVVSLCQSQRNNHELKVQLFSSLLLDLKLWSSCNYGLQKKLLSSLADMVFTESACMRDAKAMQMLLDGCRRCYWAIQEPDSIDNFAFTGTKRSLGEVNALVDELLVVVELLLGAASSTAASDDVRCLIGFIVDCPQPNQVARVLHLVYRLIVQPNISRAN

SEQ ID NO: 97598 - protein, 232 aa, Setaria italica
  misc_feature (77)..(77): Xaa can be any naturally occurring amino acid
  misc_feature (99)..(99): Xaa can be any naturally occurring amino acid
  Transcript Sequence Number=SeqID_31624
  Homolog annotation: Hit_ID=Q9LUR0; Match level="QueryCoverage=84%, HitCoverage=29%, E-value=5e-20, Identity=34%"; Hit description =Chromosoma associate protein subunit H2
FNADYRDWSDPHDPGFPGEHIPDPDDLEDPMDPVGEDSDDEDPWKPLNPHEPGNLKIRPYKRVKGSARQVMGTAKKXTLTSLFPMAKMDSVIIPEHAKXFEAQQSQQEELHPSQSPPPYEKHMRSFQYGEQGNPDVFGDSTYDTGPDTDVGFGGIDDPGSPMCGGMGDEFESPTCPAEKKEEPPYETQVSQENIDTHESLDDLCRSHLNKLLASIAEVEQQSEMDARVSTWK

SEQ ID NO: 97599 - protein, 86 aa, Setaria italica
  Transcript Sequence Number=SeqID_31625
  Gene Ontology: Mol. function=hydrolase activity, hydrolyzing O -glycosyl compounds; Cellular component=nucleus; Biological process =ubiquitin-dependent protein catabolic process
  Homolog annotation: Hit_ID=B6T544; Match level="QueryCoverage=94%, HitCoverage=43%, E-value=8e-38, Identity=92%"; Hit description =Ubiquitin-conjugating enzyme E2 E3
  Pfam annotation: Domain name=UQ_con; Domain location=1-81; Score =14.9; E_value=3.1e-06; Accession=PF00179.18; Description=Ubiquitin -conjugating enzyme
MQFSQVTFKTRIYHCNVDSAGKVHLDILKDGWSPAFTISKVLLAIKDIIGNPDPYTPLVMSISRQYLTDRTKHDEIAAEWTMRFAR

SEQ ID NO: 97600 - protein, 189 aa, Setaria italica
  misc_feature (23)..(23): Xaa can be any naturally occurring amino acid
  Transcript Sequence Number=SeqID_31626
  Gene Ontology: Mol. function=hydrolase activity, hydrolyzing O -glycosyl compounds; Cellular component=nucleus; Biological process =ubiquitin-dependent protein catabolic process
  Homolog annotation: Hit_ID=B6T544; Match level="QueryCoverage=74%, HitCoverage=75%, E-value=6e-73, Identity=93%"; Hit description =Ubiquitin-conjugating enzyme E2 E3
  Pfam annotation: Domain name=UEV; Domain location=51-161; Score= -33.0; E_value=0.0074; Accession=PF05743.5; Description=UEV domain
  Pfam annotation: Domain name=UQ_con; Domain location=50-184; Score =198.9; E_value=1.4e-56; Accession=PF00179.18; Description=Ubiquitin -conjugating enzyme
  Pfam module annotation: Pfam domain module=UEV::UQ_con; Domain location=51-161::50-184
  Subcellular localization annotation: CTP_CleavageSite=43; ConfidenceScore=5.62e-01
MSSSSFPTSRFPFAAGAGAPGRXGGGGGGGSSVRPWGSSGGTSVSSSGKRIQKELLDLNASDCSAGPKGDNLYHWLSTIIGPQGSPYEGGIFFLDIVFPPDYPFKPPMVTFKTRIYHCNVDSAGKVHLDILKDGWSPAFTISKVLLAIKDIIGNPDPYTPLVMSISRQYLTDRTKHDEIAAEWTMRFAR

SEQ ID NO: 97601 - protein, 95 aa, Setaria italica
  Transcript Sequence Number=SeqID_31627
  Gene Ontology: Mol. function=hydrolase activity; Biological process =metabolic process
  Homolog annotation: Hit_ID=B6TLN8; Match level="QueryCoverage=100%, HitCoverage=26%, E-value=4e-23, Identity=60%"; Hit description =Gibberellin receptor GID1L2
  Pfam annotation: Domain name=Abhydrolase_3; Domain location=19-95; Score=-84.9; E_value=0.04; Accession=PF07859.5; Description =alphabeta hydrolase fold
SARLYLPAGVEPGKRLPVIVFFHGGAFMVHTAASPLYHIYAASLAAAVPALVVSADYRLAPEHRLPAAYEDAFAALKAVVAACRADGAGAEPWLA

SEQ ID NO: 97602 - protein, 86 aa, Setaria italica
  Transcript Sequence Number=SeqID_31628
  Subcellular localization annotation: CTP_CleavageSite=42; ConfidenceScore=5.28e-01
MSSPAATAPSSSGATQTQPQPPPPEQQGASRERRMESLGWLTESAVMPKKHKAIEGVGAASILDLKAQLYRTQEEARNPTAPGAVT

SEQ ID NO: 97603 - protein, 81 aa, Setaria italica
  Transcript Sequence Number=SeqID_31629
MDMQSSHTSSASSYPVDCFNLFNHVADQRKITARSLFFVGEIGVNDYFLALMSKSADVAESLVPHIIGTIRSALTVTTIHP

SEQ ID NO: 97604 - protein, 287 aa, Setaria italica
  misc_feature (90)..(90): Xaa can be any naturally occurring amino acid
  Transcript Sequence Number=SeqID_31630
  Gene Ontology: Mol. function=ATP-dependent helicase activity; Biological process=regulation of transcription, DNA-dependent
  Homolog annotation: Hit_ID=Q2R377; Match level="QueryCoverage=95%, HitCoverage=32%, E-value=1e-141, Identity=88%"; Hit description=CarD- like transcriptional regulator family protein, expressed
MQNLPYLIVLLFLATTIIVQFAELFGLAQLYQLRGRVGRSGREGFAYLFYTDKSLLSRVATDRLGAIEEHSELGQGFHVAEKDMGIRGFXGSLFGDQQSGDVANVGIDLFFDMLFDSLSKVDQFCLVPVPYKDVQLDINISPHLSSEYISYLENPVELLNEAAKAAEKDLWTLIQFTEDLRRRYGKEPRDMELLLKKLYVRRMAADLGISRVYPSGKTIFMKTNMNKKVFRLMTEAMTSETHRNSLSFVGKEIKAELLVSLPDTLLLNWLFHCLADCYAVIPALVKY

SEQ ID NO: 97605 - protein, 281 aa, Setaria italica
  misc_feature (92)..(92): Xaa can be any naturally occurring amino acid
  Transcript Sequence Number=SeqID_31631
  Gene Ontology: Mol. function=ATP-dependent helicase activity; Biological process=regulation of transcription, DNA-dependent
  Homolog annotation: Hit_ID=Q2R377; Match level="QueryCoverage=93%, HitCoverage=31%, E-value=1e-132, Identity=88%"; Hit description=CarD- like transcriptional regulator family protein, expressed
  Pfam annotation: Domain name=Helicase_C; Domain location=41-119; Score=61.8; E_value=2.7e-15; Accession=PF00271.23; Description =Helicase conserved C-terminal domain
VSAFSKERALSTIKFELQRGGQVFYVVPRIKAIDDVLQFLKDSLPDVPIAVAHGKKMSKNIQFAMEKFARGEVKILVCTHIIESGIDVANAXNTIIVQFAELFGLAQLYQLRGRVGRSGREGFAYLFYTDKSLLSRVATDRLGAIEEHSELGQGFHVAEKDMGIRGFGSLFGDQQSGDVANVGIDLFFDMLFDSLSKVDQFCLVPVPYKDVQLDINISPHLSSEYISYLENPVELLNEAAKAAEKDLWTLIQFTEDLRRRDGYTRLIPRSAAIPPYIELFQ

SEQ ID NO: 97606 - protein, 148 aa, Setaria italica
  Transcript Sequence Number=SeqID_31632
QSEYLFQMVCKPARMCPDQHFYGLSVFLGLKYYDSGFWGVEYGLRGKVLVIVACTIQYNVFHWLDLMPTSLVHNGKWEEPCQLFISSNSPYSPVRSNEASHSSNRFTSLFSKVQGLIGSSSSSSLGLGNTSQKSEYVDNAIKGSDVDK

SEQ ID NO: 97607 - protein, 199 aa, Setaria italica
  misc_feature (13)..(13): Xaa can be any naturally occurring amino acid
  misc_feature (27)..(27): Xaa can be any naturally occurring amino acid
  misc_feature (185)..(185): Xaa can be any naturally occurring amino acid
  Transcript Sequence Number=SeqID_31633
  Gene Ontology: Mol. function=oxidoreductase activity; Biological process=oxidation reduction
  Homolog annotation: Hit_ID=Q0PWF8; Match level="QueryCoverage=100%, HitCoverage=54%, E-value=1e-92, Identity=83%"; Hit description =Gibberellin 20-oxidase
  Pfam annotation: Domain name=2OG-FeII_Oxy; Domain location=130-199; Score=66.5; E_value=9.8e-17; Accession=PF03171.12; Description=2OG -Fe(II) oxygenase superfamily
VNHGIDPALLAEXHRCMDTFFTLPSPXKQRAQRRPGESCGYASSFTGRFASKLPWKETLSFRYSPSDDVAGEQLVSSYFVEKLGEAYRHHGEVYGRYCSEMSRLSLEIMEVLGESLGVGPSHFRRFFEGNDSIMRLNYYPPCQRPYDTLGTGPHCDPTSLTILHQDDVGGLQVFAGGRWRSIRPXPGAFVVNIGDTFMA

SEQ ID NO: 97608 - protein, 154 aa, Setaria italica
  misc_feature (40)..(40): Xaa can be any naturally occurring amino acid
  Transcript Sequence Number=SeqID_31634
  Gene Ontology: Mol. function=metal ion binding
  Homolog annotation: Hit_ID=Q53PH4; Match level="QueryCoverage=100%, HitCoverage=30%, E-value=2e-75, Identity=84%"; Hit description=Zinc finger, C3HC4 type family protein, expressed
GVNSSHFNLICNQETFKMISQRHVSRLPDTVHGGNPYEKXDITEKCIQQSGKTLQAVISEWTSKFDNMEIDRSRLQLNNVDAITSRTYICNHCYNKFTDFLLYWYRVSMPRNLLPPDAVNRESCWYGFLCRTQHHRPDHAKKLNHVCRPTRGNP

SEQ ID NO: 97609 - protein, 79 aa, Setaria italica
  Transcript Sequence Number=SeqID_31635
  Gene Ontology: Mol. function=transcription factor activity; Cellular component=nucleus
  Homolog annotation: Hit_ID=A2Q3S3; Match level="QueryCoverage=100%, HitCoverage=14%, E-value=9e-14, Identity=55%"; Hit description =Pathogenesis-related transcriptional factor and ERF
MARKRKASDSVEFEDGNDVLINSPPPLPSTDAWASVAAAAAAAQQQRGRKRFVGVRQRPSGRWVAEIKDTIQKIRVWLG

SEQ ID NO: 97610 - protein, 159 aa, Setaria italica
  Transcript Sequence Number=SeqID_31636
  Gene Ontology: Mol. function=binding; Cellular component=cytoplasmic membrane-bounded vesicle; Biological process=biological_process
  Homolog annotation: Hit_ID=UPI000034F5A0; Match level="QueryCoverage =90%, HitCoverage=10%, E-value=8e-51, Identity=60%"; Hit description =binding
LKEKGPEAFFEFSGHDSGIEIKSPVQWPYNKGLSFCCWLRVEKFPEKGMMGLFSFFTENGKGCLAMLGKNTLIYESVSPKHQCVLLPLSLPTKQWKFLCVTHTIGRTFSGGSQLRCYVDGDLVSSEKCRYAKVNEVMTRCSVGTELMPIGEEPSSLGFE

SEQ ID NO: 97611 - protein, 66 aa, Setaria italica
  Transcript Sequence Number=SeqID_31637
  Gene Ontology: Mol. function=oxidoreductase activity; Cellular component=cytoplasm; Biological process=oxidation reduction
  Homolog annotation: Hit_ID=Q9SK87; Match level="QueryCoverage=100%, HitCoverage=17%, E-value=2e-16, Identity=59%"; Hit description =Alcohol dehydrogenase-like 2
RRAAAVCKAAGEPLETVEVEVAPPRAHEVRIRVVCTSLCHTDITFWRMKKDGLITFPCILGHEAVG

SEQ ID NO: 97612 - protein, 110 aa, Setaria italica
  Transcript Sequence Number=SeqID_31638
  Gene Ontology: Cellular component=extracellular region; Biological process=plant-type cell wall organization and biogenesis
  Homolog annotation: Hit_ID=Q8W2X8; Match level="QueryCoverage=73%, HitCoverage=30%, E-value=1e-34, Identity=88%"; Hit description =Putative expansin-A30
  Pfam annotation: Domain name=DPBB_1; Domain location=67-110; Score= -10.1; E_value=0.076; Accession=PF03330.10; Description=Rare lipoprotein A (RlpA)-like double
MASPSTAILLALVIALACAATTADARFTAMQWTPAHATFYGDETAAETMGGACGYGNLYATGYGTDTAALSTTLFKDGYGCGTCYQIRCAGSRWCYWGSPVITVTATNLC

SEQ ID NO: 97613 - protein, 51 aa, Setaria italica
  Transcript Sequence Number=SeqID_31639
RLIRRKVWALCTLLTAMFAWKVAGVVPWPVAIGVWAAAAATSAGGFVLMFR

SEQ ID NO: 97614 - protein, 78 aa, Setaria italica
  Transcript Sequence Number=SeqID_31640
  Gene Ontology: Mol. function=oxidoreductase activity; Cellular component=extracellular region; Biological process=oxidation reduction
  Homolog annotation: Hit_ID=Q2R0L2; Match level="QueryCoverage=100%, HitCoverage=12%, E-value=5e-12, Identity=48%"; Hit description =Laccase-19
LVADADPGRYYMVALPNQSPLPDPQSPTLITRGIVQYSNKQRAADGGGRPSSDIPVSPEMPDQHDMITSFYFHGNLTG

SEQ ID NO: 97615 - protein, 102 aa, Setaria italica
  Transcript Sequence Number=SeqID_31641
  Gene Ontology: Mol. function=tRNA isopentenyltransferase activity; Biological process=tRNA processing
  Homolog annotation: Hit_ID=B2XWS5; Match level="QueryCoverage=74%, HitCoverage=21%, E-value=3e-19, Identity=67%"; Hit description =Isopentenyl transferase IPT4
MSLYLAPTAAIAAAAAALPRLVEPPIDVKRLERGMALPMPPAPPPPPLVNVNRYVGAKHKAVVVMGATGTGKSRLAVDLALQFGGEVINSDKIQVHAGLDVA

SEQ ID NO: 97616 - protein, 94 aa, Setaria italica
  Transcript Sequence Number=SeqID_31642
  Subcellular localization annotation: CTP_CleavageSite=20; ConfidenceScore=5.06e-01
PHASPPPPLNSSTPMLVLLPADRIGARFAAILMSLQQIGARSTPNSSRIHHIAAAMEESLATPQWMVGVEEKGGCWGEPAEEARNDVLDGMGVG

SEQ ID NO: 97617 - protein, 100 aa, Setaria italica
  Transcript Sequence Number=SeqID_31643
  Gene Ontology: Mol. function=hydrolase activity
  Homolog annotation: Hit_ID=B6TUZ9; Match level="QueryCoverage=100%, HitCoverage=36%, E-value=3e-39, Identity=80%"; Hit description =Receptor protein kinase-like protein
LAALLWYQGEADTINRRDADLYTARMEAFVRDVRRDLNMPHLLVIQVVGLATGQGKFIELVREAQRRVKLPDVKYVDAKGLPIASDYTHLTTPAQVQLGK

SEQ ID NO: 97618 - protein, 82 aa, Setaria italica
  Transcript Sequence Number=SeqID_31644
LLIHRYFYSAVCSSATCAVYISMTTKPITLFISNQPAAIKGAPQNACWVTALLIMPQKKLGCNFSGTFHNAGLSCLDWRGDR

SEQ ID NO: 97619 - protein, 181 aa, Setaria italica
  Transcript Sequence Number=SeqID_31645
  Gene Ontology: Mol. function=hydrolase activity
  Homolog annotation: Hit_ID=B6TUZ9; Match level="QueryCoverage=98%, HitCoverage=66%, E-value=1e-66, Identity=73%"; Hit description =Receptor protein kinase-like protein
  Pfam annotation: Domain name=DUF303; Domain location=8-109; Score =106.6; E_value=8.6e-29; Accession=PF03629.10; Description=Domain of unknown function (DUF303)
  Subcellular localization annotation: CTP_CleavageSite=34; ConfidenceScore=5.04e-01
DLHNVLGVGPGMPFAHAVLRSRRLPPHAAVGLVPCAQGATPITSWSRGTELYERMLARARAALSLPGGDRELAALLWYQGEADTITRRDADLYTARMEAFVRDVRRDLNMPHLLVIQVGLATGQGKFIELVREAQRRVKLPDVKYVDAKGLPIASDYTHLTTPAQVQLGKMLANAYLATLL

SEQ ID NO: 97620 - protein, 49 aa, Setaria italica
  Transcript Sequence Number=SeqID_31646
RLKAYNCEFLTLGSIKWKSHKSKQMLIVGANNCSFCKNTNPKGFWFCYC

SEQ ID NO: 97621 - protein, 65 aa, Setaria italica
  Transcript Sequence Number=SeqID_31647
MDLPVVDLAPFLGTAAGGGAAEVGEEVRALCATVSASLRDTGALLVKDPRCSAADNDRFLDVVER

SEQ ID NO: 97622 - protein, 98 aa, Setaria italica
  Transcript Sequence Number=SeqID_31648
  Gene Ontology: Mol. function=transferase activity, transferring glycosyl groups; Cellular component=membrane; Biological process =cell wall biogenesis
  Homolog annotation: Hit_ID=A7LIE9; Match level="QueryCoverage=87%, HitCoverage=16%, E-value=2e-20, Identity=58%"; Hit description=Alpha- 1,2-fucosyltransferase
CRYVVWLPFDGLGNRMLSMASGFLYALLTGRVFLVALPPDSADLFCEPFPGTTWLLPHQDFPVANLFGLGVSPEASYTTLLNNKKIAAVVDDDDDTAA

SEQ ID NO: 97623 - protein, 93 aa, Setaria italica
  Transcript Sequence Number=SeqID_31649
RPLLHRRPPLRHGPLRQIPRLIHLLSPLSSTHLCFCRFFFPVSSCFLETSYPGDQRTQSIQVNLLIPCTHAVDPNEFWVSRRFEMNLWFVGSR

SEQ ID NO: 97624 - protein, 153 aa, Setaria italica
  Transcript Sequence Number=SeqID_31650
  Gene Ontology: Mol. function=RNA binding; Cellular component =cytoplasm; Biological process=multicellular organismal development
  Homolog annotation: Hit_ID=Q6Z5M7; Match level="QueryCoverage=98%, HitCoverage=41%, E-value=4e-53, Identity=69%"; Hit description =Putative KH domain protein
LWDYALQFNFVGRLLGPRGNSLKRVEANTDCRVLIRGRGSILYAAKEELMRGKPGYEHLNEPLHLVIEAELPAEIVDIRLMQAREILDDMLLLEEVHRFIHRFQHVIENFFKKQQLRELAMLNGTLRDDSSQKSGSVSPFRNSMGMKRAKTRG

SEQ ID NO: 97625 - protein, 56 aa, Setaria italica
  Transcript Sequence Number=SeqID_31651
MLRTRDQPSLHLGISHSPQSIKTIAIVTSVVSNHTSEGIAGANHSFQQAFHLVLLL

SEQ ID NO: 97626 - protein, 283 aa, Setaria italica
  misc_feature (42)..(42): Xaa can be any naturally occurring amino acid
  Transcript Sequence Number=SeqID_31652
  Gene Ontology: Mol. function=RNA binding; Cellular component =cytoplasm; Biological process=multicellular organismal development
  Homolog annotation: Hit_ID=Q6Z5M7; Match level="QueryCoverage=89%, HitCoverage=73%, E-value=1e-92, Identity=67%"; Hit description =Putative KH domain protein
  Pfam annotation: Domain name=KH_1; Domain location=135-189; Score =10.3; E_value=0.054; Accession=PF00013.21; Description=KH domain
MSSGGRHMAYSPSPSTGPHSPHLQLADHEKYIAELLAEKQKXLTPFMQVLPCTSRLLNQVILHVSALLGIPVLDQPGYQHGSPLINGGAIPNGRPVEMNGWAPAIPSEGAGMFHPPSRKWHSPQGNSSGFIVKKTMRMDIPVDKYPNFNFVGRLLGPRGNSLKRVEANTDCRVLIRGRGSIKDAAKEELMRGKPGYEHLNEPLHLVIEAELPAEIVDIRLMQAREILDDMLKPVDESMDFFKKQQLRELAMLNGTLRDDSSQKSGSVSPFRNSMGMKRAKTRG

SEQ ID NO: 97627 - protein, 81 aa, Setaria italica
  misc_feature (80)..(80): Xaa can be any naturally occurring amino acid
  Transcript Sequence Number=SeqID_31653
  Gene Ontology: Mol. function=DNA-directed DNA polymerase activity; Cellular component=intracellular; Biological process=DNA replication
  Homolog annotation: Hit_ID=Q69S01; Match level="QueryCoverage=96%, HitCoverage=14%, E-value=1e-30, Identity=80%"; Hit description =Putative PolI-like DNA polymerase
SNNEAFGGGKKGKEACHAIAALCEICSIDSLISNFILPLQGDHISCAEGRIHCSLNINTETGRLSARTPNLQNQPALEKXR

SEQ ID NO: 97628 - protein, 94 aa, Setaria italica
  misc_feature (7)..(7): Xaa can be any naturally occurring amino acid
  Transcript Sequence Number=SeqID_31654
  Homolog annotation: Hit_ID=Q7XUL4; Match level="QueryCoverage=78%, HitCoverage=32%, E-value=4e-17, Identity=51%"; Hit description =OSJNBa0010H02.14 protein
LHLKYFXPLRSGDKFVVKVRLASIKGIRMIFEHIIEKLPNHEQILEAKATAVCLNKDYRPSRIPPELLSKLQIYSSKDSEGSSENANNRNNSCN

SEQ ID NO: 97629 - protein, 169 aa, Setaria italica
  misc_feature (154)..(154): Xaa can be any naturally occurring amino acid
  Transcript Sequence Number=SeqID_31655
  Gene Ontology: Mol. function=hydrolase activity
  Homolog annotation: Hit_ID=O80629; Match level="QueryCoverage=99%, HitCoverage=52%, E-value=5e-59, Identity=62%"; Hit description =Putative phospholipase
DHGYAMECCISMRGTGARLAHAGFAVHGMDYEGHGKSSGLQGYITSFNDIVVDCSKYFASVCEKVEYKNQKRFLLGESMGGAVVLMLHRKEPTYWDGAILVAPMCKIVEDMKPHPIVISILSKLSNVIPTWRIIPNEDIIDRAIKSEEWREEVXSISLFYKGKPRLKTG

SEQ ID NO: 97630 - protein, 121 aa, Setaria italica
  Transcript Sequence Number=SeqID_31656
  Gene Ontology: Mol. function=nucleic acid binding; Cellular component= mitochondrion
  Homolog annotation: Hit_ID=B6TR84; Match level="QueryCoverage=90%, HitCoverage=43%, E-value=1e-21, Identity=42%"; Hit description =Glycine-rich RNA-binding protein 7
  Pfam annotation: Domain name=RRM_1; Domain location=35-105; Score =110.3; E_value=6.5e-30; Accession=PF00076.14; Description=RNA recognition motif. (a.k.a. RRM, RBD, o
MMLNGRGGMLRNAVTPFGKLFNRNAACSCARTPKLFIGGLSYDTNETALKDAFSQHGDVIAVKVICHPTTGKSKGFGFVTFSSEDEAAAAVQKMNGEVLDGRTIRVQYSDSGRSDTTDLDA

SEQ ID NO: 97631 - protein, 60 aa, Setaria italica
  Transcript Sequence Number=SeqID_31657
RPRTLVLATFSMSHFEGKPTDDPTACTRTEPYKDGEKDNEWVFREVRDIVYDEAEAARAR

SEQ ID NO: 97632 - protein, 109 aa, Setaria italica
  Transcript Sequence Number=SeqID_31658
RHQPSERRCGEVEHRGGERDDPLNDDAYVSTLALQHRARCGVRPCGAVSRRCAHASRRWRPPAELAKDSRNRGGGRAAEFPVGSPSTSAVGRRRQEGEKPAMIFSERPQ

SEQ ID NO: 97633 - protein, 67 aa, Setaria italica
  Transcript Sequence Number=SeqID_31659
LLLVLGFLAISGAARPLSGEVWSSAGEGEAVSGDGIVQFLQRIYLQQLGAGPSCGTNSSNGGCPRHP

SEQ ID NO: 97634 - protein, 78 aa, Setaria italica
  Transcript Sequence Number=SeqID_31660
  Subcellular localization annotation: CTP_CleavageSite=48; ConfidenceScore=5.06e-01
MSASATAAGRDAAGTPEAAGTATRRDKRRERKKERRRRARREAAARARVAVEADAPAADPEEELRLLDQEEAEAAAES

SEQ ID NO: 97635 - protein, 72 aa, Setaria italica
  Transcript Sequence Number=SeqID_31661
  Subcellular localization annotation: CTP_CleavageSite=21; ConfidenceScore=5.40e-01
SQSSIFRSQNSVVVHTNASTNCSTTMNSCYQPRPLVVHTKNEEPPLESGIRLQQVRSAPSERCGGEDGAGSG

SEQ ID NO: 97636 - protein, 113 aa, Setaria italica
  misc_feature (12)..(12): Xaa can be any naturally occurring amino acid
  Transcript Sequence Number=SeqID_31662
  Gene Ontology: Mol. function=transferase activity, transferring glycosyl groups; Biological process=metabolic process
  Homolog annotation: Hit_ID=B6UAG9; Match level="QueryCoverage=92%, HitCoverage=21%, E-value=7e-35, Identity=70%"; Hit description =Cytokinin-O-glucosyltransferase 3
HQAVGGFLTHCXWGSTLESVAAGVPMATWPFYAEQFLNEKLIVDVLGTGVSVGATKPTKGLLNRVQGVEETKPEVGTEQVKRALNKLMDGGIDGEGRRSKAQELKDLKVLKST

SEQ ID NO: 97637 - protein, 111 aa, Setaria italica
  Transcript Sequence Number=SeqID_31663
  Gene Ontology: Mol. function=transporter activity; Cellular component= integral to membrane; Biological process=transport
  Homolog annotation: Hit_ID=Q67VB7; Match level="QueryCoverage=91%, HitCoverage=21%, E-value=2e-14, Identity=42%"; Hit description =Ankyrin repeat protein-like
  Pfam annotation: Domain name=Ank; Domain location=31-65; Score=9.3; E_ value=1.6; Accession=PF00023.22; Description=Ankyrin repeat
  Pfam annotation: Domain name=Ank; Domain location=67-100; Score=32.6; E_value=1.5e-06; Accession=PF00023.22; Description=Ankyrin repeat
  Pfam module annotation: Pfam domain module=Ank::Ank; Domain location =31-65::67-100
LKQLLLNGRATLIIDTLFKKCPGYYKMVDDKGRNLLHCAVEHNSYRLVRFICQKYTIATLLNGTDYEGNTPLHLAVKYGFIRIVSTLLETMSVDTNIVNKDGLTAGDLAAA

SEQ ID NO: 97638 - protein, 122 aa, Setaria italica
  Transcript Sequence Number=SeqID_31664
NATPIWILPVNLFPSGIYQQISFKPAEFKTNLLAMVYILLSNTIAGSVGRNVTQLLVPCINYFKSTRKLQSKQITLSISKPPLRFGCVIARIKLSLVMAGIRLGYSLMRMISSEVFKSTMLP

SEQ ID NO: 97639 - protein, 106 aa, Setaria italica
  misc_feature (69)..(69): Xaa can be any naturally occurring amino acid
  Transcript Sequence Number=SeqID_31665
  Gene Ontology: Mol. function=protein dimerization activity; Cellular component=nucleus; Biological process=regulation of transcription, DNA-dependent
  Homolog annotation: Hit_ID=Q84UA5; Match level="QueryCoverage=56%, HitCoverage=11%, E-value=2e-14, Identity=68%"; Hit description =Liguleless2-like protein
  Subcellular localization annotation: CTP_CleavageSite=65; ConfidenceScore=5.45e-01
WPMRHQQQLHSGNSQSVGSTTDSSSAQNTMSQMELVSPASPAPRQEVMMVTTDDYSYKPGLAAAPAAAXPPAPPSFQQHHPALPLHLHGRGEGGGGDHDKRKQGST

SEQ ID NO: 97640 - protein, 66 aa, Setaria italica
  Transcript Sequence Number=SeqID_31666
DLQQQLDQFMDGRIDGRILKLYTSHWPQELWQQYEPLLNYCRDTGIKLIACGTPLEVIASFIQSIS

SEQ ID NO: 97641 - protein, 136 aa, Setaria italica
  misc_feature (130)..(130): Xaa can be any naturally occurring amino acid
  Transcript Sequence Number=SeqID_31667
  Pfam annotation: Domain name=DUF399; Domain location=1-133; Score =11.5; E_value=1.2e-09; Accession=PF04187.5; Description=Protein of unknown function, DUF399
PDDRALELEVVRGLAGRCADAGRGLALALEAFPCDLQQQLDQFMDGRIDGRILKLYTSHWPQELWQQYEPLLNYCRDTGIKLIACGTPLEVKKTVQADGIRALTKAEREAYAPPAGSGFISGFMFSSGRXLIDKIS

SEQ ID NO: 97642 - protein, 184 aa, Setaria italica
  Transcript Sequence Number=SeqID_31668
  Gene Ontology: Mol. function=transferase activity
  Homolog annotation: Hit_ID=B9T3D5; Match level="QueryCoverage=100%, HitCoverage=75%, E-value=2e-24, Identity=28%"; Hit description =Pentatricopeptide repeat-containing protein, putative
  Pfam annotation: Domain name=PPR; Domain location=130-164; Score =40.6; E_value=6.4e-09; Accession=PF01535.12; Description=PPR repeat
  Pfam annotation: Domain name=PPR; Domain location=25-59; Score=19.3; E_value=0.016; Accession=PF01535.12; Description=PPR repeat
  Pfam annotation: Domain name=PPR; Domain location=60-94; Score=39.4; E_value=1.5e-08; Accession=PF01535.12; Description=PPR repeat
  Pfam annotation: Domain name=PPR; Domain location=95-129; Score=36.8; E_value=8.8e-08; Accession=PF01535.12; Description=PPR repeat
  Pfam module annotation: Pfam domain module=PPR::PPR::PPR::PPR; Domain location=130-164::25-59::60-94::95-129
RTEVLEMALEMTDDMLRLGFVPSEASCSFMLDGLRKRGCVEEAFRLACHLGELGMVPNLFACNALIDKLCKDGRFSEAERLFTGMGSRGLEPNEVTYAILIHSLCKRGMMDDALCMSDRMRENGIRVTAYPYNSLINGYCQCDDFDQARKLMNEMVKEGLTLSAASYSPLIAGLCRKGDPASAM

SEQ ID NO: 97643 - protein, 85 aa, Setaria italica
  Transcript Sequence Number=SeqID_31669
  Gene Ontology: Mol. function=protein serine/threonine kinase activity; Cellular component=cellular_component; Biological process =protein amino acid phosphorylation
  Homolog annotation: Hit_ID=A4PRH3; Match level="QueryCoverage=65%, HitCoverage=13%, E-value=7e-19, Identity=71%"; Hit description =Protein kinase
MASLFGNGGYVYSSESEGEEEDEGTEGYRKGGYHAARPGDRFAGGRFVAQRKLGWGNFSTVWLAYDTHHSRFVALKIQKSARDYG

SEQ ID NO: 97644 - protein, 79 aa, Setaria italica
  Transcript Sequence Number=SeqID_31670
MAGGGMLGGAFWATRALEVVKRNDGPGLLWKRIKLTTTRKNNAKKRLKRLWQNEAVIRACGQSESSSASNTASAAAKQQ

SEQ ID NO: 97645 - protein, 179 aa, Setaria italica
  misc_feature (4)..(4): Xaa can be any naturally occurring amino acid
  Transcript Sequence Number=SeqID_31671
  Gene Ontology: Mol. function=electron carrier activity; Biological process=oxidation reduction
  Homolog annotation: Hit_ID=Q52PG2; Match level="QueryCoverage=98%, HitCoverage=34%, E-value=9e-38, Identity=45%"; Hit description =Cytochrome P450 monooxygenase CYP71U4v2
FQDXFGAATDTTATTLEWAMAELIRNPRAMSRATSEIRQKLGQGTAMITSRPWRPPLPTNGHQGDPKVTSCCPVDSSCKPRKLQIMGYEIPKGTSVFVNTFAVASNPSYWDNAEVFEPERFENSTLDYNWAHFESVPFGAGRRQCPGALFATMTIELTLANLLYHFDWALPDGADPKAL

SEQ ID NO: 97646 - protein, 318 aa, Setaria italica
  Transcript Sequence Number=SeqID_31672
  Gene Ontology: Mol. function=protein serine/threonine kinase activity; Biological process=protein amino acid phosphorylation
  Homolog annotation: Hit_ID=B6SY10; Match level="QueryCoverage=100%, HitCoverage=57%, E-value=1e-140, Identity=75%"; Hit description =Protein kinase G11A
  Pfam annotation: Domain name=Pkinase; Domain location=167-318; Score =0.9; E_value=1.5e-08; Accession=PF00069.17; Description=Protein kinase domain
  Pfam annotation: Domain name=Pkinase_Tyr; Domain location=167-318; Score=-149.8; E_value=0.00092; Accession=PF07714.9; Description =Protein tyrosine kinase
  Pfam module annotation: Pfam domain module=Pkinase::Pkinase_Tyr; Domain location=167-318::167-318
MTSKAMPQTPPEISSAPDLKHCSKSASPLEIPQTNNACVSAPTVLPETANLSKLSHKLNSNEQKPDHHIKESVGELGNVNGSSTSFQTCEGSSQAKVSASARLTDPSEIGDRGNSSRCRPSTSSDVSDESSCSSMSSSTKPHKANDSRWEAIQMVRTRDGMLGLSHFRLLKRLGCGDIGSVYLSELNGTKSYFAMKVMDKASLASRKKLLRAQTEKEILQCLDHPFLPTLYTHFETDKFSCLVMEFCPGGDLHTLRQRQPGKHFPEQAVKFYVAEVLLALEYLHMLGIIYRDLKPENVLVREDGHIMLSDFDLSLRCA

SEQ ID NO: 97647 - protein, 64 aa, Setaria italica
  Transcript Sequence Number=SeqID_31673
  Gene Ontology: Mol. function=metal ion binding
  Homolog annotation: Hit_ID=Q7Y1W9; Match level="QueryCoverage=96%, HitCoverage=35%, E-value=5e-18, Identity=72%"; Hit description=Zinc finger A20 and AN1 domain-containing stress-associated protein 9
  Pfam annotation: Domain name=zf-A20; Domain location=21-45; Score =35.5; E_value=2.1e-07; Accession=PF01754.8; Description=A20-like zinc finger
MAQESWKQESEETGVHAPEAPILCINNCGFFGSSMTNNMCSKCYRGFHQLDEVPVTLRAHIVRH

SEQ ID NO: 97648 - protein, 58 aa, Setaria italica
  Transcript Sequence Number=SeqID_31674
GRALGPAQLNLLLQKTWGAGCWLTIPLLLCRFDALALYFCSAREADGHVDVSDCFQFY

SEQ ID NO: 97649 - protein, 164 aa, Setaria italica
  Transcript Sequence Number=SeqID_31675
  Gene Ontology: Mol. function=metal ion binding; Biological process =response to stress
  Homolog annotation: Hit_ID=A1YAQ3; Match level="QueryCoverage=100%, HitCoverage=100%, E-value=6e-63, Identity=74%"; Hit description=Zinc finger protein
  Pfam annotation: Domain name=zf-A20; Domain location=21-45; Score =35.5; E_value=2.1e-07; Accession=PF01754.8; Description=A20-like zinc finger
  Pfam annotation: Domain name=zf-AN1; Domain location=105-145; Score =77.8; E_value=4e-20; Accession=PF01428.8; Description=AN1-like Zinc finger
  Pfam module annotation: Pfam domain module=zf-A20::zf-AN1; Domain location=21-45::105-145
MAQESWKQESEETGVHAPEAPILCINNCGFFGSSMTNNMCSKCYRDFIKLMEAPVVEKKVITAASSSAVPLETAKHDDAHAAAVTEAVAEKQAEQEPPKPPSNRCLTCRKKVGLTGFQCRCGGTFCSTHRYTDSHQCTFDYKKVAREQIAKQNPVVMAEKINKI

SEQ ID NO: 97650 - protein, 139 aa, Setaria italica
  Transcript Sequence Number=SeqID_31676
  Homolog annotation: Hit_ID=B9RWB5; Match level="QueryCoverage=83%, HitCoverage=52%, E-value=2e-11, Identity=43%"; Hit description=RNA binding protein, putative
MATETPPPEEKKKKAPLPKVVTLNKALKLAQTWVDKMSASEPDEPNDKDFEGRPSRLGLGAKVAPGVKRAPPTDPIERRLLGKVNAQKRKALEEDNRTAKEANEASDDDCDEPESRTNAFNKKRTLPSVTSTPLVKKAK

SEQ ID NO: 97651 - protein, 74 aa, Setaria italica
  Transcript Sequence Number=SeqID_31677
NTKNTEFHCQTKHVSDRRDENTVHLQIHRMMHTRCICRGGHWWGTSTLACMHTKRHISCSCISSAACGVAAMHC

SEQ ID NO: 97652 - protein, 178 aa, Setaria italica
  Transcript Sequence Number=SeqID_31678
  Gene Ontology: Mol. function=aspartic-type endopeptidase activity; Biological process=DNA integration
  Homolog annotation: Hit_ID=O23864; Match level="QueryCoverage=99%, HitCoverage=13%, E-value=1e-49, Identity=54%"; Hit description =Polyprotein
RSVLEKDKLNGTNYSDWIRNLRIVLRAEKKEDVLDNPLPEEPAEDAPAAAKNAYKKTCDANLEVSCLMLACMEPELQMQFETNHEAHDMIVALRDMFQTQARTERFNVSKAFVESKLAEGAAVGPHVIKMVGYTQRLEKLGFPLGQELATDFILSSLPPSYGNFISNYHMHGTEKGLN

SEQ ID NO: 97653 - protein, 110 aa, Setaria italica
  Transcript Sequence Number=SeqID_31679
  Gene Ontology: Cellular component=plasma membrane
  Homolog annotation: Hit_ID=Q7XBH1; Match level="QueryCoverage=100%, HitCoverage=98%, E-value=8e-45, Identity=79%"; Hit description =Stress-responsive protein
  Pfam annotation: Domain name=Dabb; Domain location=10-106; Score =106.7; E_value=7.9e-29; Accession=PF07876.4; Description=Stress responsive AB Barrel Domain
MAAGGGSGVVKHIVLARFKEEVTPERLDQLIQGYAALVDAVPSMKSFHWGTNVSIENTHEGFTHVFESTFESTEGIKEYVKHPAHVEYANEFLSVSEKILIIDYKPTSVN

SEQ ID NO: 97654 - protein, 238 aa, Setaria italica
  misc_feature (233)..(233): Xaa can be any naturally occurring amino acid
  Transcript Sequence Number=SeqID_31680
  Homolog annotation: Hit_ID=Q9M7X1; Match level="QueryCoverage=99%, HitCoverage=32%, E-value=1e-102, Identity=69%"; Hit description =MJK13.4 protein
NQVYQSGLKSSRINLPDVKAICLMECPLPAEDGLNFVCDYPEGDIRLSVDDWIDRDYDYFEYLTPDMRNSSLQLQGPCYPVIFPSVNVYWSCQFIARASNVSLKHWQQMGGVSIDENMLIDKTIHNTINSKSAVLKRYVADIGKSWPVLIICGGLLPLFLSGIWLLMIRFFVAGMPWITVVVFNALVISVTMFFYIKAGWIGHDPLTVVIGESDPYVNIGGREINHLHAASVXMTVIM

SEQ ID NO: 97655 - protein, 107 aa, Setaria italica
  Transcript Sequence Number=SeqID_31681
LRKSGLNRLTSCRHRAEREPAPLPRVRTPQVSLQLPPAAAAALRIQEASGSIRRREARPPGAAGTRRPSKTLLLPDQSESTGVNSDGVLPAAAHATYSHPTPQLRRL

SEQ ID NO: 97656 - protein, 146 aa, Setaria italica
  misc_feature (142)..(142): Xaa can be any naturally occurring amino acid
  Transcript Sequence Number=SeqID_31682
  Gene Ontology: Mol. function=electron carrier activity; Cellular component=extracellular region; Biological process=response to oxidative stress
  Homolog annotation: Hit_ID=Q9XFL6; Match level="QueryCoverage=98%, HitCoverage=39%, E-value=2e-30, Identity=49%"; Hit description =Peroxidase 5
  Pfam annotation: Domain name=peroxidase; Domain location=16-146; Score=59.0; E_value=1.8e-14; Accession=PF00141.15; Description =Peroxidase
ENFYAATNCSNLDEIVKREVSRTLFTVPPPDGGRRMGASLLRLFFHDSFVQGCDASVLLDINTDVRKGRIILSSEKQASPNFNSLRGFDVIDRIKDEVERNCPGVVSCADILALAARAAVVALEGPTWPLLLGRRDSTTANXTEAN

SEQ ID NO: 97657 - protein, 99 aa, Setaria italica
  Transcript Sequence Number=SeqID_31683
  Gene Ontology: Mol. function=protein dimerization activity; Cellular component=endoplasmic reticulum lumen; Biological process=proteolysis
  Homolog annotation: Hit_ID=Q66VR4; Match level="QueryCoverage=69%, HitCoverage=15%, E-value=4e-30, Identity=89%"; Hit description=Auxin amidohydrolase
MGTAAPPLLLAGLALAVLAAAGWPSVATAALEDPAGLLRRAKEPDFADWMVGVRRRIHENPELGYEEFETSALVRRELDAMGIPYKHPFAVTGVVATVG

SEQ ID NO: 97658 - protein, 93 aa, Setaria italica
  Transcript Sequence Number=SeqID_31684
  Gene Ontology: Mol. function=sequence-specific DNA binding; Cellular component=cytoplasm; Biological process=regulation of transcription, DNA-dependent
  Homolog annotation: Hit_ID=Q8H7Y6-2; Match level="QueryCoverage=100%, HitCoverage=23%, E-value=5e-15, Identity=56%"; Hit description =Isoform 2 of Heat stress transcription factor A-2d
SGEPGTSELENLALNIQGLGKRKQDEKEAQGGLAAELTDDFWEELLSEGMRGGHAGTAVPPVPTEMERRQRPPGRYVDALAQRISSMSNSTAK

SEQ ID NO: 97659 - protein, 93 aa, Setaria italica
  Transcript Sequence Number=SeqID_31685
GPRRRQPRTRTPAELLRAFSVEIACVSFLICFVLNYFTGKNENIVLAWATKFATKDSIFAAGRGGVAVLGGSAPPVGEKGRATPRRDCAKGRE

SEQ ID NO: 97660 - protein, 485 aa, Setaria italica
  Transcript Sequence Number=SeqID_31686
  Gene Ontology: Mol. function=protein binding; Cellular component =endoplasmic reticulum membrane; Biological process=biological_process
  Homolog annotation: Hit_ID=UPI000186D152; Match level="QueryCoverage =55%, HitCoverage=58%, E-value=2e-28, Identity=31%"; Hit description =coiled-coil domain-containing protein 47 precursor, putative
  Pfam annotation: Domain name=DUF1682; Domain location=150-474; Score =451.4; E_value=1.3e-132; Accession=PF07946.6; Description=Protein of unknown function (DUF1682)
MAAPSWIGLRPPRAALLLLLLLALNLTFSLAANFEGFDSDDLPSAAGVLDADDDEEGLDGVDLPPPPPISLSTSSPSPPVTTTSAPNPNPAAPTPPNPTPALDLWDEDEFEGIPVPEAISSDDSAAPAEVAPSDPSVEAAAEAAPAPKKTPAELLRAFSVEIACVSFLICFVLNYFTGKKQNEKIALAWATKFATRDSIFDKNFSLLGTGDGKDTPLLLKEGQDVFKFYASGRRFCQGMLATMEMRARHDLLSKFVELVFPRKDTITFEVVMNEDAMDHVVLAVARKKAAKMMQKEERDLQRFANVLTSAPAGRKWVSDELAVVAESKEVAGDIITEAVLDQVLGEKAFEKFGKWFISLHFSDQLAGSYKKVLTFKFVLPDASNMSEMTRLVALVPYYIDLVGRYKLSSHARSKTDAARTKAAQEAFKELQNARQEALQRKKAEKKKLMEEADAKLSAEALRKKEEKERARQMKKSGPKVKMLRS

SEQ ID NO: 97661 - protein, 148 aa, Setaria italica
  misc_feature (57)..(57): Xaa can be any naturally occurring amino acid
  Transcript Sequence Number=SeqID_31687
  Gene Ontology: Mol. function=zinc ion binding
  Homolog annotation: Hit_ID=Q53LU1; Match level="QueryCoverage=93%, HitCoverage=21%, E-value=4e-50, Identity=67%"; Hit description=RWP -RK domain, putative
RFGSSSNANVSIEYGDQDMKFNLRKKDLLCIHESACYANDMRMHYFVRACGDHPLEXGQGVAGNVILSNSPFFSCDVKDYDVCDYPLAHHARKFGLQAAVAIRLRSTYTGSDDYVLEYFLPLMCKGCDEQQRLLDDIAETMQRACKSL

SEQ ID NO: 97662 - protein, 57 aa, Setaria italica
  Transcript Sequence Number=SeqID_31688
RRKALRRVDHLTQLSLTWLISYFHYETLVRYKAYLLLLWNAWIGRVLSFCSFIQFPL

SEQ ID NO: 97663 - protein, 90 aa, Setaria italica
  Transcript Sequence Number=SeqID_31689
  Gene Ontology: Mol. function=nucleoside-triphosphatase activity; Cellular component=mitochondrion
  Homolog annotation: Hit_ID=B6SVD2; Match level="QueryCoverage=100%, HitCoverage=18%, E-value=1e-21, Identity=58%"; Hit description =Mitochondrial chaperone BCS1
KMTVTMAEGEEMADVYDGTEFKWCLNYRYIPSPSDSGNGRQRQVEAHSFVMTFPKKHKEKALDSYLPYIVSTAKAMKAQERTLQIYMNSW

SEQ ID NO: 97664 - protein, 405 aa, Setaria italica
  Transcript Sequence Number=SeqID_31690
  Homolog annotation: Hit_ID=Q6K999; Match level="QueryCoverage=100%, HitCoverage=75%, E-value=2e-64, Identity=48%"; Hit description =Cticosapeptide/Phox/Bem1p (PB1) domain-containing protein-like
  Subcellular localization annotation: CTP_CleavageSite=39; ConfidenceScore=5.01e-01
RLHLLRPAPGSGGGSNRGSTLRLRVFLFPVQSPPPPPPPAGLLEPKAERHWFVEALNTIPQPKQETSPSPVPAQQSPPQQKQESVFAQQSSPPQAKHETVFVQQPPPQTVLQMAPPQPHMVLAAASPDYLFGLDNGFVPPPAVKVKDPAGDPPTVRENVPVELPAKNDDRHPNPAGDHVAVSPVVSPAEFQRQIQELEKLQVADNATHQPPPASASAPAAAPAPAPAPAALPRNGSDDSLTRAYPPATATPPANADYYLPKFPEKPPVPPPSSAPPATAYLQVPGRYTSVAPGSGADHAPVFFIPAPHGYFAATASPGATSFPAMYAVAPPNANANGNGSAPSPAVSNATAYAPAPQVAYDSNGRAIYYTSMLPQYPSAVNGMSAAGAVLGTEPAKPVAVKPTVS

SEQ ID NO: 97665 - protein, 90 aa, Setaria italica
  Transcript Sequence Number=SeqID_31691
  Gene Ontology: Mol. function=citrate transmembrane transporter activity; Cellular component=integral to membrane; Biological process=citrate transport
  Homolog annotation: Hit_ID=Q6YWA2; Match level="QueryCoverage=65%, HitCoverage=16%, E-value=4e-24, Identity=93%"; Hit description =Putative Na+/H+ antiporter
KQLIAFCAGTGGSMLIIGSAAGVAFMGMEKVDFFWYIRKVSGFALAGYAAGIISYLVGQNYTRLYYSQGERVCPCQVYAAGIIRYLSWSK

SEQ ID NO: 97666 - protein, 105 aa, Setaria italica
  misc_feature (88)..(88): Xaa can be any naturally occurring amino acid
  Transcript Sequence Number=SeqID_31692
  Gene Ontology: Mol. function=citrate transmembrane transporter activity; Cellular component=integral to membrane; Biological process=citrate transport
  Homolog annotation: Hit_ID=B6SSD8; Match level="QueryCoverage=100%, HitCoverage=18%, E-value=9e-30, Identity=70%"; Hit description =Na+/H+ antiporter, probable CP0838
VVIAANAGGAWTPIGDVTTTMLWIHGQLTTLKIMQGLFIPSVVSLAVPLALMSLTSEANGSSQKSSSLSSEQMAPRGQLVLAVGVGAXLVFVPVFKSLTGLPPFM

SEQ ID NO: 97667 - protein, 213 aa, Setaria italica
  Transcript Sequence Number=SeqID_31693
  Gene Ontology: Mol. function=citrate transmembrane transporter activity; Cellular component=integral to membrane; Biological process=citrate transport
  Homolog annotation: Hit_ID=B6SSD8; Match level="QueryCoverage=82%, HitCoverage=30%, E-value=1e-58, Identity=67%"; Hit description =Na+/H+ antiporter, probable CP0838
  Subcellular localization annotation: CTP_CleavageSite=54; ConfidenceScore=5.59e-01
MALSRGLLAGARAAAFPSLPSSAALLRRRRCPPAVAVGPLPHAERWRRGLRFCCASSSSSSPPLPPAPPEEPEDYELLDTTGNCDPLCSVDEVSSQYLGENYKPKNDLLKAFTIFATALAGAAAINHSWVAANQDAAMVLVFAIGYAGIIFEESLAFNKSGVALLMAACLWVIRSIGAPIDIAVEELNHTTTEVSEIVFFLLGAMTIVEIVDA

SEQ ID NO: 97668 - protein, 535 aa, Setaria italica
  misc_feature (140)..(140): Xaa can be any naturally occurring amino acid
  misc_feature (485)..(485): Xaa can be any naturally occurring amino acid
  Transcript Sequence Number=SeqID_31694
  Gene Ontology: Mol. function=citrate transmembrane transporter activity; Cellular component=integral to membrane; Biological process=citrate transport
  Homolog annotation: Hit_ID=B6SSD8; Match level="QueryCoverage=91%, HitCoverage=86%, E-value=0.0, Identity=76%"; Hit description=Na+/H+ antiporter, probable CP0838
  Pfam annotation: Domain name=BacA; Domain location=58-243; Score= -167.8; E_value=0.0049; Accession=PF02673.10; Description=Bacitracin resistance protein BacA
  Pfam annotation: Domain name=CitMHS; Domain location=107-469; Score= -33.4; E_value=6.7e-06; Accession=PF03600.8; Description=Citrate transporter
  Pfam module annotation: Pfam domain module=BacA::CitMHS; Domain location=58-243::107-469
LSKSNGALLRLTRRRPGGSLPFPPLLRRSPPAPPEEPEDYELLDTTGNCDPLCSVDEVSSQYLGENYKPKNDLLKAFTIFATALAGAAAINHSWVAANQDAAMVLVFAIGYAGIIFEESLAFNKSGVALLMAACLWVIRXLGAPSIDIAVEELNHTTTEVSEIVFFLLGAMTIVEIVDAHQGFKLVTDNISTRSPKTLVWVIGIVTFFVSAILDNLTSTIVMVSLLRKLVPPSEYRKLLGAVVVIAANAGGAWTPIGDVTTTMLWIHGQLTTLKIMQGLFIPSVVSLAVPLALMSLTSEANGSSQKSSSLSSEQMAPRGQLVLAVGVGALVFVPVFKSLTGLPPFMGMLLGLGILWILTDAIHYGDSERQRLKVPQALSRIDSQGILFFLGILLSVGSLESAGILRQLANYLDANIPNADLIASAIGVASALIDNVPLVAATMGMYDLTAYPQDSDFWQLIAFCAGTGGSMLIIGSAAGVAFMGXEKVDFFWYIRKVSGFALAGYAAGIISYLVGQNLNFSLPTSLAEIPFIPGS

SEQ ID NO: 97669 - protein, 157 aa, Setaria italica
  misc_feature (67)..(67): Xaa can be any naturally occurring amino acid
  misc_feature (73)..(73): Xaa can be any naturally occurring amino acid
  misc_feature (83)..(83): Xaa can be any naturally occurring amino acid
  Transcript Sequence Number=SeqID_31695
  Homolog annotation: Hit_ID=Q7XC74; Match level="QueryCoverage=87%, HitCoverage=6%, E-value=9e-38, Identity=59%"; Hit description=Agenet domain containing protein, expressed
  Pfam annotation: Domain name=Agenet; Domain location=52-121; Score =58.7; E_value=2.2e-14; Accession=PF05641.4; Description=Agenet domain
LVILVVLFFQVGKELQLEEIHSGHGVEDVPTAVPLDGNRNDTAPISIIWNGIEKGSAVEVLSDKGGXGVAWFXAKVVDINENXAFVSYDNHNGTGPREEWVPLRQDGDKPPQIRLAHPSTFSKFKTRKRRRETAGSCLWVIGDHVHTLSHLPHNSEQ

SEQ ID NO: 97670 - protein, 1119 aa, Setaria italica
  misc_feature (1053)..(1053): Xaa can be any naturally occurring amino acid
  misc_feature (1090)..(1090): Xaa can be any naturally occurring amino acid
  misc_feature (1100)..(1100): Xaa can be any naturally occurring amino acid
  Transcript Sequence Number=SeqID_31696
  Gene Ontology: Mol. function=RNA binding
  Homolog annotation: Hit_ID=Q7XC74; Match level="QueryCoverage=100%, HitCoverage=52%, E-value=1e-138, Identity=52%"; Hit description =Agenet domain containing protein, expressed
  Pfam annotation: Domain name=QLQ; Domain location=953-989; Score=6.2; E_value=0.098; Accession=PF08880.3; Description=QLQ
LRFDNLIDSEVFFSVQGHESNWIEVLSTGSTVVDFSSSAAESCSISKTNNVWSEATSTESVEMLLKSVGENETTGNMDSNAHLQLSGMDSQTDPSNVHPKSMNSPTDSTVVPAKKDQSQSTDSRMTDDPDRSQSIHSRMAADPSNTEPQIEHFAPFLMNKETEQAAGSVAEKCIASEKLSSSNNTSGSCPGVGNYFEAVHHDHSLDKLSVPSAEVDSRNLNNEPFTELAPLQNIYVNDSYHFEQDDKESEVDVTQDSKICHINESKVEGGLPELQSLSCAGQSLGAVNLSSQVSSETLLSESSDGLLEAITNPVKLHRSDTTCNRVDNTLQPSFSPVQHGTEGLNTSIDRSNELNANEFGIGSNSALSHLSEADSRNSNPHLVSSLSPKSKVADTTGVPEETKNAGASSTNISCTGDESKLGVLEHHQDSVDNLKSGAMEEKTNGEEIPAVSGTIEQTVENDHEENATGATGTSKDKVNSSDSIAPENFPADTFNASEDPNIPSINHETFKERDTPALVEEPENMHLDLSTSGPQEKMSAPAISSSSGITSTTVTDTFGTSEDKNGCSLDVSVDDSSALPDEKDLKVSTMNHEGPFKEGAKSALEDEDHNVTPGSEPGGMSAVPEDSNIDVYSSTVSATEKEEYKKASSLGGLTTEETQDKSGNHPDASSQKCQTDRSSIQCEHHIDQATPPSLGISTGKVVEKIVETPLNTSDDLNAHVQDTVLNHGTDHSPGTVPSQGKVGSSILEPGNGTEICTGTTCGSPSGAEPSLQGGGQGSNALLPNTLDGQSGDPKDCEASADAAQSSKQCSTRNVGCAPDSQETNPAGGDRSFSFEVGAPPNVSEKAHSPVWSPFPRYKASQSTEITSENLQPGSPGSSLKITTENPQPGSSLKSKKTSIVKSGKEQLSERKVAESAGGPSDNSNIGSSTKNKSSPPAQSQQHPTPECSDLVNLPFTDPQHLQLRAQIFVYGALIQGTPPGEAYMMAAFGEPGGGKPTWEAAWRAAVVRFQYQKSISTGLETPTSSHQGSSMPRFRKKGTAVRTAPASKKGGKXTVVPAHSSVTLQSPTFNVPLGSSTFNLQRGTHLDFSXAVSPFTYNSXMRQPSPGVAPWYPQSPGPR

SEQ ID NO: 97671 - protein, 1121 aa, Setaria italica
  Transcript Sequence Number=SeqID_31697
  Gene Ontology: Mol. function=RNA binding
  Homolog annotation: Hit_ID=Q7XC74; Match level="QueryCoverage=99%, HitCoverage=53%, E-value=0.0, Identity=55%"; Hit description=Agenet domain containing protein, expressed
  Pfam annotation: Domain name=Agenet; Domain location=628-697; Score =63.1; E_value=1e-15; Accession=PF05641.4; Description=Agenet domain
KFSVPTRRHIVATCTDIVYGAKQPTKEPGEAYMMAAFGEPGGGKPTWEAAWRAAVVRFQYQKSISTGLETPTSSRIGSSVPEKGNKGTAVRTAPASKKGGKTVVPAHSSVTLQSPTFNVPLGSSTFNLQRGTHLDFSQAVSPFTYNSHMRQPSPGVAPWYPQSPGPRPAPWLIPSQNLIFDSSVQPTVPTNETAKGASSKNISISHAVSPGLVVPSPAPSIVSSPTAVLNDEKQKAPASSSKHETASRKPRKRKKASASLEQQPVIASPQLKTDMMLTPETKHTEGFTLSTHPPSNALGSRVVPNTSQIPSVANYQITGGMDSEQRIIFSEQICGAIEQSTGQAKGASMHSMEAVRHKEGIWSHLSTISISNLPREVEEKLTSAAAAAEAAVSVAKAAAEAAKMASEAALQAKMMAEEALNSSSSLKSVHHEASEFYVSSNPPSLSSSTPASSLKLKNTHAPGSIISVAREAARKRVEEASAAAKRAENLDAILKAAELTAEAVFRAGTIIGMGEPLPFTLRELLEAGPDGYWKSERVRNKTGSSNVNPVTETLEVYAPANLSKPGRKRGRKPKYDQAQLNLEPSSSGKELQLEEIHSGHGVEDVPTAVPLDGNRNDTAPISIIWNGIEKGSAVEVLSDKGGFGVAWFSAKVVDINENNAFVSYDNHNGTGPREEWVPLRQDGDKPPQIRLAHPSTFSKFKTRKRRRETAGSCLWVIGDHVDAWVKDSWREGVIAQNYEANETKYVVHFSVGGGGESLVVDGWSLRPSRVWKDGQWTEWSRARERKSKSNKGDSPLEKRQRTDLLQAGSDLSIVGEAGGPSKDKNTNAKKPEELKPLPLSQRDMVFNIGKSVAENKSDALAFKRPGLQKEGSKVVYGVPKHGKKKKFMEVSKHYDAGQSDKISEGNASSRLAKHSMPQLPRPRENTSKVDHNRGRRVGEMRSRLPKPTKSQNVAANSVPDKGSLPISVPNPGVSERTSTFAGSTTSTSNTEKPTIEKNNSVLGTGLRTEVPSVSEMQAASTVPTSKQNVPVNNRAKRKYVPTVGNVNRGVPRTSERTSSDSGEPQRTSSDSAEPRRSNRRIQPTSRLLEGLQSSLIISKVPSEKAPRSNYRSASSRGRGHG

SEQ ID NO: 97672 - protein, 86 aa, Setaria italica
  Transcript Sequence Number=SeqID_31698
  Gene Ontology: Mol. function=transferase activity, transferring glycosyl groups; Cellular component=integral to membrane; Biological process=cell wall organization and biogenesis
  Homolog annotation: Hit_ID=Q9LHZ7; Match level="QueryCoverage=100%, HitCoverage=6%, E-value=5e-27, Identity=70%"; Hit description =Cellulose synthase-like protein D2
CECDFKICAECFGDAVKNGGGVCPGCKEPYKNTELEDVVGGAAGARATLSLPPPPGAGGAAASRMERRLSIMRSQKALTRSQTGDW

SEQ ID NO: 97673 - protein, 144 aa, Setaria italica
  Transcript Sequence Number=SeqID_31699
  Gene Ontology: Mol. function=nucleic acid binding
  Homolog annotation: Hit_ID=Q6AT25; Match level="QueryCoverage=94%, HitCoverage=29%, E-value=7e-21, Identity=41%"; Hit description=Zinc finger CCCH domain-containing protein 34
YIGDPVVYGLDYHNAEYQEQGLSDFERGCYLEGVHGHSCLTTLRHIPHIRSDHVNSNSEEHGKKFFNPRSLMGSRADFDHQNTQIGHISKQRPERRRSAKGKNGRTKRHRTHEPRNGSEEIEQRPTHRHAQFVMGDCSRSLVCA

SEQ ID NO: 97674 - protein, 65 aa, Setaria italica
  Transcript Sequence Number=SeqID_31700
IPLHESLTNYIYICIYNVCKQDLFNAGTDTSSLVLELAMAELMRNPQHMTKLQGEVRKHTPEGQE

SEQ ID NO: 97675 - protein, 228 aa, Setaria italica
  Transcript Sequence Number=SeqID_31701
  Gene Ontology: Mol. function=electron carrier activity; Cellular component=integral to membrane; Biological process=oxidation reduction
  Homolog annotation: Hit_ID=C0KHM0; Match level="QueryCoverage=100%, HitCoverage=42%, E-value=5e-55, Identity=51%"; Hit description =Putative ferulate 5-hydroxylase
  Pfam annotation: Domain name=p450; Domain location=1-228; Score= -203.4; E_value=0.076; Accession=PF00067.14; Description=Cytochrome P450
MSEAMNAFANDVVTRAVSGKLFWAEGRNKLFRELVGINAALFGGFNLEEYFPGLASSLGFLSRWFPRNRQARHAHKRWDELLETIISDHELERRHSISMPCRDFTDVLLSVQQEYGLTRDHTKAILIDLFNAGTDTSSLVLELAMAELMRNPQHMTKLQGEVRKHTPEGQEMVEEENLASMPYLRAVVKETLRLHPPAPLLLPHLAMADCTVVVGDGAYSIPSGTRVI

SEQ ID NO: 97676 - protein, 118 aa, Setaria italica
  Transcript Sequence Number=SeqID_31702
  Subcellular localization annotation: CTP_CleavageSite=52; ConfidenceScore=5.46e-01
RRAHHSERRPLVDRSRSLFLSTPRRRFLPLPRSLRPSPGRRAPPPPALVAVTAPLAPARPRRPQPAGCRHLHPPPCPPRPLLGAPGCDGSGGPKGRVLAPPKLRDKAEGGAPRADARS

SEQ ID NO: 97677 - protein, 118 aa, Setaria italica
  Transcript Sequence Number=SeqID_31703
  Subcellular localization annotation: CTP_CleavageSite=69; ConfidenceScore=5.12e-01
LLLLVLLVLCSSVHLCDARSGKHWRHSRAPSTSLLRGKGKAKSSSSHKQNGKGNQSPYQQSPIVPVSPSGSPAQGRGGQGPTMPAPSSGTGYTLPPPPPPLQPTSATVATSQHHHRIQ

SEQ ID NO: 97678 - protein, 122 aa, Setaria italica
  Transcript Sequence Number=SeqID_31704
  Gene Ontology: Mol. function=DNA binding; Cellular component =chromosome; Biological process=nucleosome assembly
  Homolog annotation: Hit_ID=B6SP93; Match level="QueryCoverage=45%, HitCoverage=22%, E-value=9e-20, Identity=83%"; Hit description =Histone H1
  Pfam annotation: Domain name=Linker_histone; Domain location=66-121; Score=62.6; E_value=1.5e-15; Accession=PF00538.11; Description =linker histone H1 and H5 family
MSAEEAAAAATEVPETEVESEAPAAEEAEAAKPAKAKKAAAKEKKAPKEKKAPKEKKPAAARKPAAHPPYAEMISEAIAALKERTGSSSVAIGKYLEEKHGGNLPSNFRKQLAVQLKKLAAS

SEQ ID NO: 97679 - protein, 145 aa, Setaria italica
  Transcript Sequence Number=SeqID_31705
  Gene Ontology: Mol. function=DNA binding; Cellular component =chromosome; Biological process=nucleosome assembly
  Homolog annotation: Hit_ID=B6SP93; Match level="QueryCoverage=46%, HitCoverage=27%, E-value=6e-16, Identity=64%"; Hit description =Histone H1
  Pfam annotation: Domain name=Linker_histone; Domain location=24-94; Score=113.8; E_value=5.7e-31; Accession=PF00538.11; Description =linker histone H1 and H5 family
FCDCLSEKKAPKEKKPAAARKPAAHPPYAEMISEAIAALKERTGSSSVAIGKYLEEKHGGNLPSNFRKQLAVQLKKLAAAGKLTRVKNSFKLPSARPAVEPKAAPKPAKAAGKPAAKPAKAAKPAAKPKASPKAKAKTAAKPKAA

SEQ ID NO: 97680 - protein, 185 aa, Setaria italica
  Transcript Sequence Number=SeqID_31706
  Gene Ontology: Cellular component=integral to membrane
  Homolog annotation: Hit_ID=Q7F435; Match level="QueryCoverage=87%, HitCoverage=23%, E-value=9e-83, Identity=92%"; Hit description =P0696G06.19 protein
  Pfam annotation: Domain name=Rhomboid; Domain location=1-117; Score= -6.1; E_value=0.003; Accession=PF01694.14; Description=Rhomboid family
LGVEYYLHYTLVLVVLSGLLVLGFYHMMIQRFKVEYFRRVTAVGYSCVVFGWMTILAAKQPSSKLNIFGVLSLPISFAPFESLIFTSIIVPQASFIGHLSGIIVGYSIAWGLIHGMNNYWAITMLGWIVLVFVLSLKRTGSMELSFIEIEPVTDPSLPSVGVVSTRNGRTLQMDVLPGRRVADIV

SEQ ID NO: 97681 - protein, 191 aa, Setaria italica
  Transcript Sequence Number=SeqID_31707
  Gene Ontology: Mol. function=DNA binding
SVQPIHEGNQTSKNELSNINNGSQAMEISPNSVTDNSHLTVGDQMATATASAVSPDAISKEAASNIVCSLPSISNEILKEAQTLEKAGNSPSIVSAVDIHADSMDNKGATPHSAVESASLNENEVDRTHAYATKAANEHLVQSENLAPLKASEMVDEGLNKILPEDKDAKKDSQLEVSSQPVVSDGSCRQP

SEQ ID NO: 97682 - protein, 77 aa, Setaria italica
  Transcript Sequence Number=SeqID_31708
STRRSSKLITFFLECKLLYSPVGHKGSTFLKAYLVWLSWRGTGGSRGPSSFSKSRGSSITISLEIEVVWCRRRGSPP

SEQ ID NO: 97683 - protein, 79 aa, Setaria italica
  Transcript Sequence Number=SeqID_31709
LHNAILYRPVKARGLHCNVFGFTSFVVMTQSFLSVSSIMEDNAVFTCFSWYNIRFCHHIGKTVKNIKCLICEQDHAAPT

SEQ ID NO: 97684 - protein, 129 aa, Setaria italica
  Transcript Sequence Number=SeqID_31710
  Subcellular localization annotation: CTP_CleavageSite=34; ConfidenceScore=5.20e-01
LRLDRYSLIKVSGSSSHGSVTLLMKRSCGHASRRAFAGARGLAWPCRPHSHQAPARELCESCRRYPAWLPAHGEYFCLICCCSCTIPLGYRLTASCIGDTTPWPVTAAADKRKLCGLYMLSLAVNWLLK

SEQ ID NO: 97685 - protein, 152 aa, Setaria italica
  Transcript Sequence Number=SeqID_31711
  Homolog annotation: Hit_ID=B2Z6N3; Match level="QueryCoverage=98%, HitCoverage=5%, E-value=9e-15, Identity=33%"; Hit description =Neuroblastoma-amplified gene
MAAGAEDALYEIRRHASGSHVIPHEGYQGDATSSGSSDAEGYLLPNLSLQGVSKLRERWARYSALGRSSQRKRGDGVSLFVSMNAEYVSVTVGNSITILRKRDGYASPCGVYTNNDRITFFTNGAWLEAQGIFGVVDDLSTLYLIKEMGIIS

SEQ ID NO: 97686 - protein, 64 aa, Setaria italica
  Transcript Sequence Number=SeqID_31712
  Gene Ontology: Mol. function=catalytic activity; Biological process =cellular metabolic process
  Homolog annotation: Hit_ID=C3VPA5; Match level="QueryCoverage=68%, HitCoverage=13%, E-value=1e-13, Identity=79%"; Hit description =Cinnamoyl-CoA reductase
MASDGGGGGGGLVCVTGGSGFIGSWLVRLLLARGYTVHATVRNLQDEGETKHLQALDGAGARLR

SEQ ID NO: 97687 - protein, 93 aa, Setaria italica
  Transcript Sequence Number=SeqID_31713
  Gene Ontology: Mol. function=catalytic activity; Biological process =cellular metabolic process
  Homolog annotation: Hit_ID=C3VPA5; Match level="QueryCoverage=80%, HitCoverage=22%, E-value=3e-24, Identity=70%"; Hit description =Cinnamoyl-CoA reductase
MEGGAGGGGLVCVTGGSGFIGSWLVRLLLDRGYTVHATVRNLQDEGETRHLRALDGSSARLRLFQMDLLDPASSMRPAIEGARGVFHLASPVI

SEQ ID NO: 97688 - protein, 435 aa, Setaria italica
  Transcript Sequence Number=SeqID_31714
  Gene Ontology: Mol. function=glycylpeptide N-tetradecanoyltransferase activity; Cellular component=cytoplasm; Biological process=N-terminal protein myristoylation
  Homolog annotation: Hit_ID=Q8LR54; Match level="QueryCoverage=94%, HitCoverage=94%, E-value=0.0, Identity=93%"; Hit description =Glycylpeptide N-tetradecanoyltransferase
  Pfam annotation: Domain name=NMT; Domain location=70-231; Score =379.6; E_value=5.7e-111; Accession=PF01233.11; Description=Myristoyl- CoA:protein N-myristoyltransferase, N-terminal domain
  Pfam annotation: Domain name=NMT_C; Domain location=245-434; Score =319.7; E_value=5.8e-93; Accession=PF02799.7; Description=Myristoyl -CoA:protein N-myristoyltransferase, C-terminal domain
  Pfam module annotation: Pfam domain module=NMT::NMT_C; Domain location=70-231::245-434
MAAPNSNDAANAGASGTAPAGEEDTSIEALARRVQEHMTLANNPAARRHKFWETQPVGQFRDAADTSLPDGAIEPPTPLSEVRADPYPLPAAFEWLTCDLDDDALLADLYSLLAHNYVEDDENMFRFNYSPAFLRWALKPPSFFRAWHIGVRAKESKKLVAFISGVPARIRARDDVVRMAEINFLCVHKKLRSKRLAPVLIREVTRRVHQENIWQAAYTAGVVLPTPITTCRYWHRSLNPKKLIDVGFSRLGPRMTMSRTVRLYKLPDAPLTPGFRRMELRDVAAVTRLLRAYLAKFVVAPDFDEVDVEHWLLPQEDVVDSYLVESPETHEVTDFCSFYTLPSSVLNNATYATLKAAYSYYNVSTKTPLQQLMNDALIVAKQKNYDVFNALDVMENESFLKELKFGPGDGQLHYYLYNYRIRNGIKPSELGLVLL

SEQ ID NO: 97689 - protein, 50 aa, Setaria italica
  Transcript Sequence Number=SeqID_31715
IRLIEKQRNKACMLNNLIRYRKNGFLQPHQYNKYHGFMFFITETMEYTME

SEQ ID NO: 97690 - protein, 150 aa, Setaria italica
  misc_feature (9)..(9): Xaa can be any naturally occurring amino acid
  Transcript Sequence Number=SeqID_31716
  Gene Ontology: Mol. function=serine-type endopeptidase activity; Cellular component=cytoplasm; Biological process=proteolysis
  Homolog annotation: Hit_ID=Q0JBL5; Match level="QueryCoverage=84%, HitCoverage=40%, E-value=2e-54, Identity=82%"; Hit description=ATP -dependent Clp protease proteolytic subunit
  Pfam annotation: Domain name=CLP_protease; Domain location=1-117; Score=190.7; E_value=4.2e-54; Accession=PF00574.15; Description=Clp protease
IYDTMQYIXSPVTTLCIGQAASMASLLLAAGARGERRALPNARVMIHQPSGGASGQASDIAIHAKEILKVRDRLNKIYAKHTGQAIDRIEQCMERDMFMDPEEAHDWGLIDEVIEHRPVSLVSDAVGGDPPNLGGGGNGENKGAEEPSSA

SEQ ID NO: 97691 - protein, 129 aa, Setaria italica
  misc_feature (10)..(10): Xaa can be any naturally occurring amino acid
  misc_feature (13)..(13): Xaa can be any naturally occurring amino acid
  Transcript Sequence Number=SeqID_31717
  Gene Ontology: Mol. function=transferase activity; Cellular component= chloroplast
  Homolog annotation: Hit_ID=B9SM34; Match level="QueryCoverage=100%, HitCoverage=76%, E-value=1e-36, Identity=33%"; Hit description =Pentatricopeptide repeat-containing protein, putative
  Pfam annotation: Domain name=PPR; Domain location=32-66; Score=44.7; E_value=3.5e-10; Accession=PF01535.12; Description=PPR repeat
  Pfam annotation: Domain name=PPR; Domain location=67-101; Score=51.1; E_value=4.2e-12; Accession=PF01535.12; Description=PPR repeat
  Pfam module annotation: Pfam domain module=PPR::PPR; Domain location =32-66::67-101
TLIHGYCRRXHKXKALQLFDTLLHQRLRPDVVTYNSLIDGMCRKGDLTKANELWDDMHALEIFPNHVTYSILIDSHCEKGQVEDAFRFLDEMVDKGIVPNIMTYNSIIKGYCRSGNVRKGQQFLQKMRQ

SEQ ID NO: 97692 - protein, 314 aa, Setaria italica
  Transcript Sequence Number=SeqID_31718
  Gene Ontology: Mol. function=calcium ion binding; Cellular component =late endosome membrane; Biological process=protein transport
  Homolog annotation: Hit_ID=Q7X6L7; Match level="QueryCoverage=100%, HitCoverage=47%, E-value=1e-162, Identity=84%"; Hit description =OSJNBa0070C17.4 protein
YEFWTNSNDECGPRCDEQAAFVRAFRGHAQLLEKGGYAAFTPHYITWFCPEAFLDTPQCKAQCVNRGRYCAPDPEGDLGAGYDGKDVVVENLRQLCVHRAANATGRPWVWWDYVADYHLRCSMKENKYSKTCAEGVVRSLGLPVDMIDKCMGDPEADAENEVLKTEQIVQVGHGTRGDVTILPTLVINNVQYRGKLESTAVLKAICAGFKESTEPHVCLTPDMETDECLDNNGGCWRDEKTNITACKDTYRGRICECPVVDGIQYQGDGYTDCKAVGPARCAMDNGGCWTETRDGKTFSACSGSDLSGCRCPPG

SEQ ID NO: 97693 - protein, 105 aa, Setaria italica
  Transcript Sequence Number=SeqID_31719
  Gene Ontology: Mol. function=transferase activity, transferring glycosyl groups; Cellular component=integral to membrane; Biological process=protein amino acid glycosylation
  Homolog annotation: Hit_ID=Q5QLP3; Match level="QueryCoverage=97%, HitCoverage=22%, E-value=3e-48, Identity=84%"; Hit description =Galactosyltransferase-like
PEEAYPPYANGPGYVISSDIAQNILSEFDNNALRLFKMEDVNMGMWVEKFNTTRQPVEYLHDVRFYQPGCFDGYFTAHYQSPQHMICLWRKLQAGSAQCCDVVVN

SEQ ID NO: 97694 - protein, 253 aa, Setaria italica
  Transcript Sequence Number=SeqID_31720
MADDNMVTGVSPVADEWDMPPLTSSVYASPLFRKGLDPINLPGYGDVKNSQEGTHTGLVMSDGFVFPPSEHENLPIDPEHEILPIEPEHDESNTNSDGKEGSCAGSNDDEWCHVSPEEVDGMSNENLSINSDLPTDNESPLPDSNPTDHMNCKADLPCEGWWKRKSTYLFHHIKGVTTVCSVVAAGAVVGFVVMSQRWQQDHLHLHQFQFSVNGESMSRVIGAFSRLKDGLPGSEQLRSLLPTRVLPQQPLSA

SEQ ID NO: 97695 - protein, 300 aa, Setaria italica
  Transcript Sequence Number=SeqID_31721
  Gene Ontology: Mol. function=nucleotide binding; Cellular component =membrane; Biological process=defense response
  Homolog annotation: Hit_ID=Q84KC4; Match level="QueryCoverage=93%, HitCoverage=28%, E-value=4e-85, Identity=51%"; Hit description=NBS -LRR disease resistance protein homologue (Fragment)
  Pfam annotation: Domain name=NACHT; Domain location=134-285; Score= -37.6; E_value=0.065; Accession=PF05729.4; Description=NACHT domain
  Pfam annotation: Domain name=NB-ARC; Domain location=111-299; Score= -55.2; E_value=6.7e-06; Accession=PF00931.14; Description=NB-ARC domain
  Pfam module annotation: Pfam domain module=NACHT::NB-ARC; Domain location=134-285::111-299
MEDLNNETKAWRNEVTELAYDTEDCIDDFRHRVESPHDGQGWMCRAARLLKTLMARYQISRKIEELRTRVQEASDHRTRYRLGECLSRSAHVSVDPRITALYAETSSLVGIDAPKEEVIKLLTKVDDASPQELRVVSIVGFGGLGKTTLANEVYRNLRLSFSCKAIISVSQRPDMMSLLNSLFSKVSGQGANHANDLQGLIDNLREYLQGKRYFLVVDDLWDASAWEIIKCAFPESHCGSRVLTTTRIERVAVASCNYQLKFVYRMKPLGDHHSRQLFLQRVLAQQIHVLSHLKDYKRKF

SEQ ID NO: 97696 - protein, 68 aa, Setaria italica
  Transcript Sequence Number=SeqID_31722
QKIQQLQPDQETKEYYSLVCSFIIQFLCSCNRSNGVTDSVTKNMTRSDVRFRRVVLNAVYLRVAAAAA

SEQ ID NO: 97697 - protein, 105 aa, Setaria italica
  Transcript Sequence Number=SeqID_31723
QTTPLSHDMGNIAKVTYAVMSNALKATVQVKLRLNDEHSAVGIGGEITALIDGFEDEEDNRSILFRPEKRTCQSFSSTDNDSMILLQLARNVLAVPYGKDLRIKV

SEQ ID NO: 97698 - protein, 80 aa, Setaria italica
  Transcript Sequence Number=SeqID_31724
  Subcellular localization annotation: CTP_CleavageSite=45; ConfidenceScore=5.27e-01
ADTRGTCTHATAGGGRRGGAKQLDQPRRSRRPTDHGRRKYKVKIRASEVSFSSPASLAFTSLLSALLCSSPVVHCKRSGK

SEQ ID NO: 97699 - protein, 158 aa, Setaria italica
  Transcript Sequence Number=SeqID_31725
  Gene Ontology: Mol. function=nucleic acid binding; Cellular component= spliceosome; Biological process=mRNA processing
  Homolog annotation: Hit_ID=Q6ZK48; Match level="QueryCoverage=100%, HitCoverage=29%, E-value=5e-78, Identity=87%"; Hit description=Pre -mRNA-splicing factor SLU7
LVTKKFTKNTKKEMLKSEHKDKIMEKYGNAASEDTMPRELLLGQSEKEIEYDRTGRIIKGQDVSLPKSKYEEDIFINNHTTVWGSWWKDHQWGYKCCKQTIKNSYCTGLAGIEAAEASADLMKANMARKEAAEDEPVQQEEKRLATWGTDVPQDLVLD

SEQ ID NO: 97700 - protein, 535 aa, Setaria italica
  Transcript Sequence Number=SeqID_31726
  Gene Ontology: Mol. function=nucleic acid binding; Cellular component= spliceosome; Biological process=mRNA processing
  Homolog annotation: Hit_ID=Q6ZK48; Match level="QueryCoverage=99%, HitCoverage=99%, E-value=0.0, Identity=85%"; Hit description=Pre -mRNA-splicing factor SLU7
  Pfam annotation: Domain name=zf-CCHC; Domain location=94-111; Score =5.6; E_value=0.084; Accession=PF00098.15; Description=Zinc knuckle
MATASVTFKSREDHRKQLELEEARKAGLAPAEVDEDGNEINPHIPQYMSSAPWYLNAEKPSLKHQRKWKSDPNYTKSWYDRGAKLFQANKYRKGACENCGAMTHDKKSCMERPRNVGAKWTNINIAPDEKVESFELDYDGKRDRWNGYDPSTYTRVIADYEAREEARKKYLKEQQLKKLEEKDSEKDGENAGSEDDEEDGLRIDEAKVDESAQMDFAKVEKRVRTTGGGSTGTVRNLRIREDTAKYLLNLDVNSAYYDPKTRSMREDPLPDADPNDKFYVGDNQNRLSGQALEFKQLNIHSWEAFDKGQDIHMQAAPSQAELLYKSFKIKKEMLKSEHKDKIMEKYGNAASEDTMPRELLLGQSEKEIEYDRTGRIIKGQDVSLPKSKYEEDIFINNHTTVWGSWWKDHQWGYKCCKQTIKNSYCTGLAGIEAAEASADLMKANMARKEAAEDEPVQQEEKRLATWGTDVPQDLVLDKKLLEESLKKENARRKEEKDERKRKYNVKWNDEVTAEDMEAYRMKRIHHDDPMRDFLS

SEQ ID NO: 97701 - protein, 384 aa, Setaria italica
  Transcript Sequence Number=SeqID_31727
  Gene Ontology: Mol. function=electron carrier activity; Biological process=response to oxidative stress
  Homolog annotation: Hit_ID=B6U0D4; Match level="QueryCoverage=86%, HitCoverage=90%, E-value=1e-145, Identity=77%"; Hit description =Peroxidase 2
  Pfam annotation: Domain name=peroxidase; Domain location=68-315; Score=370.6; E_value=2.9e-108; Accession=PF00141.15; Description =Peroxidase
IVWFEQTAVSADSAILARPEFSRMRMGGSLAGPVALVAAVCLLLPAASLAQLQVGFYNTSCPNAEALVRQAVTAAFANNSGIAPGLIRLHFHDCFVRGCDASVLLKVNPGGGSTERDAPPNNPSLRGFEVIDAAKAAVERSCPRTVSCADILAFAARDSVNLTGSNAFYQVPAGRRDGNISTQDDALDNLPGPNSTAHNLTDGFGRKGLSAEDMVVLSGSHTIGRSHCDSFLFKNRERLASGTISPAYQALLEALCPPTTGQFTPNTTEIDLSTPTVLDNNYYKLLPLNLGLHFSDDQLIRNATLATLANSFAANETLWKEKFLAAMIKMGNIEVKTGSQGEVRLNCSVVNPASSSSSSEIEMLMFPGGTTSDDAPAEDVVATS

SEQ ID NO: 97702 - protein, 32 aa, Setaria italica
  Transcript Sequence Number=SeqID_31728
LGCCGRITCIRIYQMAVLLRTYELPGSHTHTC

SEQ ID NO: 97703 - protein, 92 aa, Setaria italica
  Transcript Sequence Number=SeqID_31729
MEVDGEAQPFRLFSSRAKTKPKLKPEPEVRTRPEPRSPDTGAVEADHADSDPAPTIVTETGQADDAEAAAGAAPATFSDLGLSQWLVDACSA

SEQ ID NO: 97704 - protein, 61 aa, Setaria italica
  misc_feature (22)..(22): Xaa can be any naturally occurring amino acid
  Transcript Sequence Number=SeqID_31730
  Gene Ontology: Mol. function=protein binding; Cellular component =cytoplasm; Biological process=multicellular organismal development
  Homolog annotation: Hit_ID=A8WES8; Match level="QueryCoverage=100%, HitCoverage=33%, E-value=7e-26, Identity=91%"; Hit description=ZCN17
HRFVFILFRQSVRQTTYAPGWXRSNFNTRDFAAIYNLGAPVAAVYFNCQRENGCGGRRYIR

SEQ ID NO: 97705 - protein, 57 aa, Setaria italica
  Transcript Sequence Number=SeqID_31731
  Gene Ontology: Mol. function=structural constituent of ribosome; Cellular component=ribonucleoprotein complex; Biological process =translation
  Homolog annotation: Hit_ID=Q0DHP9; Match level="QueryCoverage=100%, HitCoverage=100%, E-value=5e-25, Identity=100%"; Hit description=50S ribosomal protein L33
  Pfam annotation: Domain name=Ribosomal_L33; Domain location=8-55; Score=44.2; E_value=5.3e-10; Accession=PF00471.12; Description =Ribosomal protein L33
MGKAKRASIFIRLVSAAGTGFFYVKRKNPRRITEKLEFRKYDPRVNKHVLFTEAKMK

SEQ ID NO: 97706 - protein, 253 aa, Setaria italica
  misc_feature (236)..(236): Xaa can be any naturally occurring amino acid
  Transcript Sequence Number=SeqID_31732
  Gene Ontology: Cellular component=nucleus; Biological process =multicellular organismal development
  Homolog annotation: Hit_ID=Q9FZ64; Match level="QueryCoverage=98%, HitCoverage=39%, E-value=3e-50, Identity=42%"; Hit description =F11A6.3 protein
GDAPGDMINKGNDCSEETETSCSFDRHVSRIITNEEVKELIKHNSKFKWEMPAVDIPRSKWVGTGEKMQEACDDHLHDVKGKLSNHWKHTLADHLNSRMGFFSLCNSYRDIMHCNKKPFYQKSNGVDSSIMDAYLMHALNHVHRTRDVVIRNDAKLRNDADRDISDDNTYLDQGFTRPKVLFLLPLKSFARRIVKRLIQLSPLQQKNAMGQFKKEFGESDDEMPEHSTKPADFDLXFAGDIDDHFLFGIKLTK

SEQ ID NO: 97707 - protein, 275 aa, Setaria italica
  Transcript Sequence Number=SeqID_31733
  Gene Ontology: Mol. function=oxidoreductase activity; Cellular component=plasma membrane
  Homolog annotation: Hit_ID=B9SMX2; Match level="QueryCoverage=81%, HitCoverage=47%, E-value=9e-43, Identity=40%"; Hit description=Zinc binding dehydrogenase, putative
VEPFMFVILKAISHLTEEVQNARALVNGHLFSEDINISTEGPHQVDFLVPFKNAVPVEECSLDGVAGLLRFAGSVSAFAYLGPKESVSEAISDLKADIITSIRSRLDIILDDADDGSVTNELEQSPSQKATQVVFHELRESYSFSFPRRVLIPWLSGAYVCDYLQRSETTEDATDRCKEVIPLETAAETSTILEPESAATCGTLESFWDMVPGARSEARDGSSRLKGSGCTGQDGDDRSRRGQGGMNLNVLAALFALLVALIAGFVFTFSVGSNP

SEQ ID NO: 97708 - protein, 69 aa, Setaria italica
  misc_feature (56)..(56): Xaa can be any naturally occurring amino acid
  Transcript Sequence Number=SeqID_31734
  Gene Ontology: Mol. function=nucleic acid binding; Cellular component= nucleus; Biological process=mRNA processing
  Homolog annotation: Hit_ID=Q7XWP1; Match level="QueryCoverage=100%, HitCoverage=4%, E-value=3e-19, Identity=67%"; Hit description =Probable cleavage and polyadenylation specificity factor subunit 1
MSYAAYKMMHWPTGIDHCAAGFITYSPAEAVTFSSPAPATSRPDGDVDSAAARAPXRVGPTPNLVVAAA

SEQ ID NO: 97709 - protein, 42 aa, Setaria italica
  Transcript Sequence Number=SeqID_31735
KMIVHMFHGFFIRISVYIVYEFFLFTFQYYLHLFREILIKKP

SEQ ID NO: 97710 - protein, 62 aa, Setaria italica
  misc_feature (7)..(7): Xaa can be any naturally occurring amino acid
  Transcript Sequence Number=SeqID_31736
  Gene Ontology: Mol. function=zinc ion binding; Cellular component =intracellular; Biological process=ubiquitin-dependent protein catabolic process
  Homolog annotation: Hit_ID=B9STM3; Match level="QueryCoverage=98%, HitCoverage=10%, E-value=1e-20, Identity=78%"; Hit description =Ubiquitin fusion degradaton protein, putative
DRFCGDXTVHAGGEPLDARDRLRNMCEHESICGSRTAPCDSCGRSVMLKEMDIHHIAVHQKS

SEQ ID NO: 97711 - protein, 471 aa, Setaria italica
  Transcript Sequence Number=SeqID_31737
  Gene Ontology: Mol. function=zinc ion binding; Cellular component =intracellular; Biological process=ubiquitin-dependent protein catabolic process
  Homolog annotation: Hit_ID=B9STM3; Match level="QueryCoverage=97%, HitCoverage=80%, E-value=1e-171, Identity=61%"; Hit description =Ubiquitin fusion degradaton protein, putative
  Pfam annotation: Domain name=PPC; Domain location=182-267; Score =20.9; E_value=0.0052; Accession=PF04151.7; Description=Bacterial pre- peptidase C-terminal domain
  Pfam annotation: Domain name=UFD1; Domain location=1-152; Score =138.9; E_value=1.6e-38; Accession=PF03152.6; Description=Ubiquitin fusion degradation protein UFD1
  Pfam annotation: Domain name=zf-C2H2; Domain location=349-371; Score =17.5; E_value=0.056; Accession=PF00096.18; Description=Zinc finger, C2H2 type
  Pfam annotation: Domain name=zf-C2H2; Domain location=374-395; Score =0.3; E_value=11; Accession=PF00096.18; Description=Zinc finger, C2H2 type
  Pfam annotation: Domain name=zf-TRAF; Domain location=320-366; Score =4.8; E_value=0.02; Accession=PF02176.10; Description=TRAF-type zinc finger
  Pfam annotation: Domain name=zf-TRAF; Domain location=371-414; Score =3.4; E_value=0.029; Accession=PF02176.10; Description=TRAF-type zinc finger
  Pfam module annotation: Pfam domain module=PPC::UFD1::zf-C2H2::zf -C2H2::zf-TRAF::zf-TRAF; Domain location=182-267::1-152::349-371::374- 395::320-366::371-414
RGVWIKGPMYFRLSKVRDTVPGAAMKQDTEEATCCGVLEFTAREGSAELPLHVWNSLFRSDTPDVPLIEVKYVSLPKGTYAKLKPEGAGFSDLPNHRAVLETALRNHATLSENDIVVVNYGQLQYKLKVLELKPASSVSVLETDIEVDIEGSDSVLDNEENQHVLVPLAIGKVESSVVEEGKFRYYKFTVEESESEKVASGRANIEVKIDTDASGGDTDIYVSRHPLVFPTQHRHEWSSHEMGSKVLILKPRDSSLVSGVYSIGVYGFKGTSKYQLSVAIKDVNSQRVGEHASSSGSVDADSVLCRNCKRHIASRSAHLHEAYCMRHNVACPHDGCGVVLRKEEAADHVHCNKCGRAFQQREMEKHMKVFHEPLQCPCGVVLEKEDMVQHQSSTCPLRLIVCRFCGDTVHAGGEPLDARDRLRNMCEHESICGSRTAPCDSCGRSVMLKEMDIHHYSSCFYFLVKLVLYYL

SEQ ID NO: 97712 - protein, 76 aa, Setaria italica
  Transcript Sequence Number=SeqID_31738
MAPVLEHLFEHASPQSLALVFLLFVVAVRLATPKSRSEKLLSKLPSPPFKLPIIGHLHLIGSLPHHSLRDLAKRHG

SEQ ID NO: 97713 - protein, 106 aa, Setaria italica
  misc_feature (58)..(58): Xaa can be any naturally occurring amino acid
  Transcript Sequence Number=SeqID_31739
  Gene Ontology: Mol. function=catalytic activity; Biological process =metabolic process
  Homolog annotation: Hit_ID=Q942T8; Match level="QueryCoverage=81%, HitCoverage=56%, E-value=3e-39, Identity=86%"; Hit description =P0560B06.4 protein
LTNVPKYSIIYSNLVFLFIEDAASLAIAIMKKQLRSRIFLGCDNKPLSRQEIMDAVNXSGKFDTKFEGFTGTDGPLGKRMENSKTRAEIGWEPTYPSFTEFLGLSS

SEQ ID NO: 97714 - protein, 242 aa, Setaria italica
  Transcript Sequence Number=SeqID_31740
  Gene Ontology: Mol. function=catalytic activity; Biological process =metabolic process
  Subcellular localization annotation: CTP_CleavageSite=66; ConfidenceScore=5.69e-01
MRVAAAASFHLAPATNRPHRRASATTSCSLKPAPTARPSRPLTLVRRAPVARASLGISHDKGSEVSGADVVGQNDLLIVGPGVLGRIVAEKWQKEHPGCKVYGQTASTNHHSELMDLGIIPSLKGSTISQKVPHVIFCAPPSGSDDYPGDVRVAASNWSGEGSFLFTSSTALYDCSDNMMCNEDCPSVPIGRSPRTDVLLKVEKCCSRVRRTENYAKMLTAETKEFSEAWIRRLPPDLSPSF

SEQ ID NO: 97715 - protein, 181 aa, Setaria italica
  misc_feature (153)..(153): Xaa can be any naturally occurring amino acid
  Transcript Sequence Number=SeqID_31741
  Gene Ontology: Mol. function=catalytic activity; Biological process =metabolic process
  Homolog annotation: Hit_ID=Q942T8; Match level="QueryCoverage=81%, HitCoverage=80%, E-value=6e-44, Identity=61%"; Hit description =P0560B06.4 protein
GNVRVAASNWSGEGSFLFTSSTALYDCSDNMMCNEDCPSVPIGRSPRTDVLLKVENVVLEAGGCVLRLAGLYKIDRGAHVFWLRKGTLDTRPDHIINQIHYEDAASLAIAIMKKQLRSRIFLGCDNKPLSRQEIMDAVNRSGKFDTKFEGFTXRMENSKTRAEIGWEPTYPSFTEFLGLSS

SEQ ID NO: 97716 - protein, 107 aa, Setaria italica
  misc_feature (84)..(84): Xaa can be any naturally occurring amino acid
  Transcript Sequence Number=SeqID_31742
  Gene Ontology: Mol. function=single-stranded DNA binding
SSSTFKVTLQLMGQLANVGLKYLKHNDLVYVSGFLKFYHKVSPSGERNIFYQIHVTELNYVLDQNKKPQDDEDSVHPSPMLSAXPPQMLKEKRHIDQLHLWQVFFAN

SEQ ID NO: 97717 - protein, 145 aa, Setaria italica
  misc_feature (71)..(71): Xaa can be any naturally occurring amino acid
  Transcript Sequence Number=SeqID_31743
  Gene Ontology: Mol. function=single-stranded DNA binding; Biological process=DNA replication
  Homolog annotation: Hit_ID=Q9FZE9; Match level="QueryCoverage=70%, HitCoverage=40%, E-value=4e-16, Identity=41%"; Hit description =T2E6.21
FETHIFQIHVTELNYVLDQNKKPQDDEDSVHPSPMLSATPQMLKEKRHIDQLHLWQVFFANPYEWWDNRQXKPWANYPDFKHKDTREKIWLQPDDPPWVRKQLELHDLEVAKNGHKGNGRLLKNHDWKAEDFDYDDDEVQHSAEA

SEQ ID NO: 97718 - protein, 66 aa, Setaria italica
  Transcript Sequence Number=SeqID_31744
  Gene Ontology: Mol. function=electron carrier activity; Biological process=response to oxidative stress
  Homolog annotation: Hit_ID=B6SNF9; Match level="QueryCoverage=100%, HitCoverage=20%, E-value=6e-28, Identity=90%"; Hit description =Peroxidase 52
LVAQRGLLHSDQELFNGGPADALVRKYSGNAGMFANDFAKAMVKMGGLMPAAGTPTEVRLNCRKVN

SEQ ID NO: 97719 - protein, 39 aa, Setaria italica
  Transcript Sequence Number=SeqID_31745
FEISNICVLIHHTECQVKVDSLSKFRTYIYIQTGSRVKL

SEQ ID NO: 97720 - protein, 102 aa, Setaria italica
  Transcript Sequence Number=SeqID_31746
  Gene Ontology: Mol. function=nucleotidyltransferase activity
IAWDSFSFCLGESGSFVADKSCECTRQSFFRKNRACSIDIANILSCSKKPIFAKELTRLKLVEEIVCLKNNITCCGDDAIFFTSLALAPTAAGEILMKLRGL

SEQ ID NO: 97721 - protein, 315 aa, Setaria italica
  Transcript Sequence Number=SeqID_31747
  Homolog annotation: Hit_ID=B9S647; Match level="QueryCoverage=95%, HitCoverage=60%, E-value=1e-41, Identity=37%"; Hit description=F -box/LRR-repeat protein, putative
GVLVRLGKRSCSLCGIRSGDRGLGWLWRRCGSLKWLQLRACDGTGDGPASLAFAGCLAGLLALELRACRSVADRVLLLAADHCHALTSLLVYDGGSSEALHRFIQQRAAGLHTLDLRLPLDLHNDHLLAIGAEPIHGGRDPKHSLVALRLQSCVLITGDGLRSLARTATGASIEELALVSCDVVEREPGLLTFLSQSMRRLRRLDLSYNETLSDKVIGAMLSSCRNLIDIRLRGCRGLTGGSLVSLLRHCGQSLEILDLSRCPSIAVGNVELFAQRATRLNHMIIEESVISEELKAIAQKKGLKIGSLLPCEGPF

SEQ ID NO: 97722 - protein, 108 aa, Setaria italica
  Transcript Sequence Number=SeqID_31748
  Subcellular localization annotation: CTP_CleavageSite=70; ConfidenceScore=5.34e-01
WDGAGKGGPSRTAPMAGLSLSSASETSAPRTPRFQIKGEGLAGVGYPWKTGMQRRRAAGFSKRRKGGVASAAAGAASRILTERGEERWPPSWTEGWRRQVRQKVSVKG

SEQ ID NO: 97723 - protein, 66 aa, Setaria italica
  Transcript Sequence Number=SeqID_31749
HLIACCIFISFLFIYPHRWLLLGFISKKSTSLEAKGFALLFVVVFPYPKVQNIWLQNHSSVLIESF

SEQ ID NO: 97724 - protein, 55 aa, Setaria italica
  misc_feature (8)..(8): Xaa can be any naturally occurring amino acid
  Transcript Sequence Number=SeqID_31750
TALQCLVXAFSTFPRSKVFPMRRKVLQAAIKALDDRKGLFVKRLVRCRQTWQSFA

SEQ ID NO: 97725 - protein, 90 aa, Setaria italica
  misc_feature (7)..(7): Xaa can be any naturally occurring amino acid
  Transcript Sequence Number=SeqID_31751
  Gene Ontology: Mol. function=binding
  Homolog annotation: Hit_ID=B9RQE4; Match level="QueryCoverage=100%, HitCoverage=7%, E-value=1e-26, Identity=61%"; Hit description=DNA repair/transcription protein met18/mms19, putative
LMDEKGXKKCILDNVHITISVLTQLVSYPHMMVVRETALQCLVAFSTFPHSKVFPMRRKVLQAAIKALDDKKRAVRQEAVRCRQTWQSFA

SEQ ID NO: 97726 - protein, 89 aa, Setaria italica
  misc_feature (89)..(89): Xaa can be any naturally occurring amino acid
  Transcript Sequence Number=SeqID_31752
  Subcellular localization annotation: CTP_CleavageSite=43; ConfidenceScore=5.42e-01
EDAPAPPCALPRPKASATKPSVTLDHSPLRRQLCPLPPVPFPGCEARRSRLGSGRLGYLPVMGMGSRRRPCVGGGDLLAVAVLLLSCLX

SEQ ID NO: 97727 - protein, 144 aa, Setaria italica
  Transcript Sequence Number=SeqID_31753
  Subcellular localization annotation: CTP_CleavageSite=64; ConfidenceScore=5.60e-01
TTGRNPAQADTSQRRQRHAPRGDARGPPLPRSLTSSPHPSTSPSSCRPSPPGDRDPKPQRPASRCSTAGPHGLLTPGLQIPRGVQIKSGSGIARVESTHKARSKSRPPAPAPLLFALPFPNLPFSSPSLGLTHLSSFPNSITSC

SEQ ID NO: 97728 - protein, 105 aa, Setaria italica
  Transcript Sequence Number=SeqID_31754
  Subcellular localization annotation: CTP_CleavageSite=57; ConfidenceScore=5.05e-01
WAGGRVKVVVLDYRVSRCLVVGGVGSSNRRCAWDGPRRRGTRTERRRRRRRRRKDGRAAGEVERGGGGWRPVAIASETERRGKLLATSSGEARQATDRTEEGDDG

SEQ ID NO: 97729 - protein, 100 aa, Setaria italica
  Transcript Sequence Number=SeqID_31755
  Subcellular localization annotation: CTP_CleavageSite=35; ConfidenceScore=5.02e-01
EAFRKQTIFHPVSIRKHISMSIMPTCQEKNSGKVNAASGRTVCTQLFIWEASSCLTQRTWYLSLAFSLSNGIESKLHSSSEQQEEGLLVLNYLFRKHPAA

SEQ ID NO: 97730 - protein, 71 aa, Setaria italica
  Transcript Sequence Number=SeqID_31756
  Homolog annotation: Hit_ID=Q5JMX2; Match level="QueryCoverage=91%, HitCoverage=12%, E-value=2e-20, Identity=75%"; Hit description =Putative vascular plant one zinc finger protein
MGKGPSSRAASRHQQFRARAKTRVDDLQEMFSGLQSARKDSRPADAAVLEAQLQQMLREWRSELSAPSPAS

SEQ ID NO: 97731 - protein, 201 aa, Setaria italica
  misc_feature (85)..(85): Xaa can be any naturally occurring amino acid
  misc_feature (163)..(163): Xaa can be any naturally occurring amino acid
  Transcript Sequence Number=SeqID_31757
  Gene Ontology: Mol. function=protein serine/threonine kinase activity; Cellular component=plasma membrane; Biological process =protein amino acid phosphorylation
  Homolog annotation: Hit_ID=B6SYS4; Match level="QueryCoverage=99%, HitCoverage=27%, E-value=1e-88, Identity=78%"; Hit description=ATP binding protein
  Pfam annotation: Domain name=Pkinase; Domain location=4-185; Score =0.8; E_value=1.5e-08; Accession=PF00069.17; Description=Protein kinase domain
EHLFIVTELLRANLYEFQKYNQESGDELYFSLPRIQAIARQCLEALVFLHHLNIVHCDLKPENILLKSYSRCEIKVIDLGSSCFXSDNLNLYIQSRSYRSPEVILGLPYDQKIDVWSLGCILAELYTGEVLFPNESVPIILARMIGTIGPIDTEMLALGHGHXEVLQMTMTLSTKNEETGQLEYLIPEKSSLKRHLQCPDK

SEQ ID NO: 97732 - protein, 125 aa, Setaria italica
  Transcript Sequence Number=SeqID_31758
  Gene Ontology: Mol. function=protein serine/threonine kinase activity; Cellular component=plasma membrane; Biological process =protein amino acid phosphorylation
  Homolog annotation: Hit_ID=B6SYS4; Match level="QueryCoverage=92%, HitCoverage=15%, E-value=8e-43, Identity=72%"; Hit description=ATP binding protein
MFCFLKEVICDCNPFNMSQVLFPNESVPIILARMIGTIGPIDTEMLALGQETQKYFTDDHDLFHKNEETGQLEYLIPEKSSLKRHLQCPDKKFVDFLSYLLQINPKKRPTAIEALQHRWLSVVYS

SEQ ID NO: 97733 - protein, 378 aa, Setaria italica
  misc_feature (14)..(14): Xaa can be any naturally occurring amino acid
  Transcript Sequence Number=SeqID_31759
  Gene Ontology: Mol. function=hydrolase activity; Cellular component =membrane
  Homolog annotation: Hit_ID=B6U217; Match level="QueryCoverage=99%, HitCoverage=68%, E-value=0.0, Identity=92%"; Hit description=LrgB -like family protein
  Pfam annotation: Domain name=LrgA; Domain location=3-79; Score=-33.8; E_value=0.032; Accession=PF03788.6; Description=LrgA family
  Pfam annotation: Domain name=LrgB; Domain location=142-373; Score =38.0; E_value=1e-11; Accession=PF04172.8; Description=LrgB-like family
  Pfam module annotation: Pfam domain module=LrgA::LrgB; Domain location=3-79::142-373
SPSLVVFDTFVPRXRQGFMDFFEPATLFIQRWLPLFYVPSLVVLPLAVRDVPAASGIKILTITFGGWFASLAVAGYTALAVRKLVKTQLIPAEPMSKPSPFSTFETWAWAAIFVASFGVAYFNPTALGTTARTCLPFLLAATVLGYMVGSGLPAGVKKVLHPIISCALSADLAAVAYGYLSGSGLNAVLGDYLTKAPSNPGAGDVLMGFLGSVIISFAFSMFKQRKLVKRHAAEIFTSIAIASTFSLYSTAILGRLIGLEPSLTVSILPRCITVALALSIVSFFEGVNSSLTAAVVVLTGLIGANFVQAAMDKLGLNDPIARGLGTASSAHGLGTAALSAKEPEALPFCAIAYGLTGIFGSLICSVPAVRQSLIFIAG

SEQ ID NO: 97734 - protein, 49 aa, Setaria italica
  Transcript Sequence Number=SeqID_31760
  Pfam annotation: Domain name=DUF640; Domain location=1-49; Score= -24.2; E_value=0.043; Accession=PF04852.4; Description=Protein of unknown function (DUF640)
MQGGAAAGDAPRPSRYESQKRRDWHTFGQYLRNHRPPLELSRCSGAHVL

SEQ ID NO: 97735 - protein, 116 aa, Setaria italica
  misc_feature (31)..(31): Xaa can be any naturally occurring amino acid
  Transcript Sequence Number=SeqID_31761
  Homolog annotation: Hit_ID=O65250; Match level="QueryCoverage=93%, HitCoverage=26%, E-value=5e-35, Identity=59%"; Hit description =F21E10.11 protein
  Pfam annotation: Domain name=PAE; Domain location=1-97; Score=-150.5; E_value=1.9e-06; Accession=PF03283.5; Description=Pectinacetylesterase
  Subcellular localization annotation: CTP_CleavageSite=40; ConfidenceScore=5.26e-01
AVFKAADPQGLWSKCRTNHAFCNSNQLQFLXRNEMLDSVRGFSASRQNGVFINSCFAHCQSERQDTWYASNSPRLGNKRIAEAVGDWYFQRGDAKYTDCAYPCDNTCHHLVFRGDH

SEQ ID NO: 97736 - protein, 120 aa, Setaria italica
  Transcript Sequence Number=SeqID_31762
  Gene Ontology: Cellular component=cell wall
  Homolog annotation: Hit_ID=O65250; Match level="QueryCoverage=75%, HitCoverage=21%, E-value=9e-30, Identity=64%"; Hit description =F21E10.11 protein
  Pfam annotation: Domain name=PAE; Domain location=32-120; Score= -120.6; E_value=2.6e-08; Accession=PF03283.5; Description =Pectinacetylesterase
MASRLVAVILAFLVGAGASAAHGSEPWLNETQVYGTTASSGGSNGVFVGLTLIQSAAAKGAVCLDGSLPGYHLHRGFGSGANSWLVNLEGGGWCNDVSSCVFRKGSRRGSSNHMERQLQF

SEQ ID NO: 97737 - protein, 364 aa, Setaria italica
  Transcript Sequence Number=SeqID_31763
  Homolog annotation: Hit_ID=O65250; Match level="QueryCoverage=96%, HitCoverage=84%, E-value=1e-136, Identity=61%"; Hit description =F21E10.11 protein
  Pfam annotation: Domain name=PAE; Domain location=1-345; Score=766.9; E_value=1.5e-227; Accession=PF03283.5; Description=Pectinacetylesteras e
VDAYFVLYYLTVCLDGSLPGYHLHRGFGSGANSWLVNLEGGGWCNDVSSCVFRKGSRRGSSNHMERQLQFTGIMSNRPEENPDFYNWNRVKVRYCDGGSFTGDGSNAAAGLYFRGQRIWQAAMDDLMAQGMRYANQALLAGCSAGGVSTILHCDEFRGLFPSNTRVKCLADAGMFLDTIDVSGHREMRSFFNGIVRLQGSGRSLPRSCTSRMDKTSCFFPQNVVPNIQTPTFILNTAYDVWQLQQSVAPKAADPQGLWSKCRTNHAFCNSNQLQFLQGFRNEMLDSVRGFSASRQNGVFINSCFAHCQSERQDTWYASNSPRLGNKRIAEAVGDWYFQRGDAKYTDCAYPCDNTCHHLVFRGDH

SEQ ID NO: 97738 - protein, 190 aa, Setaria italica
  Transcript Sequence Number=SeqID_31764
  Homolog annotation: Hit_ID=Q9LPT5; Match level="QueryCoverage=100%, HitCoverage=26%, E-value=5e-44, Identity=49%"; Hit description =F11F12.2 protein
REHKKVRAILEDMKADLEHEKKNRRQLETINFKLVDELKEVKMAAKQLLQEYDNEQKTRELTEEVCNKLVREIEEHKSEIEALKQDSVKLRGELDEDRKLLQMAEVWREERVQMKLVDAKLTLEAKYDQLSKLQEDVEAFISTFSSSKEDSTVVETACNIVQAIGAVRNEEVEFTYEPPRASEDILSIFE

SEQ ID NO: 97739 - protein, 289 aa, Setaria italica
  Transcript Sequence Number=SeqID_31765
  Gene Ontology: Cellular component=membrane; Biological process =embryonic development ending in birth or egg hatching
  Homolog annotation: Hit_ID=Q9M586; Match level="QueryCoverage=81%, HitCoverage=81%, E-value=1e-125, Identity=92%"; Hit description =Prohibitin
  Pfam annotation: Domain name=Band_7; Domain location=38-217; Score =130.6; E_value=4.8e-36; Accession=PF01145.17; Description=SPFH domain  Band 7 family
MNVKGGGRIPAPPPGASALLKVAVFGGAAVYAAMNSLYNVEGGHRAIVFNRIQGIKDKVYPEGTHFMIPWFERPIIYDVRARPNLVESTSGSRDLQMVKIGLRVLTRPMPERLPHIYRTLGENFNERVLPSIIHETLKAVVAQYNASQLITQRETVSREIRKILTERARNFSIALDDVSITSLSFGKEFTHAIEAKQVAAQEAERAKFIVEKAEQDKRSAIIRAQGEAKSAELIGQAIANNPAFLALRQIEAAREISHTIAASANKVFLDSNDLLLNLQQLNVSKQQKK

SEQ ID NO: 97740 - protein, 468 aa, Setaria italica
  misc_feature (101)..(101): Xaa can be any naturally occurring amino acid
  misc_feature (128)..(128): Xaa can be any naturally occurring amino acid
  Transcript Sequence Number=SeqID_31766
  Gene Ontology: Mol. function=amino-acid N-acetyltransferase activity; Cellular component=cytoplasm; Biological process=amino acid biosynthetic process
  Homolog annotation: Hit_ID=Q8H5K9; Match level="QueryCoverage=82%, HitCoverage=66%, E-value=0.0, Identity=84%"; Hit description=Amino acid acetyltransferase(N-acetylglutamate synthase)-like protein
  Pfam annotation: Domain name=Acetyltransf_1; Domain location=351-425; Score=59.2; E_value=1.6e-14; Accession=PF00583.16; Description =Acetyltransferase (GNAT) family
MCSDYDKLLSERGKKAKYVGQYRITDSDSLEAAMEAAGRIRLTIEAKLSPGPPMLNLRRHGVIGRWHGLVDNVASGNFLGAKRRGVVNGIDYGFTGEVKKXDVSWIRERLDSDSIVVVSNMGYSSSGXVLNCNTYEVATACALAMEADKLVCVVDGQIFDEHGRVIHFMSIEEADLLIRKRAKQSDIAANYVKVVDEEGINSLQKGDYKPSLNSRAHVNGYAAAFQNGLGFNNGNGIYSGEQGFAIGGEEQLSRSNGYLSELAAAAYVCHGGVQRVHIIDGTVDGSLLLELFTRDGAGTMIARDVYEGTRMATAEDLHGIRKIIRPLEDSGVFVRRTDAELLDALNSFYVVERDGSIIACAALFPFPEDKSGEVAAIAVSEECRGRGQGDKLLDYVEKVALSLGLEKLFLLTTRTADWFVRRGFSECSIDSIPEQRRKRINLSRGSKYYIKQLQPKHAGVTTNNFIIR

SEQ ID NO: 97741 - protein, 234 aa, Setaria italica
  Transcript Sequence Number=SeqID_31767
  Gene Ontology: Mol. function=transporter activity; Cellular component= membrane; Biological process=transport
  Homolog annotation: Hit_ID=B6U234; Match level="QueryCoverage=100%, HitCoverage=44%, E-value=1e-96, Identity=73%"; Hit description =Permease
  Pfam annotation: Domain name=Xan_ur_permease; Domain location=1-232; Score=-79.9; E_value=4.5e-05; Accession=PF00860.12; Description =Permease family
QICHFRILERFSVLISIAVVWAYAHILTVSGAHKHASLRTQLNCRTDHANLMTTAPWIGVPYPLQWGAPTFSADHSFGMMSAVLVSLIESTGAFMAAARLASATPPPPFVLSRGIGWQGIGLLFDGLFGTVSGSTVSVENVGLLGSTRIGSRRVIQISAGFMIFFSILGRFGALFASIPFTLFAAIYCVLFGYVGAVGLSFMQFTNMNSMRNLFIIGISLFLGISIPEYFFQFT

SEQ ID NO: 97742 - protein, 212 aa, Setaria italica
  Transcript Sequence Number=SeqID_31768
  Gene Ontology: Mol. function=transcription regulator activity; Cellular component=nucleus; Biological process=regulation of transcription
SREPEPSKESHRMPVPGPATRPEPPQAEFAATKQTRLGGGAEGLMNFSLFSRPAAMARASLQSAQRPPQTGTDKASNVTTSTRVESTVLQSSIGPRTTPVFTDQRTAWSQPKEVRFSCTAAPTAGNLQQEMPRDRLGSMTLQKQVKTRKEPEAAVATSSVCSGNGAGIGNDESWRQHKRKSQAECSASQDDDLEDESGGARRSGSRGTKRSR

SEQ ID NO: 97743 - protein, 54 aa, Setaria italica
  Transcript Sequence Number=SeqID_31769
  Gene Ontology: Mol. function=ubiquitin-protein ligase activity; Cellular component=ubiquitin ligase complex; Biological process =ubiquitin-dependent protein catabolic process
AEEVAADQTVASALVEAYRNGDARTRHTAERALRHLDRIPNFSTAFHQAKARGA

SEQ ID NO: 97744 - protein, 62 aa, Setaria italica
  Transcript Sequence Number=SeqID_31770
HVTTQLGFSLAELSYGLIGKFTQMVYQQMEIYRVLSHGQLGLQTPWRGKINIKPAEHVMQIV

SEQ ID NO: 97745 - protein, 67 aa, Setaria italica
  Transcript Sequence Number=SeqID_31771
NAFYCLDNSILDLFSLTAMKLDAECHLAPVITGHHHQYDMPRSHETVPSISHSPSVRVAPATSITKC

SEQ ID NO: 97746 - protein, 55 aa, Setaria italica
  Transcript Sequence Number=SeqID_31772
MWKFCSVSLIFFPQRNKRIFDILLSHLKHAHSSSSCRAFGKRTKHTLSLHPKQWR

SEQ ID NO: 97747 - protein, 136 aa, Setaria italica
  Transcript Sequence Number=SeqID_31773
  Gene Ontology: Mol. function=DNA topoisomerase type I activity; Cellular component=chromosome; Biological process=DNA unwinding during replication
  Homolog annotation: Hit_ID=B9G4E5; Match level="QueryCoverage=100%, HitCoverage=18%, E-value=7e-71, Identity=91%"; Hit description=DNA topoisomerase
DHPPITPMRSATEEALGTDAWRLYQYISQHFIGTVSPDCRYTRTAIEFTSGGETFHCVGYRVTHKGFTSIMPWLSVSENSLPAFRKGDSVSIHKVDIYEGSTTPPDYLSESELISLMEKNGIGTDASIPVHINNIC

SEQ ID NO: 97748 - protein, 102 aa, Setaria italica
  misc_feature (85)..(85): Xaa can be any naturally occurring amino acid
  Transcript Sequence Number=SeqID_31774
MEGKQLSAVAPAVAAASMHEEDATRPMEQLKVEAIASTETEQQRGWMRGTTALAWTQWASIKSKARTAGEYTILRTRQGISMFGXPKLGPLVKAAAASDESQ

SEQ ID NO: 97749 - protein, 154 aa, Setaria italica
  misc_feature (17)..(17): Xaa can be any naturally occurring amino acid
  misc_feature (32)..(32): Xaa can be any naturally occurring amino acid
  misc_feature (51)..(51): Xaa can be any naturally occurring amino acid
  Transcript Sequence Number=SeqID_31775
  Gene Ontology: Mol. function=nuclease activity; Cellular component =Mre11 complex; Biological process=response to DNA damage stimulus
  Homolog annotation: Hit_ID=A8IE00; Match level="QueryCoverage=98%, HitCoverage=11%, E-value=7e-33, Identity=51%"; Hit description=DNA repair protein Rad50
WHTAREEKIKASNTLGXFQKAEEELVRLAEEXEQLAVEKKLLEESLDPLSXKEKDSLLQEYNALKQRFDEEYHRMAERKRDFQQELDALGRLNMKIKEYLDSKRAERLNDLQEIHSLKQSELQNCEAKKQGISDELNKSKELLQGQGQLEKKHK

SEQ ID NO: 97750 - protein, 215 aa, Setaria italica
  misc_feature (83)..(83): Xaa can be any naturally occurring amino acid
  Transcript Sequence Number=SeqID_31776
  Gene Ontology: Mol. function=nuclease activity; Cellular component =Mre11 complex; Biological process=response to DNA damage stimulus
  Homolog annotation: Hit_ID=A8IE00; Match level="QueryCoverage=92%, HitCoverage=15%, E-value=9e-61, Identity=61%"; Hit description=DNA repair protein Rad50
LYDLLGVLAQVKIDRDAVEALLQPTDAIDRHAREIQQLVGEVEDLEYKLDSCGQGVKSLEEIQQELNSVQRTRDTLSIEVDDXRDQHRMLNEDLASAQVRWHTAREEKIKASNTLGSFKKAEEELVRLAEEKEQLAVEKKLLEESLDPLSKEKDSLLQEYNALKQRFDEEYHRMAERKRDFQQELDALGRLNMKIKEYLISFHLSIPPPYRLSVT

SEQ ID NO: 97751 - protein, 140 aa, Setaria italica
  misc_feature (98)..(98): Xaa can be any naturally occurring amino acid
  Transcript Sequence Number=SeqID_31777
  Gene Ontology: Mol. function=protein tyrosine kinase activity; Cellular component=plasma membrane; Biological process=protein amino acid phosphorylation
  Homolog annotation: Hit_ID=B6V3C2; Match level="QueryCoverage=85%, HitCoverage=18%, E-value=1e-43, Identity=80%"; Hit description=PAN1
  Pfam annotation: Domain name=LRR_1; Domain location=2-24; Score=15.6; E_value=0.21; Accession=PF00560.25; Description=Leucine Rich Repeat
  Pfam annotation: Domain name=LRR_1; Domain location=51-72; Score=4.6; E_value=41; Accession=PF00560.25; Description=Leucine Rich Repeat
  Pfam module annotation: Pfam domain module=LRR_1::LRR_1; Domain location=2-24::51-72
VSLARLDLSSNQLNGSLPPAIAGLPRLSGVLNLSYNHFTGGIPPEYGGIPVAVSLDLRGNDLAGEIPQVGSLVNQGPTAFDGNPRLCGFPLKVECAGXVKDEPRIPEANSGMSDPGAAAEVGGGRRRRTVRTTVTVSTLI

SEQ ID NO: 97752 - protein, 122 aa, Setaria italica
  Transcript Sequence Number=SeqID_31778
  Subcellular localization annotation: CTP_CleavageSite=68; ConfidenceScore=5.14e-01
GSKHRLHCGLQTRSSRTKPGNELTHQYTTKCTPTAFRSVAHGLPLVSSKRTLPIKQAHRRLHRIPARRAAGEGDAQSRRGILAVPTARGRGRGAAPPITKACARRAARPRPPLWSSLASCQP

SEQ ID NO: 97753 - protein, 91 aa, Setaria italica
  Transcript Sequence Number=SeqID_31779
  Homolog annotation: Hit_ID=Q9SZP7; Match level="QueryCoverage=71%, HitCoverage=36%, E-value=1e-09, Identity=52%"; Hit description =Disease resistance response like protein
MRSPSLLLLAILLGAAVSLQSAADTPELLGAEKTTRLRFFLHDTLSGKDPSAVLVARGEGRTPKPEDPVPFSSLYATDDLLTEGPEPGSKV

SEQ ID NO: 97754 - protein, 190 aa, Setaria italica
  Transcript Sequence Number=SeqID_31780
YCGVEVSPYRADRIRERSAQEKTDNSKSVHPLLADKKPTKEQASSDKEEEDFSKTGTIGSVLIATVAFAAAFTVPGGVVADDRPGSGAAVMARRFAFRAFVVSDAMAFFCSIVATFCLIYGGTKEAPRAQRVLHKARASTLLPLSGLFTIAAFPFGFHLVLGNANRGLIVFLYMVSSASILSIPDIWNAP

SEQ ID NO: 97755 - protein, 55 aa, Setaria italica
  Transcript Sequence Number=SeqID_31781
GGGEGSRAARRHGMRTRKPLGFVGAVEEVMNGRGLIGRGVVLRRGVGRKPLLCPQ

SEQ ID NO: 97756 - protein, 114 aa, Setaria italica
  Transcript Sequence Number=SeqID_31782
MDVEEEKGGSLAPALQSSAEPGGLQTCHEANGGLFNKSLCAPCGEAVCPKDTGCMDDMLEEMADGNQGDWGGKATLEDLRIAWDEAQRSHEGLLGSMSHGSEQEARAVDGIGFI

SEQ ID NO: 97757 - protein, 367 aa, Setaria italica
  misc_feature (261)..(261): Xaa can be any naturally occurring amino acid
  misc_feature (357)..(357): Xaa can be any naturally occurring amino acid
  Transcript Sequence Number=SeqID_31783
  Gene Ontology: Mol. function=serine-type endopeptidase activity; Cellular component=cell wall; Biological process=negative regulation of catalytic activity
  Homolog annotation: Hit_ID=Q9AX30; Match level="QueryCoverage=95%, HitCoverage=44%, E-value=1e-165, Identity=81%"; Hit description =Subtilisin-like proteinase-like
  Pfam annotation: Domain name=PA; Domain location=61-164; Score=92.5; E_value=1.5e-24; Accession=PF02225.14; Description=PA domain
ARRGVVVSCSGGNSGPKPATVSNLAPWMLTVGASSIDRAFDSPIKLGNGVGIMGQTVTPFQLPGNKPYPMVYAADAVVPGTPANVSNQCLPNSLSADKVRGKIVVCLRGSGLRVGKGLEVKRAGGAAILLGNPPASGSEVPVDAHILPGTAVSAADAKTILGYINSSSSPTAVLVPSRTVVDVRPSPVMAQFSSRGPNVLEPNILKPDITAPGLNILAAWSEASSPTKLDGDHRVVQYNIMSGTSMSCPHVSAAVLLLKAXHPDWSAAAIRSAIMTTATTNNAEGGPIMNGDGSVGGPMDYGSGHIRPNHALDPGLVYDASYEDYLSFACASAGSQLDRSVPCPARPPPPYQLNHPXVAVHGLQRQG

SEQ ID NO: 97758 - protein, 256 aa, Setaria italica
  misc_feature (234)..(234): Xaa can be any naturally occurring amino acid
  Transcript Sequence Number=SeqID_31784
  Gene Ontology: Mol. function=protein binding; Cellular component =cytoplasm; Biological process=ubiquitin-dependent protein catabolic process
  Homolog annotation: Hit_ID=Q53LU3; Match level="QueryCoverage=99%, HitCoverage=66%, E-value=1e-79, Identity=61%"; Hit description =Leucine Rich Repeat family protein, expressed
TSLESELDRNAFGLTCRNWLKVRNIGRKSLTFHCSFNPTIDKEHARCIPNILARSPCLNRISLAGLAELPDSALNALRMSGSSLQSLSLYCCSGMTDDGLAQVAIGCPNLVVVELQSCFNITDAGLESLSKGCRALKSLNLGSCMGISDRGVSAIFSNCSNICTLIITGCRRLSGVGFRGCPITLRYLEAESCMLSPDGLLDVVSGGGLEYLNFHKLGSSTGLDGLGGHASANXIRILNHRMCRYLTDDSVTAIAS

SEQ ID NO: 97759 - protein, 95 aa, Setaria italica
  Transcript Sequence Number=SeqID_31785
YYSLVFVRLEYNLVCIRLECSLVSPVSRMQYTSHQYPFQVCFSKSHICILYTSDTGRSFFPVVKLKTLLLHITMSIIFRCDVAICCRSKQKIKQK

SEQ ID NO: 97760 - protein, 324 aa, Setaria italica
  misc_feature (29)..(29): Xaa can be any naturally occurring amino acid
  Transcript Sequence Number=SeqID_31786
  Gene Ontology: Mol. function=fructokinase activity; Cellular component=chloroplast; Biological process=D-ribose metabolic process
  Homolog annotation: Hit_ID=Q0JGZ6; Match level="QueryCoverage=100%, HitCoverage=100%, E-value=1e-163, Identity=90%"; Hit description =Fructokinase-1
  Pfam annotation: Domain name=PfkB; Domain location=5-314; Score =374.1; E_value=2.5e-109; Accession=PF00294.16; Description=pfkB family carbohydrate kinase
MAGGRELVVSFGEMLIDFVPTVAGVSLAXEAPAFLKAPGGAPANVAIAVSRLGGEAAFVGKLGDDEFGRMLAAILRDNGVDAGGVVFDAGARTALAFVTLRADGEREFMFYRNPSADMLLTADELNVELIKRAAVFHYGSISLIAEPCRSAHLRAMEIAKEAGALLSYDPNLREALWPSREEARTKILSIWDQADIVKVSEVELEFLTGIDSVEDDVVMKLWRPTMKLLLVTLGDQGCKYYTRDFHGAVPSFKVQQVDTTGAGDAFVGALLRKIVQDPSSLQDQKKLVEAIKFANACGAITATKKGAIPSLPTATEVLQLMEKA

SEQ ID NO: 97761 - protein, 256 aa, Setaria italica
  Transcript Sequence Number=SeqID_31787
  Gene Ontology: Mol. function=protein binding
  Homolog annotation: Hit_ID=Q10PT8; Match level="QueryCoverage=98%, HitCoverage=26%, E-value=1e-101, Identity=72%"; Hit description =Leucine Rich Repeat family protein, expressed
WIFGFNHLRSISSLSEVSSRIVKLVVRNNALTTVHGIENLKSLMGLDLSYNIISNFSELEILGTLSLLQNLWLEGNPICCARLYRAHVFSFFRNPENLKLDDKGMNTQEYWEKQVLFACRQNQPAGYGFYFPAMDDHEDEDTLTLKMRKISRLASIVEGERNLSDDGTDQQSTPCDSDSSKKDETAGADHDIRIASLINTAELLKKEKSSDWLREFKEWMDDNADKTDGENLSADVTYGNGSYARQKKRQKAHKVR

SEQ ID NO: 97762 - protein, 102 aa, Setaria italica
  misc_feature (36)..(36): Xaa can be any naturally occurring amino acid
  Transcript Sequence Number=SeqID_31788
  Homolog annotation: Hit_ID=B6SPJ4; Match level="QueryCoverage=80%, HitCoverage=80%, E-value=7e-33, Identity=89%"; Hit description =Nitrilase-associated protein
MGRGVSSGGGQSSLGYLFGSDEAPKSAEKPAPVQKXPTPPSSAEKLKDIPAGIQSSRSNNYMRAEGQNCGNFLTDRPSTKVQAAPGGGSSLDYLFSGSKDGK

SEQ ID NO: 97763 - protein, 63 aa, Setaria italica
  Transcript Sequence Number=SeqID_31789
  Gene Ontology: Mol. function=ubiquitin-protein ligase activity; Cellular component=ubiquitin ligase complex; Biological process =ubiquitin-dependent protein catabolic process
  Homolog annotation: Hit_ID=B9SKX3; Match level="QueryCoverage=100%, HitCoverage=15%, E-value=2e-23, Identity=76%"; Hit description =Spotted leaf protein, putative
  Pfam annotation: Domain name=U-box; Domain location=2-63; Score=47.1; E_value=6.8e-11; Accession=PF04564.7; Description=U-box domain
MSIPHLFRCPISLDIFTDPVTLCTGQTYDRPCIERWLAAGHRTCPVTMQPLGDAALVPNRTLR

SEQ ID NO: 97764 - protein, 114 aa, Setaria italica
  Transcript Sequence Number=SeqID_31790
  Gene Ontology: Cellular component=extracellular region; Biological process=response to biotic stimulus
  Homolog annotation: Hit_ID=Q40035; Match level="QueryCoverage=75%, HitCoverage=48%, E-value=4e-26, Identity=66%"; Hit description=Type -1 pathogenesis-related protein
  Pfam annotation: Domain name=SCP; Domain location=36-114; Score=27.6; E_value=5e-05; Accession=PF00188.18; Description=SCP-like extracellular protein
  Subcellular localization annotation: CTP_CleavageSite=17; ConfidenceScore=5.13e-01
MAFPKHSLLAAFAAVAMAMALAATTASAQNTPQDFVNLHNRARAADGVGPVTWDARVARYARDYAARRAGDCRLVHSGGPFGENIFWGSAGRAWSAADAVRSWVEEKRYYHLST

SEQ ID NO: 97765 - protein, 128 aa, Setaria italica
  Transcript Sequence Number=SeqID_31791
  Gene Ontology: Mol. function=protein serine/threonine kinase activity; Biological process=protein amino acid phosphorylation
  Homolog annotation: Hit_ID=Q069I5; Match level="QueryCoverage=95%, HitCoverage=31%, E-value=8e-43, Identity=73%"; Hit description=MAP kinase kinase
MATPRKPMKLTLPPPESTMGKFLTHSGTFRDGDLLVNKDGLRIVPQSEGGEAPPIEPLDSQLSLDDLDVIKVIGKGSSGNVQLVRHKFTGQFFALKVIQLNIEDSIRRQIAKELKINLSTQYQYIVVF

SEQ ID NO: 97766 - protein, 228 aa, Setaria italica
  Transcript Sequence Number=SeqID_31792
  Gene Ontology: Mol. function=ribose-5-phosphate isomerase activity; Biological process=pentose-phosphate shunt, non-oxidative branch
  Homolog annotation: Hit_ID=Q6ZEZ1; Match level="QueryCoverage=100%, HitCoverage=88%, E-value=1e-106, Identity=86%"; Hit description =Putative ribose-5-phosphate isomerase
  Pfam annotation: Domain name=Rib_5-P_isom_A; Domain location=46-224; Score=335.8; E_value=8.7e-98; Accession=PF06026.6; Description =Ribose 5-phosphate isomerase A (phosphoriboisomerase A)
LKRLAAVRAVEQVQSGMVLGLGTGSTAAFAVAEIGALLASGKLEKIVGVPTSKRTFEQAQSLGIPLSTLDDHPLIDLAIDGADEVDPDLNLVKGRGGALLREKMVEAASDKFIVVVDETKLVDGLGGSGLAMPVEVVQFCWKYNLVRLQELFKEEGVEAKLRLEGDKPYVTDNSNYIVDLYFKTPIKDALAAGEAIAALEGVVDHGLFLNMASSVIIAGSDGVSVKTK

SEQ ID NO: 97767 - protein, 151 aa, Setaria italica
  misc_feature (139)..(139): Xaa can be any naturally occurring amino acid
  Transcript Sequence Number=SeqID_31793
  Gene Ontology: Mol. function=nucleoside-triphosphatase activity; Cellular component=mitochondrion
  Homolog annotation: Hit_ID=B6SXQ2; Match level="QueryCoverage=99%, HitCoverage=29%, E-value=2e-51, Identity=71%"; Hit description =Mitochondrial protein
  Pfam annotation: Domain name=AAA; Domain location=1-151; Score=-40.5; E_value=0.09; Accession=PF00004.21; Description=ATPase family associated with various cellular activities (AAA)
SPGTGKSSLVAAMANYLRFNLYDLDLSEVRGNTMLQRLLNTMTNRSILVIEDIDCCFTAASREVGKDHAGEAVADDGSEEDSTPEPWDTPQPQQQHNITLSGLLNFIDGLWSTSGEERIIVFTTNYKERLDPALLRPGXMDMHVYMGYCGW

SEQ ID NO: 97768 - protein, 90 aa, Setaria italica
  Transcript Sequence Number=SeqID_31794
FEVSSGLQLRDRACEERRSSAADSDGHRPTRREVVFSEEPTMSKTEASPAAADDAQPAPETTTMPASSQPAPAAPTAASAAPAAVAGRGE

SEQ ID NO: 97769 - protein, 125 aa, Setaria italica
  misc_feature (122)..(122): Xaa can be any naturally occurring amino acid
  Transcript Sequence Number=SeqID_31795
CPALSLCRINFWGREIHCFSLQSHGRVIRTGTRNTMWHWHQLRQLKHISAHSCCGIIWPLQRILLMLYPCTLNHSLVCIWELGSVTPIPNVTVVWNAANVLVLSILGINYWFLCYFCSFVSXLFK

SEQ ID NO: 97770 - protein, 514 aa, Setaria italica
  Transcript Sequence Number=SeqID_31796
  Gene Ontology: Mol. function=molecular_function; Cellular component =cellular_component; Biological process=biological_process
  Homolog annotation: Hit_ID=B6SKZ4; Match level="QueryCoverage=100%, HitCoverage=82%, E-value=0.0, Identity=93%"; Hit description =Nucleotide binding protein
  Pfam annotation: Domain name=WD40; Domain location=138-177; Score =26.3; E_value=0.00012; Accession=PF00400.24; Description=WD domain, G-beta repeat
  Pfam annotation: Domain name=WD40; Domain location=188-225; Score =21.5; E_value=0.0036; Accession=PF00400.24; Description=WD domain, G- beta repeat
  Pfam annotation: Domain name=WD40; Domain location=233-271; Score =32.9; E_value=1.3e-06; Accession=PF00400.24; Description=WD domain, G-beta repeat
  Pfam annotation: Domain name=WD40; Domain location=37-75; Score=33.4; E_value=9e-07; Accession=PF00400.24; Description=WD domain, G-beta repeat
  Pfam annotation: Domain name=WD40; Domain location=86-122; Score =12.6; E_value=1.3; Accession=PF00400.24; Description=WD domain, G -beta repeat
  Pfam module annotation: Pfam domain module=WD40::WD40::WD40::WD40::WD4 0; Domain location=138-177::188-225::233-271::37-75::86-122
MIGPPRPPPAEDDDEEDEDDDDDMEDDGDGGFNRIPLSNEIVLRGHTKVVSALAVDHTGSRVLSGSYDYTVRMYDFQGMNSKLQSFRQLEPFEGHQVRSLSWSPTSDRFLCITGSAQAKIYDRDGLTLGEFVKGDMYIRDLKNTKGHISGLTGGEWNPKSKETILTSSEDGSIRLWDVSDFKSQKQVIKPKLVRPMRIPVTSCAWDHEGKRIVGGIGDGSIQLWTIKTGWGSRPDIHVEKTHTEDITGVKFSTDGQILLSRSMDSTLKIWDLRRMKTPLKVFEDLPNHYAETNAAFSPDEQLIFTGTSIEKDGDNGGLLCFFDRKKLELVSRVGISPHYSVIRCLWHPRINQVFATVGDKKEGGTHILYDPSISQRGALVCVGRAPRKKSVDDFEVQPVIHNPHSLPLFRDQPSRKRQREKILKDPLKSHKPEAPVNGPGYGGRVGTTKGSLLTQYLLKEGGLIKETWMDEDPREAILKYADAAEKDPKFIAPAYSQTQPKPVFAESDSDNEGK

SEQ ID NO: 97771 - protein, 124 aa, Setaria italica
  Transcript Sequence Number=SeqID_31797
  Gene Ontology: Mol. function=nucleotide binding; Biological process =defense response
  Homolog annotation: Hit_ID=Q7XKL7; Match level="QueryCoverage=78%, HitCoverage=10%, E-value=5e-10, Identity=41%"; Hit description =OSJNBa0054D14.9 protein
KKLHQDVTKLINLRQLVLPAEASRALSRVSGLGNLSCLRRLSNFIVAKKNGRGIGELKFMNQLSGKLSIRYLYTVRSEEEALEARLVEKQYLKELVLHFRDFGPILPCSTENGVLEACVLIQEL

SEQ ID NO: 97772 - protein, 56 aa, Setaria italica
  Transcript Sequence Number=SeqID_31798
RKTNRVELTNYLPRTMINIIAIHMKESRRMHRQCKDPAERHMPLHLSKCLRGKVET

SEQ ID NO: 97773 - protein, 181 aa, Setaria italica
  Transcript Sequence Number=SeqID_31799
MLVHWKTWFHYNIKMSVCYFHMGSQSVILLKIFTCAFSGNLKEYGSSTGRGGICRTIPDFDRDYMSYFQLHDCLKEFGLKDGDSLYYLKLGYCPPNGLVLIFDDNQCNQLLADHVALSSCSLYIVPDPGRLVSTEPVPRNNPTQSVVRTLVDAFSPDEIGGGEDDVGRGEEMAQLSLDDDD

SEQ ID NO: 97774 - protein, 164 aa, Setaria italica
  Transcript Sequence Number=SeqID_31800
  Gene Ontology: Mol. function=metal ion binding; Cellular component =integral to membrane; Biological process=multicellular organismal development
  Homolog annotation: Hit_ID=B9RG24; Match level="QueryCoverage=100%, HitCoverage=37%, E-value=4e-61, Identity=67%"; Hit description=Zinc finger protein, putative
  Pfam annotation: Domain name=zf-DHHC; Domain location=72-136; Score =120.0; E_value=7.6e-33; Accession=PF01529.12; Description=DHHC zinc finger domain
RSQIGGWVASVAIIFTAYILVVLFLTSGRDPGIIPRNAHPPEPEDIGESSNLPDWPGGQHGSTGLPLTRDVLVNGISVKVKYCHTCMLYRPPRCSHCSICNNCVERFDHHCPWVGQCIGKRNYRFFFMFVSSTTILCLYVFAFSWVNLRRIMDMHECKIGRALL

SEQ ID NO: 97775 - protein, 57 aa, Setaria italica
  Transcript Sequence Number=SeqID_31801
  Subcellular localization annotation: CTP_CleavageSite=29; ConfidenceScore=5.19e-01
SVLGLARGISRASSLPRLLRLRSRRQPLRAQAVSERLQSGDARASASSALMSADASQ

SEQ ID NO: 97776 - protein, 117 aa, Setaria italica
  Transcript Sequence Number=SeqID_31802
  Subcellular localization annotation: CTP_CleavageSite=80; ConfidenceScore=5.92e-01
CESTARGRGAPASPSASAPSPPSAGMTRSMRRQASSTSGTSALKRRDTAEQRPSERASASLLKMMSTSESGTRSKWSSPSAARSRSSAKIRCLDCILPALDIGFLRRVERRRWRAGQ

SEQ ID NO: 97777 - protein, 127 aa, Setaria italica
  Transcript Sequence Number=SeqID_31803
  Gene Ontology: Mol. function=nucleoside-triphosphatase activity
  Homolog annotation: Hit_ID=Q9FKM3; Match level="QueryCoverage=71%, HitCoverage=17%, E-value=7e-42, Identity=85%"; Hit description =Similarity to AAA-type ATPase
TAIMADLRDFADGSAFYERTGRAWKRGYLLYGPPGTGKSSMIAAMANYLGYDVYDLELTEVGSNAELRKLLMKTTSKSIIVIEDIDCSVDLTNRAKPPAAAPKPRPSIDGTIDQDGGAGRGGSITLS

SEQ ID NO: 97778 - protein, 75 aa, Setaria italica
  Transcript Sequence Number=SeqID_31804
  Subcellular localization annotation: CTP_CleavageSite=77; ConfidenceScore=5.37e-01
KDLALRILHLVAKTSFSCLRRSQVPHGAFLKLSISFSIHLAYVVRKSLFSFSRLALISLRSTNLALISSRICFKS

SEQ ID NO: 97779 - protein, 100 aa, Setaria italica
  Transcript Sequence Number=SeqID_31805
HHLCSLSSFLHTVLPDEAKCHAYSHVYANATLSLADRYIPSTKEDACKKKKKKKKKEELEDLFTVSVQGRRVVKGLSASSPPGRRAPCSSSPRTSAAAGR

SEQ ID NO: 97780 - protein, 233 aa, Setaria italica
  misc_feature (94)..(94): Xaa can be any naturally occurring amino acid
  misc_feature (120)..(120): Xaa can be any naturally occurring amino acid
  misc_feature (131)..(131): Xaa can be any naturally occurring amino acid
  Transcript Sequence Number=SeqID_31806
MTCRMSASKQKKRQINYTNSEQCRPGRKQKFDSSNCLVSLKPHIGLKWDQYLRRVVPIKEQVGILWSDLAPFIESKKQRSGLADVTYVPSEIFXSLENLRGVLSYKVWSTCLTEDERKFXLIQFLPGKTGXEKMYVLLLTRKNHHFWKPSFSAGHLLFCYGGIHPDAVLNKEKHMKKDEKAYHINLLNYHSKMVGTLKKWKKRWLSCADTENLFRDNPADQKQGVMQLTTTKS

SEQ ID NO: 97781 - protein, 80 aa, Setaria italica
  Transcript Sequence Number=SeqID_31807
TSRRAVRGGGGSLRRSRSWAPAPAEPAPAARRDAADTAEQAARAATRDARRSMDDIMDPDGGERGARSEGTDIWAHEVRR

SEQ ID NO: 97782 - protein, 150 aa, Setaria italica
  Transcript Sequence Number=SeqID_31808
WIIGRWQRATVASRVAIGKTTEQCRSVLSSERVVPCVMNTRGEAQQRALASRRQHGVDDGAPTGGWSSRPCATSPTTYSASSNVTRLHYTSVVCRVRCKTSPESTRSGRSGRALPLHRVLVHAPSYPLHSRSMFPMHSSPIYACAKAAHR

SEQ ID NO: 97783 - protein, 123 aa, Setaria italica
  Transcript Sequence Number=SeqID_31809
  Gene Ontology: Mol. function=binding
  Homolog annotation: Hit_ID=B6TYK3; Match level="QueryCoverage=100%, HitCoverage=38%, E-value=2e-49, Identity=79%"; Hit description =Pollenless3
MDHQHQLVAMALPASPSTTTTAAPHVAHKIPAGDGPYARAKHFQLVEKDLDASIAWFWKAINTGDKVDSALKDMAVVMKQRGYLTEAIDAVKSLRHLCPRQSQDSLDNILLDLYKASGRTKEE

SEQ ID NO: 97784 - protein, 161 aa, Setaria italica
  misc_feature (45)..(45): Xaa can be any naturally occurring amino acid
  Transcript Sequence Number=SeqID_31810
  Gene Ontology: Mol. function=protein tyrosine/serine/threonine phosphatase activity; Cellular component=cytoplasm; Biological process=protein amino acid dephosphorylation
  Homolog annotation: Hit_ID=B6SJK1; Match level="QueryCoverage=45%, HitCoverage=38%, E-value=2e-28, Identity=86%"; Hit description=Dual specificity protein phosphatase 9
  Pfam annotation: Domain name=DSPc; Domain location=1-73; Score=0.9; E_ value=0.00016; Accession=PF00782.12; Description=Dual specificity phosphatase, catalytic domain
MLSFIDEAISSGGNVLVHCFAGRSRSVAIVVAYLMKKHQIVALEXALSLVRSKRPQVAPNEGFISQLENFDKSLQGWGVSHLQAPRRSSLDKDNATQSSSALRATSAGDAGACADTVNPVELLRRMASLQQQIPLSFTLLRYQCYSFLFTFTLQGWNQTQP

SEQ ID NO: 97785 - protein, 94 aa, Setaria italica
  Transcript Sequence Number=SeqID_31811
  Gene Ontology: Mol. function=protein tyrosine/serine/threonine phosphatase activity; Biological process=protein amino acid dephosphorylation
  Homolog annotation: Hit_ID=Q3S4H6; Match level="QueryCoverage=54%, HitCoverage=31%, E-value=4e-17, Identity=88%"; Hit description=Dual -specificity protein-like phosphatase 2
GNGNKGSSRTIVVAYLMKKHQMSLESALSLVRSKRPQVAPNEGFISQLENFDKSLQGKTQTAVVVRLYVKLVSEEGGMHILLHERFSYCCCCCC

SEQ ID NO: 97786 - protein, 198 aa, Setaria italica
  Transcript Sequence Number=SeqID_31812
  Gene Ontology: Mol. function=protein tyrosine/serine/threonine phosphatase activity; Cellular component=cytoplasm; Biological process=protein amino acid dephosphorylation
  Homolog annotation: Hit_ID=B6SJK1; Match level="QueryCoverage=99%, HitCoverage=99%, E-value=1e-90, Identity=84%"; Hit description=Dual specificity protein phosphatase 9
  Pfam annotation: Domain name=DSPc; Domain location=46-184; Score =162.7; E_value=1.1e-45; Accession=PF00782.12; Description=Dual specificity phosphatase, catalytic domain
MSMPEAGQAAERDERGRDDYEQQQARVLVALMQSFCAARYRKADNTPCPIEQGLYLGSVGAALNKEALKSLNITHILIVARSLSPAFPAEFNYKKIEVLDSPDTDLLKHFDECFSFIDEAISSGGNVLVHCFAGRSRSVTIVVAYLMKKHQMSLESALSLVRSKRPQVAPNEGFISQLENFDKSLQVEQERRMESLQS

SEQ ID NO: 97787 - protein, 91 aa, Setaria italica
  Transcript Sequence Number=SeqID_31813
  Gene Ontology: Mol. function=zinc ion binding; Cellular component =intracellular; Biological process=regulation of transcription, DNA -dependent
  Homolog annotation: Hit_ID=B6U768; Match level="QueryCoverage=96%, HitCoverage=32%, E-value=2e-33, Identity=78%"; Hit description=Zinc finger, C2H2 type family protein
  Pfam annotation: Domain name=zf-C2H2; Domain location=62-84; Score =21.7; E_value=0.0031; Accession=PF00096.18; Description=Zinc finger, C2H2 type
MEQMAKYYWGMLTAAAGSSSPRSYWPPPAHATAAGEPSWEELAFARDAAGHLGGCVWPPRSYTCTFCRREFRSAQALGGHMNVHRRDRARL

SEQ ID NO: 97788 - protein, 86 aa, Setaria italica
  Transcript Sequence Number=SeqID_31814
  Gene Ontology: Mol. function=metal ion binding
NLPEHWQHDLLDSTATSVICDLPAADCHVSFLCAALGGSDQEDQICFLSAETVHKVLGSILRDLASALMASTFEWPRLAYSLLLFF

SEQ ID NO: 97789 - protein, 99 aa, Setaria italica
  Transcript Sequence Number=SeqID_31815
  Subcellular localization annotation: CTP_CleavageSite=18; ConfidenceScore=5.54e-01
TQPARLPLLPSTPARPIRAAPTPSPPPRAAASRIRAAIALAVTLLIRSALLPAEPAERCLDPIRLSLAAPALISVPPSVFPAAIRPLLARQLISAPECC

SEQ ID NO: 97790 - protein, 129 aa, Setaria italica
  misc_feature (1)..(60): Xaa can be any naturally occurring amino acid
  Transcript Sequence Number=SeqID_31816
XXXXXXXXXXXXXXXXXXXXXXXXXXXXXXXXXXXXXXXXXXXXXXXXXXXXXXXXXXXXPILGSTSSRVSLHFNDPNHNNAASTLHELHPPISYRRITATKRVFLLLNRHRLAACDVVLGVCPREAKK

SEQ ID NO: 97791 - protein, 83 aa, Setaria italica
  Transcript Sequence Number=SeqID_31817
  Gene Ontology: Mol. function=heat shock protein binding; Biological process=response to stress
  Homolog annotation: Hit_ID=Q8LQ03; Match level="QueryCoverage=100%, HitCoverage=11%, E-value=7e-25, Identity=68%"; Hit description=DNAJ heat shock N-terminal domain-containing protein-like
TLQTNPRLEGALEMLPVLEVLCAAGETLAGRGRGVDWYRVLQVLPGDDAARIEARYRSIVAQLEPIGADLPGAELALRLVREA

SEQ ID NO: 97792 - protein, 58 aa, Setaria italica
  Transcript Sequence Number=SeqID_31818
LWVELERSRWGVWPEECSQLQKRPILVWIAIVAPQFRPHLSSSPSHLLPQNLCLTCRT

SEQ ID NO: 97793 - protein, 147 aa, Setaria italica
  Transcript Sequence Number=SeqID_31819
  Homolog annotation: Hit_ID=Q0MVR3; Match level="QueryCoverage=99%, HitCoverage=26%, E-value=2e-71, Identity=86%"; Hit description=DNA damage signaling and repair protein
ETQGSRLHKDEDVMLIDGDTVTFGTGNATFRLSFVPIVAFFHGGKSARIDRSLHAVMTSIGAYATRKWSDECTHVLADESCSLTPELLDAVIGKKQIVLGDWFKAMAEKNIRTEIPSCTQYIPNLTLDGTVIKMVEINLIQNCLAGY

SEQ ID NO: 97794 - protein, 91 aa, Setaria italica
  Transcript Sequence Number=SeqID_31820
  Homolog annotation: Hit_ID=B6T558; Match level="QueryCoverage=43%, HitCoverage=10%, E-value=3e-09, Identity=80%"; Hit description =Choline/ethanolamine kinase
EPADSVDAPPIRMIVLKVSVKEDTDNEFSVTVRLYGTNTDLVIDRKRELQVRILMLQDCMLQSYYIYMHPIIFHHDSTMSLCWSYYFFPVH

SEQ ID NO: 97795 - protein, 41 aa, Setaria italica
  Transcript Sequence Number=SeqID_31821
  Gene Ontology: Mol. function=kinase activity
  Homolog annotation: Hit_ID=Q69QD7; Match level="QueryCoverage=100%, HitCoverage=11%, E-value=1e-12, Identity=88%"; Hit description =Putative ethanolamine kinase 1
DLSDLLHAPLVFAHNDLLSGNLMLNDSEGKLYFIDFEYGSY

SEQ ID NO: 97796 - protein, 84 aa, Setaria italica
  misc_feature (61)..(61): Xaa can be any naturally occurring amino acid
  Transcript Sequence Number=SeqID_31822
  Gene Ontology: Mol. function=kinase activity
  Homolog annotation: Hit_ID=B6T558; Match level="QueryCoverage=71%, HitCoverage=16%, E-value=1e-20, Identity=81%"; Hit description =Choline/ethanolamine kinase
TIIHVYSNNYFQYVVHDAYSFLPTVLKVSVKEDTDNEFSVTVRLYGPNTDLVIDRKRELQXAGFGARLLGIFENGVVQSFINAR

SEQ ID NO: 97797 - protein, 326 aa, Setaria italica
  Transcript Sequence Number=SeqID_31823
  Gene Ontology: Mol. function=kinase activity; Cellular component =cytoplasm; Biological process=phosphatidylethanolamine biosynthetic process
  Homolog annotation: Hit_ID=B6T558; Match level="QueryCoverage=92%, HitCoverage=76%, E-value=1e-150, Identity=85%"; Hit description =Choline/ethanolamine kinase
  Pfam annotation: Domain name=APH; Domain location=29-259; Score=47.6; E_value=4.7e-11; Accession=PF01636.15; Description=Phosphotransferase enzyme family
  Pfam annotation: Domain name=Choline_kinase; Domain location=36-237; Score=261.8; E_value=1.7e-75; Accession=PF01633.12; Description =Cholineethanolamine kinase
  Pfam module annotation: Pfam domain module=APH::Choline_kinase; Domain location=29-259::36-237
TIIHVYSNNYFQYVVHDAYSFLPTVLKVSVKEDTDNEFSVTVRLYGPNTDLVIDRKRELQAIPYLSAAGFGARLLGIFENGVVQSFINARTLSPADMREPRIAAEIAKELHRFHQVDIPGPKEPQLWDDIFKFLKKASALKFKDNEKQKRYETISFTEIQDEVQELKDLSDLLHAPLVFAHNDLLSGNLMLNDSEGKLYFIDFEYGSYSYRGYDIANHFNEYAGFDCDYNMYPDKDVQYHFFRNYLQPDKPSEVRAQDLEALYVETNTFRLASHIYWALWALIQANVSPIDFDYLGYFFLRYGEYKKQRESCISLAQGFLSELRNG

SEQ ID NO: 97798 - protein, 85 aa, Setaria italica
  Transcript Sequence Number=SeqID_31824
  Pfam annotation: Domain name=RanBPM_CRA; Domain location=1-84; Score =76.6; E_value=9e-20; Accession=PF10607.1; Description=Ran binding protein in the microtubule
FGKVPKYVEKLEDFMALLAYEEPEKSPMFHLLSPEYRQNVADSLNRAVLAHANLPAYSSLERVVQQATVVRQYLQQEVGKAFLSK

SEQ ID NO: 97799 - protein, 217 aa, Setaria italica
  misc_feature (60)..(60): Xaa can be any naturally occurring amino acid
  Transcript Sequence Number=SeqID_31825
  Gene Ontology: Mol. function=protein binding; Cellular component =nucleus
  Homolog annotation: Hit_ID=B7PS79; Match level="QueryCoverage=77%, HitCoverage=70%, E-value=2e-22, Identity=36%"; Hit description=LisH motif-containing protein
  Pfam annotation: Domain name=LisH; Domain location=17-43; Score=13.4; E_value=0.051; Accession=PF08513.3; Description=LisH
  Pfam annotation: Domain name=RanBPM_CRA; Domain location=109-212; Score=148.6; E_value=1.9e-41; Accession=PF10607.1; Description=Ran binding protein in the microtubule
  Pfam module annotation: Pfam domain module=LisH::RanBPM_CRA; Domain location=17-43::109-212
MMDLDPRLYENVSVSDNDVRNIVLSYLMHNCFKETAETFLSSTGLKLPIDYSVNVDKRKXNLFNFVLEGNALKAIELTEELAPNLLENDMDLHFDLLSLHFIELVRSRKCTEALEFGQKKLTSFGKVPKYVEKLEDFMALLAYEEPEKSPMFHLLSPEYRQNVADSLNRAVLAHANLPAYSSLERVVQQATVVRQYLQQEVGKDSYPPFSLKAFLSK

SEQ ID NO: 97800 - protein, 468 aa, Setaria italica
  Transcript Sequence Number=SeqID_31826
  Gene Ontology: Mol. function=RNA binding
  Homolog annotation: Hit_ID=Q69J34; Match level="QueryCoverage=94%, HitCoverage=70%, E-value=0.0, Identity=75%"; Hit description =Putative agenet domain-containing protein / bromo-adjacent homology (BAH) domain-containing protein
  Pfam annotation: Domain name=Agenet; Domain location=239-322; Score =68.8; E_value=2e-17; Accession=PF05641.4; Description=Agenet domain
  Pfam annotation: Domain name=BAH; Domain location=31-148; Score=23.5; E_value=0.0001; Accession=PF01426.10; Description=BAH domain
  Pfam module annotation: Pfam domain module=Agenet::BAH; Domain location=239-322::31-148
LNYSSDITWSGSFWTCGKQLRHYRAFCRNGTTISTHTFVLVLSEEESRYLAYLEDMYEDKKGQKKVKVRWFHQNQEFACAIPPPPPHPCEVFITPFTQVISVECVDDIATVLTPDHYEKCSNALPTSSFVGIRFCFRQYSKNKFKHFDLSTLRGYFSQAVVLSLKIPAESEKDGEITPGKTKFQKQYERLYSKCLGTKICRGPQADSIPPYQILNNKQSPGKHFSIKFIGPQIQLKPTYSAGDRVEILSQDSGIIGCWFRCTVLKSCINHNKLKVQYDDLQNADDSGRLEETVPASTLALPDKLGLRSPDRLRIRPRPQQNISVNGAALIPGTAIDVWQFSGWWEGIVVSLENPAADSLQVYFPGENFFRVCQLQDVRISKDWVKNQWVDIEIKTNVLSRIPSDGVKTRQPDNFSSVGVLDSSSSALPEQELAAIQANSNGDKPVPERGLAAIQANSNGDKPVPERGL

SEQ ID NO: 97801 - protein, 81 aa, Setaria italica
  Transcript Sequence Number=SeqID_31827
  Subcellular localization annotation: CTP_CleavageSite=49; ConfidenceScore=5.58e-01
TNCPSARPTSTHRAPPPHRPPVPAPPSSAGGGAIDHLMISSSPLLYPARAFSVPRRRPCNRAQLHSAWCACGCGRRTSCQA

SEQ ID NO: 97802 - protein, 51 aa, Setaria italica
  Transcript Sequence Number=SeqID_31828
NEENSMDIGLSFASHYLFQTPVFFYKHLFLPCLSFSLAMIICDLTLSSCLP

SEQ ID NO: 97803 - protein, 82 aa, Setaria italica
  Transcript Sequence Number=SeqID_31829
  Subcellular localization annotation: CTP_CleavageSite=60; ConfidenceScore=5.05e-01
PSRIGITKARITSYFAAGRRLHPPPPLCLCLFACAVLLLCRTRRRSAAHPGRRHPRGALTASAAAADICLPQPKRTVAAGSP

SEQ ID NO: 97804 - protein, 274 aa, Setaria italica
  Transcript Sequence Number=SeqID_31830
  Gene Ontology: Mol. function=hydrolase activity; Biological process =menaquinone biosynthetic process
  Homolog annotation: Hit_ID=B9RLD6; Match level="QueryCoverage=98%, HitCoverage=16%, E-value=2e-77, Identity=52%"; Hit description =Menaquinone biosynthesis protein, putative
  Pfam annotation: Domain name=Abhydrolase_1; Domain location=30-268; Score=47.4; E_value=5.5e-11; Accession=PF00561.12; Description =alphabeta hydrolase fold
  Pfam annotation: Domain name=Abhydrolase_2; Domain location=1-159; Score=-80.0; E_value=0.091; Accession=PF02230.8; Description =PhospholipaseCarboxylesterase
  Pfam annotation: Domain name=Abhydrolase_3; Domain location=6-256; Score=-77.4; E_value=0.014; Accession=PF07859.5; Description =alphabeta hydrolase fold
  Pfam annotation: Domain name=Thioesterase; Domain location=4-229; Score=-45.6; E_value=0.066; Accession=PF00975.12; Description =Thioesterase domain
  Pfam module annotation: Pfam domain module=Abhydrolase_1::Abhydrolase_ 2::Abhydrolase_3::Thioesterase; Domain location=30-268::1-159::6 -256::4-229
SVEKVVLLLHGFLGTSDDWVPMMKALSPSARVIAVDLPGHGESQMLQHHVENSEQYLVTVQSVADLLLKLVGQITDGEVVVVGYSMGARIALHMALNQVHQIRGAVIISGSPGLRDEESRRRRIAVDGSRAKFLMSCGLDCFLETWYSAKMWTSLREHPKFNSLVRTRSKHKNIKALAKVLADSSVGRQKSLWEDLKHLKRPLLIVAGEKDTKFKDISQRMCSEITQHAECGSGGRDGNELCDVIIIPDSGHAVHVENPLPLVRAVRKFLQKLH

SEQ ID NO: 97805 - protein, 152 aa, Setaria italica
  Transcript Sequence Number=SeqID_31831
  Subcellular localization annotation: CTP_CleavageSite=67; ConfidenceScore=5.41e-01
ALPSSYDTKPSSSNHQDAIGTHMVTAENFSGKSQPSGRYFLRSSGFSEFMSLKSETKNDIMNCKMSVASDVQQNRNSSPKLRNKSSLSEVALCNSSSAKALSPHVGCGIRSKIAVEEMDLQNYQVQLQNILDVATSPLPSSCIMSLDNMEHC

SEQ ID NO: 97806 - protein, 82 aa, Setaria italica
  Transcript Sequence Number=SeqID_31832
  Subcellular localization annotation: CTP_CleavageSite=74; ConfidenceScore=5.92e-01
FSLCLGCPNSCPVSSIRPLLPPPSPRLRRSASPPPVTWNPRSWVPSSRALPRSRRPRITSPAAGTPSVSQIHSRGARRGSSP

SEQ ID NO: 97807 - protein, 104 aa, Setaria italica
  Transcript Sequence Number=SeqID_31833
  Gene Ontology: Mol. function=aminoacyl-tRNA ligase activity; Cellular component=cytoplasm; Biological process=tRNA aminoacylation for protein translation
  Homolog annotation: Hit_ID=B6T3D4; Match level="QueryCoverage=93%, HitCoverage=27%, E-value=2e-48, Identity=94%"; Hit description =Methionyl-tRNA synthetase
  Pfam annotation: Domain name=tRNA_bind; Domain location=14-99; Score =96.7; E_value=7.9e-26; Accession=PF01588.12; Description=Putative tRNA binding domain
ADKDSECNISILNIQVGLIRKAWKHPSADSLLVEEIDLGDGNVRQVVSGLAKYCSPDDLTNRHVVLITNVKPGKLRDVMSAGLVLCASTEDHTATKPSAAKDNK

SEQ ID NO: 97808 - protein, 417 aa, Setaria italica
  Transcript Sequence Number=SeqID_31834
  Gene Ontology: Mol. function=aminoacyl-tRNA ligase activity; Cellular component=cytoplasm; Biological process=tRNA aminoacylation for protein translation
  Homolog annotation: Hit_ID=B6T3D4; Match level="QueryCoverage=84%, HitCoverage=100%, E-value=1e-164, Identity=83%"; Hit description =Methionyl-tRNA synthetase
  Pfam annotation: Domain name=tRNA_bind; Domain location=262-357; Score=125.9; E_value=1.3e-34; Accession=PF01588.12; Description =Putative tRNA binding domain
PSPCSRLRVLMAAAADLTVAKRAMAYALCKHLNVDPSTVSNTSIEESDIASLFSHIVNSSQDEVMKWVKFSSDFAGSDGKQHALLDNLNKDLSQKSVLLGDGLKPSVADIVVFAAVQAFVSRVSDSKLQKFPHVLRWMDYIQNIVDFGTTLQKINVAKSVFVPPCHPKKADKGDTESSSKKAVSGQKIADKSNGSADSKKPVGETKASDNKETKPSAAKDNKTSGEKKKDKSAGKTAEKASEKAPEKTADKDSECNISILNIQVGLIRKAWKHPSADSLLVEEIDLGDGNVRQVVSGLAKYCSPDDLTNRHVVLITNVKPGKLRDVMSAGLVLCASTEDHTAVEPLIPPEGAKIGERISFAGFDGKPEDVLNPKKKQLDKITPHLRTDENGIATFKGIPFTTSAGPCRSSIRNGNVK

SEQ ID NO: 97809 - protein, 239 aa, Setaria italica
  Transcript Sequence Number=SeqID_31835
  Gene Ontology: Cellular component=chloroplast
  Homolog annotation: Hit_ID=O48529; Match level="QueryCoverage=75%, HitCoverage=76%, E-value=1e-78, Identity=74%"; Hit description =Rhodanese-like family protein
  Subcellular localization annotation: CTP_CleavageSite=41; ConfidenceScore=5.63e-01
AVVGLSTAFSPLRGSWIAVRIRPGCKPTGVSLSPSRRRSSCAAAVSVRAEVSFVDADEAKRLVAEEGYTVLDIRDRTQRERAYINSSTHVPLFIENQDNDIGTIVKRQLHNNFAGLFFGLPFTKLNPDFAKTVKDKFKPESKLLVVCQEGLRSAAAADALEREGFQNIACITSGLQTVKPGTFESVGKTELQNAGKAGLVTVQGKISVVLGTVLISAYLFITFFPDQAEKLFDLAGISL

SEQ ID NO: 97810 - protein, 98 aa, Setaria italica
  Transcript Sequence Number=SeqID_31836
DLALPGAWNRVTLCHRGSIQLGICAQASACCCPLQPHAVSRHPNCRQVDLFAASCSSVMDTSVVKGGWIHGHRHCNACLRHTFGFFHDFPVSPPVRSL

SEQ ID NO: 97811 - protein, 73 aa, Setaria italica
  Transcript Sequence Number=SeqID_31837
  Gene Ontology: Mol. function=zinc ion binding; Cellular component =intracellular
  Homolog annotation: Hit_ID=B6TZ64; Match level="QueryCoverage=95%, HitCoverage=20%, E-value=7e-28, Identity=85%"; Hit description=Zn -finger, RanBP-type, containing protein
  Pfam annotation: Domain name=zf-RanBP; Domain location=23-54; Score =31.4; E_value=3.6e-06; Accession=PF00641.10; Description=Zn-finger in Ran binding protein and others
NTPRPENQGSKPDGSRGSKQKMPEGSWKCEQCNNINYPFRTKCNRPQCGAEKPLQTNSTNDSVTDQDNQVCVS

SEQ ID NO: 97812 - protein, 287 aa, Setaria italica
  Transcript Sequence Number=SeqID_31838
  Gene Ontology: Mol. function=zinc ion binding; Cellular component =intracellular
  Homolog annotation: Hit_ID=B6TZ64; Match level="QueryCoverage=100%, HitCoverage=84%, E-value=1e-118, Identity=76%"; Hit description=Zn -finger, RanBP-type, containing protein
  Pfam annotation: Domain name=zf-RanBP; Domain location=193-224; Score= 23.2; E_value=0.001; Accession=PF00641.10; Description=Zn-finger in Ran binding protein and others
  Pfam annotation: Domain name=zf-RanBP; Domain location=23-54; Score =20.2; E_value=0.0036; Accession=PF00641.10; Description=Zn-finger in Ran binding protein and others
  Pfam annotation: Domain name=zf-RanBP; Domain location=241-272; Score= 31.4; E_value=3.6e-06; Accession=PF00641.10; Description=Zn-finger in Ran binding protein and others
  Pfam module annotation: Pfam domain module=zf-RanBP::zf-RanBP::zf -RanBP; Domain location=193-224::23-54::241-272
MSSQVDSRSQSAGKRARTDGSRREDDWVCPSCKNVNFAFRTTCNMRNCNQSRPADHTAMQKPMQTPPHYAASGGYMGPGTPPSMYLGGGAPPYASSMFNGPAMPPRYGIPQFHGSSAYPYGYGGRIPIGSPYGPMQMAGPPPYSGGSMMGAGGMYGMPMDRYGLIPASPGAMGTRAGSYSDEGSQKKPAGAGRDNDWECPNCHNINFAFRTVCNMRKCNTPRPENQGSKPDGSRGSKQKMPEGSWKCEQCNNINYPFRTKCNRPQCGAEKPLQTNSTNDSVTDQDNQ

SEQ ID NO: 97813 - protein, 66 aa, Setaria italica
  Transcript Sequence Number=SeqID_31839
  Subcellular localization annotation: CTP_CleavageSite=43; ConfidenceScore=5.03e-01
DVEQTLCNDGSFSQLFLITSKSPPKPWYQNFLIRMIEETKPPVSSQRTCHSTLSSSCSVFFVSFLI

SEQ ID NO: 97814 - protein, 64 aa, Setaria italica
  Transcript Sequence Number=SeqID_31840
HVMQETDLTLDIQKLISWQQSFSNVSNPVKNSIPLCLGSGKKHYPNHFLQTFILKRIKGQRGHQ

SEQ ID NO: 97815 - protein, 33 aa, Setaria italica
  Transcript Sequence Number=SeqID_31841
RPEPKTNLQLAGGFDEGCRKAFQELKAYASKSE

SEQ ID NO: 97816 - protein, 418 aa, Setaria italica
  Transcript Sequence Number=SeqID_31842
  Gene Ontology: Cellular component=chloroplast envelope
  Homolog annotation: Hit_ID=B6U9R6; Match level="QueryCoverage=100%, HitCoverage=100%, E-value=0.0, Identity=87%"; Hit description =Pherophorin like protein
MMREGDACVALLRSKLHGLIERNRALEEENKQLRHQVSRLKGQVSSLEGQDTDKRMLWKKLENSATSISYSKEKQFVQSNDDAKEAVDLNSSLCHGRQQFSRATLVRSRAPRVPNPPPSPTCIQPKTNVRKEGCMAPPPPPPPPLPSKLQRSPKAIQRVPEVVELYRSLVRREGKNDAKSGSVGIPAATNSREMIGEIENRSAYVLAIKSDVENQGNFVNFLASEVQNAAYREIADVEEFVKWLDGELSYLVDERAVLKHFPNWPEKKADAMREAAFTFRDLKNLESEASSFHDDRRVATPMALKRMQALQDKIEQGIHNTERVRDSASGRYRDLKIPWEWMLDSGIINQLKMASLKLAKEYMNRIVNTLKSDPFANDEELLLQGVRFAFRIHQLAGGFDEGCRKAFQELKAYASKSE

SEQ ID NO: 97817 - protein, 159 aa, Setaria italica
  Transcript Sequence Number=SeqID_31843
  Gene Ontology: Mol. function=hydrolase activity, acting on ester bonds; Cellular component=extracellular region; Biological process =lipid metabolic process
  Homolog annotation: Hit_ID=B6TDT3; Match level="QueryCoverage=91%, HitCoverage=33%, E-value=8e-76, Identity=88%"; Hit description=Alpha- L-fucosidase 2
  Pfam annotation: Domain name=Lipase_GDSL; Domain location=1-159; Score=10.8; E_value=0.0011; Accession=PF00657.14; Description=GDSL -like LipaseAcylhydrolase
SSSSGTTYSVNDYQVLSKLQRLHKNGARKFWIHGTGALGCMPQKLAMPRDDDSGLDEHGCIASINNVCKKFNSLLSEALDELRLTLKKSAIVFVDMFAIKYDLVVNHKKYGIEKPLMTCCGHGGPPYNYDPKKSCMTSDEDLCKLGEKFISWDGVHFTE

SEQ ID NO: 97818 - protein, 348 aa, Setaria italica
  Transcript Sequence Number=SeqID_31844
  Gene Ontology: Mol. function=hydrolase activity, acting on ester bonds; Biological process=lipid metabolic process
  Homolog annotation: Hit_ID=B6TDT3; Match level="QueryCoverage=97%, HitCoverage=78%, E-value=0.0, Identity=90%"; Hit description=Alpha-L- fucosidase 2
  Pfam annotation: Domain name=Lipase_GDSL; Domain location=15-325; Score=249.4; E_value=8.4e-72; Accession=PF00657.14; Description=GDSL- like LipaseAcylhydrolase
EGKRKKKKKGDGVVLFNFGDSNSDTGGVAAVMGIRIAPPEGRAYFHYPTGRLSDGRVILDFICESLGTHHLSPFMKPLGSDFTNGVNFAIAGSTAMPGVTTFSLDVQVDQFIFFKERCLDLIERGESAPVDELGFQTALYTMDIGHNDINGILHMPYDEMLANLPPVIVEIKKAIERLHKNGARKFWIHGTGALGCMPQKLAMPRDDDSGLDEHGCIASINNVCKKFNSLLSEALDELRLTLKKSAIVFVDMFAIKYDLVVNHKKYGIEKPLMTCCGHGGPPYNYDPKKSCMTSDEDLCKLGEKFISWDGVHFTDAANGIVASKVLSGEYSIPRVKLASLVSTAKSDD

SEQ ID NO: 97819 - protein, 50 aa, Setaria italica
  Transcript Sequence Number=SeqID_31845
HRRRPYTYTVVTTEDRVAGILDWTQTKPLTRDYTNNSVQRDEIRSLTASA

SEQ ID NO: 97820 - protein, 77 aa, Setaria italica
  Transcript Sequence Number=SeqID_31846
MDEVWSCLQDLQQLQDGDLAGLHPSPDLHDHDPFWPALADCAASFLAGDDTACFGVAGIDLSGGSATGNAVDGMDTA

SEQ ID NO: 97821 - protein, 127 aa, Setaria italica
  Transcript Sequence Number=SeqID_31847
  Subcellular localization annotation: CTP_CleavageSite=51; ConfidenceScore=5.05e-01
VTCTTGLLYTIIKIKASLLVCFVFAFFYLFSPPRPQEASLGLATKKASRCSCCLASVLLPAGEPDWVEGGERYRYGAYAQSLKTETLTTGLGDGESQQKAPTLANAKGFACLSRLPKRFPNSPPTAR

SEQ ID NO: 97822 - protein, 108 aa, Setaria italica
  Transcript Sequence Number=SeqID_31848
  Gene Ontology: Mol. function=protein serine/threonine kinase activity; Biological process=protein amino acid phosphorylation
  Homolog annotation: Hit_ID=B9R6R5; Match level="QueryCoverage=99%, HitCoverage=11%, E-value=1e-25, Identity=56%"; Hit description =Receptor protein kinase, putative
  Pfam annotation: Domain name=LRR_1; Domain location=1-25; Score=1.0; E_value=1.9e+02; Accession=PF00560.25; Description=Leucine Rich Repeat
  Pfam annotation: Domain name=LRR_1; Domain location=27-49; Score=4.2; E_value=47; Accession=PF00560.25; Description=Leucine Rich Repeat
  Pfam annotation: Domain name=LRR_1; Domain location=51-73; Score =15.9; E_value=0.16; Accession=PF00560.25; Description=Leucine Rich Repeat
  Pfam annotation: Domain name=LRR_1; Domain location=75-97; Score =15.1; E_value=0.29; Accession=PF00560.25; Description=Leucine Rich Repeat
  Pfam module annotation: Pfam domain module=LRR_1::LRR_1::LRR_1::LRR _1; Domain location=1-25::27-49::51-73::75-97
TLEFVNFNENPGFDIWRPPETFMALRRIRVLILSTTSMRGGIPAWLGNMTSLTDLELSGNFLTGRIPVSLARLHRLQFLELYYNELEGVVPPELGNLTELTDIDLSEN

SEQ ID NO: 97823 - protein, 53 aa, Setaria italica
  Transcript Sequence Number=SeqID_31849
  Gene Ontology: Mol. function=phosphatidate cytidylyltransferase activity; Cellular component=integral to membrane; Biological process=phospholipid biosynthetic process
  Homolog annotation: Hit_ID=O04928; Match level="QueryCoverage=79%, HitCoverage=9%, E-value=5e-12, Identity=80%"; Hit description =Phosphatidate cytidylyltransferase
YFFGFFFGKTPLIKLSPKKTWEGFIGASVTTMLSAFVVSKYLLAFYIIIGSHC

SEQ ID NO: 97824 - protein, 94 aa, Setaria italica
  Transcript Sequence Number=SeqID_31850
  Gene Ontology: Mol. function=phosphatidate cytidylyltransferase activity; Cellular component=integral to membrane; Biological process=phospholipid biosynthetic process
  Homolog annotation: Hit_ID=B6TYH9; Match level="QueryCoverage=93%, HitCoverage=20%, E-value=2e-45, Identity=98%"; Hit description =Phosphatidate cytidylyltransferase
  Pfam annotation: Domain name=CTP_transf_1; Domain location=1-82; Score=-28.0; E_value=0.00081; Accession=PF01148.12; Description =Cytidylyltransferase family
FICTLQFPWREVAIMPVQWHALALGLFASIIAPFGGFFASGFKRAFKFKDFGDSIPGHGGFTDRMDCQMVMAVFAYIYYQSFVMVQDLSVETIL

SEQ ID NO: 97825 - protein, 426 aa, Setaria italica
  misc_feature (179)..(179): Xaa can be any naturally occurring amino acid
  Transcript Sequence Number=SeqID_31851
  Gene Ontology: Mol. function=phosphatidate cytidylyltransferase activity; Cellular component=integral to membrane; Biological process=phospholipid biosynthetic process
  Homolog annotation: Hit_ID=B6TYH9; Match level="QueryCoverage=100%, HitCoverage=100%, E-value=0.0, Identity=89%"; Hit description =Phosphatidate cytidylyltransferase
  Pfam annotation: Domain name=CTP_transf_1; Domain location=56-387; Score=434.4; E_value=1.8e-127; Accession=PF01148.12; Description =Cytidylyltransferase family
MQRDTGGGDGTPGTPSPTHGGRLRHRKRSSEVLSDVNKTNGANLLLNDQNKYKSMLVRTYSSLWMMAGFVFLIYMGHLYIWAMVVVIQIFMAKELFNLLRKANEDRQLPGFRMLNWHFFFTAMLFTYGRFLSRQLVNTVTSDKLLYKLVSGLIKYQMFICYFLYIAGFVWFIVTLKKRXYKYQFSQYAWTHMILLTVFAQSSFTVANIYDGIFWFLLPASLIAINDVAAYFFGFFFGKTPLIKLSPKKTWEGFIGASVTTMLSAFVLANFMGHFQWLTCPRKDLSTGWLHCDPGPMFTPEIYNLRGWMPQCFPWREVAIMPVQWHALALGLFASIIAPFGGFFASGFKRAFKFKDFGDSIPGHGGFTDRMDCQMVMAVFAYIYYQSFVMVQDLSVETILEQILRNLTVEEQHDLYEQLGKLLARAN

SEQ ID NO: 97826 - protein, 59 aa, Setaria italica
  misc_feature (34)..(34): Xaa can be any naturally occurring amino acid
  misc_feature (50)..(50): Xaa can be any naturally occurring amino acid
  Transcript Sequence Number=SeqID_31852
  Homolog annotation: Hit_ID=Q84TY3; Match level="QueryCoverage=69%, HitCoverage=8%, E-value=2e-09, Identity=68%"; Hit description =Putative XS domain containing protein
MEHSSSEDSDISDSDIVEHKEKIYAQLRAGKLKXKYGESAFRCPFCPGKXKQDYNLKDL

SEQ ID NO: 97827 - protein, 630 aa, Setaria italica
  misc_feature (115)..(115): Xaa can be any naturally occurring amino acid
  Transcript Sequence Number=SeqID_31853
  Homolog annotation: Hit_ID=Q8W563; Match level="QueryCoverage=96%, HitCoverage=96%, E-value=1e-135, Identity=43%"; Hit description =Putative transcription factor X1
  Pfam annotation: Domain name=XH; Domain location=496-627; Score =234.7; E_value=2.3e-67; Accession=PF03469.6; Description=XH domain
  Pfam annotation: Domain name=XS; Domain location=112-226; Score =127.7; E_value=3.6e-35; Accession=PF03468.6; Description=XS domain
  Pfam annotation: Domain name=zf-XS; Domain location=43-84; Score =92.1; E_value=2e-24; Accession=PF03470.6; Description=XS zinc finger domain
  Pfam module annotation: Pfam domain module=XH::XS::zf-XS; Domain location=496-627::112-226::43-84
MEHSSSEDSDISDSDIVEHKEKIYAQLRAGKLKVKYGESAFRCPFCPGKKKQDYNLKDLLQHATGIGAAPKRSAKVKATHLGLAMFLEKDTASSLEKPLQIVVCKPKATKGEEEXFVWPWMGIVVNLHYELKGEAFSRESEERLRAQLSRFRPLQVTILGDDKDQAFCAIVKFAKDWGGLKDALAFEKHFVLEQYGKTDWNKINCRKDDIYGWLARSDDYNTLGPIGQHLREHGDLKSVGDLEREGTQKIDMRVAHYARQIEVTNKHMSELELKNNQNAMKLNRMMEEKDRLVEEHNEKIRKMQKAACRSSRKIIDENIRLYGELETKKKEIDRKGKQLEKLATKSNTDREKLEAAKEENAKENMLLNLATQKKKEEDEKLMRLVKKHEQEKEDALKKLCNLQMQLASKQKLELEIEQLKGNLEVMKHMVDEDKNLKEKLDKLLETLEEKNDEMENIDSLNQTLIIKERRTNDELEEAKKELTSGLQKMSAVRSLIGVKRMGELDHKAFVAACKEKITDAKELALVCSKWEDEIRQPDWHPFKVIDVDGVAKEIIKEDDEKLQALKAELGEKAHDVVVRALREINEYNPSGRYPLPELWNFKDDRKAPMGEVAAYIVKQWKTNKRKNTYT

SEQ ID NO: 97828 - protein, 38 aa, Setaria italica
  Transcript Sequence Number=SeqID_31854
CLNFDAQMCNAVFLAERSADRKIIHCNHQCITNISVPR

SEQ ID NO: 97829 - protein, 355 aa, Setaria italica
  Transcript Sequence Number=SeqID_31855
  Homolog annotation: Hit_ID=B9SM11; Match level="QueryCoverage=96%, HitCoverage=99%, E-value=1e-120, Identity=62%"; Hit description=Non -imprinted in Prader-Willi/Angelman syndrome region protein, putative
  Pfam annotation: Domain name=DUF6; Domain location=32-138; Score =13.1; E_value=0.014; Accession=PF00892.12; Description=Integral membrane protein DUF6
  Pfam annotation: Domain name=DUF803; Domain location=16-316; Score =645.9; E_value=3.8e-191; Accession=PF05653.6; Description=Protein of unknown function (DUF803)
  Pfam module annotation: Pfam domain module=DUF6::DUF803; Domain location=32-138::16-316
MGGGGGGEGASGGPELSTDNVKGIVLALLSSGFIGASFIIKKKGLRRAAVASGVRAGVGGYSYLMEPLWWVGMITMIVGEVANFVAYAFAPAVLVTPLGALSIIVSAVLAHFILNERLHALGVLGCVMCIAGSVVIVIHAPQEQEITSVREIWNMATQPAFLLYVASVIVVVFVLVFYFSPLYGQSNVLIYTAICSLMGSLSVMSVKALGTSLKLTFEGTNQLIYPETWFFMLVVATCVLTQMNYLNKALDTFNTAIVSPIYYVMFTTLTILASVIMFKDWSGQSPGSIISGICGLIVVLSGTILLHVTKDYERIPQSRSVYAPLSPSLTTRLNGELLKHVDDEKTSDEEKALRR

SEQ ID NO: 97830 - protein, 111 aa, Setaria italica
  Transcript Sequence Number=SeqID_31856
  Homolog annotation: Hit_ID=B9SM11; Match level="QueryCoverage=97%, HitCoverage=32%, E-value=1e-24, Identity=54%"; Hit description=Non -imprinted in Prader-Willi/Angelman syndrome region protein, putative
ALDTFNTAIVSPIYYVMFTTLTILASVIMFKDWSGQSPGSIISGICGLIVVLSGTILLHVTKDYERIPQSRSVYAPLSPSLTTRLNGELLKHVDDEKTSDEEKALRRREMY

SEQ ID NO: 97831 - protein, 104 aa, Setaria italica
  Transcript Sequence Number=SeqID_31857
  Gene Ontology: Mol. function=protein binding; Biological process=cell division
  Homolog annotation: Hit_ID=Q7XC35; Match level="QueryCoverage=66%, HitCoverage=32%, E-value=3e-29, Identity=88%"; Hit description =Cyclin-P4-1
DICYNNAYFARVGGISLVEMNYLEVDFLFGIAFDLNVTPAAFASYCSVLQSEMAYLDPPSPVDAPRLHCYSSAGTSDHHHDDPATAATAAGCHRHSQQQPQLTV

SEQ ID NO: 97832 - protein, 66 aa, Setaria italica
  Transcript Sequence Number=SeqID_31858
LVSSSACRGAAFIKTTERLGLLSICRYFESPGNCVRQCSCLNFIIIARSYFEAKYSISAASITPIR

SEQ ID NO: 97833 - protein, 93 aa, Setaria italica
  Transcript Sequence Number=SeqID_31859
  Subcellular localization annotation: CTP_CleavageSite=21; ConfidenceScore=5.17e-01
QKRIDTAPFFLFQSSLILLIPSSLGSALSPCWVVSVIAKNPCLIGLKFSFLQRYFESPGNCVRQCSCLNFIIIARSYFEAKYSISAASITPIR

SEQ ID NO: 97834 - protein, 235 aa, Setaria italica
  Transcript Sequence Number=SeqID_31860
  Gene Ontology: Mol. function=sequence-specific DNA binding; Cellular component=nucleus; Biological process=regulation of transcription, DNA-dependent
  Homolog annotation: Hit_ID=Q8S5U8; Match level="QueryCoverage=100%, HitCoverage=27%, E-value=4e-64, Identity=62%"; Hit description =Putative homeodomain protein
  Pfam annotation: Domain name=POX; Domain location=138-235; Score =40.4; E_value=1.5e-10; Accession=PF07526.3; Description=Associated with HOX
MATFFSASADQRDLAAAGDMFHHYTTSNPYSDSPTGGLMPFPATIVSEGHVAHCGDGRDEPASFVNARDGPTSGAGMGLQTQLLMANASTAQHQGLSLSLGTQGVPVSLYQYRQAGMAAASLLSPGQTTTASRSAQSIYIQNSKYLKAARELLDEVVNVRDAIKRKGDKNQSNKDSGEGKDAEKSEEKAEEHEGNSSAELTPSERQDLQNKVSALMALLDQVDRKYRHYHHQMQI

SEQ ID NO: 97835 - protein, 382 aa, Setaria italica
  Transcript Sequence Number=SeqID_31861
  Gene Ontology: Mol. function=sequence-specific DNA binding; Cellular component=nucleus; Biological process=regulation of transcription, DNA-dependent
  Homolog annotation: Hit_ID=Q8S5U8; Match level="QueryCoverage=97%, HitCoverage=45%, E-value=1e-114, Identity=82%"; Hit description =Putative homeodomain protein
  Pfam annotation: Domain name=Homeobox; Domain location=145-203; Score= 0.9; E_value=0.0098; Accession=PF00046.21; Description=Homeobox domain
  Pfam annotation: Domain name=POX; Domain location=1-94; Score=119.2; E_value=1.3e-32; Accession=PF07526.3; Description=Associated with HOX
  Pfam module annotation: Pfam domain module=Homeobox::POX; Domain location=145-203::1-94
VVVGSKVRRYEEHEGNSSAELTPSERQDLQNKVSALMALLDQVDRKYRHYHHQMQIVMSSFDAVAGAGAARPYTALALQTISRHFRSLRDAIGAQVQSLRRSLGEKDTSAQGGGLSRLRYIDQQLRQQRAMQQFGMMQQPQHAWRPQRGLPESAVSVLRAWLFEHFLHPYPKDSEKLMLARQTGLSRGQVSNWFINARVRLWKPMIEEMYKEEFGAEMDSHSSSENAGNKGKDEAISSEDHDEFQSPSSAAKHGTAAGHLNAFKSEAIGGMDAGGAIGSYTTSLNLGAVGNGSSSSSLLQDALAHHHSDPRFVAYGDMVGLGGYDGGSVSLTLGLQHCNDAGAVPAEQPGLLYGNAGDFEFMNASEDRQRFGSSQLLHDFVA

SEQ ID NO: 97836 - protein, 74 aa, Setaria italica
  Transcript Sequence Number=SeqID_31862
MVVEAGDLFIQSKDNAEDVSQTQENNSFLDRISKSLPSYFSDDMLLGIQLDELYNHFEVGLTGFQVKVLLPDRH

SEQ ID NO: 97837 - protein, 118 aa, Setaria italica
  Transcript Sequence Number=SeqID_31863
RTTGRTAARAFNSKIMCPSLHFIGDDDFVKVHSEELVEAFADPLVIRHPCGHTIPNLDEKGLQTMLTFLDKIERGIWEHSSTDTKIMVSNFGRSSKYLKFRKCTELTCSKEYQIQRVW

SEQ ID NO: 97838 - protein, 150 aa, Setaria italica
  misc_feature (43)..(43): Xaa can be any naturally occurring amino acid
  Transcript Sequence Number=SeqID_31864
SDLGGHDPVECKNFDRCFSYLEELMIRRAARILPVLAGLQTRXLTFTRQAKVKCVIVISGGEIQATARAFNSKIMCPSLHFIGDHDFAKVHNEELVEAFVDPLVIRHPCGHTIPNLGESISAWRVFHEEKTEVLSTHLTISAVKSKYVGE

SEQ ID NO: 97839 - protein, 58 aa, Setaria italica
  Transcript Sequence Number=SeqID_31865
HTEYYCAGDHDFAKVHNEELVEAFVDPLVIRHPCGHTIPNLGESISAWRVFHEEKQKF

SEQ ID NO: 97840 - protein, 69 aa, Setaria italica
  Transcript Sequence Number=SeqID_31866
VGFWQAEQARGRKDARVVGRGGRLGVTSALKIGFTRPRYSSRAGLGGARRKRSADGERGRKKWKPRWFG

SEQ ID NO: 97841 - protein, 102 aa, Setaria italica
  Transcript Sequence Number=SeqID_31867
LASGKQDPTQICQWLELSLIKLSSCHPCQLCNHASSMMCSRCWSVINASHDVETENHCVRNILIVACSESECPQLPIYHHLDHAHLPEWKPCLSLGPRSVAG

SEQ ID NO: 97842 - protein, 306 aa, Setaria italica
  Transcript Sequence Number=SeqID_31868
  Gene Ontology: Mol. function=protein binding; Cellular component =chromosome; Biological process=chromosome organization and biogenesis
  Homolog annotation: Hit_ID=Q8L6H8; Match level="QueryCoverage=100%, HitCoverage=24%, E-value=1e-166, Identity=91%"; Hit description=SMC4 protein
  Pfam annotation: Domain name=ABC_tran; Domain location=156-285; Score= -50.7; E_value=0.029; Accession=PF00005.19; Description=ABC transporter
  Pfam annotation: Domain name=SMC_N; Domain location=16-291; Score =82.1; E_value=2e-21; Accession=PF02463.11; Description=RecFRecNSMC N terminal domain
  Pfam module annotation: Pfam domain module=ABC_tran::SMC_N; Domain location=156-285::16-291
TKEEYSKLKKALDELRASEVDAEYKLQDTKELAKEWEMKVKAFRKRLDDIQTNLAKHMDQIQKDAIDPEKLKVTLRDEQLNDTCDMKRAMEMVALLEAQLKDLNPNLDSIAEYRTKARLYSERVDELNATTQERDDLKKLHDGLRKRRLDEFMAGFNIISLKLKEMYQMITLGGDAELELVDSLDPFSEGVVFSVRPPKKSWKNIANLSGGEKTLSSLALVFALHHYKPTPLYVMDEIDAALDFKNVSIVGHYVKDRTKDAQFIIISLRNNMFELADRLVGIYKTDNCTKSITINPGSFAESMKVV

SEQ ID NO: 97843 - protein, 43 aa, Setaria italica
  Transcript Sequence Number=SeqID_31869
GQGAPPRGPCPQGHEGPGRAEPVSAFYQGVGLARSGLARHSPN

SEQ ID NO: 97844 - protein, 128 aa, Setaria italica
  Transcript Sequence Number=SeqID_31870
  Subcellular localization annotation: CTP_CleavageSite=24; ConfidenceScore=5.10e-01
RSEIRSSRISPAGVLVAPGRPVRRCRRATSPRREREALSHESARREPNVAGTSDAAMEPLNADLTLGIIARSDDAATVVRCAAPSAILDDPSFRRRLELRAAGGLLYVPPPASSSSLRCSPCPLRRRG

SEQ ID NO: 97845 - protein, 82 aa, Setaria italica
  Transcript Sequence Number=SeqID_31871
  Subcellular localization annotation: CTP_CleavageSite=94; ConfidenceScore=5.81e-01
PGEGANANPRRWLPPPPSPPLPRTTTPATPPPSPLTRTRSNPASAPASAPLLAPALSSGRPPLPPPCRRPTTRRRSWSGASP

SEQ ID NO: 97846 - protein, 644 aa, Setaria italica
  misc_feature (384)..(384): Xaa can be any naturally occurring amino acid
  Transcript Sequence Number=SeqID_31872
  Gene Ontology: Mol. function=nucleotide binding; Biological process =defense response
  Homolog annotation: Hit_ID=Q84KC8; Match level="QueryCoverage=100%, HitCoverage=40%, E-value=0.0, Identity=57%"; Hit description=NBS-LRR disease resistance protein homologue
  Pfam annotation: Domain name=NB-ARC; Domain location=256-539; Score =186.5; E_value=7.3e-53; Accession=PF00931.14; Description=NB-ARC domain
RSPALKEMLLKLQQLAYGADDVLDELEYFRIQDMLDGKNHAADVHEGGCIHGLTLNARHTARAIASKLKICSGSREGSRGDPDDENEDDARQGCLSGICSCGRLAISSTPKSPTTQSDQYSGCMSKVASCARQAAHDVGKRLTCSSFPCVHNNAHSDMLDAGTFCSACQSKIKEGKHVVQTPKLKFDRVDISKKMKDIVEKLKHVSAKVSTILDMELLGSAILKLELLGSNTTTQKNAMGRPETTPDIIEPKLYGRDNQKRSLIDGITDGQYFANDLVVLPIVGPGGIGKTTFTQHVYDEVKKHFEVTIWICVSLNFNVSRLVQEVVRKIPKVDNEKENSSAQELIEQRLKTKRFLLVLDDMWTCQEDEWKKLIAPFGRGGEKXGNVVIVTTRIPEVAEMVKTVDCSVQMDRLGDEDFMHFFEACVFGYQQPWKDCLELRLVGKKIVRNLKGFPLAAKTVGRLLRKQLTLDHWTSVLESKEWELQTNDNDIMPALKLSYDYLPFHLQQCFSYCSLVPEDYEFLNDELIHLWIGLDILHTCGQNKRTEDIARSYLVDLVNHGFLKRNEKDDGTPYYVVHDLLHNLAVKVSSYECISINSSNVRSIEIPISVRHLSIVVDDKEVENRVNFENFKKGLRELDKRLNV

SEQ ID NO: 97847 - protein, 74 aa, Setaria italica
  Transcript Sequence Number=SeqID_31873
LGSIPFLPVLAHQFPAVIIVICYLLGMFFYNNCGLSYFVLTMEISNFKIGGHLDLVVNRFAVRCMFGPISSQSP

SEQ ID NO: 97848 - protein, 122 aa, Setaria italica
  Transcript Sequence Number=SeqID_31874
  Gene Ontology: Mol. function=kinase activity; Cellular component =plasma membrane
FELQPIYEKIDNFFANGSESSAEEIADNVDELVDKVVNLELKFPKQSAQINQLKQENENLKNKLDDLQDEMELRDDQSDLNAQLKLLEDEFNRVRILDKSIIEEEVSVNKGFSEVFSCIINI

SEQ ID NO: 97849 - protein, 84 aa, Setaria italica
  Transcript Sequence Number=SeqID_31875
MAMGAVYGDPAAADHFTAFDHDDFFFQRTPYAGEGSGGGDGLTTPYSSITDYLQGFLDPAGLAAHLDVPCRLGDDDAVKQEMEV

SEQ ID NO: 97850 - protein, 123 aa, Setaria italica
  misc_feature (117)..(117): Xaa can be any naturally occurring amino acid
  Transcript Sequence Number=SeqID_31876
  Gene Ontology: Mol. function=DNA binding; Cellular component=nucleus; Biological process=regulation of transcription
  Homolog annotation: Hit_ID=Q5N7Y8; Match level="QueryCoverage=97%, HitCoverage=14%, E-value=9e-24, Identity=49%"; Hit description =Putative Myb-like protein
MDANKSEGTDSHSSMCQGTCYTSTEAVGSALPDGHHHLSSSFSQRLDLQMDVHEGSGNSMFVDEQTLCSTSNQENSMVPFGVAQEMPVSVLSSVSDAEQKLHLISDADSLKSELWKXVSLQTL

SEQ ID NO: 97851 - protein, 78 aa, Setaria italica
  Transcript Sequence Number=SeqID_31877
  Gene Ontology: Mol. function=electron carrier activity; Cellular component=intrinsic to endoplasmic reticulum membrane
  Homolog annotation: Hit_ID=Q69SQ1; Match level="QueryCoverage=97%, HitCoverage=32%, E-value=6e-17, Identity=56%"; Hit description =Flavin-containing monooxygenase-like
FSQTYKFDFLILCVGRYAVAKHPKFPHEAGPEVFHGQVLHSMDFSRMPHADADELIRGKRVVVVGAGKSGIDIVAQCA

SEQ ID NO: 97852 - protein, 230 aa, Setaria italica
  Transcript Sequence Number=SeqID_31878
  Gene Ontology: Mol. function=zinc ion binding
  Homolog annotation: Hit_ID=B9RVN5; Match level="QueryCoverage=93%, HitCoverage=20%, E-value=4e-56, Identity=47%"; Hit description =Protein binding protein, putative
  Pfam annotation: Domain name=DUF1423; Domain location=49-230; Score= -5.3; E_value=1.3e-12; Accession=PF07227.3; Description=Protein of unknown function (DUF1423)
  Subcellular localization annotation: CTP_CleavageSite=21; ConfidenceScore=5.15e-01
MSNDLRRHASIPGVLSPTHSRGSHDSGSEHNRHRRQLTRERSSSSLTRGDRQEGEQLVINGAGVIERIISKVVSEPLHLTGRMLQEMTENSITYLREAISDIIVDPGKREQIIALQEALKKRSDLNSDMLRMCPRVLMEILVAIKTGHPYFIKKSSSVATSNLVDIFLNLKCCNLSCQSILPVDDCDCKVCQRKTGFCSSCMCIVCSKFDSASNTCSWVGCDVCLHWCHT

SEQ ID NO: 97853 - protein, 1346 aa, Setaria italica
  Transcript Sequence Number=SeqID_31879
  Gene Ontology: Mol. function=zinc ion binding; Cellular component =nucleus; Biological process=regulation of transcription, DNA -dependent
  Homolog annotation: Hit_ID=B9RVN5; Match level="QueryCoverage=46%, HitCoverage=58%, E-value=1e-131, Identity=39%"; Hit description =Protein binding protein, putative
  Pfam annotation: Domain name=DUF1423; Domain location=867-1334; Score= 817.6; E_value=7.7e-243; Accession=PF07227.3; Description=Protein of unknown function (DUF1423)
  Pfam annotation: Domain name=PHD; Domain location=1023-1085; Score =4.0; E_value=0.0096; Accession=PF00628.21; Description=PHD-finger
  Pfam module annotation: Pfam domain module=DUF1423::PHD; Domain location=867-1334::1023-1085
GGGGGGFHDGRYREYPSPREYGGDRAMHRSESFSGFRREFPKGFRSERDRSRRDGDGGSAWRRPGSGWRDAECFDEYRAPSRLGAASLTAQPQRSRSRSRSPSVPRRRFEVTKAEKLKKQTAGVSEIEEGEVAPDAEPKARPAAVEHRKQVEPSRAKEKGPERGKVKKLDSRVPADKGTQGKGATGAADPDNAGKEEVRRIDGMLAEAGKPIDEGTMLADAGKPIDEGSEKSSMKVEEEVSGGHEVQAQDVVTGDASKFGLSTSPMQQEVLQRGVHRQEETTNSVDVVGQSTSSSILNEVIQEEAPTQEETVNDINDAEKSAPSSFSQGVVQDEVMMAHKTGSAADDVGKSTSPVMRQEVVQEEALALDSTSYAADEVGKLSGMPQQVLQEEVMKQDGTSSDVHRIETDTSDDLLREATQEKMTMLDETAHNTALEPVSYSGMLKEAMHEGESMMDATGNTTDVAGRSNSADVAEDAMPEKAAVQETTNAVNLTGESNTFTGPQREVIASLQLQAPEIKEFEKLTVEMDKPTEHAAFQPAEEELEMDQCRKGGASKESMIVENEADVLDESVEKQLTGFDIETDADGARMFHRSTKEHVGDSKEDAASANVMTRESMAEAKGNGIAFDVLSKKVKVDHSTSAGRSLDSALQLGVEPTETSNSASTTPVKQENDTVKLGKLDLSLSLSGCLQNSEFKCSIPQTARLVHAACSQPLPSSSFRTNSDGFAASVSLTSSQTFGHNPSCSLTQQSLDNYEHSVGSKPFFMGVGQMSNRTGRQAQLSSESTQKGSATPLLQRVLLNDHMPETNTLAGIKGHNNVMSNDLRRHASIPGVLSPTHSRGSHDSGSEHNRHRRQLTRERSSSSLTRGDRQEGEQLVINGAGVIERIISKVVSEPLHLTGRMLQEMTENSITYLREAISEIYIELEYQGKREEIIALQEALKKRSDLNSDMLRMCPRVLMEILVAIKTGHPYFIKKSSSVATSNLVDIFLNLKCCNLSCQSILPVDDCDCKVCQRKTGFCSSCMCIVCSKFDSASNTCSWVGCDVCLHWCHTDCGLRHSLIRKGQSASRAYGTTEMQFHCAACGHPSEMFGFVKEVFRTCAQHWRMETLIRELQYVERIFSASDDVRGKRVRNFVKQMLIKSENKAYHPEVVKCVIAFFSDDDTILGINPSVPLKGIPCSIAEAIDGIPSSSRKAAWTPFTLEGLPVLDKTTVQSTTGSPSLHRKSGEAEFQTIDNKKAVTDELDSLIRLKQAEAYMYQERANDARNEVDNLRRIIMVKNARIEEDYATQIDDLDIYELQERRKRKIEELQVIERTHHEFLNMKTRMVASIRELLSKMEALKQNRTI

SEQ ID NO: 97854 - protein, 220 aa, Setaria italica
  Transcript Sequence Number=SeqID_31880
  Gene Ontology: Mol. function=protein binding; Cellular component =intracellular; Biological process=reproduction
  Homolog annotation: Hit_ID=Q6AU06; Match level="QueryCoverage=99%, HitCoverage=96%, E-value=1e-102, Identity=53%"; Hit description =Putative WD G-beta repeat protein
  Pfam annotation: Domain name=WD40; Domain location=130-171; Score =31.5; E_value=3.4e-06; Accession=PF00400.24; Description=WD domain, G-beta repeat
  Pfam annotation: Domain name=WD40; Domain location=175-215; Score =26.2; E_value=0.00013; Accession=PF00400.24; Description=WD domain, G-beta repeat
  Pfam annotation: Domain name=WD40; Domain location=3-41; Score=46.6; E_value=9.5e-11; Accession=PF00400.24; Description=WD domain, G-beta repeat
  Pfam annotation: Domain name=WD40; Domain location=45-83; Score=52.3; E_value=1.9e-12; Accession=PF00400.24; Description=WD domain, G-beta repeat
  Pfam annotation: Domain name=WD40; Domain location=87-126; Score =24.3; E_value=0.00049; Accession=PF00400.24; Description=WD domain, G-beta repeat
  Pfam module annotation: Pfam domain module=WD40::WD40::WD40::WD40::WD4 0; Domain location=130-171::175-215::3-41::45-83::87-126
  Subcellular localization annotation: CTP_CleavageSite=38; ConfidenceScore=5.08e-01
AGPGLVKTLTGHTNYAFCVSFSPHGNVLASGSFDETVRVWEVRSGKCLRVLPAHSEPVTAVDFDRDGAMIVSGSYDGLCRVWDSATGHCVKTLIDDESPPVSFAKFSPNGKFVLAATLDSTLRLWNFSAGKFLKTYTGHVNTKYCIPAAFSITNGKYIVSGSEDKCVYLWDLQSRKIVQKLEGHTDTVIAVSCHPRENMIASGALDNDKTVKVWVQKEDQ

SEQ ID NO: 97855 - protein, 200 aa, Setaria italica
  Transcript Sequence Number=SeqID_31881
  Gene Ontology: Cellular component=integral to membrane
  Homolog annotation: Hit_ID=O80539; Match level="QueryCoverage=61%, HitCoverage=44%, E-value=4e-40, Identity=60%"; Hit description =F14J9.24 protein
  Pfam annotation: Domain name=DUF607; Domain location=17-172; Score =236.2; E_value=8.2e-68; Accession=PF04678.5; Description=Protein of unknown function, DUF607
ISQLILINIGLDCCLVVLHKQLPNTSRYLPLADANSSCFIQIVDLVRKAMPLALTPENDPGKEELKQLQAQLEDINKLAHKQVRRILWSGLGFLITQVGLFFRLTFWEFSWDVMEPITFFTTTTGLVVGYAYFLITSRDPTYRDFMERMFESRQKKLIQRQNFNLDRYLELQRRCKDPLEKVCGTSNPDMAHLHELSIHK

SEQ ID NO: 97856 - protein, 86 aa, Setaria italica
  misc_feature (11)..(11): Xaa can be any naturally occurring amino acid
  Transcript Sequence Number=SeqID_31882
  Gene Ontology: Mol. function=DNA binding; Cellular component=nucleus; Biological process=regulation of transcription, DNA-dependent
  Homolog annotation: Hit_ID=B4FNX8; Match level="QueryCoverage=100%, HitCoverage=24%, E-value=6e-33, Identity=83%"; Hit description=NAC domain-containing protein 76
KTLVFYIGRAXPHGKKTDWIMHEYRLDEENVEIQEDGWVVCRVFKKKNYQRGLNPADMAALDDDELQPFPVPRVPAAMPTDHKHNP

SEQ ID NO: 97857 - protein, 109 aa, Setaria italica
  misc_feature (13)..(13): Xaa can be any naturally occurring amino acid
  Transcript Sequence Number=SeqID_31883
  Gene Ontology: Mol. function=nucleic acid binding
  Homolog annotation: Hit_ID=Q75HC2; Match level="QueryCoverage=100%, HitCoverage=10%, E-value=1e-42, Identity=77%"; Hit description =Protein argonaute 7
LPPKLKLGNGGRXIKDITPDRYDRQWNLMDSHVAEGSKIKSWALISFGGSPEHQSFVPKFINQLSSRCEQLGILLNKKTVLSPLFERIHLLNNVGILRTAEKIQEAASG

SEQ ID NO: 97858 - protein, 166 aa, Setaria italica
  misc_feature (155)..(155): Xaa can be any naturally occurring amino acid
  Transcript Sequence Number=SeqID_31884
  Gene Ontology: Cellular component=membrane
  Homolog annotation: Hit_ID=B6U1N6; Match level="QueryCoverage=98%, HitCoverage=42%, E-value=1e-83, Identity=92%"; Hit description =Nodulin-like protein
  Pfam annotation: Domain name=DUF6; Domain location=20-153; Score =47.8; E_value=4.2e-11; Accession=PF00892.12; Description=Integral membrane protein DUF6
MLAKMGGSAKAYAAVVLIRLMYSGMHVMSKVALDQGMNPLVFVFYRHTTAALVLIPTAFVLERRKAKPVTFKIGWKMFIHALYGVTACGVLFNLGLNYASATSSSALYNVQPVVTFILAVIFGMETLKLTRFHGKVKFAGILCCIAGVTVLAFYXEGPMFRSFNHH

SEQ ID NO: 97859 - protein, 410 aa, Setaria italica
  Transcript Sequence Number=SeqID_31885
  Gene Ontology: Mol. function=protein serine/threonine kinase activity; Biological process=protein amino acid phosphorylation
  Homolog annotation: Hit_ID=Q650V1; Match level="QueryCoverage=100%, HitCoverage=57%, E-value=1e-166, Identity=67%"; Hit description =Putative serine/threonine-specific protein kinase
  Pfam annotation: Domain name=Pkinase; Domain location=178-403; Score =182.0; E_value=1.7e-51; Accession=PF00069.17; Description=Protein kinase domain
  Pfam annotation: Domain name=Pkinase_Tyr; Domain location=178-410; Score=225.2; E_value=1.7e-64; Accession=PF07714.9; Description =Protein tyrosine kinase
  Pfam module annotation: Pfam domain module=Pkinase::Pkinase_Tyr; Domain location=178-403::178-410
LPCRIVKGCKYCKAGAATSCLVRFGHDREYLIDLIGNPGFLSEPDSLLNGLSSISVSSPLRPPKHNSVDIAYICKSLAKQYFLDCQSLNLMFSDPAAGTVIDLDEAMGSNLGPNTSHGTNSDCQATFPHLNAGAQLGSQDENFMMQRSFPEDTQSGLSDPFSDMSLDIEDLIIPWSELVLKEKIGAGSFGTVHRADWNGSDVAVKILMEQDFHPERLKEFLREVAIMRSLRHPNIVLLMGAVTQPPNLSIVTEYLSRGSLYRLLHRHSARENLDERRRLSMAFDVAKGMNYLHKRNPPIVHRDLKSPNLLVDKKYTVKVCDFGLSRLKANTFLSSKTAAGTPEWMAPEVLRDEPSNEKSDVYSFGVILWELMTLQQPWSNLNPAQVVAAVGFKGRRLEIPSSVDPKVAAL

SEQ ID NO: 97860 - protein, 73 aa, Setaria italica
  misc_feature (15)..(15): Xaa can be any naturally occurring amino acid
  Transcript Sequence Number=SeqID_31886
  Gene Ontology: Cellular component=integral to membrane
  Homolog annotation: Hit_ID=B9RJS5; Match level="QueryCoverage=94%, HitCoverage=18%, E-value=9e-15, Identity=57%"; Hit description =Purine transporter, putative
GLIICVSSLLAGVMXAVLLPLSEVLSVIFLHEKFDGTNGIALVLSLWGFVSYLYGENAQKKLEAKKIAPQACH

SEQ ID NO: 97861 - protein, 45 aa, Setaria italica
  Transcript Sequence Number=SeqID_31887
QEHIDQYFCTMTMRTLARMTVNLDPNLRQAEDMNQVAFNISYSHI

SEQ ID NO: 97862 - protein, 163 aa, Setaria italica
  misc_feature (45)..(45): Xaa can be any naturally occurring amino acid
  misc_feature (129)..(129): Xaa can be any naturally occurring amino acid
  Transcript Sequence Number=SeqID_31888
  Gene Ontology: Mol. function=serine-type carboxypeptidase activity; Cellular component=extracellular region; Biological process =proteolysis
  Homolog annotation: Hit_ID=B6SWY3; Match level="QueryCoverage=93%, HitCoverage=30%, E-value=5e-74, Identity=85%"; Hit description =Serine carboxypeptidase
WWPLHTTACNTILNDDTNTRATIDYYWTHAMISKETHKAVQENCXFNGTYTGLCRTAIEAANNEKGLIDQSNIYASFCWDASAPRQHHASVTNTDPCASYYMRSYLNRQEVQRAFHANTTGLKQPWLDXSHIISPENWKDAQVSMLPSIQQLISSGIRTWLYR

SEQ ID NO: 97863 - protein, 187 aa, Setaria italica
  misc_feature (184)..(184): Xaa can be any naturally occurring amino acid
  Transcript Sequence Number=SeqID_31889
  Gene Ontology: Mol. function=serine-type carboxypeptidase activity; Cellular component=extracellular region; Biological process =proteolysis
  Homolog annotation: Hit_ID=B6SWY3; Match level="QueryCoverage=94%, HitCoverage=29%, E-value=8e-74, Identity=77%"; Hit description =Serine carboxypeptidase
  Pfam annotation: Domain name=Peptidase_S10; Domain location=3-187; Score=-64.9; E_value=4.2e-11; Accession=PF00450.14; Description =Serine carboxypeptidase
LLLAWQILKISGPGCSSLGGAMLEIGPFFVNRDNKTLSRNKYAWNNGRLIPTRLHMAVNTLNTSVLTDHSWMTVANMLFLESPAGVGFSYSNRTSDYNNTGDRSTTADAYTFLINWLERFPEYKGHSFFITGESYGGHYIPQLANTILSNNKIMNITMINLKGIAIGNAYLNDDTNTRATIDYXWTH

SEQ ID NO: 97864 - protein, 507 aa, Setaria italica
  Transcript Sequence Number=SeqID_31890
  Gene Ontology: Biological process=protein localization
  Homolog annotation: Hit_ID=B9RUS0; Match level="QueryCoverage=96%, HitCoverage=11%, E-value=1e-178, Identity=61%"; Hit description =Vacuolar protein sorting-associated protein, putative
MQVWSRRITGVGDGLIQGTEAFAQGLAFGVSGVLRKPVESARQYGLIGIAPGLGRAFVGFIVQPLSGALDFFSLTVDGIGASFMRCVNILSNKSVPQRIRDPRAIHRDGIVREYDKVEAAGQMALYLAEASRYFACTDLFREPSKYAWSDYYEDHFILPNQRIALVTNKRVILLQCLDLDKMDKKPSKILWDVPWEEVLALELAKAGYQRPSHVIIHLKNFRRSENFVRLIKCNVDEDREPQALSLCSSVRKMWRSHQAAMKVIPLKVPSGQRHVYFASDDDKRESHSLSRSLISSRGTSSDVEQRLMNHTVNFQKMWSSEPEIRSRCKLVAKQVADDGRVFSIWRPLCPNGYISIGDVAHVGTHPPQLAAVYKNANGNFALPLGYDLVWRNCAEDYKSPVSIWLPRPPGGYVALGCVAVSAFEEPPLDCAFCVDERLAEAAEYEEQIIWASADAYPWGCYIYQVQSSSLQFMALRVSKEQSEQRPKKIVESLMQRAPATPRQEKQT

SEQ ID NO: 97865 - protein, 56 aa, Setaria italica
  Transcript Sequence Number=SeqID_31891
SSQQQGRRAGPGRRRRLLCLDRSSLLLLSSHVDGGREGSRRWRCCPLLAMNQPRMI

SEQ ID NO: 97866 - protein, 351 aa, Setaria italica
  misc_feature (32)..(32): Xaa can be any naturally occurring amino acid
  misc_feature (177)..(177): Xaa can be any naturally occurring amino acid
  misc_feature (199)..(199): Xaa can be any naturally occurring amino acid
  Transcript Sequence Number=SeqID_31892
  Homolog annotation: Hit_ID=B4FRE3; Match level="QueryCoverage=88%, HitCoverage=86%, E-value=1e-129, Identity=76%"; Hit description =Ankyrin repeat domain-containing protein 2
  Pfam annotation: Domain name=Ank; Domain location=259-291; Score =26.3; E_value=0.00013; Accession=PF00023.22; Description=Ankyrin repeat
  Pfam annotation: Domain name=Ank; Domain location=292-324; Score =36.0; E_value=1.5e-07; Accession=PF00023.22; Description=Ankyrin repeat
  Pfam module annotation: Pfam domain module=Ank::Ank; Domain location =259-291::292-324
MAAQEEKTATVKTEEPSPAEEQQPAAGATRRXAGPSAPANPFDFSTMMNLLNDPSIKEMAEQIAKDPAFTQMAEQLQKTVVSPRQAPAAKQAVPQAAAALDPQKYVATMQQLMQNPQFVAMAERLGSALMQDPAMATMLGGLTNPAHKEQLEARIARMKEDPTLKPILDEIETGGPXAAMMKYWNDPEALQKFGRAMGXVGPSSEAAGAEHDEAEEEAGEEEGEYEESSIIHHTASVGDVEGLKKALEDGVDKDEEDSEGRRGLHFACGYGELNCAQVLLDAGAAVDAVDKNNNTALHYAAGYGRKDCVALLLESGAAVTLQNLDGKTPIDVAKLNNQEDVLKLLEKHAFV

SEQ ID NO: 97867 - protein, 81 aa, Setaria italica
  Transcript Sequence Number=SeqID_31893
YQISSPTPTRLDSDSGKWDPFIPICLYKGKGWIHRSKRARVAATSEDIMGLPEVTGRSRSGEECAVCLQDFGADEKLRAMP

SEQ ID NO: 97868 - protein, 278 aa, Setaria italica
  misc_feature (108)..(108): Xaa can be any naturally occurring amino acid
  Transcript Sequence Number=SeqID_31894
  Gene Ontology: Mol. function=protein dimerization activity
  Homolog annotation: Hit_ID=Q01N04; Match level="QueryCoverage=96%, HitCoverage=34%, E-value=1e-101, Identity=66%"; Hit description =OSIGBa0126J24.6 protein
FIVIGIVINHEWLEYSIKKDSAFCFICYLFKKGAGSNTFIVGGWNNWNIGNKALLKHSGSMAHNAAQERYISFINPKVAIDYHIEKWTDEDLRLYKKRLTYSLRCIKXLLHQGLAFRGHDENEESSNRGNFIELLKFLAGNSDEVNKYVLNNAPGNCTLTSPEIQKQIIHCCAIETRKKIIEELDDEPYAILADESSDISHKEQLALCLRYVDKLGRPCEHFIGVVHVDDTTSSSLKEAIEGLLVSHGLTMTQIRGQGYDGASNMKGDIKGLKTLIMQ

SEQ ID NO: 97869 - protein, 164 aa, Setaria italica
  misc_feature (93)..(93): Xaa can be any naturally occurring amino acid
  Transcript Sequence Number=SeqID_31895
  Gene Ontology: Mol. function=aspartic-type endopeptidase activity; Cellular component=chromatin; Biological process=RNA-dependent DNA replication
  Homolog annotation: Hit_ID=Q6UUN7; Match level="QueryCoverage=100%, HitCoverage=13%, E-value=4e-63, Identity=70%"; Hit description =Putative gag-pol polyprotein
KCTICTHQVVFLGFVVSGQEIQVGESKVAAIKEWPTPENVSQLRSFHGLASFYRRFVKDFSTIAAALNELTKKGVVFKSGEPQENAFRELKKXLMEAPLLVLPDFTITFEVECDESGIGIGGVLMQDGKPIAYFSEKLGGAQLNYSMYDKELYALVRVLETWQH

SEQ ID NO: 97870 - protein, 157 aa, Setaria italica
  misc_feature (20)..(20): Xaa can be any naturally occurring amino acid
  misc_feature (91)..(91): Xaa can be any naturally occurring amino acid
  misc_feature (110)..(110): Xaa can be any naturally occurring amino acid
  Transcript Sequence Number=SeqID_31896
  Gene Ontology: Mol. function=aspartic-type endopeptidase activity; Cellular component=chromatin; Biological process=RNA-dependent DNA replication
  Homolog annotation: Hit_ID=Q109Z1; Match level="QueryCoverage=81%, HitCoverage=13%, E-value=8e-21, Identity=35%"; Hit description =Retrotransposon protein, putative, Ty3-gypsy subclass
ILIVVHKSVSESHKPNERDXKKRFFFIRIMLVTKSRDVRRNPYQTFIVLVYKDKLLSANNIRSLPSVISHLLQDYKDVFPEKTLAGLPPLXGIKHQIDLIPGAASPNRPXYRTNLEKCTICTHQVVFLGFVVSGQEIQVGESKVAAIKEWPTPSLLH

SEQ ID NO: 97871 - protein, 138 aa, Setaria italica
  Transcript Sequence Number=SeqID_31897
  Gene Ontology: Mol. function=transporter activity; Cellular component= intracellular; Biological process=transport
  Homolog annotation: Hit_ID=B6TAH4; Match level="QueryCoverage=100%, HitCoverage=42%, E-value=3e-65, Identity=89%"; Hit description=SEC14- like protein 1
ETYYIVNAPYIFSACWKVVKPLLQERTRKKVHVLRGCGKDELLKIMDYSSLPHFCRREGSGASKRSSSDPDDCFSLDHPFHQELYNFIQEQALNMELTKQGSLHVNIPDQDPEDAKIVEVIEAEFHKLGVQNGSAIGV

SEQ ID NO: 97872 - protein, 88 aa, Setaria italica
  Transcript Sequence Number=SeqID_31898
CGAAASGAGLPGEEETMRRPTATAAHAPESCLGRPPAPGLRLGMMRLEAKHSERGRLSGGASGGHRRQRAPPDAHVPGPGICKMPPGS

SEQ ID NO: 97873 - protein, 174 aa, Setaria italica
  Transcript Sequence Number=SeqID_31899
GSVINQNTNKVGSTVCKSGTLALDATGSKSPSGAEPRKEDVKHDETSSVEKEGNGVPSGGIHTETATLCNKAQSSGASTYSSGNLSGGFHMYIESSSVSPVNYSILQSTALSGVKHADHSSIVSSVENCQSTRAPTDELYQADGVTNNGIRKPHKHETMANDAISDHDNAHQMT

SEQ ID NO: 97874 - protein, 135 aa, Setaria italica
  Transcript Sequence Number=SeqID_31900
  Gene Ontology: Mol. function=protein serine/threonine kinase activity; Biological process=protein amino acid phosphorylation
  Homolog annotation: Hit_ID=Q6H459; Match level="QueryCoverage=99%, HitCoverage=13%, E-value=4e-16, Identity=39%"; Hit description =Putative wall-associated kinase
  Subcellular localization annotation: CTP_CleavageSite=47; ConfidenceScore=5.21e-01
PATGDLVGHCTSKCSSMAAMLIATGGGSCNGMGCCTVTFPVPFRGFRVTIIKNNDKVPQPFSHITVKAFLSFRPYKFSIMDLLSDTINASIVGSSWAYLSTVIADEPNCKRAQLDNKAQYACSSSNCMDVQNGGY

SEQ ID NO: 97875 - protein, 74 aa, Setaria italica
  Transcript Sequence Number=SeqID_31901
  Gene Ontology: Mol. function=inositol-1,3,4-trisphosphate 5/6-kinase activity; Cellular component=intracellular; Biological process =inositol trisphosphate metabolic process
  Homolog annotation: Hit_ID=Q84Y01; Match level="QueryCoverage=100%, HitCoverage=21%, E-value=5e-31, Identity=87%"; Hit description =Inositol-tetrakisphosphate 1-kinase 1
GLRHALGLQLFNFDMIRDVRAGDRYLVIDINYFPGYAKMPGYETVLTDFFWEMVHKDDDVVVQEEKESNHVSVK

SEQ ID NO: 97876 - protein, 73 aa, Setaria italica
  Transcript Sequence Number=SeqID_31902
LGPQKTKLDMLEPDYGTRNRNYFMCGPRIWTPSPRGSLGNHWIIWIWALGAIWVSKIWAHCAWIHEETNESVI

SEQ ID NO: 97877 - protein, 119 aa, Setaria italica
  Transcript Sequence Number=SeqID_31903
ISICLILLMVYLFARATSLGSIPVLWFYYVLLLLVHAHELFLVPELWKLKQKSQWFLSLSGAEFLLMLLDVEELYSTSLSLKILRSSQIIGCFDFSRCIDIIMHLDIGYILVHNKVYGS

SEQ ID NO: 97878 - protein, 70 aa, Setaria italica
  Transcript Sequence Number=SeqID_31904
MAGGNLFGRALSYVVNEFLVEGLANNRAFQRFAVKTNRTLESLSSKAKEVREELSEQLKEARGQDDHFRR

SEQ ID NO: 97879 - protein, 86 aa, Setaria italica
  Transcript Sequence Number=SeqID_31905
  Gene Ontology: Mol. function=acid-amino acid ligase activity; Cellular component=intracellular; Biological process=ubiquitin -dependent protein catabolic process
  Homolog annotation: Hit_ID=Q2L3D3; Match level="QueryCoverage=95%, HitCoverage=9%, E-value=4e-10, Identity=48%"; Hit description =Polyubiquitin-like protein
RSGAPGVLVQLYHSNDEHRRAVAERAIRCFLCPDAPSGKGIVRAWTAPVLLEFCGSIATGARTGDSLYTALRSMLATVLSDPEWTP

SEQ ID NO: 97880 - protein, 61 aa, Setaria italica
  Transcript Sequence Number=SeqID_31906
  Gene Ontology: Mol. function=nucleotide binding; Biological process =defense response
  Homolog annotation: Hit_ID=Q2QW61; Match level="QueryCoverage=70%, HitCoverage=8%, E-value=3e-11, Identity=79%"; Hit description=NB-ARC domain containing protein
IKEESIALDAWLWHLRDAVEKAEDAVDEIEYYELKEKAKDLKEITSSGRVKAFHWTLSFRR

SEQ ID NO: 97881 - protein, 52 aa, Setaria italica
  Transcript Sequence Number=SeqID_31907
SERGSLEWNKISHIPHVQIGDYFFRKGEGISLDSFFQEVMMMEKSGFLGEKP

SEQ ID NO: 97882 - protein, 130 aa, Setaria italica
  misc_feature (72)..(72): Xaa can be any naturally occurring amino acid
  Transcript Sequence Number=SeqID_31908
  Homolog annotation: Hit_ID=B3TIK7; Match level="QueryCoverage=81%, HitCoverage=9%, E-value=4e-22, Identity=49%"; Hit description=Slow walker 2
KKPHPLELHGPLTTTKPGAVTSNYPLMKAAALSGQWYTDADELEAKVLGGRKQTPPAVGLQEMQRIVEQKRXLAEKLMVQYAREYDTVRRGHGDLKLLEISAKSGTSADKVSAFTCLVEDNPIANMRALD

SEQ ID NO: 97883 - protein, 674 aa, Setaria italica
  Transcript Sequence Number=SeqID_31909
  Gene Ontology: Mol. function=voltage-gated potassium channel activity; Cellular component=integral to membrane; Biological process=potassium ion transport
  Homolog annotation: Hit_ID=B6U0R1; Match level="QueryCoverage=99%, HitCoverage=95%, E-value=0.0, Identity=84%"; Hit description=Cyclic nucleotide-gated ion channel 1
  Pfam annotation: Domain name=Ion_trans; Domain location=100-362; Score=62.8; E_value=1.3e-15; Accession=PF00520.23; Description=Ion transport protein
  Pfam annotation: Domain name=cNMP_binding; Domain location=463-563; Score=31.1; E_value=4.4e-06; Accession=PF00027.21; Description =Cyclic nucleotide-binding domain
  Pfam module annotation: Pfam domain module=Ion_trans::cNMP_binding; Domain location=100-362::463-563
SERGHNVFGLLKDRTAGAFSFLGNSSHAETLNKSASEERKRKTRVLDPQGPFLQRWNKIFVISCLVAVFVDPLFLYIPVINGEKNCLYLDKKLATTASILRFFTDIFYLLHMMFQFRTGFIAPSSRVFGRGVLVENTFAIGKRYMSTFFLVDFLAVLPLPQVFVLVVLPHLEGSEVMKAKIVLLIIIICQYVPRLLRIIPLYLQITRSAGILTETAWAGAAFNLLIYMLASHGFGALWYILSIQREDSCWRQACSNQIGCHPTLLYCESNTFGNNAFLQNACATNSSANPDPTFGIFLPALQNVSESKSFFEKLFYCFWWGLQNLSSLGQNMKTSTNTSENLFAVFVSTSGLVLFALLIGNVQTYLQSASVRIEEMRVKRRDTEQWMAHRLLPENLKERIMRHEQYRWQETRGVDEEGLLTNLPKDLRREIKRHLCLSLLMKVPMFENMDEQLLDAMCDRLKPMLYTEGSCMIREGDPVNEMLFIMRGTLESTTTNGGQTGFFNSNVLKGGDFCGEELLTWALDPTQASNLPGSTRTVKTLTEVEAFALRADDLKFVATQFRRLHSKQLQHTFRFYSQQWKTWAACFIQAAWHRYCRKKLEETLYEKEKRLQAAIVCDGTTSLSLGAALYASRFAGNMMRILRRNATRKARLQERVPARLLQKPAEPNFFAEDQ

SEQ ID NO: 97884 - protein, 123 aa, Setaria italica
  Transcript Sequence Number=SeqID_31910
  Gene Ontology: Mol. function=protein kinase CK2 regulator activity; Cellular component=protein kinase CK2 complex; Biological process =Wnt receptor signaling pathway
  Homolog annotation: Hit_ID=Q84VF5; Match level="QueryCoverage=44%, HitCoverage=22%, E-value=5e-26, Identity=100%"; Hit description =Possible protein kinase CK2 regulatory subunit (Fragment)
  Pfam annotation: Domain name=CK_II_beta; Domain location=55-123; Score=-27.8; E_value=2e-08; Accession=PF01214.10; Description=Casein kinase II regulatory subunit
  Subcellular localization annotation: CTP_CleavageSite=49; ConfidenceScore=5.21e-01
DRSFTIITANILPFYVLNFYLLLSGFISSSIPTCLVQKTFVVVVVVVVVVSLGSTYHLVDVFQLCICAGDMFTEEQNELVESAAEMLYGLIHARYILTSKGLAAMLEKYKNYDFGRCPRVYCC

SEQ ID NO: 97885 - protein, 175 aa, Setaria italica
  misc_feature (36)..(36): Xaa can be any naturally occurring amino acid
  Transcript Sequence Number=SeqID_31911
  Gene Ontology: Mol. function=protein kinase CK2 regulator activity; Cellular component=protein kinase CK2 complex; Biological process =Wnt receptor signaling pathway
  Homolog annotation: Hit_ID=Q84VF5; Match level="QueryCoverage=100%, HitCoverage=72%, E-value=2e-97, Identity=98%"; Hit description =Possible protein kinase CK2 regulatory subunit (Fragment)
  Pfam annotation: Domain name=CK_II_beta; Domain location=1-163; Score= 391.8; E_value=1.2e-114; Accession=PF01214.10; Description=Casein kinase II regulatory subunit
EFFCEVDDDYIQDDFNLCGLSSQVPYYDYALDLILXIESSHGDMFTEEQNELVESAAEMLYGLIHARYILTSKGLAAMLEKYKNYDFGRCPRVYCCGQPCLPVGQSDIHRSSTVKIYCPKCEDIYYPRSKYQDIDGAYFGTTFPHLFLMTYEHLKPQKPSQRYVPRVFGFKLHKP

SEQ ID NO: 97886 - protein, 271 aa, Setaria italica
  Transcript Sequence Number=SeqID_31912
  Gene Ontology: Mol. function=protein kinase CK2 regulator activity; Cellular component=protein kinase CK2 complex; Biological process =Wnt receptor signaling pathway
  Homolog annotation: Hit_ID=Q84VF5; Match level="QueryCoverage=84%, HitCoverage=93%, E-value=1e-117, Identity=89%"; Hit description =Possible protein kinase CK2 regulatory subunit (Fragment)
  Pfam annotation: Domain name=CK_II_beta; Domain location=85-259; Score=459.2; E_value=6.3e-135; Accession=PF01214.10; Description =Casein kinase II regulatory subunit
MYKQGGAGLDRKRISDALDKHLEKAVASPSTSRGSAGGGGGRDHHRLVVPSSASSMPKGRCSEGESDSDSEASDVSGSDGEDTSWISWYCNLRGNEFFCEVDDDYIQDDFNLCGLSSQVPYYDYALDLILDIESSHGDMFTEEQNELVESAAEMLYGLIHARYILTSKGLAAMLEKYKNYDFGRCPRVYCCGQPCLPVGQSDIHRSSTVKIYCPKCEDIYYPRSKYQGNIDGAYFGTTFPHLFLMTYEHLKPQKPSQRYVPRVFGFKLHKP

SEQ ID NO: 97887 - protein, 74 aa, Setaria italica
  Transcript Sequence Number=SeqID_31913
  Subcellular localization annotation: CTP_CleavageSite=76; ConfidenceScore=5.04e-01
GFIEGFSRSDLLSSLMHRPNISVVAPPATCIFRVDCLSVSTSIGPDPSSHGAPKRALTRPQSNRGAGSRGKRQN

SEQ ID NO: 97888 - protein, 144 aa, Setaria italica
  Transcript Sequence Number=SeqID_31914
  Gene Ontology: Mol. function=actin binding; Cellular component =intracellular
  Homolog annotation: Hit_ID=Q6JAG0; Match level="QueryCoverage=100%, HitCoverage=31%, E-value=3e-75, Identity=92%"; Hit description =Putative actin depolymerizing factor
  Pfam annotation: Domain name=Cofilin_ADF; Domain location=23-144; Score=189.1; E_value=1.2e-53; Accession=PF00241.12; Description =Cofilintropomyosin-type actin-binding pr
PGCGNETNPSTMANSASGMAVSDECKLKFQYLKSKRSFRFITFKIDEQTQQVVVDRLGQPGDTYDDFTASMPDSECRYAVFDFDFTTDENCQKSKIFFISWSPDTSRVRSKMLYASSKDRFKRELDGIQVELQATTPAEMSMDI

SEQ ID NO: 97889 - protein, 57 aa, Setaria italica
  Transcript Sequence Number=SeqID_31915
  Gene Ontology: Mol. function=sequence-specific DNA binding; Cellular component=nucleus; Biological process=regulation of transcription, DNA-dependent
  Homolog annotation: Hit_ID=Q6AST1; Match level="QueryCoverage=100%, HitCoverage=6%, E-value=7e-28, Identity=98%"; Hit description =Homeobox-leucine zipper protein HOX32
  Pfam annotation: Domain name=MEKHLA; Domain location=1-57; Score= -3.6; E_value=1.3e-07; Accession=PF08670.3; Description=MEKHLA domain
TEYPKIMQQGFAYLPGGVCVSSMGRPVSYEQAVAWKVLSDDDTPHCLAFMFVNWSFV

SEQ ID NO: 97890 - protein, 188 aa, Setaria italica
  Transcript Sequence Number=SeqID_31916
  Gene Ontology: Mol. function=sequence-specific DNA binding; Cellular component=nucleus; Biological process=regulation of transcription, DNA-dependent
  Homolog annotation: Hit_ID=Q6AST1; Match level="QueryCoverage=100%, HitCoverage=21%, E-value=1e-101, Identity=96%"; Hit description =Homeobox-leucine zipper protein HOX32
TSQLFSAIGGGILCAKASMLLQNVPPALLVRFLREHRSEWADPGVDAYSAAALRASPYAVPGLRASGFMGSQVILPLAHTLEHEEFLEVIRLEGHSLCHDEVVLSRDMYLLQLCSGVDENAAGACAQLVFAPIDESFADDAPLLPSGFRVIPLDAKTDPPSGTRTLDLASTLEVGSGGTTRASSDASS

SEQ ID NO: 97891 - protein, 852 aa, Setaria italica
  Transcript Sequence Number=SeqID_31917
  Gene Ontology: Mol. function=sequence-specific DNA binding; Cellular component=nucleus; Biological process=regulation of transcription, DNA-dependent
  Homolog annotation: Hit_ID=Q2QM96; Match level="QueryCoverage=99%, HitCoverage=99%, E-value=0.0, Identity=85%"; Hit description =Homeobox-leucine zipper protein HOX33
  Pfam annotation: Domain name=Homeobox; Domain location=22-80; Score =63.2; E_value=9.5e-16; Accession=PF00046.21; Description=Homeobox domain
  Pfam annotation: Domain name=MEKHLA; Domain location=705-852; Score =225.2; E_value=1.6e-64; Accession=PF08670.3; Description=MEKHLA domain
  Pfam annotation: Domain name=START; Domain location=171-381; Score =215.2; E_value=1.7e-61; Accession=PF01852.11; Description=START domain
  Pfam annotation: Domain name=bZIP_1; Domain location=61-120; Score =9.2; E_value=0.037; Accession=PF00170.13; Description=bZIP transcription factor
  Pfam module annotation: Pfam domain module=Homeobox::MEKHLA::START::bZ IP_1; Domain location=22-80::705-852::171-381::61-120
MAAVASRERLSPGAAPQVDTGKYVRYTPEQVEALERVYSECPKPSSLRRQQLIRDCPILSNIEPKQIKVWFQNRRCREKQRKEASRLQTVNRKLTAMNKLLMEENDRLQKQVSRLVYENGYMRQQLHSPSVATTDTSCESVVTSGQQYQQQNAAVPHPPQRDANNPAGLLAIAEETLAEFLSKATGTAVNWVQMVGMKPGPDSVGIIAVSHNCSGVAARACGLVSLEPTKVAEILKDRASWYRDCRHVEILHVIPTGNGGTIELIYMQTYALTTLAGPRDFWTLRYTSGLDDGSLVICERSLTQSTGGPCGPNAPTFIRAEVLPSGYLIRPCDGGGSMIYIVDHVDLNAKSVPEVLRPLYESPKILAQKMTAAALRHIRQIAHESSGEIPYGAGRQPAVLRTFSQRLSRGFNDAVSGFPDDGWSLMSSDGAEDVTIAVNSSPNKLVGSHVSSSQLFSAIGGGIMCAKASMLLQNVPPALLVRFLREHRSEWADPGVDAYSAASLRANPYAVPGLRAGGFMGNQVILPLARTLEHDESLEVIRLEGHGFSHDEVLMSRDMFLLQLCTGVDESAPGACAQLVFAPIDESFADDAPLLPSGFRVIPLDDKMDVPSATRTLDLASALEVGSGAGSRSPSDASGSCTTRSVLTIAFQFSFENHLRESVAAMARQYVRGVMASVQRVAMAIAPSRLGSHIQLKHPHPPGSPEALALATWIGRSYRVHTGSEIRWSDTEGVDNPLMPFWKHSDAILCCSLKPPFMLKFANSAGFDILETTMVNIQDMPLEGVLDDEGRKLLFSELPKIMQQGFAYLPGGVCRSSMGRQASYEQAVAWKVVGDDGAPQGLALMLVNWTFI

SEQ ID NO: 97892 - protein, 309 aa, Setaria italica
  Transcript Sequence Number=SeqID_31918
  Gene Ontology: Mol. function=sequence-specific DNA binding; Cellular component=nucleus; Biological process=regulation of transcription, DNA-dependent
  Homolog annotation: Hit_ID=Q6AST1; Match level="QueryCoverage=96%, HitCoverage=34%, E-value=1e-165, Identity=94%"; Hit description =Homeobox-leucine zipper protein HOX32
  Pfam annotation: Domain name=MEKHLA; Domain location=156-303; Score =319.1; E_value=8.9e-93; Accession=PF08670.3; Description=MEKHLA domain
PPGTLQLISRDMYLLQLCSGVDENAAGACAQLVFAPIDESFADDAPLLPSGFRVIPLDAKTDPPSGTRTLDLASTLEVGSGGTTRASSDASSTCNTRSVLTIAFQFSYENHLRESVAAMARQYVRTVVASVQRVAMAIAPSRLGGQLEMKQTPGSPEAHTLARWIGRSYRFHTGAELLRADTQCTDASLKALWQHSDSIMCCSLKAAPVFTFANQAGLDMLETTLIALQDISLEKILDDDGRKALCTEYPKIMQQGFAYLPGGVCVSSMGRPVSYEQAVAWKVLSDDDTPHCLAFMFVNWSFVVVVKTL

SEQ ID NO: 97893 - protein, 92 aa, Setaria italica
  Transcript Sequence Number=SeqID_31919
  Subcellular localization annotation: CTP_CleavageSite=29; ConfidenceScore=5.32e-01
AHWRRLAVGQPHADLRGTAAAPPPPPPPRASRRARAVETNLTGTGDYGEPSSPPAPTCPYSDTAPAAARPPPQAKKPGQQGAWIRRRIRKHQ

SEQ ID NO: 97894 - protein, 123 aa, Setaria italica
  Transcript Sequence Number=SeqID_31920
  Gene Ontology: Mol. function=transporter activity; Cellular component= membrane; Biological process=oligopeptide transport
  Subcellular localization annotation: CTP_CleavageSite=66; ConfidenceScore=5.38e-01
IFFYASSVLASTVIVYVQDTVSWTLGFGVSGAASVVGLAALLAGARYYRRPAVRGSPFTGLARVAVAAARKRKVNVATSGELKFYHGPRRSGDGDDKAGNGETDQAPSDSFSFLNRAALITDG

SEQ ID NO: 97895 - protein, 78 aa, Setaria italica
  Transcript Sequence Number=SeqID_31921
HARLYPQTLNGEGLRIQSGMSEEEAPSNISAKPIGEFSSLQGKSAENTRSLGLEGTAGLQLLDVKQSGEEVDGLNRLV

SEQ ID NO: 97896 - protein, 79 aa, Setaria italica
  Transcript Sequence Number=SeqID_31922
TCLSGDWRLEAGGGSPPRSLPLIDESLPGAGRLAAGDQLPPFPELSAGAQAPTRQVRRSRLDLVHVSELQVTDDATTCT

SEQ ID NO: 97897 - protein, 258 aa, Setaria italica
  Transcript Sequence Number=SeqID_31923
  Gene Ontology: Mol. function=metal ion binding
  Homolog annotation: Hit_ID=B6TEL3; Match level="QueryCoverage=99%, HitCoverage=99%, E-value=1e-88, Identity=64%"; Hit description=PHD finger protein
  Pfam annotation: Domain name=C1_3; Domain location=204-232; Score =11.0; E_value=0.03; Accession=PF07649.4; Description=C1-like domain
  Pfam annotation: Domain name=PHD; Domain location=205-253; Score =51.6; E_value=3e-12; Accession=PF00628.21; Description=PHD-finger
  Pfam module annotation: Pfam domain module=C1_3::PHD; Domain location= 204-232::205-253
MDGGGGFMGPPPVPRSPEDVFRDYRARRAGLIRALTTDVEKFYVMCDPEKENLCLYGLPNETWEVNLPAEEVPPELPEPALGINFARDGMNEKDWLSLVAVHSDSWLLSVAYYFGARFGFDKESRKRLFTMINNLPTVYEVVTGTAKKEPKEKTPKNSNKSSKSGSKPSRQAEPNSRVPKMPPPKDEEESEGEEGEPQEDHETALCGACGQSYDDFWICCDLCEKWFHGKCVKITPAKAEHIKQYKCPSCTGSKRAKA

SEQ ID NO: 97898 - protein, 175 aa, Setaria italica
  Transcript Sequence Number=SeqID_31924
  Gene Ontology: Mol. function=protein binding
  Homolog annotation: Hit_ID=Q7XED0; Match level="QueryCoverage=100%, HitCoverage=47%, E-value=3e-50, Identity=55%"; Hit description =BTB/POZ domain containing protein, expressed
  Pfam annotation: Domain name=BTB; Domain location=47-160; Score =108.0; E_value=3.1e-29; Accession=PF00651.23; Description=BTBPOZ domain
DLERSHRGLLRDDSFTLQCEVVVLDRFRAVKTAPFVEVPPPDLHRHLGDLLLTGEASDVTLQAGGVRFNAHRCVLAARSPVFKAELLGSMKEGTTNCAIHIEDMEPRVFKAVLHFVYTDTVPEVDKKEEAAMSQHLLEAADRFNLQRLRLLCEDKLCGCIDTSSVVTTLVLAEQH

SEQ ID NO: 97899 - protein, 349 aa, Setaria italica
  misc_feature (330)..(330): Xaa can be any naturally occurring amino acid
  misc_feature (342)..(342): Xaa can be any naturally occurring amino acid
  misc_feature (349)..(349): Xaa can be any naturally occurring amino acid
  Transcript Sequence Number=SeqID_31925
  Gene Ontology: Mol. function=pyridoxal phosphate binding; Cellular component=plasma membrane; Biological process=metabolic process
  Homolog annotation: Hit_ID=B9S8P3; Match level="QueryCoverage=99%, HitCoverage=40%, E-value=1e-109, Identity=56%"; Hit description =Molybdopterin cofactor sulfurase, putative
AAVGLFVFPAQSRVTGAKYSYQWMALAQQNGWHVMLDAGALGPKDMDSLGLSLFRPDFIITSFYRVFGSDPTGFGCLLIKKSVIGSLQGRNGCNASGMVRIVPVFPQYLSDSVDGFDAFDGLEDDSGINKDEKPASNAQNGSQLPAFSGVYTSAQVRETFESDPGRDSSSDRDGASTIFEETESISMGEVMRSPAFSEDCSSENSFWVDVGQSPLGSEKSGQFKKGKLGSPLPSSWFNGRKCNKRMSPNLTSRISRSPLYDGHVISFDAAVLSVSQDTDCLKEDPEEEIFENGRRNHFRQVSEIQEEPEVEEVACQHAMNGGAEHKEARXGGRQEGEFRLLXGGRDGNX

SEQ ID NO: 97900 - protein, 48 aa, Setaria italica
  Transcript Sequence Number=SeqID_31926
  Subcellular localization annotation: CTP_CleavageSite=17; ConfidenceScore=5.15e-01
ILLQHQKNTHKHTMAIKQSMNKDTSSRCRSTRSAIATTTARSEAGYID

SEQ ID NO: 97901 - protein, 90 aa, Setaria italica
  Transcript Sequence Number=SeqID_31927
GTSRFHPVGLTPTRVAVAAVPGRRAADRGSIAVADIEFAEDPPPLLGVVANRWGSSHGAVPGEFPLAAAPRAAANRRLVPAACRRRPRRR

SEQ ID NO: 97902 - protein, 367 aa, Setaria italica
  Transcript Sequence Number=SeqID_31928
  Gene Ontology: Mol. function=catalytic activity; Cellular component =chloroplast envelope; Biological process=metabolic process
  Homolog annotation: Hit_ID=Q1A3R7; Match level="QueryCoverage=69%, HitCoverage=96%, E-value=1e-16, Identity=28%"; Hit description =CASTOR protein (Fragment)
VCGIFRSGKIYFHPSEDELLKETDKLLLIAPVHGRRRPVYTVLSTPKETQTSIHYSESRVDQGSFSMAATVEKETRLKSIVKRPLKSLSKSSDYMLGPKECVLIVGWRPKVTEMIREYDSYLGPGSTVEILSETPVKERSSVVNPLLQSQLKNVKVSHRVGCPLNYDTLKDTIINIRKSAKSDKKVPLSIVVISDRDWLTGDATQADKQLAYTLLLAENICEKHGITVENLVSEIVDTGLGKQISKIRPSLSFIGAEEVMSRVTAQVAETSELNEVWKDILNAEGDEIYIKEIGLYMKEGERIPFSELSERAVLRREVAIGYVKDGKQHINPTNKLEPLSLEMTDSLIVISEFEGEQPIIMDTETSR

SEQ ID NO: 97903 - protein, 86 aa, Setaria italica
  Transcript Sequence Number=SeqID_31929
  Gene Ontology: Mol. function=inositol or phosphatidylinositol phosphatase activity
  Homolog annotation: Hit_ID=Q84W55; Match level="QueryCoverage=100%, HitCoverage=7%, E-value=2e-18, Identity=56%"; Hit description=Type II inositol-1,4,5-trisphosphate 5-phosphatase FRA3
LLKVFGIDGQVDLARLEAPVMPEQFIEEEIKVKPTKKEKPQGSFTFFQKSRNALIGAADAVRRVATKGTFVEDNRQTEAVTQAMDG

SEQ ID NO: 97904 - protein, 97 aa, Setaria italica
  Transcript Sequence Number=SeqID_31930
  Subcellular localization annotation: CTP_CleavageSite=90; ConfidenceScore=5.57e-01
MAGVVVDDSCRRPGSVPFKWEVCPGTPKHVRSSSSSSASVAPPPYNSSSPSSSGALYSSSKVAVSPKLAPPPAMSPSPYHSPRVSYYAARSASVSPC

SEQ ID NO: 97905 - protein, 64 aa, Setaria italica
  Transcript Sequence Number=SeqID_31931
LCGLVTVSLGYPDRLYSVQRCTLYLYVRSAHTSTSGGTDLGDPYPPASISRQHSLTPSTCTTGV

SEQ ID NO: 97906 - protein, 62 aa, Setaria italica
  Transcript Sequence Number=SeqID_31932
FTPHQQNLVNHPKGPRWAIGRLEQDFRMVPGPVGTGHRLRSSGPGGIVMMHLFYRDSVHVWT

SEQ ID NO: 97907 - protein, 77 aa, Setaria italica
  Transcript Sequence Number=SeqID_31933
GIESVYCCGCSFWVVLEASQDQQQVHLPDLITDPLTLVPHLSMQCKCDSQTRRCQPAIRPAAMHDLKSILQATTPAE

SEQ ID NO: 97908 - protein, 236 aa, Setaria italica
  misc_feature (55)..(55): Xaa can be any naturally occurring amino acid
  Transcript Sequence Number=SeqID_31934
  Gene Ontology: Mol. function=binding; Cellular component=nucleus; Biological process=cell cycle
  Homolog annotation: Hit_ID=B9SJD1; Match level="QueryCoverage=98%, HitCoverage=13%, E-value=3e-87, Identity=69%"; Hit description =Pearli, putative
  Pfam annotation: Domain name=HEAT; Domain location=170-206; Score =1.8; E_value=30; Accession=PF02985.14; Description=HEAT repeat
  Pfam annotation: Domain name=HEAT; Domain location=57-92; Score=14.4; E_value=0.47; Accession=PF02985.14; Description=HEAT repeat
  Pfam annotation: Domain name=HEAT; Domain location=99-131; Score=2.9; E_value=22; Accession=PF02985.14; Description=HEAT repeat
  Pfam module annotation: Pfam domain module=HEAT::HEAT::HEAT; Domain location=170-206::57-92::99-131
MYLGTKIDPHSQEKIIYYLARLKSKEILRDSGNGLVISRDWAKKICLALAQKCEXSRGFDKILALLLASLRENSPVIRAKALRAVSSIVEADPEVLGDKRVQSAVEGRFCDSAISVREAALELVGRHIASHPDVGLKYIEKVAERIKDTGVSVRKRAIKIIRDLCASNPNTDTTHAFVEIISRVNDEESSVQDLVCKTFHELWFEEPTGSHKHLVADGSSVPMEIAKKLSKLLNVE

SEQ ID NO: 97909 - protein, 99 aa, Setaria italica
  Transcript Sequence Number=SeqID_31935
  Gene Ontology: Mol. function=protein serine/threonine kinase activity; Cellular component=nucleus; Biological process=protein amino acid phosphorylation
  Homolog annotation: Hit_ID=Q84YE5; Match level="QueryCoverage=100%, HitCoverage=32%, E-value=7e-49, Identity=96%"; Hit description =Cyclin-dependent kinase-like protein
EVGEGTYGKVYKAQDKATGQLVALKKTRLEMDEEGIPPTALREISLLNLLSHSIYVVRLLAVEQAAKNGKPILYLVFEFLDTDLKKYLDVYRRGPNARP

SEQ ID NO: 97910 - protein, 231 aa, Setaria italica
  misc_feature (35)..(35): Xaa can be any naturally occurring amino acid
  Transcript Sequence Number=SeqID_31936
  Gene Ontology: Mol. function=protein serine/threonine kinase activity; Biological process=protein amino acid phosphorylation
  Homolog annotation: Hit_ID=Q7XKV8; Match level="QueryCoverage=100%, HitCoverage=32%, E-value=1e-104, Identity=79%"; Hit description =OSJNBa0073E02.11 protein
  Pfam annotation: Domain name=Pkinase; Domain location=1-182; Score= -71.3; E_value=0.0003; Accession=PF00069.17; Description=Protein kinase domain
  Pfam annotation: Domain name=Pkinase_Tyr; Domain location=1-170; Score=-131.0; E_value=5.1e-05; Accession=PF07714.9; Description =Protein tyrosine kinase
  Pfam module annotation: Pfam domain module=Pkinase::Pkinase_Tyr; Domain location=1-182::1-170
RIAHEAAEGLNFLHSYASPPIIHGDVKTANILLDXNYMAKVSDFGASILAPSDKEQYVTMVQGTCGYLDPEYMLTCQLTEKSDVFSFGVILLEVLTGQEPLKLDGPETERSLSSNFLSAMKENNLDAILPSHVKGQENNELIRGLAELAKQCLDMCGSNRPSMKEIADELGRLRKLSLHPWVQVDVEMEAQSLLGGASTASFEIEGATSIGYPTQEGESLPMNPGSSYYAR

SEQ ID NO: 97911 - protein, 78 aa, Setaria italica
  Transcript Sequence Number=SeqID_31937
  Subcellular localization annotation: CTP_CleavageSite=46; ConfidenceScore=5.38e-01
MSISPRERTGGSYYPRAPNPTPTPQHGSERRRHGRRSPPATVSPPVAAGAPGPGGSGASSNSVVPASRESINAPEKVL

SEQ ID NO: 97912 - protein, 96 aa, Setaria italica
  Transcript Sequence Number=SeqID_31938
  Gene Ontology: Mol. function=metal ion binding
  Homolog annotation: Hit_ID=B6UER3; Match level="QueryCoverage=81%, HitCoverage=10%, E-value=2e-24, Identity=71%"; Hit description=Zinc finger, C3HC4 type family protein
EESERVKAEVAAAVQASAMRFEFTNFSQSHNDFISLITVFLVACNNAGPSTSPPASERKLFSDVTRLGFASAQDSPPLRVETGDASGKNESARDQG

SEQ ID NO: 97913 - protein, 691 aa, Setaria italica
  Transcript Sequence Number=SeqID_31939
  Gene Ontology: Mol. function=metal ion binding; Cellular component =cytoplasm; Biological process=positive regulation of transcription
  Homolog annotation: Hit_ID=B6UER3; Match level="QueryCoverage=99%, HitCoverage=92%, E-value=0.0, Identity=78%"; Hit description=Zinc finger, C3HC4 type family protein
  Pfam annotation: Domain name=zf-C3HC4; Domain location=188-234; Score= 29.3; E_value=1.6e-05; Accession=PF00097.17; Description=Zinc finger, C3HC4 type (RING finger)
HNSYFADSVVPASRESINAPEKVVGFRISGEENDTCTQETGNISECHSSEQGNLGFPTDNVSSVRAYPERTGMMGSLQTDHLASGSTGLQGNGTQMAARKSQAVNANHLLNFQYDPISRPQPRGPRTYPPRRQRKIKPYNKDLFLQANYKFVVLDTGNYQIESMDPDKMLQWEDIICVRYYSPSEVQCPICLESPLCPQITSCGHIYCFPCILRYLTMGKEDYKGECWKKCPLCFMMVSTKELYTIHITQVQHFRAGDVASFTLLSRSRNSLTPSIKSTSSECSSADEDPCNVFSKFILTSDVELSVREAKSDLSNWLHMADLGFVDDLEKLPYVSAALEQLEERMKYWTEYRSYGCSPPLKDSFSPGSSYKSRNSFDVNTSHQNNGNKISPVSDRDMVSGISALSMSPESNKSFDKGTISKMNEKCTTTTDSNEHDSYTFYQVSDGQHLILHPLNMRCLLNHFGGSDMLPPRITGKILELETVTQSEAIRKRYRFLSHFSLTTTFQFCEIDLSDIVSPSSLAPFLDEIKKREKQRKRTAKKEESERVKAEVAAAVQASAMRFEFTNFSQSHNDVMFSLDDFEALGNNAGPSTSPPASERKLFSDVTRLGFASAQDSPPLRVETGDASGKNESARDQGPSAPPALSFASIISSSRAAAAADNLEMQKPNGVGKKGKKPARVLLSTGGGRRY

SEQ ID NO: 97914 - protein, 164 aa, Setaria italica
  misc_feature (17)..(17): Xaa can be any naturally occurring amino acid
  misc_feature (130)..(130): Xaa can be any naturally occurring amino acid
  Transcript Sequence Number=SeqID_31940
  Gene Ontology: Mol. function=heat shock protein binding
  Homolog annotation: Hit_ID=Q8RYN2; Match level="QueryCoverage=99%, HitCoverage=10%, E-value=2e-31, Identity=47%"; Hit description =Auxilin-like protein
SIHSVSSEEAPSPDYPXLRASDISIPAAPIKVQPPPIPPSKLLNKNGNKEHGDADVNPNSAAAAAMKEAMEFAEARLKAAKDLMERKGDSFKFRKKPAHHRSTKSTEIKERKAPEDVHLFEEKLNVRRLXKEENQNNDITLLDKNRVGGALKPVHCDRRQKGIY

SEQ ID NO: 97915 - protein, 148 aa, Setaria italica
  misc_feature (113)..(113): Xaa can be any naturally occurring amino acid
  Transcript Sequence Number=SeqID_31941
  Gene Ontology: Mol. function=aspartic-type endopeptidase activity; Cellular component=chromatin; Biological process=RNA-dependent DNA replication
  Homolog annotation: Hit_ID=Q8SA93; Match level="QueryCoverage=98%, HitCoverage=5%, E-value=2e-36, Identity=45%"; Hit description =Putative polyprotein
CKDRWLDGAITLAEIAPNLFKTVPKRTAKRRTVAQALQNRRWMHDIKGTLTIEVPNDYLLIWDMVDGLILHQNVPDHYKWKLTKNGSYSSKSAYAAFFVGSIKFSPWRRIWKXWAPPRCRFFIWLVFHNRVWTADRLAKRNLPHPKAC

SEQ ID NO: 97916 - protein, 47 aa, Setaria italica
  Transcript Sequence Number=SeqID_31942
MAVSLLANEVSDLCIGKPAVRSLPLSAAAGELAAALRRVARSGAAAC

SEQ ID NO: 97917 - protein, 63 aa, Setaria italica
  Transcript Sequence Number=SeqID_31943
CCEHYTAQEIGYKFSYVLFLFGVKFLNVSENGKKGYMVGTSRGNQKVKATTFINIGMYYISCP

SEQ ID NO: 97918 - protein, 77 aa, Setaria italica
  Transcript Sequence Number=SeqID_31944
  Gene Ontology: Mol. function=oxidoreductase activity; Biological process=oxidation reduction
  Homolog annotation: Hit_ID=Q673G3; Match level="QueryCoverage=92%, HitCoverage=20%, E-value=3e-14, Identity=54%"; Hit description=GA 2 -oxidase 4
PTVVAAATMDRAETEAIRFFAQAQADKDRAGPAYPFGYGSKRIGLNGDMGWLEYLLLAVDSASLSDACSVPSNAAFR

SEQ ID NO: 97919 - protein, 296 aa, Setaria italica
  misc_feature (140)..(140): Xaa can be any naturally occurring amino acid
  Transcript Sequence Number=SeqID_31945
  Gene Ontology: Mol. function=protein serine/threonine kinase activity; Cellular component=nucleoplasm; Biological process=protein amino acid phosphorylation
  Homolog annotation: Hit_ID=B6U918; Match level="QueryCoverage=99%, HitCoverage=55%, E-value=1e-161, Identity=91%"; Hit description=Wee1- like protein
  Pfam annotation: Domain name=Pkinase; Domain location=43-286; Score =207.1; E_value=4.8e-59; Accession=PF00069.17; Description=Protein kinase domain
  Pfam annotation: Domain name=Pkinase_Tyr; Domain location=43-286; Score=0.6; E_value=9e-14; Accession=PF07714.9; Description=Protein tyrosine kinase
  Pfam module annotation: Pfam domain module=Pkinase::Pkinase_Tyr; Domain location=43-286::43-286
VKNPYLNTDPCIDDAVYGVRQCNSAGFSPSIGGNGLSRYRTDFHEIEKIGHGNFSVVFKVLNRIDGCLYAVKRSIKQLHNDMERRQAVKEVQAMAALGSHENIVRYFTSWFENEQLYIQMELCDRCLSVNRNQPLKHGEXLELLYQICEGLDFIHECGIAHLDVKPDNIYVSNGIYKLGDFGCATLINRSLAIEDGDSRYMPPEMLNDKYEHLDKVDIFSLGAAIYELIRGTPLPESGPHFTSIREGKIPLLPGCPMQFQNLIKSMMDPDPLRRPSAKEILRHPTFEKLHKVPAKK

SEQ ID NO: 97920 - protein, 80 aa, Setaria italica
  misc_feature (38)..(38): Xaa can be any naturally occurring amino acid
  Transcript Sequence Number=SeqID_31946
  Homolog annotation: Hit_ID=B9EYN2; Match level="QueryCoverage=97%, HitCoverage=5%, E-value=8e-15, Identity=56%"; Hit description=DNA ligase
SSGGDVVKAASDFFERERDFFEEANISCSETLKSEEKXTSDHGSSADGSSQQECPLFSQKPVEHSTKLVNLTPTGKKPNT

SEQ ID NO: 97921 - protein, 163 aa, Setaria italica
  Transcript Sequence Number=SeqID_31947
EDVPYGRQDEDMLENGSIKPAELATPLSNKQKGKGMLHVKRKHGAKPACRTEKVEIQLNRKDIHAVADGISLIDENSRKQQSDKSGEKEHLLKSVSPIDTNRRNTQKDVKKLNRRDGRPSEKELMEAVELDLNGLPKKGFGAVKFPETESNITVHLNARSKEA

SEQ ID NO: 97922 - protein, 142 aa, Setaria italica
  misc_feature (129)..(129): Xaa can be any naturally occurring amino acid
  Transcript Sequence Number=SeqID_31948
  Gene Ontology: Mol. function=ATP binding
  Homolog annotation: Hit_ID=Q6K8H0; Match level="QueryCoverage=90%, HitCoverage=38%, E-value=6e-34, Identity=57%"; Hit description=ATP -binding region, ATPase-like domain-containing protein-like
GFAAGRGNGGDREEKKAMILAAGSAVPAGFLEPLPLPPGRLLPPPALERTVTKQFWKAGDYDGSPHLLAVEAAEHTDSGMEHVRVHPKFLHSNATSHKWALGAFAELLDNSLDEVANGATFVKIDMIEXIRKDGTRMLLLKM

SEQ ID NO: 97923 - protein, 35 aa, Setaria italica
  Transcript Sequence Number=SeqID_31949
MDLATTPARRPMEPGLARRLWHVVLAVCHMLRRGL

SEQ ID NO: 97924 - protein, 61 aa, Setaria italica
  Transcript Sequence Number=SeqID_31950
APVVGAPAAAGAAPQKSNKMGMGTGLAVGAAAGVLGGLALAGGASYLGEKFDDDSHDHDDY

SEQ ID NO: 97925 - protein, 193 aa, Setaria italica
  Transcript Sequence Number=SeqID_31951
  Subcellular localization annotation: CTP_CleavageSite=21; ConfidenceScore=5.52e-01
LTFVTRRCPAPPPPPRPPRSCAGARSPGPSSPGASRTAPTRYRYACIDRQKKKNMSSVRELPIKLIKERDGPRRRRRRRGRPSRRGAPCACAPSPPSCTSPSRPGRSRTHRRRTFCCTRRRRTFCCTRRRRRTCCTRRRRCCSRRSPTCCTRRRRCGRSRRCRTCCSRPRSLRRRRTCRSRCGRTRQPSRSRS

SEQ ID NO: 97926 - protein, 202 aa, Setaria italica
  misc_feature (196)..(197): Xaa can be any naturally occurring amino acid
  Transcript Sequence Number=SeqID_31952
  Gene Ontology: Mol. function=hydrolase activity, acting on acid anhydrides, in phosphorus-containing anhydrides; Biological process =nucleobase, nucleoside, nucleotide and nucleic acid metabolic process
  Homolog annotation: Hit_ID=B9SQD1; Match level="QueryCoverage=86%, HitCoverage=18%, E-value=2e-10, Identity=30%"; Hit description =Regulator of telomere elongation helicase 1 rtel1, putative
  Subcellular localization annotation: CTP_CleavageSite=50; ConfidenceScore=5.57e-01
VPTITLSVSSTTKRSNFMKLAQITPANRSTLTTKHNSTSMSQLFSEDQLSQDTKVVNMTDDVAVHGHLKEHTFKPLGLKKAKLMDRSKDAVGSDDISAKSPQNIESRTLARYQGEGSTPQSKKCTTEKACGKNEGICEKSEGQESNSGTAFLRLAREKLSGAEYKEFVEFMKALKLKTMHIKDSLEAIAKLFSSPXXLPLLE

SEQ ID NO: 97927 - protein, 87 aa, Setaria italica
  Transcript Sequence Number=SeqID_31953
MVKAYLRYEPAVTFGVIASPESNVCYDPSGRLLLAAALDRLAAWDLKRGLPSVSFAPSSSSPSLAVSCIASSQSAAVSSSIASGHAD

SEQ ID NO: 97928 - protein, 54 aa, Setaria italica
  Transcript Sequence Number=SeqID_31954
  Gene Ontology: Mol. function=protein serine/threonine kinase activity; Biological process=protein amino acid phosphorylation
  Homolog annotation: Hit_ID=Q7XVI0; Match level="QueryCoverage=77%, HitCoverage=9%, E-value=4e-12, Identity=69%"; Hit description =OSJNBa0016N04.14 protein
QIAQLLLCSEYLPNGSLDRYIKDKSCRFQWNTRYQIIKGICEGLDYLHFISFLY

SEQ ID NO: 97929 - protein, 99 aa, Setaria italica
  Transcript Sequence Number=SeqID_31955
  Gene Ontology: Mol. function=protein serine/threonine kinase activity; Biological process=protein amino acid phosphorylation
  Homolog annotation: Hit_ID=Q2R1E0; Match level="QueryCoverage=100%, HitCoverage=11%, E-value=3e-20, Identity=52%"; Hit description =Jacalin-like lectin domain containing protein
IKAKHTNIVRLLGYCCVAEKERVPVPGPGWSWEDANRQLLLCSEYLPNGSLDRYIKDKSCRFQWNTRYQIIKGICEGLDYLHQQTGPIIHRDLKPENIL

SEQ ID NO: 97930 - protein, 403 aa, Setaria italica
  misc_feature (78)..(78): Xaa can be any naturally occurring amino acid
  Transcript Sequence Number=SeqID_31956
  Gene Ontology: Mol. function=protein binding; Cellular component =endomembrane system; Biological process=apoptosis
  Homolog annotation: Hit_ID=B9GTE7; Match level="QueryCoverage=88%, HitCoverage=39%, E-value=4e-41, Identity=30%"; Hit description=Cc -nbs-lrr resistance protein
  Pfam annotation: Domain name=LRR_1; Domain location=245-267; Score =4.0; E_value=51; Accession=PF00560.25; Description=Leucine Rich Repeat
  Pfam annotation: Domain name=LRR_1; Domain location=44-65; Score=2.7; E_value=93; Accession=PF00560.25; Description=Leucine Rich Repeat
  Pfam annotation: Domain name=LRR_1; Domain location=67-89; Score=9.3; E_value=5; Accession=PF00560.25; Description=Leucine Rich Repeat
  Pfam annotation: Domain name=LRR_1; Domain location=91-112; Score =10.0; E_value=3.7; Accession=PF00560.25; Description=Leucine Rich Repeat
  Pfam module annotation: Pfam domain module=LRR_1::LRR_1::LRR_1::LRR _1; Domain location=245-267::44-65::67-89::91-112
ALCVQKSLLIPKIILASSHLRSFILFDTVVPSSWIYDVSSHFRLLRVLCLRFTNIEQVPDVVTELYNLRYLDISYTKXVKWISPSFRKLVNLQVLDLRFSYVKELPLEITMLTNLRHLHVCVVHDIQERSLNCFSDTKFRGNICGLKNLQALHTVSTNKDLVLQLGNLTMMRSLSVMKVRQSYIAELWNSLTKMPNLSRLLLFASDMDEILNLKMLRPLPDLKLLWLAGKLDGGTVPSLFSKFEKLTLLKMDWTGLKKDPIRSFSHMSTLVNLGLRGAYGGEHLSFCAGWFPKLKYLQLADMEHLSCILMEDGTMIGLHHLELIGLRNIRAVPKGIKYIRTLHQMFLTDMPMEFVESLRGSASHIVQHVTNVHIFDSSDSEAVNNFIFWPHLSKKYGSGARLK

SEQ ID NO: 97931 - protein, 164 aa, Setaria italica
  misc_feature (41)..(41): Xaa can be any naturally occurring amino acid
  Transcript Sequence Number=SeqID_31957
  Gene Ontology: Mol. function=protein binding; Biological process =apoptosis
  Homolog annotation: Hit_ID=Q7XB93; Match level="QueryCoverage=86%, HitCoverage=13%, E-value=9e-19, Identity=35%"; Hit description =Disease related protein 2
KNKETKELATRRKDPIRSFSHMSTLVNLGLRGAYGGEHLSXFCAGWFPKLKYLQLADMEHLSCILMEDGTMIGLHHLELIGLRNIRAVPKGIKYIRTLHQMFLTDMPMEFVESLRGSASHIVQHVTNVHIFDSSDSEAVNNFIFWPHLSKKYGSGAAKYDPTAE

SEQ ID NO: 97932 - protein, 43 aa, Setaria italica
  Transcript Sequence Number=SeqID_31958
MGADEQPSPTRKRDREEEELADGSAAEKRARAEGFALRGAREL

SEQ ID NO: 97933 - protein, 104 aa, Setaria italica
  Transcript Sequence Number=SeqID_31959
  Gene Ontology: Mol. function=binding
  Pfam annotation: Domain name=Arm; Domain location=19-61; Score=14.3; E_value=0.19; Accession=PF00514.15; Description=Armadillobeta -catenin-like repeat
  Pfam annotation: Domain name=Arm; Domain location=62-100; Score=7.0; E_value=1.6; Accession=PF00514.15; Description=Armadillobeta-catenin- like repeat
  Pfam module annotation: Pfam domain module=Arm::Arm; Domain location =19-61::62-100
RPPRSRRPWSPNFLCLSALDANKLVIGASGAAPFLVSAFQGASSTEQARHDALRALLNLSIAPANAPYLLAAGLAPALVASVGDAPVTDRALAALCNLVAACPE

SEQ ID NO: 97934 - protein, 79 aa, Setaria italica
  misc_feature (78)..(78): Xaa can be any naturally occurring amino acid
  Transcript Sequence Number=SeqID_31960
YRTETKEHSSGMESGKKHVSVVALLAAMVALQLMAAPAAMARPMQAMKGDGSRAPLPRQIMEELILSKLGKLQYCGEXC

SEQ ID NO: 97935 - protein, 81 aa, Setaria italica
  Transcript Sequence Number=SeqID_31961
  Gene Ontology: Mol. function=metal ion binding
  Homolog annotation: Hit_ID=Q7XQ90; Match level="QueryCoverage=98%, HitCoverage=1%, E-value=2e-32, Identity=82%"; Hit description =OSJNBa0018M05.18 protein
YAMDYLNVLRRLQEDVKGEPLSTEQLSFVHCVLEAFVDCYPDSQVPDVLLNSLVIPDSFGVLAPARNLVYNDAPWMNADST

SEQ ID NO: 97936 - protein, 92 aa, Setaria italica
  misc_feature (1)..(1): Xaa can be any naturally occurring amino acid
  Transcript Sequence Number=SeqID_31962
  Gene Ontology: Mol. function=transferase activity, transferring groups other than amino-acyl groups
  Homolog annotation: Hit_ID=B6TU21; Match level="QueryCoverage=95%, HitCoverage=18%, E-value=2e-35, Identity=87%"; Hit description =Anthocyanin 5-aromatic acyltransferase
XQEEQTPMVMASFLLPRHQIDRIKEGAAARSDAKASSFVAASALAWVCLLKSGSAGVAGAERSHMLFSAECRSRLAPPLPAEYFGNCLRPAS

SEQ ID NO: 97937 - protein, 85 aa, Setaria italica
  Transcript Sequence Number=SeqID_31963
NIRTSLVLDSRSRFCCPAILHQNEKNQEQQQKVGCRSAEMEELIIDCQSASTEAGASTQSKEVQRPYHLYWPPDHNQDQTIQINK

SEQ ID NO: 97938 - protein, 301 aa, Setaria italica
  misc_feature (265)..(265): Xaa can be any naturally occurring amino acid
  Transcript Sequence Number=SeqID_31964
  Gene Ontology: Mol. function=electron carrier activity; Cellular component=nucleus; Biological process=chromatin modification
  Homolog annotation: Hit_ID=B6SXR1; Match level="QueryCoverage=96%, HitCoverage=36%, E-value=1e-137, Identity=81%"; Hit description =Flowering locus D
  Pfam annotation: Domain name=SWIRM; Domain location=8-100; Score =56.3; E_value=1.2e-13; Accession=PF04433.9; Description=SWIRM domain
VEYKYGKPNRRKDPTTAALTAGFPADSLTDEEIEAGVVSDVGGIEQVNYILIRNHLLCRWRETYDSWLAKEPFATLIPPHCEHLLNAAYSFLVSHSYVNFGVAPAIKERIPKEPTRPTTVVVIGAGLAGLAAARQLVAFGFKVIVLEGRKRCGGRVYTKKMEGGGRSAAGDLGGSVLTGTFGNPLGIVAKQLGLPMHKIRDKCPLYRPDGSPVDPEVDKKVEITFNKLLDKSSNLRTSMGEVAVDVSLGAALETLREADGGISTXEEKNLFNWHLANLEYANAGLLSRLSLAFWDQDDPYD

SEQ ID NO: 97939 - protein, 379 aa, Setaria italica
  Transcript Sequence Number=SeqID_31965
  Gene Ontology: Mol. function=nucleic acid binding
  Homolog annotation: Hit_ID=B9RXN0; Match level="QueryCoverage=86%, HitCoverage=75%, E-value=1e-123, Identity=65%"; Hit description =Nuclear acid binding protein, putative
  Pfam annotation: Domain name=MPPN; Domain location=238-322; Score= -14.6; E_value=0.0043; Accession=PF05172.5; Description=MPPN (rrm -like) domain
  Pfam annotation: Domain name=RRM_1; Domain location=138-209; Score =72.3; E_value=1.7e-18; Accession=PF00076.14; Description=RNA recognition motif. (a.k.a. RRM, RBD, o
  Pfam annotation: Domain name=RRM_1; Domain location=247-311; Score =78.8; E_value=2e-20; Accession=PF00076.14; Description=RNA recognition motif. (a.k.a. RRM, RBD, o
  Pfam annotation: Domain name=RRM_1; Domain location=45-116; Score =56.7; E_value=8.9e-14; Accession=PF00076.14; Description=RNA recognition motif. (a.k.a. RRM, RBD, o
  Pfam module annotation: Pfam domain module=MPPN::RRM_1::RRM_1::RRM_1; Domain location=238-322::138-209::247-311::45-116
TAPPPQFYQAGPPPPAMWGQPPPQAAPAPAPAPSGSGGGDEAKTLWIGDLQYWMDENYLYSCFSQAGEVISVKIIRNKQTGQPEGYGFIEFGNHALAEQVLQNYNGQMMPNGNQPFKLNWATSGAGEKRGDDGSDYTIFVGDLASDVTDFILQDTFKSRYPSVKGAKVVFDRTTGRSKGYGFVKFGDLDEQTRAMTEMNGQYCSSRPMRLGPASNKKNISGQQQPSSATYPNTQGTDSDNDPNNTTVFVGGLDPSVTDEVLRQTFSPYGELLYVKIPVGKRCGFVQYSNRASAEEAIRVLNGTQLGGQSVRLSWGRSPANKQPQQEQNQWSSGYYGYPQGYDPYGYARPPQDPAMYAYTAYPGYGNYQQQPPQQPPPQQ

SEQ ID NO: 97940 - protein, 143 aa, Setaria italica
  misc_feature (22)..(22): Xaa can be any naturally occurring amino acid
  misc_feature (62)..(62): Xaa can be any naturally occurring amino acid
  Transcript Sequence Number=SeqID_31966
  Homolog annotation: Hit_ID=Q0MVR3; Match level="QueryCoverage=100%, HitCoverage=25%, E-value=1e-64, Identity=86%"; Hit description=DNA damage signaling and repair protein
QATTFILGPSDKYQFGEKLHGXLLESTGAKYLHIDEFCPNSQDSVAGDTDQQILVVPARYPXLEFSKIRVLFPLSKISDVKLFAAMLSGRLEATSIEPPAFIVTSSNSTDETIVEDSDVEMEMATSNPTGAANKSQNHIENIS

SEQ ID NO: 97941 - protein, 226 aa, Setaria italica
  Transcript Sequence Number=SeqID_31967
  Homolog annotation: Hit_ID=Q0MVR3; Match level="QueryCoverage=91%, HitCoverage=36%, E-value=2e-81, Identity=74%"; Hit description=DNA damage signaling and repair protein
QEFVDQYLQLLSPGCLDKILVVPARYPLEFSKIRVLFPLSKISDVKLFAAMLSGRLEATSIEPPAFIVTSSNSTDETIVEDSDVEMEMATSNPTGAANKSQNHIENISDDEKEITNITDEAAVTVSGTKASVVQPNDPQKVEASKPMEDDVKVIEKTAIYRSKARDEDVRVINKVPKDENLDISRDGACDVIFSQDLVVKRLPRPAPAAATEVRGVNFNPFGKRAV

SEQ ID NO: 97942 - protein, 92 aa, Setaria italica
  Transcript Sequence Number=SeqID_31968
MLGAEKRLKLAIKMDKTIIIVCSVIGSLGVLSAILGFSAEGTKLTPYTILVYGDECIYPQNPALGLGVCAAIFLLVAQVTFSAVGGCCGCCN

SEQ ID NO: 97943 - protein, 238 aa, Setaria italica
  Transcript Sequence Number=SeqID_31969
  Gene Ontology: Mol. function=receptor activity; Biological process =protein amino acid phosphorylation
  Homolog annotation: Hit_ID=B9RP35; Match level="QueryCoverage=89%, HitCoverage=23%, E-value=4e-39, Identity=40%"; Hit description=ATP binding protein, putative
GGKQMDYSDPMPTMFSEDSADLGGAGFHINTTSHWVVSHVGSDPFNKTSGIVNTSNILETNMPELYKTARTSTSSLRYYVVGLANGKYTVQLFFAEIVITDGPGRRLFDIDMQDQNIRKDFDITKEAGGPRKATNITQEVTVDNSMLVIHLYWSGRGTCCIPYKGAYGPLVSAIKVTRSHDRKISPPQAPSSDSARQDEKRRGVIAGIAALCIAAAVISSSVVYLWWKWVSLVKRSMA

SEQ ID NO: 97944 - protein, 169 aa, Setaria italica
  Transcript Sequence Number=SeqID_31970
  Gene Ontology: Mol. function=nucleic acid binding; Cellular component= nucleus; Biological process=regulation of transcription, DNA-dependent
  Homolog annotation: Hit_ID=Q7XI63; Match level="QueryCoverage=100%, HitCoverage=26%, E-value=5e-69, Identity=74%"; Hit description =Putative DNA repair protein rhp54
FHQPSLKMMRMMDSLDKLCKWHESLSILLMTYPSFLALTKEDTKLQHRAFMAKVLMNNPGLLILDEGHNPRSNKSKLRKLLMKVKTEFRILLSGTVFQNNFQEYFNTLSLARPRFVSDVMTALVPEAERETRNRTGKHQEAVARRIFVEKVGQKIESSSMHDRVDGISL

SEQ ID NO: 97945 - protein, 231 aa, Setaria italica
  misc_feature (112)..(112): Xaa can be any naturally occurring amino acid
  Transcript Sequence Number=SeqID_31971
  Gene Ontology: Mol. function=nucleotide binding; Biological process =defense response
  Homolog annotation: Hit_ID=Q8LJZ8; Match level="QueryCoverage=100%, HitCoverage=26%, E-value=5e-65, Identity=56%"; Hit description =Putative Mla1
  Pfam annotation: Domain name=LRR_1; Domain location=164-187; Score =3.8; E_value=58; Accession=PF00560.25; Description=Leucine Rich Repeat
  Pfam annotation: Domain name=LRR_1; Domain location=189-210; Score =8.4; E_value=7.6; Accession=PF00560.25; Description=Leucine Rich Repeat
  Pfam annotation: Domain name=LRR_1; Domain location=212-230; Score =8.1; E_value=8.5; Accession=PF00560.25; Description=Leucine Rich Repeat
  Pfam module annotation: Pfam domain module=LRR_1::LRR_1::LRR_1; Domain location=164-187::189-210::212-230
SLSYDDLPSHLRTCLLYLSVFPEGYEIGKDRLIRIWIAEDLIQCEKQGESLFEIGERYYYELIGRGMIQPVYKRWYYDMTENCRVHDMVFELICDLSCKENFVSILDHVHHXFLQKEIIQRLSLQNCMVDHATHRATMSMQEVRSVVVFPSAVNILPALASFRVLRVLDLQSCCLSQGYSLKYLENLVDLRYLGLRDTGISQLSREIGKLQFLQTLDVTGNEISSLPSTVV

SEQ ID NO: 97946 - protein, 79 aa, Setaria italica
  misc_feature (1)..(16): Xaa can be any naturally occurring amino acid
  Transcript Sequence Number=SeqID_31972
XXXXXXXXXXXXXXXXFFFFLLYDDVCCLISQAVIQIHEVQGGEKLIQASYNGSSTVSNLQFPSEAVSTSVAFGVIDCR

SEQ ID NO: 97947 - protein, 117 aa, Setaria italica
  Transcript Sequence Number=SeqID_31973
  Subcellular localization annotation: CTP_CleavageSite=38; ConfidenceScore=5.36e-01
RKLDESEFRNAFSRSYIRVREYDARRSRSRSRGRSHSRSKSRSRSRGRSYSRSRSHSYSRSRSPRSRSASQSRSPVKARSPSRSQSPRASPPRDKSASRSPARSKSLPRSDSPAKAE

SEQ ID NO: 97948 - protein, 216 aa, Setaria italica
  Transcript Sequence Number=SeqID_31974
  Gene Ontology: Mol. function=nucleic acid binding; Cellular component= nucleus; Biological process=mRNA processing
  Homolog annotation: Hit_ID=Q64HB5; Match level="QueryCoverage=65%, HitCoverage=56%, E-value=8e-65, Identity=88%"; Hit description =ASF/SF2-like pre-mRNA splicing factor SRP31'
  Pfam annotation: Domain name=RRM_1; Domain location=68-134; Score =34.4; E_value=4.7e-07; Accession=PF00076.14; Description=RNA recognition motif. (a.k.a. RRM, RBD, o
TPPGFAFVEFEDPRDAEDAIYGRDGYNFDGHRLRVELAHGGRGPSFDRSSSHNSVGRRGATRRSDYRVMVTGLPSSASWQDLKDHMRRAGDVCFSDVYREAGATIGIADYTNYEDMKHAIRKLDESEFRNAFSRSYIRVREYDARRSRSRSRGRSHSRSKSRSRSRGRSYSRSRSHSYSRSRSPRSRSASQSRSPVKARSPSRSQSPRASPPRDET

SEQ ID NO: 97949 - protein, 77 aa, Setaria italica
  Transcript Sequence Number=SeqID_31975
AIIRSFAVNHKIKKIQKLATNEGTFSSREELQQYTIQHSCKYFSSELAAVALKGQEPAAAAEPEGHEAAAVLLVLVA

SEQ ID NO: 97950 - protein, 139 aa, Setaria italica
  Transcript Sequence Number=SeqID_31976
  Gene Ontology: Mol. function=DNA binding
  Homolog annotation: Hit_ID=B6TUB0; Match level="QueryCoverage=66%, HitCoverage=22%, E-value=3e-41, Identity=84%"; Hit description =Regulatory protein
HGEKGQRPQIVMPANSTPTQQQKQQQEEETPSQDLADLLRRAATADKTVLMTAINEAWASPGSFLDLFLESFRHGEGTSDLPRHLLIVAMDGKAYERCLAVHPFCYWFRVAGMDFAGEQKYMKGDYLEMMWRRNRLQQR

SEQ ID NO: 97951 - protein, 43 aa, Setaria italica
  Transcript Sequence Number=SeqID_31977
GTSSLIFIIDEYMFLYITLILQGIWYEPIIIPRFRNFSTLVIQ

SEQ ID NO: 97952 - protein, 119 aa, Setaria italica
  Transcript Sequence Number=SeqID_31978
TGDGDDSAKKAIVLYAAPSFSDAELVAHEVEAQDEEDSDDYLTHTLFAEEEDELVSAPGSVIDVMRDAREREAGEGAEFRLEDEIDHVADVFIRRIHRQLKLQKLDSFKRLCEMLERGA

SEQ ID NO: 97953 - protein, 82 aa, Setaria italica
  Transcript Sequence Number=SeqID_31979
CYHTTSVMTSTRQASALKLEASNVEKHQQLSDFFHLQNYPRGHQQLVSTPDVLNLSVLISRPLGLNLICRLHSFLIMFFRGY

SEQ ID NO: 97954 - protein, 103 aa, Setaria italica
  Transcript Sequence Number=SeqID_31980
  Subcellular localization annotation: CTP_CleavageSite=48; ConfidenceScore=5.06e-01
NSILPPPHRARTPPPLSLSRSPELILSPLSCWCVGLGMRDSRTRNRVRGGAENEDQGLGLVVQIGVGVAAATGSARCSLALITTGRLVDCRLACVERAGVPSF

SEQ ID NO: 97955 - protein, 52 aa, Setaria italica
  misc_feature (17)..(17): Xaa can be any naturally occurring amino acid
  Transcript Sequence Number=SeqID_31981
  Gene Ontology: Mol. function=structural constituent of ribosome; Cellular component=ribonucleoprotein complex; Biological process =translation
  Homolog annotation: Hit_ID=Q9AYP4; Match level="QueryCoverage=100%, HitCoverage=28%, E-value=8e-24, Identity=98%"; Hit description=40S ribosomal protein S10
  Pfam annotation: Domain name=S10_plectin; Domain location=3-52; Score= 52.6; E_value=5e-13; Accession=PF03501.7; Description=PlectinS10 domain
MIIPKKNRNEICKYLFXEGVLYAKKDYNLAKHPQIDVPNLQVIKLMQSFKSK

SEQ ID NO: 97956 - protein, 110 aa, Setaria italica
  Transcript Sequence Number=SeqID_31982
SAKASSINGAIKIKLVITDHPRPGREGPPWQWLRAREVAQPRRAPRPHFFNPTPKASSLLRHPDQEDAFCGGVQMSVREGEIPKPLPATARTNSPSAGQRPRRRRSPRTY

SEQ ID NO: 97957 - protein, 376 aa, Setaria italica
  misc_feature (139)..(139): Xaa can be any naturally occurring amino acid
  misc_feature (185)..(185): Xaa can be any naturally occurring amino acid
  misc_feature (199)..(199): Xaa can be any naturally occurring amino acid
  misc_feature (230)..(230): Xaa can be any naturally occurring amino acid
  Transcript Sequence Number=SeqID_31983
  Gene Ontology: Mol. function=4-alpha-glucanotransferase activity; Cellular component=chloroplast; Biological process=carbohydrate metabolic process
  Homolog annotation: Hit_ID=Q1ALB2; Match level="QueryCoverage=98%, HitCoverage=88%, E-value=7e-86, Identity=70%"; Hit description =Disproportionating enzyme
  Pfam annotation: Domain name=Glyco_hydro_77; Domain location=33-376; Score=160.7; E_value=4.3e-45; Accession=PF02446.9; Description=4 -alpha-glucanotransferase
AAAVGVGEELPEGYDQMMPTVEPARRRRAGVLLHPTSLRGPHGIGDLGDEALAFLHWLRDAGCTLWQVLPLVPPGRSAGEDGSPYSGQDANCGNTLLISLEELVKDGLLMEDELPSPVDVEYVEFDTVANLKEPLIAKXWLEDAALFAAIDRSIGAFSWYEWPEPVKNRHLGALEDKYLDTLKYXKDFIETFMAQQFIXRRQSVAQAGYQHNGFDSFMLMFISSMIATCXGVITEDVVQLRKTIGAPGMAVLQFAFGSGSDNPHLPHNHEMDQVVYTGTHDNDTVLGWWKTLPEEERQIVIKYLPEAENTDISWTLITAALSSVARTSMVTMQDILGLDSSGRMNTPATQKGNWRWRIPSSVGFDSLSPEAAKTRK

SEQ ID NO: 97958 - protein, 389 aa, Setaria italica
  Transcript Sequence Number=SeqID_31984
  Gene Ontology: Mol. function=4-alpha-glucanotransferase activity; Cellular component=chloroplast; Biological process=carbohydrate metabolic process
  Homolog annotation: Hit_ID=Q1ALB2; Match level="QueryCoverage=100%, HitCoverage=67%, E-value=0.0, Identity=79%"; Hit description =Disproportionating enzyme
  Pfam annotation: Domain name=Glyco_hydro_77; Domain location=1-386; Score=413.2; E_value=4.1e-121; Accession=PF02446.9; Description=4 -alpha-glucanotransferase
LIAKAAERLLLGQGELRTQYDCFKKDPNISAWLEDAALFAAIDRSIGAFSWYEWPEPVKNRHLGALEDIYLKQKDFIETFMAQQFLFQRQWQRIRKYAQKLGISIMGDMPIYVGYHSADVWANRKSFLLDKNGFPTFVSGVPPDAFSETGQLWNSPLYDWRAMEADGFSWWIKRIKRALDLYDEFRIDHFRGLAGFWAVPSDAKVALVGSWRAGPRNAFFDAIFKAVGSINIIAEDLGVITEDVVQLRKTIGAPGMAVLQFAFGSGSDNPHLPHNHEIVVYTGTHDNDTVLGWWKTLPEEERQIVIKYLPEAENTDISWTLITAALSSVARTSMVTMQDILGLDSSGRMNTPATQKGNWRWRIPSSVGFDSLSPEAAKLKELLALYNRL

SEQ ID NO: 97959 - protein, 262 aa, Setaria italica
  misc_feature (65)..(65): Xaa can be any naturally occurring amino acid
  Transcript Sequence Number=SeqID_31985
  Gene Ontology: Mol. function=receptor activity; Cellular component =anchored to membrane; Biological process=cell wall catabolic process
  Homolog annotation: Hit_ID=B6TLZ0; Match level="QueryCoverage=93%, HitCoverage=59%, E-value=5e-88, Identity=73%"; Hit description =Erwinia induced protein 1
  Pfam annotation: Domain name=LysM; Domain location=35-77; Score=31.2; E_value=4.3e-06; Accession=PF01476.12; Description=LysM domain
DPTAPLAPGLKLVIPLPCVCFNSTDNNLPAVYLSYVVRVGDTAQSIAASHATTVTDISNVNAMGXPIVAPGDILAIPLSACASAIPSSASDYGLLVANGTYALTAGNCVQCSCGPENLNLYCTPAPASLTTSCSSMQCPNSSLILGNVTAQPTSGGCSVSSCIYGGYVNGTIATSLSSGLQPTCPGPHQFPPLTALPTAVNHGSYSPAPAPGPGEAGGAIPGGSNVSPANEPAGNTAQAPVMNQPGCILLLSFLCMVLSLRM

SEQ ID NO: 97960 - protein, 93 aa, Setaria italica
  Transcript Sequence Number=SeqID_31986
  Subcellular localization annotation: CTP_CleavageSite=4; ConfidenceScore=5.10e-01
VVPSSSSASCFTPAPSASWIGSLLLPAIWIGPVPWIGVEPPVRHQQSTNQNPPAAARSALPAVALGGSKAPNKRGENGERRIGDGRWSLASAG

SEQ ID NO: 97961 - protein, 70 aa, Setaria italica
  Transcript Sequence Number=SeqID_31987
  Subcellular localization annotation: CTP_CleavageSite=31; ConfidenceScore=5.16e-01
MPSAPAVVPPELPKLSPTSQQALRPRSPLANGSAGGDFELRHWRRPKKRAAPSPPWAPPVIQIPEGAGSD

SEQ ID NO: 97962 - protein, 50 aa, Setaria italica
  Transcript Sequence Number=SeqID_31988
PPPAYPPTQDAGAYGQQQQQQHETTSRGGDGFWKGCCAAICCCCVLDMCF

SEQ ID NO: 97963 - protein, 98 aa, Setaria italica
  Transcript Sequence Number=SeqID_31989
  Gene Ontology: Mol. function=transferase activity, transferring glycosyl groups; Biological process=metabolic process
  Homolog annotation: Hit_ID=C4MF59; Match level="QueryCoverage=97%, HitCoverage=20%, E-value=4e-24, Identity=62%"; Hit description=UDP -glycosyltransferase UGT710F3
PPAEQSLHAPDRGCLAWLDARTPRSVLYVSLGSLACVNRAVFEEMAWGLAGSGVPFLWVVRPGMVTGGAAGEEAPPPLPDGLEEKMRGRGKIVTWAPT

SEQ ID NO: 97964 - protein, 245 aa, Setaria italica
  Transcript Sequence Number=SeqID_31990
  Gene Ontology: Mol. function=mismatched DNA binding; Cellular component=MutSalpha complex; Biological process=mismatch repair
  Homolog annotation: Hit_ID=Q9XGD0; Match level="QueryCoverage=100%, HitCoverage=20%, E-value=1e-120, Identity=84%"; Hit description=MUS2 protein
  Pfam annotation: Domain name=MutS_V; Domain location=64-245; Score =251.9; E_value=1.5e-72; Accession=PF00488.13; Description=MutS domain V
KRVQEEFPCYQDLGVEDSDGDTLALLVGLFVRKASEWSLVINAVSTIDVLRSFAAMTLSSFGTMCKPHILLKDDVPILRMKGLWHPYAFAESANGLVPNDLTLGQDLSGFNRFALLLTGPNMGGKSTMMRATCLTIVLAQLGCYVPCTSCELTLADSIFTRLGATDRIMSGESTFLVECTETASVLQNATEDSLVLLDELGRGTSTFDGYAIAYAVFRHLVEQVRCRLLFATHYHSLTKEFASHP

SEQ ID NO: 97965 - protein, 510 aa, Setaria italica
  Transcript Sequence Number=SeqID_31991
LDDSPPAERDAGVGDSAVVGDWATCATVERMGEEAAGEGRGSPEQASLRVREMIRQHFELQGAERVRMLPAHEFCKQGFVLGKASEAGFGNEMYKILTAGALSVMLNRSLIIGQTRGLYPFWEYISYTNQSFTIHEIKHLWRKHHCARTYGRDLNIRVDIFENPAETNVLCSDWNSWKDPIIWFDGTTDAVGIQFFLKNVHPRMKAAALALFGLPDSLHARPNTFGELMRAIISPSSTVQAAVNWALKGANPDIVLHMRMMANRPVRARKAAVLCIKRALQICSMKGTPRVALVSDTPAFVKEIKSDISEFAEVLYFDYKLFTKTSGLEIDGNDKPLNFRSRDWGSAPRWVAFVDFFLAAQAKYAVVTGAHRRVGTTYAQLIAALAAANRHGQEPSGTNFTFLSSVHSNLLVDGLSTQVGWGHIWNRYAGPLSCQRQPHQCALTPLLPPAWWDGQWQSPIPRDVRRLLEYGVRLSNTGKVDERHLVSHCRSRKDHVKRYHVLPPYKNPAR

SEQ ID NO: 97966 - protein, 85 aa, Setaria italica
  Transcript Sequence Number=SeqID_31992
  Gene Ontology: Mol. function=nucleic acid binding; Biological process= DNA integration
  Homolog annotation: Hit_ID=Q5JQ00; Match level="QueryCoverage=75%, HitCoverage=6%, E-value=1e-22, Identity=84%"; Hit description =OSJNBa0009K15.24 protein
IEGRVMGVGHPEYASTMYLLAKVLSVQGKRRGAESLTEESIRILEEAGLGESPTCIQRMRYLSTSWGNMGIVEGLTVRLVVLPNL

SEQ ID NO: 97967 - protein, 181 aa, Setaria italica
  misc_feature (19)..(19): Xaa can be any naturally occurring amino acid
  Transcript Sequence Number=SeqID_31993
  Gene Ontology: Mol. function=nucleic acid binding; Cellular component= kinesin complex; Biological process=DNA integration
  Homolog annotation: Hit_ID=Q5JQ00; Match level="QueryCoverage=90%, HitCoverage=19%, E-value=7e-57, Identity=65%"; Hit description =OSJNBa0009K15.24 protein
  Pfam annotation: Domain name=TPR_1; Domain location=113-146; Score =0.2; E_value=5.6; Accession=PF00515.20; Description=Tetratricopeptide repeat
  Pfam annotation: Domain name=TPR_1; Domain location=29-62; Score =24.7; E_value=0.00038; Accession=PF00515.20; Description =Tetratricopeptide repeat
  Pfam annotation: Domain name=TPR_1; Domain location=71-104; Score =27.2; E_value=6.7e-05; Accession=PF00515.20; Description =Tetratricopeptide repeat
  Pfam annotation: Domain name=TPR_2; Domain location=113-146; Score =11.2; E_value=1.4; Accession=PF07719.9; Description=Tetratricopeptide repeat
  Pfam annotation: Domain name=TPR_2; Domain location=29-62; Score =21.2; E_value=0.0042; Accession=PF07719.9; Description =Tetratricopeptide repeat
  Pfam annotation: Domain name=TPR_2; Domain location=71-104; Score =25.7; E_value=0.00019; Accession=PF07719.9; Description =Tetratricopeptide repeat
  Pfam annotation: Domain name=TPR_4; Domain location=113-138; Score =9.9; E_value=2.9; Accession=PF07721.6; Description=Tetratricopeptide repeat
  Pfam annotation: Domain name=TPR_4; Domain location=71-96; Score=7.1; E_value=6.1; Accession=PF07721.6; Description=Tetratricopeptide repeat
  Pfam module annotation: Pfam domain module=TPR_1::TPR_1::TPR_1::TPR _2::TPR_2::TPR_2::TPR_4::TPR_4; Domain location=113-146::29-62::71 -104::113-146::29-62::71-104::113-138::71-96
QLDKAEKLFQAALLEAKEXGFGLRDPHVASALNNLAEFYRLKQEYEKAELLYLEAIEILEESFGSDDIRVGTALHSLGMCYHLQHKFAQAQTCYERALKIEGRVMGVGHPEYASTMYLLAKVLSVQGKRRGAESLTEESIRILEEAGLGESPTCIQRMRYLSTELIKSKRFTEAEIWQRKI

SEQ ID NO: 97968 - protein, 125 aa, Setaria italica
  misc_feature (64)..(65): Xaa can be any naturally occurring amino acid
  Transcript Sequence Number=SeqID_31994
  Homolog annotation: Hit_ID=Q7F9A6; Match level="QueryCoverage=88%, HitCoverage=14%, E-value=1e-20, Identity=50%"; Hit description =OSJNBa0079F16.2 protein
AQQHSNDSIRITEAILNSSTDQNKLESTSTTDGEKIAATAILLQALDVVGLTDIMAKHVLAPGXXQDYRSIEDALHKCISLYSEPDTRRFVTKAVRQDYLRCLRVLIETVDFTKLNSLSNFRSFL

SEQ ID NO: 97969 - protein, 174 aa, Setaria italica
  misc_feature (23)..(23): Xaa can be any naturally occurring amino acid
  Transcript Sequence Number=SeqID_31995
  Gene Ontology: Mol. function=binding; Biological process=DNA integration
  Homolog annotation: Hit_ID=B9T2R5; Match level="QueryCoverage=94%, HitCoverage=32%, E-value=5e-34, Identity=47%"; Hit description =Kinesin light chain, putative
  Pfam annotation: Domain name=TPR_1; Domain location=112-145; Score =24.7; E_value=0.00038; Accession=PF00515.20; Description =Tetratricopeptide repeat
  Pfam annotation: Domain name=TPR_1; Domain location=70-103; Score =2.8; E_value=2.7; Accession=PF00515.20; Description=Tetratricopeptide repeat
  Pfam annotation: Domain name=TPR_2; Domain location=112-145; Score =21.2; E_value=0.0042; Accession=PF07719.9; Description =Tetratricopeptide repeat
  Pfam annotation: Domain name=TPR_2; Domain location=70-103; Score =10.8; E_value=1.5; Accession=PF07719.9; Description=Tetratricopeptide repeat
  Pfam module annotation: Pfam domain module=TPR_1::TPR_1::TPR_2::TPR _2; Domain location=112-145::70-103::112-145::70-103
WSTCKLGSSVGAVLIGQAAFFLXGLSNGYAFAQEDSVSPAATSEQAEVNATGLQRIEDGSVVSNEHTVKWRIFTDNGRDFFQKRQLDKAEKLFQAALLEAKEGFGLRDPHVASALNNLAEFYRLKQEYEKAELLYLEAIEILEESFGSDDIRVGTALHSLGMCYHLQHKFAQAQ

SEQ ID NO: 97970 - protein, 89 aa, Setaria italica
  Transcript Sequence Number=SeqID_31996
  Gene Ontology: Mol. function=nucleic acid binding; Biological process= DNA integration
  Homolog annotation: Hit_ID=B9T2R5; Match level="QueryCoverage=100%, HitCoverage=16%, E-value=1e-15, Identity=51%"; Hit description =Kinesin light chain, putative
VLSVQGKRRGAESLTEESIRILEEAGLGESPTCIQRMRYLSTSWGNMGIELIKSKRFTEAEIWQRKILHTLELSKGWDSLHTAHAAEVL

SEQ ID NO: 97971 - protein, 327 aa, Setaria italica
  Transcript Sequence Number=SeqID_31997
  Gene Ontology: Mol. function=protein binding; Biological process=DNA integration
  Homolog annotation: Hit_ID=B9T2R5; Match level="QueryCoverage=89%, HitCoverage=62%, E-value=4e-34, Identity=33%"; Hit description =Kinesin light chain, putative
  Pfam annotation: Domain name=TPR_1; Domain location=10-43; Score =18.3; E_value=0.032; Accession=PF00515.20; Description =Tetratricopeptide repeat
  Pfam annotation: Domain name=TPR_2; Domain location=10-43; Score =11.2; E_value=1.4; Accession=PF07719.9; Description=Tetratricopeptide repeat
  Pfam annotation: Domain name=TPR_2; Domain location=114-147; Score =8.4; E_value=3.1; Accession=PF07719.9; Description=Tetratricopeptide repeat
  Pfam module annotation: Pfam domain module=TPR_1::TPR_2::TPR_2; Domain location=10-43::10-43::114-147
SLQLDQRQLDNKYLSLGMCYHLQHKFAQAQTCYERALKVLSVQGKRRGAESLTEESIRILEEAGLGESPTCIQRMRYLSTELIKSKRFTEAEIWQRKILHTLELSKGWDSLHTAHAAEVLSLTLQALEKFKESEELLERSLATKKKVLPEGHFLLAVTLVHLARLSLHKIASDLKNANSNVATYYLSRAQQHSNDSIRITEAILNSSTDQNKLESTSTTDGEKIAATAILLQALDVVGLTDIMAKHVLAPGVQDYRSIEDALHKCISLYSEPDTRRFVTKAVRQDYLRCLRVLIETVDFTQQTTELQDLLGEARKIIEELGGESNRK

SEQ ID NO: 97972 - protein, 62 aa, Setaria italica
  Transcript Sequence Number=SeqID_31998
TAKRTVVPLLDATMLKKAIYHIRRINLKKIMRIHNSNFKSKTALVLSLEGTWYLHTLGDQPP

SEQ ID NO: 97973 - protein, 42 aa, Setaria italica
  Transcript Sequence Number=SeqID_31999
MTTGGMPGSPVGSAAGGPAAPEVAARDAVIGWFRGEFAAANA

SEQ ID NO: 97974 - protein, 93 aa, Setaria italica
  Transcript Sequence Number=SeqID_32000
AAPAPSRRRGVLLRPCAEVSCVLPWRRAYPHGKVVRLQSPELMPGAVKTPAATLFLHAAPIANGWVTRRLGEAPLPPRGLVLRRGAAAGESGR

SEQ ID NO: 97975 - protein, 69 aa, Setaria italica
  Transcript Sequence Number=SeqID_32001
DPHRVGHHAHSNLDVVLVLVLEAIVLKGDSGEDACRGRAVGGVGSERLKANEGHRLQDTLASSRDPQGA

SEQ ID NO: 97976 - protein, 113 aa, Setaria italica
  Transcript Sequence Number=SeqID_32002
  Subcellular localization annotation: CTP_CleavageSite=53; ConfidenceScore=5.15e-01
YQEGSKAFPTCTSLCKGPTWFSSPLTLVPHRITFMNGLATSIRLPSPRGDFLLAHHAMGIKYLLEYNRLPNSSTSHALLFSVSFDGCTAETFQKISNSGHARQLAKGVEDNNT

SEQ ID NO: 97977 - protein, 167 aa, Setaria italica
  Transcript Sequence Number=SeqID_32003
  Gene Ontology: Mol. function=nucleic acid binding; Cellular component= nucleus
  Homolog annotation: Hit_ID=Q8W4C3; Match level="QueryCoverage=96%, HitCoverage=26%, E-value=1e-36, Identity=49%"; Hit description =Poly(A)-specific ribonuclease PARN-like
FQPLQIAVCPFRLHDSSPSTLVAYPYNFHLFPRDELQLGMPSYSFSCQSSYLSTMANDGFDFNMCIYDGISYLSRVQESFARQKIFTTRLRPLLPSQNTSVADSVFKSRIKSRITHWRKGYAEPSKKDDDSLVGSLSRLILGGESYGSRPSISIDVCSDHQSYKLGT

SEQ ID NO: 97978 - protein, 105 aa, Setaria italica
  Transcript Sequence Number=SeqID_32004
RRRQRRRALPPGGHVPAGGRRAIQIDSRGAEQPDGSGETTTGARAVSWRDVASLSCDGSPACVRELVDRGTVVFEVRRRRGGRRRAVMLGKVLGSELVGRAEVPW

SEQ ID NO: 97979 - protein, 186 aa, Setaria italica
  misc_feature (26)..(26): Xaa can be any naturally occurring amino acid
  misc_feature (110)..(110): Xaa can be any naturally occurring amino acid
  misc_feature (116)..(116): Xaa can be any naturally occurring amino acid
  misc_feature (132)..(132): Xaa can be any naturally occurring amino acid
  Transcript Sequence Number=SeqID_32005
  Gene Ontology: Mol. function=RNA binding; Cellular component =ribonucleoprotein complex; Biological process=mRNA processing
  Homolog annotation: Hit_ID=Q6Z4U2; Match level="QueryCoverage=97%, HitCoverage=42%, E-value=3e-72, Identity=78%"; Hit description=CRS2 -associated factor 1, mitochondrial
  Pfam annotation: Domain name=CRS1_YhbY; Domain location=33-116; Score= 49.9; E_value=1e-11; Accession=PF01985.13; Description=CRS1  YhbY domain
YNPKKRPVIPLMLWKPAEPVYPRLIXKTTIEGLTVEETKQMRKKGLHVPVLMKLAKNGYYASLVPMVRDAFLVDELVRIDCKGLPKSDYRKIGVKLRDLVPCILVSFDKXQIIVWXGKDDGSLQDQMQQPSXSVIDSDGASVKDESDDQEQAPSDWSSDEFSGISSSNEEPDDKPVISNLDSSRLI

SEQ ID NO: 97980 - protein, 82 aa, Setaria italica
  Transcript Sequence Number=SeqID_32006
EDAYGCSRLRADSCFSTRAWEAPARGAERWPGLLAHLLVTWLISKPLHKRRGKQGLRRKTSLHPGLSSLASHDHFPPLIPKS

SEQ ID NO: 97981 - protein, 70 aa, Setaria italica
  Transcript Sequence Number=SeqID_32007
LGWREYDLEYSYMLLGVPIVLAVEIRSRIRCHLLATASTILLCLIIIAIKVAAEELVVEFEHRTMIIFVI

SEQ ID NO: 97982 - protein, 54 aa, Setaria italica
  Transcript Sequence Number=SeqID_32008
SNLPSEDIPVSQASLATVYVLISLVLYLIKKKKTKKKRRNVRTETGTGTNQREG

SEQ ID NO: 97983 - protein, 132 aa, Setaria italica
  Transcript Sequence Number=SeqID_32009
  Homolog annotation: Hit_ID=B9S6G4; Match level="QueryCoverage=46%, HitCoverage=15%, E-value=5e-13, Identity=57%"; Hit description=Sugar transporter, putative
  Pfam annotation: Domain name=DUF1195; Domain location=1-117; Score =223.1; E_value=7e-64; Accession=PF06708.3; Description=Protein of unknown function (DUF1195)
AAIALLALWSMSAASVSLRWSSSGDLAAFSGDLDVPLLDDLDSLEMEEREKLVGRMWDMYTRTSDEVRLPRFWQEAFEAAYEELAGDDTQVRDAAISEIARMSAHKLELEQTVNENEEENAASNRGGRSMGK

SEQ ID NO: 97984 - protein, 98 aa, Setaria italica
  Transcript Sequence Number=SeqID_32010
  Gene Ontology: Mol. function=protein binding
  Homolog annotation: Hit_ID=Q8RYX6; Match level="QueryCoverage=97%, HitCoverage=20%, E-value=5e-19, Identity=51%"; Hit description =P0648C09.24 protein
  Pfam annotation: Domain name=DUF266; Domain location=1-98; Score= -34.7; E_value=2.9e-13; Accession=PF03267.6; Description=Arabidopsis protein of unknown function, DUF266
KVAFLFLVRGELPLRPLWEKFFAGHQGLYSIYVHAHPSYTGSPPVDSVFYGRYIPSQRTKWGDASLVEAERRLLANALLDLGNERFALFSEACIPVYD

SEQ ID NO: 97985 - protein, 36 aa, Setaria italica
  Transcript Sequence Number=SeqID_32011
VMTTACTSHHHITLTLTPIVLILIGLKFKCLGGCFK

SEQ ID NO: 97986 - protein, 367 aa, Setaria italica
  Transcript Sequence Number=SeqID_32012
  Gene Ontology: Mol. function=catalytic activity; Biological process =cellular metabolic process
  Homolog annotation: Hit_ID=O82055; Match level="QueryCoverage=95%, HitCoverage=93%, E-value=1e-170, Identity=84%"; Hit description =Cinnamoyl-CoA reductase
  Pfam annotation: Domain name=3Beta_HSD; Domain location=25-288; Score= -52.8; E_value=1.2e-06; Accession=PF01073.11; Description=3-beta hydroxysteroid dehydrogenaseisomerase family
  Pfam annotation: Domain name=Epimerase; Domain location=24-263; Score= 78.7; E_value=2.1e-20; Accession=PF01370.13; Description=NAD dependent epimerasedehydratase family
  Pfam annotation: Domain name=KR; Domain location=23-163; Score=-80.5; E_value=0.021; Accession=PF08659.2; Description=KR domain
  Pfam annotation: Domain name=NAD_binding_4; Domain location=26-248; Score=-21.3; E_value=7.6e-08; Accession=PF07993.4; Description=Male sterility protein
  Pfam annotation: Domain name=NmrA; Domain location=24-293; Score= -80.4; E_value=0.0013; Accession=PF05368.5; Description=NmrA-like family
  Pfam annotation: Domain name=adh_short; Domain location=22-149; Score= -21.4; E_value=0.00035; Accession=PF00106.17; Description=short chain dehydrogenase
  Pfam module annotation: Pfam domain module=3Beta_HSD::Epimerase::KR::N AD_binding_4::NmrA::adh_short; Domain location=25-288::24-263::23 -163::26-248::24-293::22-149
MTVVEAVSAAAAAVVPPAGNGQTVCVTGAAGYIASWLVKLLLEKGYTVKGTVRNPDDPKNAHLKALDGAAERLVLCKADLLDYDAICRAVQGCQGVFHTASPVTDDPEQMVEPAVRGTEYVLSAAAEAGTVRRVVFTSSIGAVTMDPNRGPDVVVDESCWSDLDFCKKTRNWYCYGKAVAEQAAWDAARQRGVDLVVVNPVLVVGPLLQPTVNASIAHILKYLDGSARTFANAVQAYVDVRDVAAAHLAVFESPAASGRHLCAERVLHREDVVRILAKLFPEYPVPTRCSDEENPRKQPYRFSNQKLRDLGLEFRPVSQSLYDTVKSLQEKGHLPVLGDGEQKPEAEKEEQAPAATEVQQGGIAIRA

SEQ ID NO: 97987 - protein, 51 aa, Setaria italica
  misc_feature (46)..(46): Xaa can be any naturally occurring amino acid
  Transcript Sequence Number=SeqID_32013
MPLRAPPLLLHLILLLLVPALADVPDRYSSPRTGASAGGGLGNSPXREYLD

SEQ ID NO: 97988 - protein, 95 aa, Setaria italica
  Transcript Sequence Number=SeqID_32014
  Gene Ontology: Mol. function=hydrolase activity; Biological process =lipid catabolic process
  Homolog annotation: Hit_ID=Q9XE77; Match level="QueryCoverage=100%, HitCoverage=23%, E-value=6e-42, Identity=82%"; Hit description =Patatin-like protein
LSDICISTAAAPTYFPAHFFRTEGPSGKSREFHLVDGGVAANNPTMVAMSMLTKEVLRHNPDFRPAEYGNFLIISVGTGAPKQAEMYTAPKCAKW

SEQ ID NO: 97989 - protein, 89 aa, Setaria italica
  Transcript Sequence Number=SeqID_32015
  Subcellular localization annotation: CTP_CleavageSite=19; ConfidenceScore=5.34e-01
LTPAGVASMLLGASMALMLCGSVTFMLGFFLMPWVVGLGCVFLFVGFVTNLSGIWRAILLWPAAACSASPKEASSSPWHIFSKPPFMPM

SEQ ID NO: 97990 - protein, 66 aa, Setaria italica
  Transcript Sequence Number=SeqID_32016
LPLDLLACHVSSKGNVIYGYLYNKYPPVNICIFICFNVNMFMEAITCLVDLKYFSSAVTRSMNCFL

SEQ ID NO: 97991 - protein, 68 aa, Setaria italica
  Transcript Sequence Number=SeqID_32017
VNLGGIGIQSSAFKDKDMTYLLMPVCHKISNTRLNNEPNMKKSTSQGLQGLKLDIAQRVAKCNCLRSP

SEQ ID NO: 97992 - protein, 156 aa, Setaria italica
  Transcript Sequence Number=SeqID_32018
  Gene Ontology: Cellular component=plasma membrane
  Homolog annotation: Hit_ID=Q9SRX5; Match level="QueryCoverage=61%, HitCoverage=57%, E-value=3e-10, Identity=33%"; Hit description =F22D16.19 protein
  Pfam annotation: Domain name=DUF538; Domain location=36-147; Score =169.2; E_value=1.2e-47; Accession=PF04398.4; Description=Protein of unknown function, DUF538
  Subcellular localization annotation: CTP_CleavageSite=52; ConfidenceScore=5.09e-01
MARRLLAALLAVSLLLPLARPDSSISSSLPANTTSTAYDELRLRGFPRGLLPANVRGYTLDTGSGDFAVDLHSSCRIVLPAGSYLAAFNNRLTGRLDDRRISGLSGIRVRAFFRWWSITGIRADGDQLVFEVGSVSAKFPARDFNASLECPAKADS

SEQ ID NO: 97993 - protein, 71 aa, Setaria italica
  Transcript Sequence Number=SeqID_32019
FCMSVYVAILPCNNKGLIYLMNISVKWASWSFFSYLLFSLRLKSVCGINFIALKKYISTYRLVSFIRGKAT

SEQ ID NO: 97994 - protein, 324 aa, Setaria italica
  misc_feature (17)..(17): Xaa can be any naturally occurring amino acid
  Transcript Sequence Number=SeqID_32020
  Gene Ontology: Mol. function=DNA-directed DNA polymerase activity; Cellular component=nucleoplasm; Biological process=DNA repair
  Homolog annotation: Hit_ID=B9SQ81; Match level="QueryCoverage=56%, HitCoverage=33%, E-value=5e-70, Identity=66%"; Hit description=DNA polymerase eta, putative
PSSSVQGFLASLPVKKXDDLGVETIGDLLSFAEEKLQEQYGVNTGTWLWKIARGISGEEVEDRLLPKSHGCGKTFPGPKALKNSASVKSWLDQLCEELSERIQSDLNQNKRIAQTLTLHARASKENERDSTKKFPSKSCPLRYGTGKIQEDAMKLFESGLHEFLESQNTGWSITSLSVTASKIFDIPSGTSSILRYIKGPSSAASPAIPDSSSVPDDPSLDNNVHVTPIHEEQCEPSISEKEDGKRYSSISAKQCPANEEKRIPKKLPEVKGTSSILKFLSRGQSALHEKRKSDVLICSPQGPGSSSEANKAEEHNVSGQAADR

SEQ ID NO: 97995 - protein, 239 aa, Setaria italica
  Transcript Sequence Number=SeqID_32021
  Gene Ontology: Cellular component=chloroplast
  Subcellular localization annotation: CTP_CleavageSite=34; ConfidenceScore=5.46e-01
MSSSLLPTTSAGLHLHVCPSPPRPRRRRCCQVITAAALPPTSDGVGRRAVSLAGVAAWLATTAGRADAASPLDKYVKRKKLEPLETYVPAVLLTIDQFVDLEKSLEFEKPRYDETRSLLRSGPASSLRINIRAVAQYASSNGQGKAASDAVDECLRALEDLDSLLLHASRNDPSASVETMRSKITVALGALDNLLQTVPSAVLDKGKAIADAYRTPADDYIEENATVLDPKLKQLEDIL

SEQ ID NO: 97996 - protein, 194 aa, Setaria italica
  misc_feature (175)..(175): Xaa can be any naturally occurring amino acid
  Transcript Sequence Number=SeqID_32022
  Gene Ontology: Mol. function=RNA-directed DNA polymerase activity; Biological process=RNA-dependent DNA replication
  Homolog annotation: Hit_ID=Q33AJ4; Match level="QueryCoverage=79%, HitCoverage=8%, E-value=2e-16, Identity=31%"; Hit description =Retrotransposon protein, putative, unclassified
EESILKLQSLPPNLQNQSLQRDLIQQHQVILDKQAEFHKQRYKKSWVTEGDRNAHFFQQAILKRERRNRILFLADEFGNPLTTQDQIDTCFNNYFKNLFTSQVDHQQLNILPQQNRVQEDFSSDLTSSIPDKAELWGILKNMKKDAAPGPDGFNAAFYRVSWDWLGDDVVNLVQXFYRTGMLPHELNKLLLFLF

SEQ ID NO: 97997 - protein, 181 aa, Setaria italica
  Transcript Sequence Number=SeqID_32023
  Gene Ontology: Mol. function=nucleoside-triphosphatase activity; Cellular component=DNA replication factor C complex; Biological process=DNA replication
  Homolog annotation: Hit_ID=Q948P2; Match level="QueryCoverage=99%, HitCoverage=53%, E-value=1e-101, Identity=97%"; Hit description =Replication factor C 40kDa subunit
  Pfam annotation: Domain name=Rep_fac_C; Domain location=83-171; Score= 132.2; E_value=1.7e-36; Accession=PF08542.3; Description=Replication factor C
SSKIIEPIQSRCAIVRFSRLSDQEILGRLMIVVAAEKVPYVPDGLEAIIFTADGDMRQALNNLQATFSGFRFVNQENVFKVCDQPHPLHVKNMVKNVLDGKFDEACSALKQLYDLGYSPTDIITTLFRVVKNYDMAEYLKLEMLKETGFAHMRICDGVGSFLQLSGLLAKFALVRETAKAP

SEQ ID NO: 97998 - protein, 140 aa, Setaria italica
  Transcript Sequence Number=SeqID_32024
  Gene Ontology: Mol. function=oxidoreductase activity; Cellular component=cytoplasm; Biological process=metabolic process
  Homolog annotation: Hit_ID=Q49HE0; Match level="QueryCoverage=100%, HitCoverage=38%, E-value=3e-58, Identity=75%"; Hit description=12 -oxo-phytodienoic acid reductase
  Pfam annotation: Domain name=Oxidored_FMN; Domain location=1-140; Score=-149.6; E_value=0.0043; Accession=PF00724.12; Description =NADH:flavin oxidoreductase  NADH oxidas
PGLWTDEQVEAWKPIVDTVHAKGAVFFAQIWHTGRVSAPEFQPNGQAPISSTDKQVPPQVSQDGHVSTFAVPRRLETTEIPQVVNDFRIAARNAIKAGFDGVEIHAANGYLFDQFMKDSVNDRDDTYGGTLENRCRFTAE

SEQ ID NO: 97999 - protein, 96 aa, Setaria italica
  Transcript Sequence Number=SeqID_32025
SSYQTAGIHGQSGSCFSITWLWVCMLNGKLLLNHVHSIISLPLQQKLLTTICMHNIAPDRDAVCCILHVAWHLLNCFCLWCRIMDYWNSNMIRWPA

SEQ ID NO: 98000 - protein, 110 aa, Setaria italica
  Transcript Sequence Number=SeqID_32026
  Gene Ontology: Mol. function=DNA-directed RNA polymerase activity; Cellular component=nucleus; Biological process=transcription
  Homolog annotation: Hit_ID=B6TWH7; Match level="QueryCoverage=100%, HitCoverage=42%, E-value=4e-50, Identity=81%"; Hit description=RNA polymerase Rpc34 subunit family protein
EKLGAATVQMIHHGILRDDPKAGYTIDEVRDIVKTMVLDKVLEEVKSTGEGDFAAVRSGTICYRLAGAAQGGMMEGIPCGVCPRIDECSPDGVISPSTCVYYKKWLEMDF

SEQ ID NO: 98001 - protein, 105 aa, Setaria italica
  Transcript Sequence Number=SeqID_32027
  Gene Ontology: Mol. function=hydrolase activity, acting on acid anhydrides, catalyzing transmembrane movement of substances; Cellular component=integral to membrane; Biological process=metal ion transport
  Homolog annotation: Hit_ID=A9NIX0; Match level="QueryCoverage=100%, HitCoverage=10%, E-value=8e-37, Identity=67%"; Hit description =Putative ATPase-like zinc transporter
SKSIQPKPENATEFRIYPGEGIYGEISGRHVYIGNRRIMARSSCYTVPEMDDRKGASIGYVICDGDLVGAFSLSDDCRTGAAEAIRELRSMGIKSVMLTGDSRSA

SEQ ID NO: 98002 - protein, 64 aa, Setaria italica
  Transcript Sequence Number=SeqID_32028
  Gene Ontology: Mol. function=phosphoprotein phosphatase activity; Cellular component=cytoplasm; Biological process=protein amino acid dephosphorylation
  Homolog annotation: Hit_ID=B6TDT2; Match level="QueryCoverage=100%, HitCoverage=16%, E-value=9e-30, Identity=98%"; Hit description =Serine/threonine protein phosphatase
MDPALLDDVIRRLLEVKNLKPGKNAQLSESEIKQLCAAAKEIFLQQPNLLELEAPIKICGDVHG

SEQ ID NO: 98003 - protein, 88 aa, Setaria italica
  Transcript Sequence Number=SeqID_32029
MRRRKEDDYSVEKYIVVVDSIEDLTIEQKADANELFQSEMNRQIFMMAKNQAVRLVWLKKKFTELDMKCLPASSCVFISLLLALDTKE

SEQ ID NO: 98004 - protein, 66 aa, Setaria italica
  misc_feature (17)..(17): Xaa can be any naturally occurring amino acid
  misc_feature (41)..(41): Xaa can be any naturally occurring amino acid
  Transcript Sequence Number=SeqID_32030
EYVWQQRSRFSGSKVVXELGAGTSLPGLVAAKVGADVTLTXFAHNTEVSSNPSLESLLFLSLSVFQ

SEQ ID NO: 98005 - protein, 117 aa, Setaria italica
  Transcript Sequence Number=SeqID_32031
  Gene Ontology: Cellular component=integral to membrane
  Homolog annotation: Hit_ID=Q9VEZ4; Match level="QueryCoverage=82%, HitCoverage=37%, E-value=3e-14, Identity=37%"; Hit description=CG5013
MEGVAFGARAAAVPARMTTVSRHYFGGDASESDHDLRVDIIENIEEDYGMFVWPCSIILAEYVWQQRSRFSGSKVVELGAGTSLPGLVAAKVGADVTLTDIAHNTEVLNNIRRICTL

SEQ ID NO: 98006 - protein, 164 aa, Setaria italica
  Transcript Sequence Number=SeqID_32032
  Gene Ontology: Cellular component=plasma membrane; Biological process= response to stress
  Homolog annotation: Hit_ID=B6TYX3; Match level="QueryCoverage=100%, HitCoverage=100%, E-value=3e-76, Identity=85%"; Hit description=USP family protein
  Pfam annotation: Domain name=Usp; Domain location=8-162; Score=85.0; E_value=2.6e-22; Accession=PF00582.18; Description=Universal stress protein family
MAGAGADGERRIGVAMDYSDSSKKALDWAIANLLRHGDTLVVVHVLHHGGEETKHTLWAKSGSPLIPLSEFREPEVMKNYGVKTDAEVLDMIDTAARQKQLKVVAKLYWGDAREKLCDGVEELKIDSLVMGSRGLGPIQRILLGSVTNYVLSNASCPVTVVKGK

SEQ ID NO: 98007 - protein, 79 aa, Setaria italica
  Transcript Sequence Number=SeqID_32033
  Subcellular localization annotation: CTP_CleavageSite=39; ConfidenceScore=5.22e-01
LPIVTAHLKDLQHEPTNATQPVHSPMRSPAKAFADIIPRVATSSAPPGPPRRLSAASPVRHPIVQPWCPVGSSSSTGVA

SEQ ID NO: 98008 - protein, 90 aa, Setaria italica
  misc_feature (37)..(37): Xaa can be any naturally occurring amino acid
  misc_feature (57)..(57): Xaa can be any naturally occurring amino acid
  Transcript Sequence Number=SeqID_32034
  Gene Ontology: Mol. function=catalytic activity; Biological process =metabolic process
  Homolog annotation: Hit_ID=B9SFX6; Match level="QueryCoverage=75%, HitCoverage=18%, E-value=6e-13, Identity=56%"; Hit description =Muconate cycloisomerase, putative
CHPSSTRTSRPRSRPAASLGALLDEVTGVLHGHAFAXGVEMALIDAVANSIHIPLWXLFGGASDTVTTDIMVAPASKLKEILLCSRPYIC

SEQ ID NO: 98009 - protein, 73 aa, Setaria italica
  Transcript Sequence Number=SeqID_32035
NNHVTDDLPVANGPEPRNGLEPAEVEKPEPVAYLPQVVVLCEQRHEALDEAAAAAAGPSTTGLVSKWRPKDRM

SEQ ID NO: 98010 - protein, 79 aa, Setaria italica
  Transcript Sequence Number=SeqID_32036
YVNAIILLACCVSSLKSFLYHIYPYAQDICSYKYNPQGVKSLGFCSCRQQALIANQHGLHKYPSWEVQQSVLCSNLKKY

SEQ ID NO: 98011 - protein, 85 aa, Setaria italica
  misc_feature (28)..(28): Xaa can be any naturally occurring amino acid
  misc_feature (50)..(50): Xaa can be any naturally occurring amino acid
  Transcript Sequence Number=SeqID_32037
  Gene Ontology: Mol. function=binding
  Homolog annotation: Hit_ID=Q6RUS5; Match level="QueryCoverage=80%, HitCoverage=5%, E-value=7e-28, Identity=86%"; Hit description =Transducin/WD-40 repeat protein (Fragment)
HDNEEANARREEREQIALGCIAKCQRSXCKMTSQIASWDTRFETGTKSSXLLLPFSPIVIAADENEQIRVWNYDDALPVNSFSKP

SEQ ID NO: 98012 - protein, 89 aa, Setaria italica
  misc_feature (4)..(4): Xaa can be any naturally occurring amino acid
  misc_feature (6)..(6): Xaa can be any naturally occurring amino acid
  Transcript Sequence Number=SeqID_32038
FFFXFXFFYFATDSYLRKIWPVLQALTFTTLNHLHQDSLDYPVESGLGRTEADVGGDTVQVRWWRYLALASPFIRLMEWQHGYGDTFSI

SEQ ID NO: 98013 - protein, 40 aa, Setaria italica
  Transcript Sequence Number=SeqID_32039
DPVYGGYEAFEPLSYKFTNARGHGGFLHLDNDESVYHSYP

SEQ ID NO: 98014 - protein, 134 aa, Setaria italica
  Transcript Sequence Number=SeqID_32040
HSWLNPDIALGEFPRAHYIHAHGGHHELIESAHHGKLPANCSNRSCAVGVSPCARKARAHIDQGWVEPQKLTCTRPRGRRRHCPGSRFMAFLLHRSHERGAHTPGCGKYLDAYLQVMTKLQPYYLLAKESQATD

SEQ ID NO: 98015 - protein, 101 aa, Setaria italica
  Transcript Sequence Number=SeqID_32041
GGQGGDGERVGGRREEATAMAAKGAMAALLVPLLVAALLACVSPPGAAAVAAEQGVLRMKPCDGGYPYNRTLAHILVEYASANNLPLDFKRPLPFCLLSRL

SEQ ID NO: 98016 - protein, 92 aa, Setaria italica
  Transcript Sequence Number=SeqID_32042
AIISSAIMLLIYSDYFIYCNIYFLMPLSLLRNCSFQAADLHKKNPQTVPLVYSSYDSYKFSRQPLDLCTSLQTPVAMVVSFTWTTMGRNEDG

SEQ ID NO: 98017 - protein, 158 aa, Setaria italica
  Transcript Sequence Number=SeqID_32043
  Gene Ontology: Mol. function=binding; Cellular component=cytosol; Biological process=positive regulation of protein amino acid phosphorylation
  Homolog annotation: Hit_ID=Q6RUS5; Match level="QueryCoverage=87%, HitCoverage=11%, E-value=2e-70, Identity=89%"; Hit description =Transducin/WD-40 repeat protein (Fragment)
RKTLHSQYERWQPKARYKLQLDPTVEEVKKLCNTCRKYARSERVLFHYNGHGVPKPTANGEIWVFNKSYTQYIPLPITDLDSWLKTPSIYVFDCSAAGIIVKAFLERLDWSSSSSASSQKDCILLAACEAHQTLPQSAEELELQSRRSRKSFHNNSSC

SEQ ID NO: 98018 - protein, 78 aa, Setaria italica
  Transcript Sequence Number=SeqID_32044
RYISRTNASIYSTTSICEYRRHVHAFYFYLGPYAQPHLPRQQQPLPHLIYGINHLQTFLQLAKAKERTNPNEVTINHT

SEQ ID NO: 98019 - protein, 311 aa, Setaria italica
  misc_feature (40)..(40): Xaa can be any naturally occurring amino acid
  misc_feature (160)..(160): Xaa can be any naturally occurring amino acid
  misc_feature (198)..(198): Xaa can be any naturally occurring amino acid
  Transcript Sequence Number=SeqID_32045
  Gene Ontology: Mol. function=catalytic activity; Biological process =metabolic process
  Homolog annotation: Hit_ID=B9SFX6; Match level="QueryCoverage=85%, HitCoverage=70%, E-value=7e-96, Identity=66%"; Hit description =Muconate cycloisomerase, putative
  Pfam annotation: Domain name=MR_MLE; Domain location=60-154; Score =60.7; E_value=5.4e-15; Accession=PF01188.13; Description=Mandelate racemase  muconate lactonizing enzyme, C-terminal domain
GALLDEVAGVLPGHAFASARAGVEMALIDAVANSIHIPLXLFGGASDTVTTDITIPIVAPNEAAQLTAKYRGQGFQTLKLKVGKNLNSNMEVLKAIRFVHPDFSFILDANEGYTADQAIEVLDRLNEMGVTPVLFEQPVHRDDWEGVHDVSIVAMEKYKXVAVAADESCRSLLDTQKIIHGNLPHVINIKLTKLGVLXALEIIDAARKANVTLMIGGMVETRIAMGFAGHLAAGLGCFSFVDLYTPHLLSEDPVYGGYEAFEPLSYKFTNARGHGGFLHLDNDESVLDEKGLMVVATMLQEIRACRYECCS

SEQ ID NO: 98020 - protein, 178 aa, Setaria italica
  misc_feature (15)..(15): Xaa can be any naturally occurring amino acid
  Transcript Sequence Number=SeqID_32046
  Gene Ontology: Mol. function=triacylglycerol lipase activity; Biological process=lipid metabolic process
  Homolog annotation: Hit_ID=B6TRM7; Match level="QueryCoverage=79%, HitCoverage=39%, E-value=6e-74, Identity=91%"; Hit description=Lipase
GRAGRRRRWLRRARXAALLVAALLACASPPEAAAAAVEQGVLRMKPCDGGYPYNRTLAHILVEYASAVYTSDLTSLFTWTCPRCKGHTKGFEVIEVIVDVENCLQAFVGVAPDPRSIIIAFRGTQQHSVSNWIEDLFWKQLDVTYPGMPDAMVHHGFYTAYYNTTLRHEILKSIQWAR

SEQ ID NO: 98021 - protein, 148 aa, Setaria italica
  Transcript Sequence Number=SeqID_32047
KFTYYTSSRKESTRDTGEKLIEVLNIRNKTHPLHMGRLVHKLCTTAPAILPSHQPFTQHPGHFSSVGKPSSCCKTIQQPYQDFNIILAPTAGWVLTGIITDCLISGNHISSYDLMKPNLHSHHTLDLPTVNEVCTDQQNCIHMLQEQF

SEQ ID NO: 98022 - protein, 78 aa, Setaria italica
  misc_feature (45)..(45): Xaa can be any naturally occurring amino acid
  Transcript Sequence Number=SeqID_32048
  Gene Ontology: Mol. function=catalytic activity; Biological process =metabolic process
  Homolog annotation: Hit_ID=B9SFX6; Match level="QueryCoverage=75%, HitCoverage=12%, E-value=3e-11, Identity=62%"; Hit description =Muconate cycloisomerase, putative
GVLHGHAFASVRNPHLPSPGSQATAGVEMALIDAVANSIHIPLWXLFGGASDTVTTDIMVAPASKLKEILLCSRPYIC

SEQ ID NO: 98023 - protein, 86 aa, Setaria italica
  Transcript Sequence Number=SeqID_32049
  Subcellular localization annotation: CTP_CleavageSite=39; ConfidenceScore=5.09e-01
NTNKSWIANSYSWPGPPAVLPGLSFCGDSDRSAILYRTSQNVISPRFVQLLLSYLIHCSSSKKTIERHIRSTKSWKRNTETVDAII

SEQ ID NO: 98024 - protein, 351 aa, Setaria italica
  Transcript Sequence Number=SeqID_32050
  Gene Ontology: Cellular component=chloroplast
  Subcellular localization annotation: CTP_CleavageSite=52; ConfidenceScore=5.49e-01
KFVHLATTTPLVVVSSCNGCRRPYPHRRRRFSGKPKPNALPPLLSLSLCAIPAAAPLVPLPRRRRNVTAAYGDDDMDDDFGDFDADDADGVGDDDDIDNEQDYDVDYDRLLAPVKPPLPSSLHGEEGDIAMVAAESFVSTQDSASDTVVDYTVDEDEFHKIRLLHCDFLIRKVPDPDDDVFDFREMYVTPPDTDIYSIPRVLAPMPQKYVRCTKKDFGRYNVTEPPVEHLRDPLYKTEREIMKVFLTKHYRNRRADDPDFFLDFEEIYVIDSKTRSITRAKVVVSVPEGKKRDRQNDLLLIRDGGESFRIIDKTKRDDASTVIQREEWAKSRQDVEKHFRKLRDFDYSNWF

SEQ ID NO: 98025 - protein, 115 aa, Setaria italica
  Transcript Sequence Number=SeqID_32051
  Gene Ontology: Mol. function=triacylglycerol lipase activity; Biological process=lipid metabolic process
  Homolog annotation: Hit_ID=B6TRM7; Match level="QueryCoverage=70%, HitCoverage=21%, E-value=2e-31, Identity=76%"; Hit description=Lipase
ELECNFGAQVPRTICVTHQNDIVPHLPPYYYYLGQWTYHHCAREVWLHEIIEGNVVTRNKTISDDSGEDPTCSRYLSASHGLTILDKAVQLFCCCTGARMILKSDKAVELFCNRS

SEQ ID NO: 98026 - protein, 347 aa, Setaria italica
  misc_feature (42)..(42): Xaa can be any naturally occurring amino acid
  Transcript Sequence Number=SeqID_32052
  Gene Ontology: Mol. function=triacylglycerol lipase activity; Biological process=lipid metabolic process
  Homolog annotation: Hit_ID=B6TRM7; Match level="QueryCoverage=94%, HitCoverage=90%, E-value=1e-176, Identity=89%"; Hit description =Lipase
  Pfam annotation: Domain name=Lipase_3; Domain location=102-242; Score= 129.2; E_value=1.4e-35; Accession=PF01764.17; Description=Lipase (class 3)
LVAALLACASPPEAAAAAVEQGVLRMKPCDGGYPYNRTLAQXYLVRNNASAVYTSDLTSLFTWTCPRCKGHTKGFEVIEVIVDVENCLQAFVGVAPDPRSIIIAFRGTQQHSVSNWIEDLFWKQLDVTYPGMPDAMVHHGFYTAYYNTTLRHEILKSIQWARKTYGKLPINVVGHSMGGALASFCALDLSVKFGSQEVELMTFGQPRIGNPAFAAYFGAQVPRTIRVTHQNDIVPHLPPYYYYLGEWTYHHFAREVWLHVIIDGNVVTRNETVCDDSGEDPTCSRSVYGISVADHLEYYGVTLHSDSRGTCQFVMGAANSVYSYIREVDGTIILSRYAQEPHALESM

SEQ ID NO: 98027 - protein, 169 aa, Setaria italica
  misc_feature (120)..(120): Xaa can be any naturally occurring amino acid
  Transcript Sequence Number=SeqID_32053
  Gene Ontology: Mol. function=binding
  Homolog annotation: Hit_ID=Q6RUS5; Match level="QueryCoverage=98%, HitCoverage=13%, E-value=2e-68, Identity=76%"; Hit description =Transducin/WD-40 repeat protein (Fragment)
VLVEQIALGCIAKCQRSSACKMTSQIASWDTRFETGTKAALLLPFSPIVIAADENEQIRVWNYDDALPVNSFQNHKLSERGLSKLLLINELDESLLLAASSDGNVRIWKNFTQSGGQKLXVTAFSSVQGHRAAGRSIVIDWQQQSGYLYASGDMSSILIWDLDKEQLQT

SEQ ID NO: 98028 - protein, 206 aa, Setaria italica
  misc_feature (134)..(134): Xaa can be any naturally occurring amino acid
  misc_feature (169)..(169): Xaa can be any naturally occurring amino acid
  Transcript Sequence Number=SeqID_32054
  Gene Ontology: Mol. function=hydrogen ion transmembrane transporter activity; Cellular component=proton-transporting ATP synthase complex, coupling factor F(o); Biological process=proton transport
  Homolog annotation: Hit_ID=B6TCR9; Match level="QueryCoverage=95%, HitCoverage=80%, E-value=4e-95, Identity=94%"; Hit description =Mitochondrial ATP synthase
MIYKATLYSDLLKGIFFEVKKKFETALGVLKKEKITIDPDDPAAVSRYAQVMKTVREKADLLSDSQRIKYTIETFTKGIPDARTYLNTLQEIRVKSGLIDHLGIEPLMMEALEKIEKDIKKPLLRSDKKNMATXLAEFDKINKKLGIGKEDLPKIEEELEMEIAKSELXTELKKECIEAMETQLKREEFKDEEMPDVKKLDIRNFL

SEQ ID NO: 98029 - protein, 102 aa, Setaria italica
  Transcript Sequence Number=SeqID_32055
FHRIVQRVLVQVVQSCETQSSQYWPNLAEVAVNSNMLKPLLHFLLSTSAVSLLPHFSRTCGRAAHLYIKKKIHRCLIQELKTPRGKAPIMGKYTEFFHMIKA

SEQ ID NO: 98030 - protein, 1068 aa, Setaria italica
  Transcript Sequence Number=SeqID_32056
  Gene Ontology: Mol. function=binding; Cellular component=cytosol; Biological process=positive regulation of protein amino acid phosphorylation
  Homolog annotation: Hit_ID=Q6RUS5; Match level="QueryCoverage=100%, HitCoverage=85%, E-value=0.0, Identity=82%"; Hit description =Transducin/WD-40 repeat protein (Fragment)
  Pfam annotation: Domain name=HEAT; Domain location=347-379; Score =11.0; E_value=2.2; Accession=PF02985.14; Description=HEAT repeat
  Pfam annotation: Domain name=HEAT; Domain location=396-432; Score =14.6; E_value=0.43; Accession=PF02985.14; Description=HEAT repeat
  Pfam annotation: Domain name=WD40; Domain location=1024-1062; Score =4.5; E_value=12; Accession=PF00400.24; Description=WD domain, G-beta repeat
  Pfam annotation: Domain name=WD40; Domain location=785-828; Score =7.5; E_value=5.1; Accession=PF00400.24; Description=WD domain, G -beta repeat
  Pfam annotation: Domain name=WD40; Domain location=839-879; Score =5.5; E_value=8.8; Accession=PF00400.24; Description=WD domain, G -beta repeat
  Pfam annotation: Domain name=WD40; Domain location=884-923; Score =13.6; E_value=0.86; Accession=PF00400.24; Description=WD domain, G -beta repeat
  Pfam annotation: Domain name=WD40; Domain location=976-1014; Score =21.9; E_value=0.0026; Accession=PF00400.24; Description=WD domain, G- beta repeat
  Pfam module annotation: Pfam domain module=HEAT::HEAT::WD40::WD40::WD4 0::WD40::WD40; Domain location=347-379::396-432::1024-1062::785 -828::839-879::884-923::976-1014
IPADVFTACLTTPIKMALHWFCKRSLLRGSMDHSLIDQIPGRQNDRKTLLGELNWIFTAITDTIAWNVLPHDLFQRLFRQDLLVASLFRNFLLAERIMRSANCSPISYPLLPPTHQHHMWDAWDMAAEICLSKLPQLIADPNAEFQPSPFFTEQLTAFEVWLDHGSEDKKPPEQLPIVLQVLLSQSHRFRALVLLGRFLDMGPWAVDLALSVGIFPYVLKLLQTSAMELRQILVFIWTKILSLDKSCQVDLVKDGGHAYFIRFLDSLDAYPEQRAMAAFVLAVIVDGHRRGQEACINAGLIDVCLRHLQPENPHDAQTEPLLLQWLCLCLGKLWEDFPEARLLGLQSNAPEIVAYLLSETQPEVRASAVFALGNLLDMGSTSLNGVDDDSDDDEKLKAETIVVRSLLQVSSDCSPLVRSEVAIALTRFALGHNKYLKSVAAEYWKPQTNSLLKSLPSLANISSPNNAYSPNNIRQGSSGLGSHIGPVLRVGSDSSATGRDARISTSSPIATSSIMHGSPQSDDSSQHSDSGILLKENASNGGLSYNRSRPVDSGIYSQFISTMCSVAKDPYPRIATIGRRALSLIGVEQVVMKNSRFNSGGTHQGETSAPPSNFGMARSSSWFDMNSGNFSIAFRTPPVSPPQHDYLTGLRRVCSMEFKPHPMNSPEGLAGPLLSSVAAPSNAELSILPQSTIYNWSCGHFSRPLLTGSDDNEEANARREEREQIALGCIAKCQRSSACKMTSQIASWDTRFETGTKAALLLPFSPIVIAADENEQIRVWNYDDALPVNSFQNHKLSERGLSKLLLINELDESLLLAASSDGNVRIWKNFTQSGGQKLVTAFSSVQGHRAAGRSIVIDWQHQSGYLYASGDMSSILIWDLDKEQLLSTIQSSGDGAISALSASQVRSGHFAAGFADGSVRIFDVRSPDRLIYTARPHAPRTEKVVGIGFQPGFDPYKIVSASQAGDIQFLDVRRAAEPYLTIKAHRGSLTALAVHRHAPVVASGSAKQMIKVFSLEGEQLTIIRYQPSFMGQRIGSVNCLSFHPYKSLLAAGAGDNALVSIYAEENYK

SEQ ID NO: 98031 - protein, 1255 aa, Setaria italica
  misc_feature (232)..(232): Xaa can be any naturally occurring amino acid
  Transcript Sequence Number=SeqID_32057
  Gene Ontology: Mol. function=binding; Cellular component=cytosol; Biological process=positive regulation of protein amino acid phosphorylation
  Homolog annotation: Hit_ID=Q6RUS5; Match level="QueryCoverage=98%, HitCoverage=99%, E-value=0.0, Identity=83%"; Hit description =Transducin/WD-40 repeat protein (Fragment)
  Pfam annotation: Domain name=HEAT; Domain location=535-567; Score =9.2; E_value=3.7; Accession=PF02985.14; Description=HEAT repeat
  Pfam annotation: Domain name=HEAT; Domain location=585-620; Score =13.6; E_value=0.81; Accession=PF02985.14; Description=HEAT repeat
  Pfam annotation: Domain name=WD40; Domain location=1026-1066; Score =5.4; E_value=9.1; Accession=PF00400.24; Description=WD domain, G -beta repeat
  Pfam annotation: Domain name=WD40; Domain location=1070-1110; Score =11.8; E_value=1.6; Accession=PF00400.24; Description=WD domain, G -beta repeat
  Pfam annotation: Domain name=WD40; Domain location=1163-1201; Score =21.8; E_value=0.0028; Accession=PF00400.24; Description=WD domain, G- beta repeat
  Pfam annotation: Domain name=WD40; Domain location=972-1015; Score =7.5; E_value=5.1; Accession=PF00400.24; Description=WD domain, G -beta repeat
  Pfam module annotation: Pfam domain module=HEAT::HEAT::WD40::WD40::WD4 0::WD40; Domain location=535-567::585-620::1026-1066::1070-1110::1163- 1201::972-1015
MKTGCVALVLCLNISVDPPDVIKISPCARMECWIDPFSMAPPKALENIGKTLHSQYERWQPKARYKLQLDPTVEEVKKLCNTCRKYARSERVLFHYNGHGVPKPTANGEIWVFNKSYTQYIPLPITDLDSWLKTPSIYVFDCSAAGIIVKAFLERLDWSSSSSASSQKDCILLAACEAHQTLPQSAEFPADVFTACLTTPIKMALHWFCKRSLLRGSMDHSLIDQIPGRQNXDRKTLLGELNWIFTAITDTIAWNVLPHDLFQRLFRQDLLVASLFRNFLLAERIMRSANCSPISYPLLPPTHQHHMWDAWDMAAEICLSKLPQLIADPNAEFQPSPFFTEQLTAFEVWLDHGSEDKKPPEQLPIVLQVLLSQSHRFRALVLLGRFLDMGPWAVDLALSVGIFPYVLKLLQTSAMELRQILVFIWTKILSLDKSCQVDLVKDGGHAYFIRFLDSLDAYPEQRAMAAFVLAVIVDGHRRGQEACINAGLIDVCLRHLQPENPHDAQTEPLLLQWLCLCLGKLWEDFPEARLLGLQSNAPEIVAFLLAETQPEVRASAVFALGNLLDMGSTSLNGVDDDSDDDEKLKAEINVVRSLLQVSSDGSPLVRSEVAIALTRFALGHNKYLKSVAAEYWKPQTNSLLKSLPSLANISSPNNVYSSNNIRQGSSGLASHIGPVLRVGSDSSATGRDARISTSSPIATSSIMHGSPQSDDSSQHSDSGILLKENASNGGLSYNRSRPVDSGIYSQFISTMCSVAKDPYPRIATIGRRALSLIGVEQVVMKNSRFNSGGTHQGETSAPPSNFGMARSSSWFDMNSGNFSIAFRTPPVSPPQHDYLTGLRRVCSMEFKPHPMNSPEGLAGPLLSSVAAPSNAELSILPQSTIYNWSCGHFSRPLLTGSDDNEEANARREEREQIALGCIAKCQRSSCKMTSQIASWDTRFETGTKAALLLPFSPIVIAADENEQIRVWNYDDALPVNSFQNHKLSERGLSKLLLINELDESLLLAASSDGNVRIWKNFTQSGGQKLVTAFSSVQGHRAAGRSIVIDWQQQSGYLYASGDMSSILIWDLDKEQLLNTMQSSGDSAISALSASQVRSGHFAAGFTDGSVRIFDVRSPDRLIYMARPHAPRTEKVVGIGFQPGFDPYKIVSASQAGDIQFLDVRRAAEPYLTIEAHRGSLTALAVHRHAPVVASGSAKQMIKVFSLEGEQLTIIRYQPSFMGQRIGSVNCLSFHLYKSLLAAGAGDNALVSIYAEENYK

SEQ ID NO: 98032 - protein, 243 aa, Setaria italica
  Transcript Sequence Number=SeqID_32058
  Gene Ontology: Mol. function=hydrogen ion transmembrane transporter activity; Cellular component=proton-transporting ATP synthase complex, coupling factor F(o); Biological process=proton transport
  Homolog annotation: Hit_ID=B6TCR9; Match level="QueryCoverage=100%, HitCoverage=100%, E-value=1e-123, Identity=93%"; Hit description =Mitochondrial ATP synthase
MALAARMVSRSRQLYSAQTALVNGGATQVRSFAKDAAPADRPPINGDDLLKGIFFEVKKKFETALGVLKKEKITIDPDDPAAVSRYAQVMKTVREKADLLSDSQRIKYTIETFTKGIPDARTYLNTLQEIRVKSGLIDHLGIEPLMMEALEKIEKDIKKPLLRSDKKNMATLLAEFDKINKKLGIRKEDLPKIEEELEMEIAKSELTELKKECIEAMETQLKREEFKDEEMPDVKKLDIRNFL

SEQ ID NO: 98033 - protein, 105 aa, Setaria italica
  Transcript Sequence Number=SeqID_32059
  Gene Ontology: Mol. function=electron carrier activity; Biological process=oxidation reduction
  Homolog annotation: Hit_ID=B6U021; Match level="QueryCoverage=55%, HitCoverage=11%, E-value=3e-14, Identity=73%"; Hit description =Cytochrome P450 CYP76M15
MERQLWLLWAALAVPLLYCLTNLRRRLGTGRRPLPGPTPLPLIGNLLDLRRGNLHHTLARLARTHGPVMYLRLGLTDAVVVSSRDAASEAFMRHDRRLAGRAIPD

SEQ ID NO: 98034 - protein, 154 aa, Setaria italica
  Transcript Sequence Number=SeqID_32060
RRKRGQSNGTPCDPGSTRGRHTESNGEPAYEEQWLLPFCPAGTAPPWFSSGSTSTGTVPDPAPSTGSTVPASGAASSPSPCAEPVAPPAAPAVRFAQPVRVYQRRARPAPLDLQPAPPPPSPPQSSPVDSSPPATPTPPPPPPAPTETVAPTVY

SEQ ID NO: 98035 - protein, 401 aa, Setaria italica
  Transcript Sequence Number=SeqID_32061
  Gene Ontology: Mol. function=aspartic-type endopeptidase activity; Cellular component=chromatin; Biological process=DNA integration
  Homolog annotation: Hit_ID=Q688L2; Match level="QueryCoverage=92%, HitCoverage=21%, E-value=1e-122, Identity=58%"; Hit description =Putative polyprotein
  Pfam annotation: Domain name=rve; Domain location=147-307; Score =129.1; E_value=1.4e-35; Accession=PF00665.18; Description=Integrase core domain
  Subcellular localization annotation: CTP_CleavageSite=29; ConfidenceScore=5.09e-01
VGTAHTHGSFRIPDVLVAPSMVHNLLSIRRFTADNSCSVEFDSSGLTVKDVATRRPLLRCDSTGPLYSLRFPASTSSASPSASSAAFAATASSTTWHRRLGHPGRAVLTQLSRSSDIPCTRAPDEHLCQACQLGRHVRLPFPTSSSHATHVFDLVHCDLWTSPVLSISGYKYYLIVVDDFSHYSWTFPLRAKSDTFPTLLHFFAWVSTQFGLTIKAVQCDNGREFDNTTSRAFFLSHGVHLRMSCPYTSSQNGKAERMIRTTNDTMRSLLFQSSLPAPFWAESLHTSTYLLNRLPSVACPAPTPHHALFGTSPRYDHLRVFGCACYPNTAATAPHKLAPRSTQCVFLGYSPDHKGYRCFDLSSRRVLISRHVVFDESVFPYSTTTPPSSTSDPDFFFLPLS

SEQ ID NO: 98036 - protein, 98 aa, Setaria italica
  Transcript Sequence Number=SeqID_32062
  Gene Ontology: Mol. function=transcription factor activity; Cellular component=nucleus; Biological process=regulation of transcription, DNA-dependent
  Homolog annotation: Hit_ID=B4FT20; Match level="QueryCoverage=100%, HitCoverage=23%, E-value=1e-47, Identity=92%"; Hit description=AP2 domain transcription factor
DYMNLSCGKDIMLDGKFAGSFGLERKLDLTNYIRWWLPKKTRQSDTSKAEEIADEVRAIESSMQQTEPYKLPSLGLCSPSKPSSMGLSACGILSQSDA

SEQ ID NO: 98037 - protein, 119 aa, Setaria italica
  Transcript Sequence Number=SeqID_32063
WCQLVQIRRSRTWGGGPVTTATIVVHATGAQELVGRRVWNGTHFVDVGPYALLTPAISDGVVWDAPCRLLELCCGVVWDAPCRLLELCCGVVWDAPHRLLELCCGGLGCTGKNHGDDVV

SEQ ID NO: 98038 - protein, 155 aa, Setaria italica
  Transcript Sequence Number=SeqID_32064
  Gene Ontology: Mol. function=nucleic acid binding; Cellular component= nucleus; Biological process=regulation of transcription, DNA-dependent
  Homolog annotation: Hit_ID=B9SBN6; Match level="QueryCoverage=99%, HitCoverage=7%, E-value=6e-51, Identity=64%"; Hit description =Helicase, putative
EKQLPKKHEHVIYCRLSRRQRNLYEDFIASSETQTTLASGNYFGMISIIMQLRKVCNHPDLFEGRPIISSFDMAGINMHLSYSVCMLLDKNPFSHVDLSDMNLVFTQNEFGMSSWEADEVVAAFPPSITSWDSQLDISCSKKDHQRSNVTNILKI

SEQ ID NO: 98039 - protein, 62 aa, Setaria italica
  Transcript Sequence Number=SeqID_32065
ATINNSQFRLSILFSYAVQSKARMQSLASLRTDAYSSPRIEFLQDDDQIHTHTHTHTQVLIA

SEQ ID NO: 98040 - protein, 77 aa, Setaria italica
  Transcript Sequence Number=SeqID_32066
MPGVPSASGSGIWSRRRDEITFDRLQKFWNDLPPQARQELLKLDKQTLIEQARKNFYCSRCNGLFLESFSQIVIYGK

SEQ ID NO: 98041 - protein, 513 aa, Setaria italica
  misc_feature (439)..(439): Xaa can be any naturally occurring amino acid
  Transcript Sequence Number=SeqID_32067
VVLCLFEVIETCVIALLPKRKLITLGCELIFLFQFWNDLPPQARQELLKLDKQTLIEQARKNFYCSRCNGLLLESFSQIVIYGKSLQQEASDISQLRTTTESRITQGEQDGAQDPSVHPWGGLSTTKDGVLTLLDCFIKAKSLRVLQNVFDNARAREREREMLYPDACGAGGRGWISQGMVNYRGHGTREMCALHTAHLSCDTLVDFWSALGEETRSSLLRMKEEDFIEKLMYRFDSKRFCRECRRNVIREFKELKELKRMRREPHCTSWFCVTDTAFQCEVFEDAVIVDWRQCLSEPDGSYHHFEWAIGTDEGESDIFGFEDVGMNAQVHRNGINLDQFEDYFITLRAWRLDGHYTELCVKAHALKGQSCVHHRLVVGDGFVTMTKGESIRNFFEHAEEAEEEDEDDAMDRDGNDFDGDGSHPQKHAKSPELAREFLXDAAAVIFKEQVEKAFREGTAQQNAHSVFVSLALKLLEERLHIACKEIITLEKQNKLLEEEEKEKREEQERRMKR

SEQ ID NO: 98042 - protein, 88 aa, Setaria italica
  Transcript Sequence Number=SeqID_32068
LDRSHWLVFHSVFLYCYFEEKKNNHRDSCFEGEKCTYVPQNFTSFSSGMRYSHSVILHWLLVFLCDVCPRCKTVQCWYIFQCMITSFN

SEQ ID NO: 98043 - protein, 407 aa, Setaria italica
  Transcript Sequence Number=SeqID_32069
  Gene Ontology: Mol. function=serine-type peptidase activity; Cellular component=integral to membrane; Biological process=proteolysis
  Homolog annotation: Hit_ID=B6TF59; Match level="QueryCoverage=100%, HitCoverage=99%, E-value=1e-152, Identity=69%"; Hit description =Peptidase/ serine-type peptidase
  Pfam annotation: Domain name=Peptidase_S24; Domain location=249-326; Score=61.4; E_value=3.3e-15; Accession=PF00717.15; Description =Peptidase family S24
  Pfam annotation: Domain name=Peptidase_S26; Domain location=269-381; Score=0.1; E_value=5.3e-05; Accession=PF10502.1; Description=Signal peptidase I
  Pfam module annotation: Pfam domain module=Peptidase_S24::Peptidase _S26; Domain location=249-326::269-381
MAIRITVSYSGYVVQNLAASLGHRFCSASASATGGRLLHDGAWRPFCIFTSTRQPEQHRSGGGGNDRHDGGDHNHPKPQAIAAGAHSLLLTRACLSSKSPPPSLAVGLLSVLTQATGPTAGITGSAAPLSGSSSISLGFNPTSFLPFLQTAKWLPCSDLATSSSSAPSSPPRSLAPSPSSKKALIGGASSGAGASGPAGIATSSGASAAMSRSNWLSRWMNSCSDEAKTAFAAVTVPLLYGSSLAEPRSIPSKSMYPTFDIGDRILAEKVSYIFREPEILDIVIFRAPPALQAYGYSSGDVFIKRVVAKGGDYVEVRDGKLLVNGVVQDEEFVLEPHNYELGPLLVPEGYVFVLGDNRNNSFDSHIWGPLPARNIVGRSLLRYWPPSKITDTIHDYEPDAARHMVPS

SEQ ID NO: 98044 - protein, 67 aa, Setaria italica
  Transcript Sequence Number=SeqID_32070
LLRQPVDRNGSTVAGLLSLPLCAHVKPQFYKPEIGNQNGLSNGVIIQFQNGECTEASLLFFQQLNLF

SEQ ID NO: 98045 - protein, 151 aa, Setaria italica
  Transcript Sequence Number=SeqID_32071
  Homolog annotation: Hit_ID=B6SW35; Match level="QueryCoverage=96%, HitCoverage=25%, E-value=5e-77, Identity=93%"; Hit description =Ternary complex factor MIP1
  Pfam annotation: Domain name=DUF547; Domain location=2-123; Score =147.1; E_value=5.4e-41; Accession=PF04784.6; Description=Protein of unknown function, DUF547
MEFNLNICCFQAHIEYGIPQSNSKRILLTKVSYIISGQRVNAELIEYQILCCRAHSSGQWLRLLLYPKWKSRDKDELQGFAVDRPEPLVHFALSSGSYSDPVVRLYNPKSLFQQLEAAKEEYIRANVGVRGRGQHKVILPKALELYARDAG

SEQ ID NO: 98046 - protein, 82 aa, Setaria italica
  misc_feature (8)..(8): Xaa can be any naturally occurring amino acid
  Transcript Sequence Number=SeqID_32072
  Gene Ontology: Mol. function=chitinase activity; Cellular component =vacuole; Biological process=cell wall catabolic process
  Homolog annotation: Hit_ID=Q9ZSE8; Match level="QueryCoverage=100%, HitCoverage=32%, E-value=2e-38, Identity=89%"; Hit description =Chitinase
  Pfam annotation: Domain name=Glyco_hydro_19; Domain location=1-79; Score=-33.3; E_value=1.6e-06; Accession=PF00182.11; Description =Chitinase class I
WMTPRRPXPSCHEVMVGEYRPSAADLAANRTPGFGLVTNIVNGGLECNRTDDARVNNRIGFYQRYCQIFNVDAGLNLDCAHQ

SEQ ID NO: 98047 - protein, 236 aa, Setaria italica
  misc_feature (75)..(75): Xaa can be any naturally occurring amino acid
  misc_feature (130)..(130): Xaa can be any naturally occurring amino acid
  misc_feature (213)..(213): Xaa can be any naturally occurring amino acid
  Transcript Sequence Number=SeqID_32073
  Gene Ontology: Mol. function=zinc ion binding; Biological process =carbohydrate metabolic process
  Homolog annotation: Hit_ID=A2Q1A1; Match level="QueryCoverage=99%, HitCoverage=29%, E-value=1e-64, Identity=47%"; Hit description=FAR1; Zinc finger, SWIM-type
  Pfam annotation: Domain name=MULE; Domain location=71-168; Score =75.9; E_value=1.5e-19; Accession=PF10551.1; Description=MULE transposase domain
CTNVDLQNQRCGIQKAIKESDCQVFINIMKKKQSFNSEFFFDYQLDEKGMVKHIFWADGSCRKNYTLFGDVILFXSTCDTNQHGPIITLFTGVNHHNTCVTFGAGYLADNRIQSCTWLCQAFLKAMGGVXAPKVVITNEDPSMECAIRDVFQTTKHRLCTWKILMKLSDKVGPMLNSNTQFSNRIRACVLGSETPEEFELKWSSIISEFGLEXNAWLTEKYNMRQTWIPAYFHDLS

SEQ ID NO: 98048 - protein, 62 aa, Setaria italica
  Transcript Sequence Number=SeqID_32074
LQNVESGEGGPGAGVDTSNSVKFTCQVRVARTGGKMMTYVCVYITHSACEYVTRWRSAFRGS

SEQ ID NO: 98049 - protein, 137 aa, Setaria italica
  Transcript Sequence Number=SeqID_32075
  Gene Ontology: Mol. function=thiamin diphosphokinase activity; Biological process=thiamin diphosphate biosynthetic process
  Homolog annotation: Hit_ID=B6SN96; Match level="QueryCoverage=94%, HitCoverage=48%, E-value=7e-58, Identity=82%"; Hit description =Thiamin pyrophosphokinase 1
  Pfam annotation: Domain name=TPK_catalytic; Domain location=1-100; Score=76.3; E_value=1.1e-19; Accession=PF04263.8; Description =Thiamin pyrophosphokinase, catalytic domain
VEVRERYKPDVIKGDMDSVRPEVKEYYSNLGTKIVDESHDQDTTDLHKCIAFIAKNSPVAGKSNICILVLGALGGRFDHEMGNINVLHLFPNINIVLLSDDCLIFLLPRTHSHERGIEGTIEGPHCGLIPNWHAIDK

SEQ ID NO: 98050 - protein, 111 aa, Setaria italica
  Transcript Sequence Number=SeqID_32076
  Gene Ontology: Cellular component=membrane
  Homolog annotation: Hit_ID=B6TRP3; Match level="QueryCoverage=99%, HitCoverage=26%, E-value=1e-37, Identity=69%"; Hit description =Nodulin-like protein
MSNILPAMTFVMAVIFRMEKLDIKKVRCQAKVAGTLVTVAGAMLMTLYKGPLMELAWTRHASHAHAGGAEAPAAAAISGRDWFLGSVFVIIATLAWAALFILQTHTIRQYP

SEQ ID NO: 98051 - protein, 76 aa, Setaria italica
  Transcript Sequence Number=SeqID_32077
  Gene Ontology: Mol. function=transferase activity, transferring groups other than amino-acyl groups
  Homolog annotation: Hit_ID=B9RGN0; Match level="QueryCoverage=97%, HitCoverage=16%, E-value=5e-17, Identity=56%"; Hit description =Anthranilate N-benzoyltransferase protein, putative
MAVVEILESCMVTPSDAATPKHGVWLSNLDLLVARSHTPTIYVYRPSPGPAFFSPDVLKAALSQALVTFYPLAGRL

SEQ ID NO: 98052 - protein, 91 aa, Setaria italica
  Transcript Sequence Number=SeqID_32078
  Subcellular localization annotation: CTP_CleavageSite=38; ConfidenceScore=5.14e-01
ASSAPATAADGRSPPSHPQAAILLHPELFNPAAGVFALAGRKKRPRRYHRRCPRPLTVPPRDRIHHGGGPRLLAPSRLIDPALGSSHLSLG

SEQ ID NO: 98053 - protein, 51 aa, Setaria italica
  Transcript Sequence Number=SeqID_32079
QKQHVVMFQKSKKIMYLAHIKLNKPAEIKCQIHSTCQGKIQLVFFESCYQR

SEQ ID NO: 98054 - protein, 82 aa, Setaria italica
  Transcript Sequence Number=SeqID_32080
IPRGLPHIPRKHTSSYSFPHHLSQNLPFGQIINNLYLQLYMLHPILIKRKRKKKGGENRRIAKLTATPWIALELYQKGSKKN

SEQ ID NO: 98055 - protein, 187 aa, Setaria italica
  misc_feature (140)..(140): Xaa can be any naturally occurring amino acid
  misc_feature (163)..(163): Xaa can be any naturally occurring amino acid
  misc_feature (181)..(181): Xaa can be any naturally occurring amino acid
  Transcript Sequence Number=SeqID_32081
  Homolog annotation: Hit_ID=Q01K95; Match level="QueryCoverage=100%, HitCoverage=7%, E-value=6e-74, Identity=74%"; Hit description =OSIGBa0148A10.3 protein
LLSLLLEYSGQSGGCWDLERVPESMYKYLQPLFYIMLDSQIKNIRDQAYILVKAAMASSGAFDQNFTEIDAWLVFLPGYEAKWCIRENQLVGAPNKLSYIVIPFLCDAISVVGNNLYKYQEHTRKLISKSGQFEGTPAFXPLIICVLQKCLRLLDLESGSMKXHVKSTFSLYVCNTIPTLXQSQADV

SEQ ID NO: 98056 - protein, 187 aa, Setaria italica
  misc_feature (10)..(10): Xaa can be any naturally occurring amino acid
  misc_feature (105)..(105): Xaa can be any naturally occurring amino acid
  Transcript Sequence Number=SeqID_32082
  Homolog annotation: Hit_ID=Q01K95; Match level="QueryCoverage=97%, HitCoverage=11%, E-value=4e-29, Identity=58%"; Hit description =OSIGBa0148A10.3 protein
RSTKQDHTTXLCEIVGLRIKMPKMKDAKVVEDVFHSKLLDVLRFYLGVMPSSFDGSYDFFRIIPPNPLDLSKDEQQSLLSLLLEYSGQSGGCWDLERVPESMYRXPAFSPLIICVLQKCLRLLESGSMKLHEKSTISLYVCNTIHLIMQSQADVHLLSDLIGAVLNERFDKFSSEEMNSSIYLAEWR

SEQ ID NO: 98057 - protein, 90 aa, Setaria italica
  Transcript Sequence Number=SeqID_32083
PELLIYFKLIRSVNWQASHSLGVCFFLKHNIMLVERPTSYGIPFCYIKAVHDHVQGNNRNKGKYHITCSKYLKKVFWEQKPFLHPPMLEA

SEQ ID NO: 98058 - protein, 125 aa, Setaria italica
  Transcript Sequence Number=SeqID_32084
  Gene Ontology: Mol. function=ATPase activity, coupled to transmembrane movement of substances; Cellular component=integral to membrane
  Homolog annotation: Hit_ID=B9HC81; Match level="QueryCoverage=94%, HitCoverage=20%, E-value=4e-27, Identity=50%"; Hit description=ABC transporter family, retinal flippase subfamily (Fragment)
VVPSMLTVKANNGELKEILRFQKLARDNLKNNLDKKKMKTLIPQAVRATYIGGLLVLCAGSMVVSGTSFDAEGFLSFLTALALVVEPIQDLGKAYNEYKQGEPALERIFDLMRFNPEVLTNQYAC

SEQ ID NO: 98059 - protein, 62 aa, Setaria italica
  Transcript Sequence Number=SeqID_32085
RKEAALRAAGRLRERAFARLLERDLAFFEGRGGVAAGDLAHRIADEADDVADAVFSVLNIQL

SEQ ID NO: 98060 - protein, 189 aa, Setaria italica
  misc_feature (26)..(26): Xaa can be any naturally occurring amino acid
  misc_feature (150)..(150): Xaa can be any naturally occurring amino acid
  Transcript Sequence Number=SeqID_32086
  Gene Ontology: Mol. function=ATPase activity, coupled to transmembrane movement of substances; Cellular component=integral to membrane
  Homolog annotation: Hit_ID=B9SWF7; Match level="QueryCoverage=90%, HitCoverage=25%, E-value=1e-36, Identity=47%"; Hit description=Abc transporter, putative
LTNEQTGIRPNEADDVADAVFSVLNXTIVPTSLQLITMGTQMVTIDPMLSLLAATVIPCMCAVIASLGKQLHQMSKEVEAHLSLAMLTAYLNDVVPSMLTVKANNGELKEILRFQKLARDNLKNNLDKKKMKTLIPQAVRATYIGGLLVXCAGSMVVSGTSFDAEGFLSFLTALALVVEPIQSLEFSSS

SEQ ID NO: 98061 - protein, 104 aa, Setaria italica
  misc_feature (77)..(77): Xaa can be any naturally occurring amino acid
  Transcript Sequence Number=SeqID_32087
  Gene Ontology: Cellular component=nuclear pore; Biological process =poly(A)+ mRNA export from nucleus
  Subcellular localization annotation: CTP_CleavageSite=49; ConfidenceScore=5.25e-01
MCCVSFHHVRALGSLMTLFSLVDRTALTIFGTPLFIFLKTSSSSMMFVLQEEVRSKLAALEVGHQNEIQRTVSAFAXLQKYAESRKEIDRRLDVRFQRRMYVPL

SEQ ID NO: 98062 - protein, 541 aa, Setaria italica
  misc_feature (21)..(21): Xaa can be any naturally occurring amino acid
  Transcript Sequence Number=SeqID_32088
  Gene Ontology: Cellular component=nuclear pore; Biological process =poly(A)+ mRNA export from nucleus
  Homolog annotation: Hit_ID=B9RMT7; Match level="QueryCoverage=89%, HitCoverage=79%, E-value=3e-45, Identity=40%"; Hit description =Nucleoporin GLE1, putative
  Pfam annotation: Domain name=GLE1; Domain location=239-492; Score =375.2; E_value=1.1e-109; Accession=PF07817.5; Description=GLE1-like protein
  Pfam annotation: Domain name=TolA; Domain location=5-346; Score= -152.0; E_value=0.075; Accession=PF06519.3; Description=TolA protein
  Pfam module annotation: Pfam domain module=GLE1::TolA; Domain location=239-492::5-346
FVMRIDDEDDTEDEDGISVGXSQALVVNGARFFCNDLESSDSEDELDGQIEPYHLMEKRNLEKSILLELEREHHLKVQEDVRSKLAALEVGHQNEIQRTISAFARLQKYAESRKEIDRRLDVHFQRRIAEVLDKHLSMVQRDHEQKSQIVERRIRDDAALEEAKRKEQAIKEEKLRQERARQEAEARQKEAAKLAAEARKTAFEAAQKEAAEKEAAEKEAAKSREAAASQSGQNSQNNIAGIKVFADKYALEAESRRRALVHDQVPENIHLSKEFGKYDRQIAKSISKLMPTTDSVRARASELIKALDGQDCPRPIACFIFANKIISIVKSRNTKDKTFGNLAFACGYVMLLVTNQVPDAMDYLLAEFNRVCIYTVPKHLHALNAQARSRDYYRLIGYQEENGQLESTESYLTYVVAYVKLYAAMIQTEIKGVRHPHGLAEGWRWLAMFLNALPATTATAYALHAFLKMAGFALHKKYGSQFLKILDVISRCFLPALKDQGNKMQSEAVNNLKNYLNDKIYLQEPEGQYLVQQLLSKELFM

SEQ ID NO: 98063 - protein, 88 aa, Setaria italica
  Transcript Sequence Number=SeqID_32089
  Gene Ontology: Cellular component=chloroplast
MLLRRMRWMSEGDGRWELDAETPVTMEGTARPVPGDPLPLGLSRGPRVTRPKQLDFFHRFMASPLVPTFSAAGDGLFVHHAHLLHLTD

SEQ ID NO: 98064 - protein, 105 aa, Setaria italica
  Transcript Sequence Number=SeqID_32090
EEEELTKIWVSLCIIYVCRFRPMHPHGFQHRLVANGDLEVDHMGVIIHEKKERQHVKYTVRVGCIKQHIVDLQLIIVWPRTEQSPRPQSCQQNLYLPIAAASLLN

SEQ ID NO: 98065 - protein, 165 aa, Setaria italica
  misc_feature (132)..(132): Xaa can be any naturally occurring amino acid
  Transcript Sequence Number=SeqID_32091
  Gene Ontology: Mol. function=heat shock protein binding
  Homolog annotation: Hit_ID=B9RLW4; Match level="QueryCoverage=92%, HitCoverage=21%, E-value=2e-33, Identity=48%"; Hit description=Heat shock protein binding protein, putative
FCTCIVLSFNVLTHESFNAAIAEEYPLIIMVYSKGSPRCAQFIEYWKQIGIRLDGIAKIAMVEVGDSQLAGHFTEKGFSKQPFFRNGVPAIVAYPANCRSPSCYMRYPGGLFVDSVVDWVATSVIGLPRILXYLFLKETLGPQFIGKSGNHKVKAIFFSSNWKKT

SEQ ID NO: 98066 - protein, 683 aa, Setaria italica
  Transcript Sequence Number=SeqID_32092
  Gene Ontology: Mol. function=heat shock protein binding
  Homolog annotation: Hit_ID=B9RLW4; Match level="QueryCoverage=99%, HitCoverage=99%, E-value=1e-179, Identity=47%"; Hit description=Heat shock protein binding protein, putative
  Pfam annotation: Domain name=DnaJ; Domain location=37-96; Score=16.3; E_value=0.00011; Accession=PF00226.23; Description=DnaJ domain
MAMEIPAEVRRYWLPILLFTAGFLFQLIVLPGHFPPSHYDALGIERFAPVERVVEAYERLSKEWLSETNHQPTVDIIKIRYAYELLTNPILKRDYDLFGLDEHMDVLERVKEQYQKEHFLKIDLPLLKDSVVSLTDDAFNVLTHESFNAAIAEEYPLIIMVYSKGSPRCAQFIEYWKQIGIRLDGIAKIAMVEVGDSQLAGHFTEKGFSKQPFFRNGVPAIVAYPANCRSPSCYMRYPGGLFVDSVVDWVATSVIGLPRILYYSKETLGPQFIGKSGNHKVKAIFFSSTGERAAPFLRQAAQEYSSYVSFAFVLWREDESQIWWNSLGVESAPALVFLKGPGTKPVVHHGTFSKSEFTEMMEEHKHHELRQLRSDTSLELGCDARGHSRAGNDATIWYCVIVAGRPGVELSKKRQILRMAQDQLIGAVDGSTSGNVDDSVEISSAATALKDERLTFVWLDGEVQKQICAFYLATDYSGACGPRGFGDDNEKPEVFIVRFQRNATYEALKAEKRNNLMEALQGQHTYASQLVARHKGPDEIQEINRWISQIIKDGDTREIPYFTSKVPDLVPEETSKEWLRSTKSIRSAGKSLKENFGFHFQDYLTDPRIGSTLLMCGCVSLGIIWLRNNKPAQSTRQEKAPKDRTKRPRPKLSTSLFGQPSESIADVEPKDARQWEMSDSDSD

SEQ ID NO: 98067 - protein, 65 aa, Setaria italica
  Transcript Sequence Number=SeqID_32093
NVGIWKHVHYYVIQTFLSWYAGYSNQIIRGKTSEKLWVQKSCWVQLPLCLMYNYGVAEMFLMFDI

SEQ ID NO: 98068 - protein, 200 aa, Setaria italica
  Transcript Sequence Number=SeqID_32094
  Gene Ontology: Mol. function=RNA polymerase II transcription factor activity; Cellular component=transcription factor TFIID complex; Biological process=transcription initiation from RNA polymerase II promoter
  Homolog annotation: Hit_ID=A9RJY7; Match level="QueryCoverage=100%, HitCoverage=93%, E-value=1e-105, Identity=92%"; Hit description=TATA- box binding protein, component of TFIID and TFIIIB
  Pfam annotation: Domain name=TBP; Domain location=110-196; Score =152.8; E_value=1.1e-42; Accession=PF00352.13; Description =Transcription factor TFIID (or TATA-binding protein, TBP)
  Pfam annotation: Domain name=TBP; Domain location=20-105; Score =137.9; E_value=3.3e-38; Accession=PF00352.13; Description =Transcription factor TFIID (or TATA-binding protein, TBP)
  Pfam module annotation: Pfam domain module=TBP::TBP; Domain location =110-196::20-105
MAEPGLEGSQPVDLSKHPSGIVPTLQNIVSTVNLDCKLDLKAIALQARNAEYNPKRFAAVIMRIREPKTTALIFASGKMVCTGAKSEQQSKLAARKYARIIQKLGFPAKFKDFKIQNIVGSCDVKFPIRLEGLAYSHGAFSSYEPELFPGLIYRMKQPKIVLLIFVSGKIVLTGAKVREETYTAFENIYPVLTEFRKVQQ

SEQ ID NO: 98069 - protein, 108 aa, Setaria italica
  Transcript Sequence Number=SeqID_32095
  Gene Ontology: Mol. function=protein serine/threonine kinase activity; Biological process=protein amino acid phosphorylation
  Pfam annotation: Domain name=LRRNT_2; Domain location=5-44; Score =41.7; E_value=2.9e-09; Accession=PF08263.4; Description=Leucine rich repeat N-terminal domain
  Subcellular localization annotation: CTP_CleavageSite=67; ConfidenceScore=5.50e-01
PAAALSPDGKALLSLLPGAAPSPVLPSWDPKAATPCSWQGVTCSPQSRVVSLSLPNTFLNLSSLPPPLAALSSLQLLNLSTCNISGTIPPSYASLSALRVLDLSSNAL

SEQ ID NO: 98070 - protein, 63 aa, Setaria italica
  Transcript Sequence Number=SeqID_32096
  Subcellular localization annotation: CTP_CleavageSite=43; ConfidenceScore=5.51e-01
MQQPPPPAPAAASTSSAPAPQSLVSRARTAIHSAAARVLTDIKADLRDADGSGGRSRAPSPRT

SEQ ID NO: 98071 - protein, 159 aa, Setaria italica
  Transcript Sequence Number=SeqID_32097
  Homolog annotation: Hit_ID=Q67UW7; Match level="QueryCoverage=99%, HitCoverage=17%, E-value=9e-41, Identity=46%"; Hit description =Putative pentatricopeptide (PPR) repeat-containing protein
MPVRPDGIIWKTLLSACKIQKNFDMAERIAERVIELDPHDSASYVLLSNIRATSSRWEDVSTVRETMRKQNVRKEPGVSWVEFKGQIHQFCTGDKSHSRQLEIDECLEEMMAKIRQCGYAPDMSMVLHDMEDEEKEVSLAHHSEKLAIAFAFLSLPEGT

SEQ ID NO: 98072 - protein, 102 aa, Setaria italica
  Transcript Sequence Number=SeqID_32098
IVLSEFSSYRKQLKRRYEDYLSLFGSCRHHFEEFYIEGKDGSIAQEALTRNDFSSSRHGNFSEYSTTESDEFEKNDGGELICEEESTFFDSVDYFIESDNRS

SEQ ID NO: 98073 - protein, 143 aa, Setaria italica
  misc_feature (19)..(19): Xaa can be any naturally occurring amino acid
  Transcript Sequence Number=SeqID_32099
  Gene Ontology: Biological process=steroid metabolic process
  Homolog annotation: Hit_ID=C3SAC1; Match level="QueryCoverage=93%, HitCoverage=17%, E-value=8e-33, Identity=55%"; Hit description =Oxysterol-binding protein
NLSLIGSRIGGSRRTEKPXGVVSLKVSAFRESKSDDRRFYIFSPTKTLHLKTDSKDDRVAWIEALILARSVYSLRSLSGRVTFVQCDVSISTARLRDRMHQEDLNENLIQECEQIVLSEFSSYRKQLKRRYEDYLSLCFGSVV

SEQ ID NO: 98074 - protein, 278 aa, Setaria italica
  misc_feature (142)..(142): Xaa can be any naturally occurring amino acid
  misc_feature (183)..(183): Xaa can be any naturally occurring amino acid
  misc_feature (260)..(260): Xaa can be any naturally occurring amino acid
  Transcript Sequence Number=SeqID_32100
  Gene Ontology: Mol. function=zinc ion binding
  Homolog annotation: Hit_ID=Q9LPT2; Match level="QueryCoverage=50%, HitCoverage=21%, E-value=1e-20, Identity=38%"; Hit description =F11F12.6 protein
  Pfam annotation: Domain name=C1_3; Domain location=169-199; Score =16.2; E_value=0.0074; Accession=PF07649.4; Description=C1-like domain
  Pfam annotation: Domain name=PHD; Domain location=170-220; Score =27.9; E_value=2.3e-05; Accession=PF00628.21; Description=PHD-finger
  Pfam module annotation: Pfam domain module=C1_3::PHD; Domain location= 169-199::170-220
  Subcellular localization annotation: CTP_CleavageSite=72; ConfidenceScore=5.24e-01
TGVPRNLSTPMTSPVISKQPMLNATVAGASSIKSPDIPSAVSLPPIGSADVEMEIVVNGSNFTQNGGAETIEQSNKSGHHTANSSNRSSLQSSSQAEKSVDEKEPAICPGTGSVVMGYQAPKEELSVQKQTIFSNHKAIAKXTLARILRQPANHPSWSVPSTEYMNKRLDCQICKVPIINTEXLLVCDACERGAHVKCLQYYGNQGLQKPEWYCPTCVLHSKGKPLPPKYGKVSRTIVVPNTCMTNGAQPSQVAAENPTXKDGRSDKNVAANGSVINQ

SEQ ID NO: 98075 - protein, 117 aa, Setaria italica
  Transcript Sequence Number=SeqID_32101
IFCSNQSTATHVVARRILAWQVKAGKQTAYYFHILVFLNAFSVKLLLVIPVQKLLLTFRTCSNIGQAIMSDIRQPFCCSYQNYLTKETSDLLLSLLKPVLVLSGHDHDQCTVVHSTP

SEQ ID NO: 98076 - protein, 526 aa, Setaria italica
  Transcript Sequence Number=SeqID_32102
  Gene Ontology: Mol. function=hydrolase activity; Cellular component =endoplasmic reticulum membrane; Biological process=cell division
  Homolog annotation: Hit_ID=B9SHW7; Match level="QueryCoverage=96%, HitCoverage=96%, E-value=1e-126, Identity=46%"; Hit description=Cell division control protein, putative
  Pfam annotation: Domain name=Metallophos; Domain location=50-292; Score=70.1; E_value=8.1e-18; Accession=PF00149.20; Description =Calcineurin-like phosphoesterase
MQSATRLTLLLCAAWAATVLYGEMGAYWASYLACSWPSPSPSSSPPNNHVKVAVVADPQLMDSTSLGLPSSSIALQAAEFYTDLNMRRSFQSAILPFKPDVVLFLGDHFDGGPYMSDEEWQESLFRFKHIFSLNEQRSKPHVPIYYLSGNHDIGYSAFFSVHPEVLSRYEKEFGSRNYQFSAGKVDFVVIDAQTLDGSKKSKERSSSWEFIKTLSPGNASNPKVLLTHIPLYRPDNTPCGPHRSSPVINQRESYAALDQGITYQNYLTKETSDLLLSLLKPVLVLSGHDHDQCTVVHSTPFGPVTEHTLGTISWQQGNLYPSFMLLSAGPKMSQNSTDLKPEVMTNLCFLPKQTHIYIWYICQFAVTILLLVFWPTNGLSSVPCMNTFVSFMRSVGAELFSRTKEKDDEEDGEYEMVFDAEGSMHLVKKAVAKAPSASSDSRTVGRGSVVARAAAGKHQLEPDSSILVEMGSEMTSEDGAKLARPSKSKVRKVLQRLFRVIQSIVVIAALNVPLYMMLLFKDWIDH

SEQ ID NO: 98077 - protein, 401 aa, Setaria italica
  misc_feature (327)..(327): Xaa can be any naturally occurring amino acid
  Transcript Sequence Number=SeqID_32103
  Gene Ontology: Cellular component=chloroplast
  Homolog annotation: Hit_ID=Q338A4; Match level="QueryCoverage=97%, HitCoverage=93%, E-value=0.0, Identity=35%"; Hit description =Pentatricopeptide, putative, expressed
  Pfam annotation: Domain name=PPR; Domain location=125-159; Score=6.6; E_value=1.5; Accession=PF01535.12; Description=PPR repeat
  Pfam annotation: Domain name=PPR; Domain location=160-194; Score =41.7; E_value=3e-09; Accession=PF01535.12; Description=PPR repeat
  Pfam annotation: Domain name=PPR; Domain location=195-229; Score =23.7; E_value=0.00078; Accession=PF01535.12; Description=PPR repeat
  Pfam annotation: Domain name=PPR; Domain location=20-53; Score=21.3; E_value=0.004; Accession=PF01535.12; Description=PPR repeat
  Pfam annotation: Domain name=PPR; Domain location=230-264; Score =38.1; E_value=3.6e-08; Accession=PF01535.12; Description=PPR repeat
  Pfam annotation: Domain name=PPR; Domain location=265-299; Score =47.7; E_value=4.5e-11; Accession=PF01535.12; Description=PPR repeat
  Pfam annotation: Domain name=PPR; Domain location=300-334; Score =28.1; E_value=3.7e-05; Accession=PF01535.12; Description=PPR repeat
  Pfam annotation: Domain name=PPR; Domain location=335-369; Score =35.1; E_value=2.8e-07; Accession=PF01535.12; Description=PPR repeat
  Pfam annotation: Domain name=PPR; Domain location=90-124; Score=1.0; E_value=6.8; Accession=PF01535.12; Description=PPR repeat
  Pfam module annotation: Pfam domain module=PPR::PPR::PPR::PPR::PPR::PP R::PPR::PPR::PPR; Domain location=125-159::160-194::195-229::20 -53::230-264::265-299::300-334::335-369::90-124
TYAIDMLYSMTAKGCTPDLSSYNTVMYGLVNEDRFEEAFGMFCQMKKVLAPDYATLCTLLPSFVKNGLMKEALHTFKEYIFKADSNMDKSSFHSLMEGILKKAGVEKSIEFAENIASRGILLNDFFLCPLIRHLCKNKKALEAHELSQKFKSLGVSLKTSSYNSLIRGLVDENLIDVAEGLFAEMKRLGCGPDEFTYNLILDAMGKSARIEEMLKVQEEMHRKGFESTYVTYNTIISGLVKSKRLDQAIDLYYNLVSEGFSPTPCTYGPLLDGLLKAGKIEEAENLFNEMLEYGCKPNCTIYNILLNGHRIAGNTENVCQLFDKMEXLKLNPDIKSYTVLIDALCTAGRLNDGLSYFRQLVELGLEPDLITYNLLIDGLGKSGRIEEAISLFNCSIVSTKR

SEQ ID NO: 98078 - protein, 136 aa, Setaria italica
  misc_feature (136)..(136): Xaa can be any naturally occurring amino acid
  Transcript Sequence Number=SeqID_32104
  Homolog annotation: Hit_ID=Q94LQ9; Match level="QueryCoverage=98%, HitCoverage=5%, E-value=5e-59, Identity=76%"; Hit description =Putative transcription regulatory protein
TNWVRVMEYLDHDGFNIPDEAAFYLLMSIYARACKDPFPLHAVCGSLWKNAAGQISFLKHAVSAPTDTFTFAHSSRQLAFPDLAGPSQGNHAWFCLDLLEVLCQLAEVGYTVSVRSMLEYPLEHCPDLLLVGVSNX

SEQ ID NO: 98079 - protein, 474 aa, Setaria italica
  misc_feature (359)..(359): Xaa can be any naturally occurring amino acid
  Transcript Sequence Number=SeqID_32105
  Gene Ontology: Mol. function=P-P-bond-hydrolysis-driven protein transmembrane transporter activity; Cellular component=mitochondrial inner membrane presequence translocase complex; Biological process =intracellular protein transport
  Homolog annotation: Hit_ID=B9SF39; Match level="QueryCoverage=100%, HitCoverage=100%, E-value=1e-126, Identity=48%"; Hit description =Mitochondrial import inner membrane translocase subunit tim44, putative
  Pfam annotation: Domain name=Tim44; Domain location=314-467; Score =177.7; E_value=3.3e-50; Accession=PF04280.7; Description =Mitochondrial import inner membrane, translocase subunit TIM44
MATSALLRALRRPSSEAALRLATSANVQAITGYRHLNNRNLSVFNEFSKQLKGEAKSNPEFQKSMKEFGEKIGVVKEDLKVRTKKTTETIYKSVDDVWSEAEETSKKVTANIKEKVFAAKEEVKENFGLGKEESTSCKDGSPGASKQEKTESSSHSDGTSEDATSSYTLFTKLKSTISSASPVVSGAFAKLKDTRASTLAKQGYEIIKEELSSTSSRKKKHQARHASAKVEKSTRTDLVITPTKKSVLGEKWEAFKDKIRGHPVYKRVDEYTKPVVTKGQEVAEDVRERWETSDNPVVQKIQDLNESLLEETTAAVTFREIRQRDPSFSLTDFVADVQETIKPVLTAYSKGDVETLKKXCTKEVIERCKGERQAYASQGIFFDHKILHISEADVLETKMFGSSPMIILRFQTQQIYCVRDREGEVTEGGQDTIQTVFYSWAMQLLDSDEVPEEESYYPVWRLREMQQAGVKALI

SEQ ID NO: 98080 - protein, 91 aa, Setaria italica
  Transcript Sequence Number=SeqID_32106
  Gene Ontology: Mol. function=pyridoxal phosphate binding; Cellular component=plasma membrane
  Homolog annotation: Hit_ID=B9S8P3; Match level="QueryCoverage=100%, HitCoverage=9%, E-value=3e-30, Identity=69%"; Hit description =Molybdopterin cofactor sulfurase, putative
LATFLAMYPKYASAADVDRLRADEYPHLDKVCLDYCGFGLFSYLQSCNPADPSAAFTLSEITANLSNHALYGSAEKGTAEHDIKNRIMDYL

SEQ ID NO: 98081 - protein, 400 aa, Setaria italica
  Transcript Sequence Number=SeqID_32107
  Homolog annotation: Hit_ID=B5TV63; Match level="QueryCoverage=93%, HitCoverage=90%, E-value=1e-102, Identity=48%"; Hit description =Senescence-related protein
  Pfam annotation: Domain name=Senescence; Domain location=52-384; Score=727.9; E_value=7.8e-216; Accession=PF06911.4; Description =Senescence-associated protein
MLLLLRETQPPLAAPSAPPLYPTLTMADLAPVEIGPVSSPTAGEDTGPPPSEDVLLRIPGAQLHLIDRSRSHPLAAGDLSLLRIRSGDTNLAAIALLDPVQWPLARDVAAVKLDPCHYSFSLTVPVSADDPNPDPLHYGLTLSHPDARLDGLLATYTSFSVHSVVGTKELESRVRDEVEAAAYWTAVAPNVEEYGGKVARAIATGAEHLAKGILWCGEVTVDRLRWGNEVLRKRMQPGDANAEVSPEMLRRIKRAKKVTQMSEKVATGILSGVVKVTGYFTSSFANSKAGKKFFNLLPGEIVLASLDGFGKICDAVEVSGKNVLSTSSTVTTGLVSHKYGDKAAAATNEGLDAAGHAIGTAWAVFKIRQALNPKSVLKPTALAKSTIKANVAEVRAKRSK

SEQ ID NO: 98082 - protein, 71 aa, Setaria italica
  Transcript Sequence Number=SeqID_32108
MGGGMEVHKNRWIEEWNAGRENLEFNFRWTRRSLAVVGLFGLAVPILVYKGIVREFHMQDEDAGRPLRKFL

SEQ ID NO: 98083 - protein, 71 aa, Setaria italica
  Transcript Sequence Number=SeqID_32109
MGGGMEVHKNRWIEEWNAGRENLEFNFRWTRRSLAVVGLFGLAVPILVYKGIVREFHMQDEDAGRPYRKFL

SEQ ID NO: 98084 - protein, 87 aa, Setaria italica
  Transcript Sequence Number=SeqID_32110
  Subcellular localization annotation: CTP_CleavageSite=68; ConfidenceScore=5.57e-01
SPHIGQAPPVSAITLPTTSPNPPPPRAHPPTQKSKQKPPGQFLDRIARPPPWPPPPSPRSPPPPPPPPASASSSRAPPPPSPSPPAA

SEQ ID NO: 98085 - protein, 80 aa, Setaria italica
  Transcript Sequence Number=SeqID_32111
  Subcellular localization annotation: CTP_CleavageSite=41; ConfidenceScore=5.13e-01
GAPPSASSVSAAASQVGRVLVSLSELLRHPQAQDPLRRLARSRLAERLLDDFLRLADAHGSFRQALVALASLQAETRAAL

SEQ ID NO: 98086 - protein, 132 aa, Setaria italica
  Transcript Sequence Number=SeqID_32112
  Homolog annotation: Hit_ID=Q9SHK5; Match level="QueryCoverage=46%, HitCoverage=23%, E-value=4e-11, Identity=45%"; Hit description =F12K11.5
ELPEQGSEDGKHGVSSLAYWLKPSSADDESHGDTNTEDNVEKEPCYEKSVFDVPIFPASAFNWDIDNPTPVLPKAWDGNGIPNTTTKYKEDQKVSWHATPFEERLMKVLSDEKPLHERKISGKLIHLEENAE

SEQ ID NO: 98087 - protein, 436 aa, Setaria italica
  Transcript Sequence Number=SeqID_32113
  Gene Ontology: Mol. function=transition metal ion binding; Cellular component=ER-Golgi intermediate compartment membrane; Biological process=Golgi organization and biogenesis
  Homolog annotation: Hit_ID=B6TDW5; Match level="QueryCoverage=100%, HitCoverage=100%, E-value=0.0, Identity=91%"; Hit description =Transmembrane protein 49
  Pfam annotation: Domain name=SNARE_assoc; Domain location=190-310; Score=-26.2; E_value=0.057; Accession=PF09335.3; Description=SNARE associated Golgi protein
MGRRKMSAAAPPSRSWSNVGGSVIPELRAKHKMELENLTLTKQPIRTLHFFMLALLKYLKRLATYILSKGSLFVLLIILVVAPGILLVVSDGLHKKHVQEFINYAKFALWWVSLGVASSIGLGSGLHTFVLYLGPHIALFTIKAVQCGRIDLKMAPYDTIQLKVGPSWLDKKCSEFGPPVYPASTHSVRIPVFDLLPQIQLEAVLWGIGTALGELPPYFISRAARLSGSESKAVKELDAATSKEDGRVASTLNRTKLWLLSHAQHLNFFSILLLASVPNPLFDLAGIMCGQFGVPFWEFFFATLIGKAIIKTHIQTLFIVSLCNNQLLYLMEKELIWIFGHIPGFSATLPSVIARLHAAKDKYLSPPATASSSSQMEDKQWNFSFTFVWNSIVWLVLLNFFIKIITSTAQDYLKKQQDMEMELVSDSPVSDHSKAN

SEQ ID NO: 98088 - protein, 255 aa, Setaria italica
  misc_feature (245)..(245): Xaa can be any naturally occurring amino acid
  Transcript Sequence Number=SeqID_32114
  Gene Ontology: Mol. function=ATP-dependent helicase activity; Cellular component=intracellular
  Homolog annotation: Hit_ID=B9S9D0; Match level="QueryCoverage=99%, HitCoverage=16%, E-value=1e-63, Identity=46%"; Hit description=ATP -dependent RNA helicase, putative
  Pfam annotation: Domain name=IBR; Domain location=160-225; Score =37.8; E_value=4.4e-08; Accession=PF01485.13; Description=IBR domain
  Pfam annotation: Domain name=zf-C3HC4; Domain location=94-136; Score =17.9; E_value=0.00093; Accession=PF00097.17; Description=Zinc finger, C3HC4 type (RING finger)
  Pfam module annotation: Pfam domain module=IBR::zf-C3HC4; Domain location=160-225::94-136
ALLHLHEKKPHEVRLRGRNLPPNLMKEVIKRFGADLEGFKKEAPAAELHLNTRRHVLYVRGSKEEKQRVEEMISELMTSSDHNSLGQLLSENACPICFCELEDPFKLESCGHMFCKACLVDQCESAMKSQDGFPLCCLKNGCKKLLLLADLKSLLPDRLDELFRASLNAFVASSAGLYRFCPTPDCMSIYQVAAADAEGKPFVCGACYVEICTKCHIECHPFISCEAYKEYKAEPGLDKLLEWRXGKENVKNCLQ

SEQ ID NO: 98089 - protein, 144 aa, Setaria italica
  Transcript Sequence Number=SeqID_32115
  Gene Ontology: Mol. function=translation elongation factor activity; Cellular component=cytoplasm; Biological process=response to stress
  Homolog annotation: Hit_ID=B6TQG2; Match level="QueryCoverage=81%, HitCoverage=45%, E-value=2e-44, Identity=78%"; Hit description =Stress-related protein
  Pfam annotation: Domain name=REF; Domain location=21-144; Score=64.6; E_value=3.6e-16; Accession=PF05755.4; Description=Rubber elongation factor protein (REF)
MAEQPNPQPQVVEKEVVVERQQEARRAPKLRYLDFVHVAAAQAAVCLAGLYGLAKDHAGPLRPGVDAVESTVKGVVGPVYDRFHGVPLDVLAFVDRKVDDTVHEVEKHLPGALKAASAQAYAVARGIPEVARELAAEAQRSGVK

SEQ ID NO: 98090 - protein, 192 aa, Setaria italica
  misc_feature (47)..(47): Xaa can be any naturally occurring amino acid
  Transcript Sequence Number=SeqID_32116
  Gene Ontology: Mol. function=translation elongation factor activity; Cellular component=cytoplasm; Biological process=response to stress
  Homolog annotation: Hit_ID=B6TQG2; Match level="QueryCoverage=96%, HitCoverage=71%, E-value=1e-84, Identity=83%"; Hit description =Stress-related protein
  Pfam annotation: Domain name=REF; Domain location=3-187; Score=210.1; E_value=5.9e-60; Accession=PF05755.4; Description=Rubber elongation factor protein (REF)
RSDYAVESTVKGVVGPVYDRFHGVPLDVLAFVDRKVDDTVHEVEKHXPGALKAASAQAYAVARGIPEVARELAAEAQRSGVKGAARAALAKVEPVAKDVYGRVEPVARDLYVRYEPAAEHLAVSTWRTLNGLPVFPQVAQIAVPTAAYWAEKYNKVIAAAAEQGYTGAKYLPAIPTERIAKVFASSPEAEAQ

SEQ ID NO: 98091 - protein, 85 aa, Setaria italica
  Transcript Sequence Number=SeqID_32117
MEQDNAEAKQVGEQSQSSQKGKNAEPESPKLSDTKKLIEFMESHYDEFVARVQTFDEFYHAIFELIEMFCEERGQLQYRIPEKRI

SEQ ID NO: 98092 - protein, 35 aa, Setaria italica
  misc_feature (35)..(35): Xaa can be any naturally occurring amino acid
  Transcript Sequence Number=SeqID_32118
  Gene Ontology: Mol. function=hydrolase activity, hydrolyzing O -glycosyl compounds; Cellular component=integral to membrane; Biological process=cell wall organization and biogenesis
  Homolog annotation: Hit_ID=P0C1U4; Match level="QueryCoverage=97%, HitCoverage=5%, E-value=1e-12, Identity=94%"; Hit description =Endoglucanase 9
MSMYGRDPWGGPLEICPDSATDDDRSRNLDIDRGX

SEQ ID NO: 98093 - protein, 168 aa, Setaria italica
  misc_feature (138)..(138): Xaa can be any naturally occurring amino acid
  Transcript Sequence Number=SeqID_32119
  Gene Ontology: Mol. function=ubiquitin-protein ligase activity; Cellular component=ubiquitin ligase complex; Biological process =ubiquitin-dependent protein catabolic process
  Homolog annotation: Hit_ID=C3SA81; Match level="QueryCoverage=100%, HitCoverage=16%, E-value=1e-58, Identity=59%"; Hit description=Beta -catenin repeat family protein
  Pfam annotation: Domain name=U-box; Domain location=89-166; Score =40.4; E_value=7e-09; Accession=PF04564.7; Description=U-box domain
DLGRIPASAFGSNAYMNVLIKSQSMRGYSEADISMNVMGNRPRRRSLCDNDTPKLVDFLQGMYHESHEYGGQMFNTLPEVAEYIEPLYDAFFCPLTNEIMTDPVTIESGVTCDRRAIEEYIERFSVSSEPVYCPVTKXMPMQSKTVMSNASLKSVIEEWTMRNEAMRV

SEQ ID NO: 98094 - protein, 105 aa, Setaria italica
  Transcript Sequence Number=SeqID_32120
  Gene Ontology: Mol. function=nucleic acid binding; Cellular component= intracellular
  Homolog annotation: Hit_ID=B9RAP0; Match level="QueryCoverage=67%, HitCoverage=4%, E-value=6e-19, Identity=57%"; Hit description =Nucleic acid binding protein, putative
  Pfam annotation: Domain name=JmjN; Domain location=42-75; Score=63.5; E_value=8e-16; Accession=PF02375.9; Description=jmjN domain
PPKCESSPEEGPPDLFVLPAAAAMSPPAVETPEWLRNLPVAPEYHPTAAEFVDPIAYILKIEAEASRYGICKIVPPLAPPPREATVERLKASFAANAAAAAGVDG

SEQ ID NO: 98095 - protein, 131 aa, Setaria italica
  misc_feature (13)..(13): Xaa can be any naturally occurring amino acid
  Transcript Sequence Number=SeqID_32121
  Gene Ontology: Mol. function=protein serine/threonine kinase activity; Cellular component=cell surface; Biological process =protein amino acid phosphorylation
  Homolog annotation: Hit_ID=Q5NB60; Match level="QueryCoverage=100%, HitCoverage=17%, E-value=2e-48, Identity=69%"; Hit description =Putative S-domain receptor-like protein kinase
  Pfam annotation: Domain name=Pkinase; Domain location=12-131; Score= -106.3; E_value=0.037; Accession=PF00069.17; Description=Protein kinase domain
  Pfam annotation: Domain name=Pkinase_Tyr; Domain location=11-131; Score=-96.0; E_value=2.4e-07; Accession=PF07714.9; Description =Protein tyrosine kinase
  Pfam module annotation: Pfam domain module=Pkinase::Pkinase_Tyr; Domain location=12-131::11-131
VFSFVQIKNCTKXYSEKLGEGGFGCVFKGMLPGCTAVAVKKLKGLRQEDKQFRAEVQTIGMIQHINIVRLLGFCAEDSRRFLVYEYMANGSLSNHLFSKRSSKLSWELRYSIALGIAGGLAYLHEGCRDCI

SEQ ID NO: 98096 - protein, 97 aa, Setaria italica
  Transcript Sequence Number=SeqID_32122
  Gene Ontology: Mol. function=hydrolase activity, acting on ester bonds; Biological process=lipid metabolic process
  Homolog annotation: Hit_ID=Q672R1; Match level="QueryCoverage=100%, HitCoverage=24%, E-value=6e-16, Identity=50%"; Hit description =Lipase 1
SVVFDVGFFERNGLVPFKLLNNSLDVQLGWFEELRSSLCNNATEAAQGSGGCFGKSLFIVGEFGVNDYSFIFSANKTEAEVRSYVPKVVRTIASAVE

SEQ ID NO: 98097 - protein, 200 aa, Setaria italica
  Transcript Sequence Number=SeqID_32123
  Gene Ontology: Mol. function=hydroxymethyl-, formyl- and related transferase activity; Cellular component=chloroplast; Biological process='de novo' IMP biosynthetic process
  Homolog annotation: Hit_ID=P52423; Match level="QueryCoverage=100%, HitCoverage=64%, E-value=5e-82, Identity=71%"; Hit description =Phosphoribosylglycinamide formyltransferase, chloroplastic
  Pfam annotation: Domain name=Formyl_trans_N; Domain location=1-172; Score=189.9; E_value=7.1e-54; Accession=PF00551.11; Description =Formyl transferase
RAINEAALGGTVHGDVVALVTDKPGCGGAEHARSNGIPVVVFPKSKSAPEGISVAELLDTLRGYGVDFVLLAGYLKLIPAELIQEYPRSILNIHPSLLPAFGGKGFYGSKVHKAVIASGARYSGPTVHFVDEHYDTGKTLAQRVVPVFADDTPELLAARVLHEEHQVYVEAVAALCEDRIVWREDGVPLIKSRLNSDVYL

SEQ ID NO: 98098 - protein, 69 aa, Setaria italica
  Transcript Sequence Number=SeqID_32124
  Gene Ontology: Mol. function=nucleotide binding; Cellular component =plasma membrane; Biological process=response to cadmium ion
  Homolog annotation: Hit_ID=B9SS14; Match level="QueryCoverage=100%, HitCoverage=11%, E-value=1e-27, Identity=82%"; Hit description =Dynamin, putative
KDFGVLTKLDLMDKGTNALDVLEGRAYRLQNPWVGIVNRSQADINRKVDMIAAKGKEREYFESSPDYAH

SEQ ID NO: 98099 - protein, 128 aa, Setaria italica
  Transcript Sequence Number=SeqID_32125
  Gene Ontology: Mol. function=electron carrier activity; Cellular component=extracellular region; Biological process=response to oxidative stress
  Homolog annotation: Hit_ID=O23044; Match level="QueryCoverage=98%, HitCoverage=38%, E-value=9e-37, Identity=55%"; Hit description =Peroxidase 3
  Pfam annotation: Domain name=peroxidase; Domain location=1-128; Score= 68.4; E_value=2.6e-17; Accession=PF00141.15; Description=Peroxidase
HNGTAQRDADPNSTVRGYEAIEAVKAKVDEACPLVVSCADIMAMAARDAVNYTQGPAYAVETGRRDGNVSRKEDALRFLPPADGNVTVLTQYFAAQNLSYKDMVVLSAAHSIGVAHCPSFSNRLYNYT

SEQ ID NO: 98100 - protein, 133 aa, Setaria italica
  Transcript Sequence Number=SeqID_32126
  Homolog annotation: Hit_ID=B6TXP6; Match level="QueryCoverage=100%, HitCoverage=45%, E-value=7e-36, Identity=68%"; Hit description =Transposon protein
  Subcellular localization annotation: CTP_CleavageSite=52; ConfidenceScore=5.12e-01
HRSEEDKHQGGVAKERKKYSWFAGIIPRRRKKQAPAAASSSPPSAPPRRSCRVVSNRGLSPERDSHGSGDESSSPNADPPWRPSPSPMRKTPCRRRQTNSLPSGFAVCLSPLVRPSPGRRHRGVQPPDPAAFS

SEQ ID NO: 98101 - protein, 253 aa, Setaria italica
  misc_feature (124)..(124): Xaa can be any naturally occurring amino acid
  Transcript Sequence Number=SeqID_32127
  Homolog annotation: Hit_ID=Q3KLP1; Match level="QueryCoverage=93%, HitCoverage=94%, E-value=5e-29, Identity=34%"; Hit description =UPF0082 protein CTA_0499
  Pfam annotation: Domain name=DUF28; Domain location=7-253; Score =230.9; E_value=3.3e-66; Accession=PF01709.12; Description=Domain of unknown function DUF28
QPLCMGRRSCKIAGRKDAQNLKKMKRNSKIGKEIVSAIKKGGPSPSSNTALAAILEKARELDIPKEILERNIKRASEKDQDTYTEKVYEVYGFGGVGMIVEVLTDKITRSVADIRNVVKDCGAXKLADPGSVTFRFRQARVVNIKVTDACKDQLLSIALDAGADDVLEPNFDDDDDSEEEIERFYKIVTTSDNYPVVLSKLQEEGLKFETDNGYELLPLNPIEVDDEAMELNKELVSKLLELDDVDSVYTDQK

SEQ ID NO: 98102 - protein, 206 aa, Setaria italica
  Transcript Sequence Number=SeqID_32128
  Gene Ontology: Mol. function=metal ion binding; Cellular component =nucleus; Biological process=regulation of transcription, DNA -dependent
  Homolog annotation: Hit_ID=A0SQ39; Match level="QueryCoverage=99%, HitCoverage=35%, E-value=3e-65, Identity=59%"; Hit description=VIL3 protein
FEGLCEDTHEGSWSRSATDTELSGACRKLHFNASSVPDLNVGVPVAMDYTTAKHYHSKKGLVRSNDSGDSETCAVGRSAEPPAVESRPVGKVNSAHIDRCEQNGASAICHKKQLSGTTRQLDGDYEHCVKVIRQLECDGHIENGFRMKFLTWYSLRSTDQERRAVTTFIKTLSEEPSSLAEQLIDSFGEIINCKKARTGYCNKLWH

SEQ ID NO: 98103 - protein, 90 aa, Setaria italica
  Transcript Sequence Number=SeqID_32129
SHVPFLSSVSVIYHGYHLAVAGGGGDDISWLHWSSSFSFDDIINHWSATDDTNTNWGKLLVSRCGGSANDHDLLFLLPPPPLPPGVLLQP

SEQ ID NO: 98104 - protein, 281 aa, Setaria italica
  Transcript Sequence Number=SeqID_32130
  Gene Ontology: Mol. function=zinc ion binding; Cellular component =nucleus; Biological process=regulation of transcription, DNA -dependent
  Homolog annotation: Hit_ID=Q10NX9; Match level="QueryCoverage=79%, HitCoverage=25%, E-value=5e-27, Identity=30%"; Hit description =Transposon protein, putative, unclassified, expressed
  Pfam annotation: Domain name=FAR1; Domain location=78-165; Score =105.7; E_value=1.6e-28; Accession=PF03101.7; Description=FAR1 family
PRRTRASPRRSWKVHLENFGPMEEEEYSTESSNEEDLQEDGEKEGNAAEIDVFKPVDIDPACLPKVGMIFDSEEDAFQFYVTYGCHAGFGITRRSNNTFDGFRYRSTFICSKGGQSRLRSGVTRPARKRGMKTGCKAKMIVKDAHFQNRWEVIVLELEHNHPLDPSLLKFKRHLKNSPFSLNPPRMSESEGPQSSSAVALSGRGGDTGVTSSTQAEFRTKIDRNRKLKLADGDLEELLNFLNKMQDQNLFFYSLDMNEQGQLRNVFWADAKSRSHTLLVML

SEQ ID NO: 98105 - protein, 233 aa, Setaria italica
  Transcript Sequence Number=SeqID_32131
  Gene Ontology: Mol. function=nucleoside-triphosphatase activity; Cellular component=membrane; Biological process=transport
  Homolog annotation: Hit_ID=B9SDN1; Match level="QueryCoverage=99%, HitCoverage=30%, E-value=1e-105, Identity=79%"; Hit description=ATP -binding cassette transporter, putative
  Pfam annotation: Domain name=ABC_tran; Domain location=20-209; Score =145.2; E_value=2.1e-40; Accession=PF00005.19; Description=ABC transporter
AAKGSPREILGGISGSASPGEVLALMGPSGSGKTTLLSILGGRAGGGAVEGCISYNDEPYCKSLKRRIGFVTQDDVLFTHLTVKETLTYAALLRLPRTMTRQQKKERAMDIIYELGLERCQDTMIGGSFVRGVSGGERKRVCIGNEILINPSLLFLDEPTSGLDSTTALRIVQLLHDIAEDGKTVITTIHQPSSRLFHNFDKLILLGKGSLLYFGKASEAMPYFQSIGCTPFS

SEQ ID NO: 98106 - protein, 92 aa, Setaria italica
  Transcript Sequence Number=SeqID_32132
  Gene Ontology: Mol. function=transporter activity; Cellular component= mitochondrial inner membrane; Biological process=transport
  Homolog annotation: Hit_ID=B6UAY5; Match level="QueryCoverage=86%, HitCoverage=24%, E-value=3e-35, Identity=85%"; Hit description =Protein brittle-1
  Pfam annotation: Domain name=Mito_carr; Domain location=10-85; Score =20.3; E_value=4.1e-05; Accession=PF00153.19; Description =Mitochondrial carrier protein
STPFFDPKISYTSRLTILFQVAGMHADAAALKKYSIWHEASRIVREEGFRAFWKGNLVTIVHRLPYSAISFYSYDRYKNLVQMVPGLDRDSN

SEQ ID NO: 98107 - protein, 72 aa, Setaria italica
  Transcript Sequence Number=SeqID_32133
EAFLFSLSLVPLNCPDLKEFKISILISNKPPSLATPYVLVLYPPIHMRVVAVTGSRCELHKSLCFGGGEVQK

SEQ ID NO: 98108 - protein, 112 aa, Setaria italica
  Transcript Sequence Number=SeqID_32134
VAHTIISSAERTSLLAMRTSFYEIMQKRHRQPFRITPWATFGCSMVACAGLVMHGDGIECAAEVAPSVPMIASLGRGLESLRLTSQEVRQTKGQNVKEAMRALMNSLKKSAK

SEQ ID NO: 98109 - protein, 61 aa, Setaria italica
  misc_feature (28)..(28): Xaa can be any naturally occurring amino acid
  Transcript Sequence Number=SeqID_32135
  Homolog annotation: Hit_ID=B6TLP0; Match level="QueryCoverage=88%, HitCoverage=14%, E-value=7e-16, Identity=78%"; Hit description=DNA binding protein
  Subcellular localization annotation: CTP_CleavageSite=18; ConfidenceScore=5.40e-01
SAKIIAFANQSSRAVCVLSAMGSVSRSXLRHPGDTSPMSRVHTSQPYRNPAIYEVNTKQCN

SEQ ID NO: 98110 - protein, 71 aa, Setaria italica
  Transcript Sequence Number=SeqID_32136
VLSSELETPGKTMSNSATDQCQLIVWMQNMFGLLGHLRNRQLKSTFCQSGQKSMIKQTMGETEDKDFYSVA

SEQ ID NO: 98111 - protein, 396 aa, Setaria italica
  Transcript Sequence Number=SeqID_32137
  Gene Ontology: Mol. function=DNA binding; Cellular component=nucleus
  Homolog annotation: Hit_ID=B6TLP0; Match level="QueryCoverage=100%, HitCoverage=100%, E-value=1e-103, Identity=60%"; Hit description=DNA binding protein
  Pfam annotation: Domain name=AT_hook; Domain location=115-127; Score =16.8; E_value=0.034; Accession=PF02178.11; Description=AT hook motif
  Pfam annotation: Domain name=AT_hook; Domain location=170-182; Score =7.4; E_value=1.4; Accession=PF02178.11; Description=AT hook motif
  Pfam annotation: Domain name=DUF296; Domain location=201-332; Score =115.8; E_value=1.4e-31; Accession=PF03479.7; Description=Domain of unknown function (DUF296)
  Pfam module annotation: Pfam domain module=AT_hook::AT_hook::DUF296; Domain location=115-127::170-182::201-332
  Subcellular localization annotation: CTP_CleavageSite=60; ConfidenceScore=5.30e-01
MDGKELISPSDLQSFYQQQQQQQQHRAALGSGGGAHSPSSLAGMHSVIRPMPNMPNMNMSATAILNSIGGGSLAGMQFQMDTAPPPLLHNNAMGSVSGSASGTVPPAPPPAEPVKRKRGRPRKYGPDGTMKAAASAAQQQHLVSAPPRMGSSMSGAEMLGGQGMEDPAQKKRRGRPPGTGKKQQTSPSLGNAFAGSAGTSFTPHIITASPSEDVAAKIIAFANQSSRAVCVLSAMGSVSRVDLRHPGDTSPMSRVHTSQPYRNPAIYEGFYEILSLTGSYNLAEGSQGQQSGGLSVTLCSPERNVIGGVLGGALVAASTVQVVLGSFHQGGSRSKSKKAAKQAAFSPDSLTGGQEASPSSGHNQQNLTPPSVTGGWPTSGIFDTRSSSIDINSSRG

SEQ ID NO: 98112 - protein, 107 aa, Setaria italica
  Transcript Sequence Number=SeqID_32138
  Homolog annotation: Hit_ID=B9T190; Match level="QueryCoverage=98%, HitCoverage=26%, E-value=7e-28, Identity=55%"; Hit description =Dopamine beta-monooxygenase, putative
  Pfam annotation: Domain name=DUF568; Domain location=6-107; Score =114.8; E_value=2.9e-31; Accession=PF04526.5; Description=Protein of unknown function (DUF568)
  Subcellular localization annotation: CTP_CleavageSite=4; ConfidenceScore=5.44e-01
AGAPAMTGARVLAAFSDPSTGALLALPFVLSPDVKLQASPLVSRPLDIPLLASSASLLAPARTVRDGAKVTIAATIRLSPNRTRVHLVWNRGLYVQGYSPTIHPTDA

SEQ ID NO: 98113 - protein, 98 aa, Setaria italica
  Transcript Sequence Number=SeqID_32139
MMMRARSRAGGRLVAVNAVGDVAAEGNTYLIAGAVAVALVGTAFPILFSRKDTCPECDGAGFIRKAGSTLRANAARKDQAQIVCPNCNGLGKLGQIDK

SEQ ID NO: 98114 - protein, 118 aa, Setaria italica
  Transcript Sequence Number=SeqID_32140
  Subcellular localization annotation: CTP_CleavageSite=24; ConfidenceScore=5.18e-01
MAAVVNAPPAGCCTVAARPSMMMRARSRAGGRLVAVNAVGDVAAEGNTYLIAGAVAVALVGTAFPILFSRKDTCPECDGAGFIRKAGSTLRANAARKDQAQIVCPNCNGLGKLGQIDK

SEQ ID NO: 98115 - protein, 89 aa, Setaria italica
  Transcript Sequence Number=SeqID_32141
LISVYQILTVGHQLKDIYLHRSMQQAKKNVLIRKYSDILAPLTTARLQEFQCTYTINAGKHSLNQNPDQQKTTLPSVLCFGITMQLLET

SEQ ID NO: 98116 - protein, 52 aa, Setaria italica
  Transcript Sequence Number=SeqID_32142
CFKLSTFLSHEMTMYHTKKAGMFIFCFSSWTWQNKMNQLICMSSKKVNKNIT

SEQ ID NO: 98117 - protein, 395 aa, Setaria italica
  Transcript Sequence Number=SeqID_32143
  Gene Ontology: Cellular component=anchored to membrane
  Homolog annotation: Hit_ID=Q06IA1; Match level="QueryCoverage=77%, HitCoverage=71%, E-value=8e-86, Identity=54%"; Hit description =Fasciclin-like protein FLA5
  Pfam annotation: Domain name=Fasciclin; Domain location=195-325; Score=47.9; E_value=4e-11; Accession=PF02469.14; Description =Fasciclin domain
MAMQRVAAAAALLACLAMAASPVRGRNITAILDGYKEYKLYNKYLSETKVCDEINSRQSTSMTILVLSNDAMTTLASDAGDSLPAIKNALRLHSVLDYYDRKKVKKYGDESAATLYQATGDAASTTGNVKVVDQEDKNYAFSAATPGARLCTVTKEVETHPFKFAILEVTAPIEFDGLFDTPATSNLTRLLERAGCKVFASLAARTGVLKTYEDAMDKGLTLFAPNDDAFQAKDAPDVKTMSTANLTRLLQYNALPSYNTKTSLKFVKGTLRTMASTKAGKDGVTVVAKGDDVSLDTGKARSRVADTVVDSVPFSLLTLDSLLVPPELYVGAPEAPAPEPSPAETPASQPADAPSVAADHAADHKTKKPSSAIASRPIGALAAAACSVVLASLLL

SEQ ID NO: 98118 - protein, 413 aa, Setaria italica
  misc_feature (11)..(11): Xaa can be any naturally occurring amino acid
  Transcript Sequence Number=SeqID_32144
  Gene Ontology: Mol. function=protein serine/threonine kinase activity; Cellular component=ubiquitin ligase complex; Biological process=ubiquitin-dependent protein catabolic process
  Homolog annotation: Hit_ID=B9RK56; Match level="QueryCoverage=99%, HitCoverage=52%, E-value=1e-149, Identity=61%"; Hit description=ATP binding protein, putative
  Pfam annotation: Domain name=APH; Domain location=64-237; Score= -19.1; E_value=0.056; Accession=PF01636.15; Description =Phosphotransferase enzyme family
  Pfam annotation: Domain name=Pkinase; Domain location=62-321; Score =137.4; E_value=4.6e-38; Accession=PF00069.17; Description=Protein kinase domain
  Pfam annotation: Domain name=Pkinase_Tyr; Domain location=62-324; Score=52.9; E_value=3e-17; Accession=PF07714.9; Description=Protein tyrosine kinase
  Pfam annotation: Domain name=U-box; Domain location=342-413; Score =54.3; E_value=4.6e-13; Accession=PF04564.7; Description=U-box domain
  Pfam module annotation: Pfam domain module=APH::Pkinase::Pkinase _Tyr::U-box; Domain location=64-237::62-321::62-324::342-413
AIGAVEMAKNXFAREAYSKHKAEFVANMVSTEKAKVVDALLSTGKSCRQYSKHEIELATDYFSDAKKIGEGGYGTVYKCTLDHTEVAVKVIQQDSSDKIDEFLREVEILSKLHHPNLVLLLGFCPEIGCLVYEYMENGSLEDQLINNKGQPLHWFLRFQIIFEVSCGLAFLHGTKPEPIVHRDLKPGNILLDKNYVSKIGDVGFAKLISDLVPEGLTEYRETVIAGTLFYMDPEYQLTGTVRPKSDLFALGIIILQLLTGKRPHGLICSVEEAIEKGILSDILDRSQTDWPIAEAEMLAKLGLRCTALKCRDRPNLESEVLPELENILSRVTASLKLENIIAPSHFICPILQEVMENPYVAADGHTYEHRAIKAWLKKHKVSPVNNQRLPHLSIIPNHSLQAAIQQWKLHTSF

SEQ ID NO: 98119 - protein, 346 aa, Setaria italica
  misc_feature (36)..(36): Xaa can be any naturally occurring amino acid
  Transcript Sequence Number=SeqID_32145
MRPPVSRAAFASVLLGRRAVGASLVAARCASSAASXAAAVTAYDHASFVKEIAATDPPEHLNSLLNVLQARGEKIVSPGAKRGLIPVVVPLSESPAGNLTSLLRWPTAPTGMEMPVVEVGKHGLWLLAKNVKQYIHRILVEADINADTGDDVWDAVGEAGENLYTKGDFKESQLADLDVYLLKKVGLFPDVIERKTLRHLEKGDNVSALITGEFYSRDQFPGFGRPFVFNAEILKRVGRTSEAKDSARVALKSPWWTLGCSYEEAAELAGWEDEQIEFIREKVTEEGKREDLKKGKAPEQVVLDEAAFLMDLACVDGNWDDVVDRIAECYREAGLDDVAKFIAYRE

SEQ ID NO: 98120 - protein, 80 aa, Setaria italica
  Transcript Sequence Number=SeqID_32146
VSCNVTKETYCKLQPQLQLNKKRNTPAPVLLIKDRNTVLVVSNYGAGILNNYHAAISSNKTSSTNKSNMIAAQQSNKKTF

SEQ ID NO: 98121 - protein, 129 aa, Setaria italica
  misc_feature (64)..(64): Xaa can be any naturally occurring amino acid
  Transcript Sequence Number=SeqID_32147
  Gene Ontology: Mol. function=nucleoside transmembrane transporter activity; Cellular component=membrane; Biological process=transport
  Homolog annotation: Hit_ID=Q69S27; Match level="QueryCoverage=83%, HitCoverage=51%, E-value=6e-32, Identity=56%"; Hit description =Equilibrative nucleoside transporter(ENT3)-like protein
TMDDYFVYIFLDYHPTRVLTLAYLPFVLCTTVVFTYHDAKINTRARTLVGYSLFLLRSLGLITXRGGAATFAGVCTVAAVFCIAEGHAEGAMARDLSLMCPEFIQTLLLVASREVQIHWMKKALLFLNV

SEQ ID NO: 98122 - protein, 73 aa, Setaria italica
  Transcript Sequence Number=SeqID_32148
  Gene Ontology: Mol. function=protein binding; Cellular component =nucleus; Biological process=ubiquitin-dependent protein catabolic process
  Homolog annotation: Hit_ID=Q2QNU9; Match level="QueryCoverage=95%, HitCoverage=14%, E-value=1e-23, Identity=75%"; Hit description =Leucine Rich Repeat family protein, expressed
QTSSELQILKLGLCSSISDKGLVYIGSNCGKLVELDLYRCSAITDEGLAALVHGCKKIRMLNLRYCTQITDTG

SEQ ID NO: 98123 - protein, 195 aa, Setaria italica
  Transcript Sequence Number=SeqID_32149
YPLCSKANSGSHDGLLVLPCCLLLADDPPALFLHLLSRPRPPAAIRVLGHGHHAEKRRRGHPPPCALPDPQAAAALLAVAGTVGVAATILLRSSPRREQQQQEEEEEEEEVVAEQSECPDCGGTGLCGLCKGEGFVFKQLPEEAATKARKAAKNMATRYTAGLPTKWTYCNRCSSTRSCTTCRGSGTIKPITSTT

SEQ ID NO: 98124 - protein, 79 aa, Setaria italica
  Transcript Sequence Number=SeqID_32150
GSSVSWQCHSECPIQPQRAILNILGCLSKSSTRKHFRIRDRNRTAKKSLEKSEPNQQCIIMKQRPPSKVVAHCTQRLLF

SEQ ID NO: 98125 - protein, 81 aa, Setaria italica
  Transcript Sequence Number=SeqID_32151
  Gene Ontology: Mol. function=signal transducer activity; Cellular component=plasma membrane; Biological process=response to light stimulus
  Homolog annotation: Hit_ID=B9SGZ1; Match level="QueryCoverage=96%, HitCoverage=15%, E-value=3e-30, Identity=79%"; Hit description =Signal transducer, putative
MKYMKLGSKPDVFQTDGNSIRFVTTELATDIVITVGDVKFYLHKFPLLSKSSRLQTLVASTNDESNDEVDISDIPGGPCRS

SEQ ID NO: 98126 - protein, 128 aa, Setaria italica
  Transcript Sequence Number=SeqID_32152
  Gene Ontology: Mol. function=protein-L-isoaspartate (D-aspartate) O -methyltransferase activity; Cellular component=cytoplasm; Biological process=protein modification process
  Homolog annotation: Hit_ID=B4FN58; Match level="QueryCoverage=98%, HitCoverage=54%, E-value=5e-65, Identity=92%"; Hit description =Protein-L-isoaspartate O-methyltransferase
  Pfam annotation: Domain name=PCMT; Domain location=11-127; Score =95.6; E_value=1.8e-25; Accession=PF01135.11; Description=Protein-L -isoaspartate(D-aspartate) O-methyltransferase (PCMT)
MEHGLWSSGASDKNKTMVEQLQRYGIIRSSKVAEVMQAVDRGLFVPSGGSPYFDSPMPIGYNATISAPHMHAACLELLEKNLQPGMRALDVGSGTGYLTACFALMVGSEGRAVGVEHIPELVATSIEI

SEQ ID NO: 98127 - protein, 272 aa, Setaria italica
  Transcript Sequence Number=SeqID_32153
  Gene Ontology: Mol. function=nucleic acid binding; Cellular component= intracellular
  Homolog annotation: Hit_ID=Q6K687; Match level="QueryCoverage=100%, HitCoverage=53%, E-value=1e-91, Identity=65%"; Hit description=Zinc finger CCCH domain-containing protein 18
  Pfam annotation: Domain name=G-patch; Domain location=72-116; Score =63.0; E_value=1.1e-15; Accession=PF01585.15; Description=G-patch domain
ARLTSDSLSLSEYADMSSEDDEGSSSEEESELSDDADQEDGCVHQGIGLLEPANFSGIQTDTVIFAKWEHHTRGVASKMMAKMGYREGMGLGVSGQGMLDPIPVKVLPPKQSLDHALAASEADGSVGSGKKRSRGGKRKREKKFAEQARAAKAEEAERSVFSFINSHLVNQDMPEGSAIKVKKGASGEANGHAKKEDRRSLVAYDEEVKELRIQVERLEEMKNRNRKDKAVFEAASRKLEETRKALADAEATHASATNAVARKEKEKKWLKF

SEQ ID NO: 98128 - protein, 101 aa, Setaria italica
  Transcript Sequence Number=SeqID_32154
PWCTLSIVLVYSYKEMYTILEVLSTEVVHGQIESTTSIFFFTLVRVHSEPGTVSVASPLVGLAGKLVLLPPIQRTTVDLPLSQNHFFWLDGHVPQLIMKNS

SEQ ID NO: 98129 - protein, 93 aa, Setaria italica
  Transcript Sequence Number=SeqID_32155
  Gene Ontology: Mol. function=binding
  Homolog annotation: Hit_ID=B6TBS1; Match level="QueryCoverage=100%, HitCoverage=20%, E-value=9e-35, Identity=81%"; Hit description =Ankyrin-1
  Pfam annotation: Domain name=Ank; Domain location=54-87; Score=27.8; E_value=4.3e-05; Accession=PF00023.22; Description=Ankyrin repeat
MADATAALEARSKVQAFLEAARAGDLDSLKNLVAALDEEGTGAAAVAAAVRDANKRTALHFAAREGRTDVCQFLIDQLGLPVDPKDDDGETPL

SEQ ID NO: 98130 - protein, 93 aa, Setaria italica
  Transcript Sequence Number=SeqID_32156
IPEMMEEEKPLADADSDAGAPPAGMHPTMIMPLLSPPTQGQEANAHGITVSTESGSKSSEAPSTADQAAPMDIEDDVRQPQPGQHPQFWSGFF

SEQ ID NO: 98131 - protein, 80 aa, Setaria italica
  Transcript Sequence Number=SeqID_32157
  Gene Ontology: Mol. function=hydrolase activity
  Homolog annotation: Hit_ID=B6UII7; Match level="QueryCoverage=100%, HitCoverage=24%, E-value=2e-25, Identity=72%"; Hit description =Epoxide hydrolase 2
MDGGGAVEVRHWNADVNGVSIHVAEQGPADGTVVLLLHGFPELWLSWRHQMAALAARGFRAVAPDLRGYGDSSVPADPAA

SEQ ID NO: 98132 - protein, 89 aa, Setaria italica
  Transcript Sequence Number=SeqID_32158
  Gene Ontology: Mol. function=protein serine/threonine kinase activity; Cellular component=integral to membrane; Biological process=protein amino acid phosphorylation
  Homolog annotation: Hit_ID=Q75N53; Match level="QueryCoverage=100%, HitCoverage=7%, E-value=2e-10, Identity=44%"; Hit description =Putative leucine rich repeat-type serine/threonine receptor-like kinase
  Pfam annotation: Domain name=LRR_1; Domain location=2-22; Score=9.2; E_value=5.3; Accession=PF00560.25; Description=Leucine Rich Repeat
  Pfam annotation: Domain name=LRR_1; Domain location=28-49; Score=9.0; E_value=5.7; Accession=PF00560.25; Description=Leucine Rich Repeat
  Pfam annotation: Domain name=LRR_1; Domain location=51-70; Score=8.7; E_value=6.5; Accession=PF00560.25; Description=Leucine Rich Repeat
  Pfam module annotation: Pfam domain module=LRR_1::LRR_1::LRR_1; Domain location=2-22::28-49::51-70
PSLRSLDLSRNALSDAGLLNYSVAGCHGLHHLNLSANQFAGRLPELPPCSGLSVLDVSWNHMSGELPAGLVAAAPANLTHLSIAGNNFT

SEQ ID NO: 98133 - protein, 105 aa, Setaria italica
  Transcript Sequence Number=SeqID_32159
SRRMQSITTAAAAPNYYEVQSCGFRGVRHKLHYVLVCSSCCQTPMVWCHWITPNDLLVTDENCTIQGKGHGLSLSLKMTAILGRKQLDGLVIITFRMGQRVRIFR

SEQ ID NO: 98134 - protein, 127 aa, Setaria italica
  Transcript Sequence Number=SeqID_32160
  Homolog annotation: Hit_ID=B6SL47; Match level="QueryCoverage=97%, HitCoverage=23%, E-value=2e-64, Identity=95%"; Hit description =Carboxyl-terminal proteinase
  Pfam annotation: Domain name=DUF239; Domain location=1-105; Score =100.8; E_value=4.6e-27; Accession=PF03080.7; Description=Arabidopsis proteins of unknown function
SRIAIGASISPVSSPGGAQYDMTLLVWKDPKLGNWWLSYGDQLVGYWPAQLFTHLSDHATMVEWGGEVVDTRPAGVHTATQMGSGRFAAEGFARASYFRNLETVDADNSLAEVALDAIQTLAENVRP

SEQ ID NO: 98135 - protein, 149 aa, Setaria italica
  misc_feature (59)..(59): Xaa can be any naturally occurring amino acid
  Transcript Sequence Number=SeqID_32161
  Homolog annotation: Hit_ID=Q5W7D1; Match level="QueryCoverage=97%, HitCoverage=26%, E-value=3e-40, Identity=61%"; Hit description =Unknow protein
MLPPMDAPRDEDNIREGFSNKSILSCEKEAPKQVEFTHCSPGIVARLMGLDTVPRPKKXLDRCQSDTQANLQRHLFGVVQEVAHASSGDQPCNVSSDELPAVKDVFEVTEMENMAMHKVLEPRNEEQYLRNLEADLEFVRQKFLDAKRL

SEQ ID NO: 98136 - protein, 73 aa, Setaria italica
  Transcript Sequence Number=SeqID_32162
TELKMGNLTTNCCNCGVGDGGRLRGPTMAEAPSGDFSPDPSMARASSVPPPSKKRGGRWGTNGSSGDQAWASS

SEQ ID NO: 98137 - protein, 207 aa, Setaria italica
  misc_feature (196)..(196): Xaa can be any naturally occurring amino acid
  Transcript Sequence Number=SeqID_32163
  Homolog annotation: Hit_ID=B9RQR6; Match level="QueryCoverage=58%, HitCoverage=26%, E-value=5e-27, Identity=53%"; Hit description =Calmodulin binding protein, putative
  Pfam annotation: Domain name=IQ; Domain location=112-132; Score=9.8; E_value=2.4; Accession=PF00612.19; Description=IQ calmodulin-binding motif
  Pfam annotation: Domain name=IQ; Domain location=138-158; Score=5.4; E_value=8.1; Accession=PF00612.19; Description=IQ calmodulin-binding motif
  Pfam annotation: Domain name=IQ; Domain location=90-110; Score=30.1; E_value=9.1e-06; Accession=PF00612.19; Description=IQ calmodulin -binding motif
  Pfam module annotation: Pfam domain module=IQ::IQ::IQ; Domain location=112-132::138-158::90-110
PEKEDGKDKLQIPSVHGGLRGKGRKWKLWRSSSGDHGSLWRGSRGGSHRSAASEASDDTSSVAAPADPFTAAVATVARAPARDFMAVRQEWAAIRIQTAFRGFLARRALRALKGLVRLQAIVRGRQVRKQAAVTLRCMQALVRVQARIRARRVRMSTEGQAVQKLLEARRTQMDILREAEEGWCDSQGTLEEVRVXLQKRQGGCDQA

SEQ ID NO: 98138 - protein, 120 aa, Setaria italica
  misc_feature (56)..(56): Xaa can be any naturally occurring amino acid
  misc_feature (80)..(80): Xaa can be any naturally occurring amino acid
  Transcript Sequence Number=SeqID_32164
  Gene Ontology: Cellular component=chloroplast
MKGGCLHRLLVNKLCFGLVVLLTVPIIVLLLEGAPVLTIFSTRPEQLKVLSHGIPXQLPGVTHTKLGGKVNKDCNYAKGXWVADDKRPLYSGNECKQWLSKMWACRMMRRAHFSYESYRW

SEQ ID NO: 98139 - protein, 56 aa, Setaria italica
  Transcript Sequence Number=SeqID_32165
YKAITYRRKGTVTTHRSMNISTVRVKPKLRVIVNISTCGLNCNSIIATMSCYRIQV

SEQ ID NO: 98140 - protein, 75 aa, Setaria italica
  Transcript Sequence Number=SeqID_32166
  Subcellular localization annotation: CTP_CleavageSite=40; ConfidenceScore=5.19e-01
LFDAFLSLSTKPFTNSSTWRVIFLAVYAIVSLLVFTLQISAMLVSIFLLCGCVEVVILELQCLMVLPSFVNYMLW

SEQ ID NO: 98141 - protein, 65 aa, Setaria italica
  misc_feature (57)..(57): Xaa can be any naturally occurring amino acid
  Transcript Sequence Number=SeqID_32167
MWHLLVLVALSRESLVSELSVIAGQEKVMLDECRELLATAAKLQVHESSIRTHLMQXRHRLHDMN

SEQ ID NO: 98142 - protein, 398 aa, Setaria italica
  misc_feature (239)..(239): Xaa can be any naturally occurring amino acid
  misc_feature (269)..(269): Xaa can be any naturally occurring amino acid
  Transcript Sequence Number=SeqID_32168
  Pfam annotation: Domain name=DUF566; Domain location=247-397; Score= -40.4; E_value=1.4e-06; Accession=PF04484.4; Description=Family of unknown function (DUF566)
MDPLKNEVKKATLVDETLRPPLVPSEKHNAFRGRDVASRYKTGPADATKTRRCTSPSLGRTSATEGTPAPKRAQSADRRRPSTPSTPTSRVSTPSTPTPRSITPVRDTARDLHKNSKRIASTKAPDGLWPAMRNLSSSFQSESVSTPATRKDKVISASSLDCTKGQGSVLTERKRSPFRRKNTGEQCENAQPSEEPPKRVIEQHRWPAMIGGQVPKNLMSRSIDLSGKTTRPVPSANTXRHSPRKTPSVESSDKGLSPSLDEVARSLAXQASRRDGKADSQKTERSKSVSRPNRTATFPVPVLQRSSSPNKALPAASSTSRAFQSPSRTRPSTPCRSQSAGAIQPSVTSPLINYMVDARKGKKNASQIEYIHQLRLLYNRHLQWLFINANAEDYSYSF

SEQ ID NO: 98143 - protein, 189 aa, Setaria italica
  Transcript Sequence Number=SeqID_32169
  Homolog annotation: Hit_ID=Q8H2N8; Match level="QueryCoverage=95%, HitCoverage=34%, E-value=2e-32, Identity=41%"; Hit description =Proteophosphoglycan-like
  Pfam annotation: Domain name=DUF566; Domain location=1-155; Score =99.9; E_value=8.6e-27; Accession=PF04484.4; Description=Family of unknown function (DUF566)
HLQWLFINANAEDTLSFQKVTVENAIYNVWRNTIDLRDSVNVRRIMVQHLQQELRLYNILKEQIAYLEQWPTLERENSISLFGATEALKASTLRLPVTSGAKADAIALKNAVSSAVDVMQGLGSSVCCMFSKITDRESLVSELSVIAGQEKVMLDECRELLATAAKLQVHESSIRTHLMQQRHRLHDMN

SEQ ID NO: 98144 - protein, 182 aa, Setaria italica
  Transcript Sequence Number=SeqID_32170
  Gene Ontology: Cellular component=plasma membrane
EKTSCPAVSTISPFVEQMYEQIKESIHEYGVVINRWPQYLMSLESAVADVEREIMKTLEKQYMETLMPLRDGIPKYLEKQVQRLTRRQSIAPYVVPSQLGAFMNTVKRMLDMLHCRVEDILKSWAAYLTITSGNTVFGEQMNSITVMLRKKYKNYLKAIVDKLVSNAQANRNTRLKRILEET

SEQ ID NO: 98145 - protein, 105 aa, Setaria italica
  Transcript Sequence Number=SeqID_32171
  Gene Ontology: Mol. function=ribonuclease activity; Cellular component=cytoplasm; Biological process=carbohydrate metabolic process
  Homolog annotation: Hit_ID=Q8GZQ4; Match level="QueryCoverage=90%, HitCoverage=9%, E-value=2e-33, Identity=71%"; Hit description =Endoribonuclease
LRESDDDTNGSRWSQVRKGTKIMVQVVKEGLGSKGPTLSPFPCLRSRFWILVSRGNKVGVSKKITGIERTRLKGITKLLRPPGFTLTARTVAAGHSWEELQRDLD

SEQ ID NO: 98146 - protein, 457 aa, Setaria italica
  Transcript Sequence Number=SeqID_32172
  Gene Ontology: Mol. function=binding; Cellular component=chloroplast; Biological process=nuclear mRNA splicing, via spliceosome
  Homolog annotation: Hit_ID=Q9FMF9; Match level="QueryCoverage=91%, HitCoverage=33%, E-value=2e-87, Identity=47%"; Hit description =Nuclear protein-like
  Pfam annotation: Domain name=SF3b1; Domain location=254-391; Score =223.2; E_value=6.6e-64; Accession=PF08920.2; Description=Splicing factor 3B subunit 1
STVARGDPNRFAGYDTSIPASEDDAAEDDTEAANPAPRRLAAYTGHAIAAADLPRSADDDALPKRSQRIIDREDDYRRRRLNQIISPERHDPFAAGEATPDPSVRTYADVMRDAALAKKKEDLMREIAKKKKEEEEKEKEKKAAAPEQPAATTKRRNRWDQSQDSDAAAGAKKAKTSSDWDAPDATPGIGRWDATPGRVGDATPSVRRNRWDETPTPGRMADADATPAAGGVTPGATPSGAWDATPKLPGGVTPTPGKKQRSRWDETPASMGSATPGGLGAATPAGYTPGPTPFGAENLATPTPSQIARGPMTPEQYQLMRWERDIEERNRPLTDEELDAMFPQEGYKILEPPASYQPIRTPARKLLATPTPLGTPLYAIPEENRGQQFDVPKELGGGLPLMKPEDYQYFGTLLNEEEEEQLSPEEQKERKIMKLLLKVKNGTPPQRKTALRQSCNK

SEQ ID NO: 98147 - protein, 230 aa, Setaria italica
  Transcript Sequence Number=SeqID_32173
  Gene Ontology: Biological process=cell division
  Homolog annotation: Hit_ID=Q75T24; Match level="QueryCoverage=99%, HitCoverage=100%, E-value=1e-107, Identity=82%"; Hit description=MinE
  Pfam annotation: Domain name=MinE; Domain location=117-186; Score =46.9; E_value=7.9e-11; Accession=PF03776.6; Description=Septum formation topological specificity factor MinE
  Subcellular localization annotation: CTP_CleavageSite=28; ConfidenceScore=5.22e-01
MALPISGAGEARALLAPSAYSIRPPLRRGAAAKAHFCTFPHGASSSHMLTNSRLIIERQSCSHSSTQTNALSRKDFSPITQEVEGFLHNVVNMGFLDRLKLAWKIIFPAPTIKENSNANIAKQRLKMILFSDRCEVSDEAKKKIVENVIEALSEFVEIESRDNVQVDISTDAGLGTVYSVTVPVRRVKPEYQESEEQYRGKIVGVDFKDTGETSGSVDVTFDFFVPNENY

SEQ ID NO: 98148 - protein, 70 aa, Setaria italica
  Transcript Sequence Number=SeqID_32174
LVIPTGSYCEIGCRSSHHRVKLMRCLSFGNKETILEWSSAPFHRPEQSAVVVKSVLFVSLFFFVVSHISR

SEQ ID NO: 98149 - protein, 80 aa, Setaria italica
  Transcript Sequence Number=SeqID_32175
  Gene Ontology: Mol. function=unfolded protein binding; Cellular component=prefoldin complex; Biological process=protein folding
  Homolog annotation: Hit_ID=B6TWV7; Match level="QueryCoverage=100%, HitCoverage=51%, E-value=3e-38, Identity=95%"; Hit description =Protein UXT
ANAINQRDKVFGQQKTFLDLKRNIENLEKNGVTSMRSMVNLGSEVYMQAEVPDTRHIFVDIGLGFHVEFTWQEALQFISV

SEQ ID NO: 98150 - protein, 103 aa, Setaria italica
  misc_feature (19)..(19): Xaa can be any naturally occurring amino acid
  Transcript Sequence Number=SeqID_32176
VSNLRLSGEDSASVQQRGXQKSRPPPLPAFRVKEEWDDSTVSSNVSRMRIQSRIEATTRRERALAYAFSQQLRSCGGTKKRSARPEQAEFNVGWSLAWSGWYW

SEQ ID NO: 98151 - protein, 131 aa, Setaria italica
  Transcript Sequence Number=SeqID_32177
  Gene Ontology: Mol. function=beta-N-acetylhexosaminidase activity; Biological process=carbohydrate metabolic process
  Homolog annotation: Hit_ID=B4FYZ2; Match level="QueryCoverage=100%, HitCoverage=21%, E-value=6e-68, Identity=91%"; Hit description=Beta -hexosaminidase beta chain
KEREGTPLFNDPGGTGGSWCAPFKTWQRIYDYDILHGLTEDEATRVLGGEVALWSEQSDAAVLDGRLWPRAAAAAETLWAGNKDSSGRKRYANATARLNEWRYRMVARGIRAEPIQPLWCPLHPRMCHLSQ

SEQ ID NO: 98152 - protein, 97 aa, Setaria italica
  misc_feature (30)..(30): Xaa can be any naturally occurring amino acid
  misc_feature (42)..(42): Xaa can be any naturally occurring amino acid
  Transcript Sequence Number=SeqID_32178
  Gene Ontology: Mol. function=nutrient reservoir activity; Cellular component=extracellular region
  Homolog annotation: Hit_ID=Q7XZY1; Match level="QueryCoverage=97%, HitCoverage=42%, E-value=4e-33, Identity=68%"; Hit description =Putative germin-like protein 3-2
  Pfam annotation: Domain name=Cupin_1; Domain location=1-88; Score= -5.8; E_value=0.002; Accession=PF00190.14; Description=Cupin
  Subcellular localization annotation: CTP_CleavageSite=43; ConfidenceScore=5.27e-01
MGHLHVGFITTANVLFARTLRRGEVFVFPXGLVHFQRNNGRXPAAVVSAFNSQLPGTQALAATLFGASPPVPDDVLARAFQIDAGLVEAIKARFPPM

SEQ ID NO: 98153 - protein, 142 aa, Setaria italica
  Transcript Sequence Number=SeqID_32179
  Gene Ontology: Mol. function=nutrient reservoir activity; Cellular component=extracellular region
  Homolog annotation: Hit_ID=Q942A8; Match level="QueryCoverage=80%, HitCoverage=51%, E-value=3e-47, Identity=79%"; Hit description =Germin-like protein 1-3
  Pfam annotation: Domain name=Cupin_1; Domain location=69-141; Score= -20.5; E_value=0.041; Accession=PF00190.14; Description=Cupin
MAHKLPSTLIAAFAVLLALAAPLVVVAGDPDMLQDICVADYHSLKGPLRLNGFPCKRAENVTAHDFSSGLLAKPGNTTDNAAGSAVTAANVEMVPGLNTLGVSMARIDFAPWGVNPPHTHPRATEIIFVLRGSLHVGFITTA

SEQ ID NO: 98154 - protein, 222 aa, Setaria italica
  Transcript Sequence Number=SeqID_32180
  Gene Ontology: Mol. function=nutrient reservoir activity; Cellular component=extracellular region
  Homolog annotation: Hit_ID=Q942A8; Match level="QueryCoverage=89%, HitCoverage=89%, E-value=9e-91, Identity=79%"; Hit description =Germin-like protein 1-3
  Pfam annotation: Domain name=Cupin_1; Domain location=65-213; Score =174.9; E_value=2.3e-49; Accession=PF00190.14; Description=Cupin
  Pfam annotation: Domain name=Cupin_2; Domain location=100-175; Score =42.4; E_value=1.7e-09; Accession=PF07883.3; Description=Cupin domain
  Pfam module annotation: Pfam domain module=Cupin_1::Cupin_2; Domain location=65-213::100-175
MAKLAATSLLAVVLLALAAPSLAGDPDMLQDICVADYKSLQGPLRLNGFPCKRPENVTADDFFSGLLANPGNTGNAVGSAVTAANVEKLPGLNTLGVSMARIDFAPWGINPPHTHPRATEIIFVLQGSLDVGFVTTANKLYARTVCRGEAFVFPRGLVHYQRNNGNTPAAVISAFNSQLPGTQSVAETLFGASPAVSTDVLARTFQIDGGLVEGIKSKFPPK

SEQ ID NO: 98155 - protein, 75 aa, Setaria italica
  Transcript Sequence Number=SeqID_32181
  Gene Ontology: Mol. function=ATPase activity, coupled to transmembrane movement of ions, phosphorylative mechanism; Cellular component=integral to membrane; Biological process=phospholipid transport
  Homolog annotation: Hit_ID=P98205; Match level="QueryCoverage=97%, HitCoverage=6%, E-value=5e-17, Identity=60%"; Hit description =Putative phospholipid-transporting ATPase 2
QSQDEEALVNAALNLNMVLISKDSSTAEVCFNGSKFRYELLEILEFTSDRKRMSVVVKEGQTGKILLLSKGAEGE

SEQ ID NO: 98156 - protein, 89 aa, Setaria italica
  Transcript Sequence Number=SeqID_32182
  Gene Ontology: Mol. function=transferase activity, transferring groups other than amino-acyl groups
  Homolog annotation: Hit_ID=A4U7G0; Match level="QueryCoverage=100%, HitCoverage=21%, E-value=1e-11, Identity=40%"; Hit description =Hydroxycinnamoyl-CoA:quinate hydroxycinnamoyltransferase
  Subcellular localization annotation: CTP_CleavageSite=40; ConfidenceScore=5.51e-01
PPRSTSPEPAPAHAVTAPSSTYASAIITLTKAQVTALKARCAGASTFRAVVALVWQCACRARSLPDDAETRLYSMIDMRARLAPPLAPG

SEQ ID NO: 98157 - protein, 393 aa, Setaria italica
  Transcript Sequence Number=SeqID_32183
  Gene Ontology: Cellular component=mitochondrion
  Homolog annotation: Hit_ID=B9SFI2; Match level="QueryCoverage=99%, HitCoverage=49%, E-value=1e-137, Identity=60%"; Hit description =Pentatricopeptide repeat-containing protein, putative
  Pfam annotation: Domain name=PPR; Domain location=169-203; Score=0.4; E_value=8; Accession=PF01535.12; Description=PPR repeat
  Pfam annotation: Domain name=PPR; Domain location=240-274; Score =28.1; E_value=3.7e-05; Accession=PF01535.12; Description=PPR repeat
  Pfam annotation: Domain name=PPR; Domain location=315-349; Score =12.6; E_value=0.29; Accession=PF01535.12; Description=PPR repeat
  Pfam annotation: Domain name=PPR; Domain location=98-132; Score=15.7; E_value=0.13; Accession=PF01535.12; Description=PPR repeat
  Pfam module annotation: Pfam domain module=PPR::PPR::PPR::PPR; Domain location=169-203::240-274::315-349::98-132
CSTSRPISSRQMLSYVSFFKDNSFARLELEARELLELLSDKLQEQVGLVKSEHGILHPTETMYAKLVKAFLEADKISALASFLVKASKEDSPVSVERSFVVQVINACICLGLLEQAHDLLDEMRFSGIRVGSSIYSSLLKAYCKEGQHEDDITALLKDAQQAGIQLDASCYEDLIQSRASHSNTPGALHLFKELKNSNVLKSGHKEFQTLVQGSDENEAVLTTRLVEEVRSGHMVDHAVHDWNNVIHFFCKKRLMHDAHSALNKMRASGHVPNAQTFHSLITAYAAIGGKYVEVTDLWGEMKVLAGSSSMKFDQELLDSLLYCFVRGGFFLRAMEVIEMMEKSDMFIDKYKYKSLWLKYHRTLYKGKAPKVQTEAQLKRREAAIHFKKWIGLT

SEQ ID NO: 98158 - protein, 86 aa, Setaria italica
  Transcript Sequence Number=SeqID_32184
MRIRRRPQPSPQLGSDPTTSTSPQTPQNAARSRGWLDPGGGGDREAGKLLHAGADLAHKSGVARRLALPQEDNLVVDCGRSIGCTT

SEQ ID NO: 98159 - protein, 111 aa, Setaria italica
  Transcript Sequence Number=SeqID_32185
  Gene Ontology: Mol. function=acyltransferase activity; Cellular component=integral to membrane; Biological process=metabolic process
  Homolog annotation: Hit_ID=Q69R60; Match level="QueryCoverage=100%, HitCoverage=19%, E-value=3e-27, Identity=57%"; Hit description =Phospholipid/glycerol acyltransferase-like protein
SEYPRPLVFHDGRLVRRPEPLAFLAILLWVPLGVVLSVMRLLLGFLPHGAGLLIAAATGFRIRGGGLTGATGPAGRRRGTLFACNHQTLMDPVILSTVLRRKVTAVTYSLA

SEQ ID NO: 98160 - protein, 68 aa, Setaria italica
  Transcript Sequence Number=SeqID_32186
SIHPICVQYFQFQCTRHNFITYSQYPCRCGSGPSPFPYGPIKLFAIKKKVLFAQSIYKIDFSVWMDRC

SEQ ID NO: 98161 - protein, 214 aa, Setaria italica
  misc_feature (121)..(121): Xaa can be any naturally occurring amino acid
  Transcript Sequence Number=SeqID_32187
  Gene Ontology: Mol. function=translation initiation factor activity; Cellular component=intracellular; Biological process=translational initiation
  Homolog annotation: Hit_ID=Q69IM0; Match level="QueryCoverage=100%, HitCoverage=30%, E-value=4e-95, Identity=80%"; Hit description =Translation initiation factor IF-2
HFSDGAVGKLAQFYRSERPNHAARCVPSNHFIIRNFHAGVYMLAWSRKKEDVVGLKAPKKEKRVKRENRTQPPVEAPYVAPKPKIATKSPDKTVEIFDGMTLLDLSKRTGAYISTLQGILXDLGEKVESEFDSISIDLAELVAMELGVNTRRMHTGEGKNEPRPAVVTVMGHVDHGKTSLLDALRQTSVAAKEAGGITQHIGAFVVEMPSGASI

SEQ ID NO: 98162 - protein, 123 aa, Setaria italica
  misc_feature (117)..(117): Xaa can be any naturally occurring amino acid
  Transcript Sequence Number=SeqID_32188
VPNSRSECRKFIKIIQERVLDSDSGDIDTGGFALTGARKVGRQAVDGYSSFSPTESSPATSSLQMHRCDNSVAVGTIPKLADTDQSPFIQNSKNIQPVLKRNYSVREDAYGELRRVXPKINGS

SEQ ID NO: 98163 - protein, 108 aa, Setaria italica
  Transcript Sequence Number=SeqID_32189
  Subcellular localization annotation: CTP_CleavageSite=36; ConfidenceScore=5.30e-01
HKRASTNKSLDLPRRTSPLHLSSRLPRRPGSHGWRSCGEASACARDGRRLVVGAACRLRRGGDVRTRSLDDKKVNLLRPAETLISPSKHTLDLPGWHHHAAVPGLLSC

SEQ ID NO: 98164 - protein, 51 aa, Setaria italica
  Transcript Sequence Number=SeqID_32190
LTETNSKHSAQRTKFRLSVYYSLITGRAVYIQLQSLIIISSALVLTAIHGS

SEQ ID NO: 98165 - protein, 95 aa, Setaria italica
  Transcript Sequence Number=SeqID_32191
  Gene Ontology: Mol. function=hydrolase activity, acting on ester bonds; Biological process=lipid metabolic process
  Homolog annotation: Hit_ID=B6TLP8; Match level="QueryCoverage=98%, HitCoverage=24%, E-value=2e-18, Identity=43%"; Hit description=Alpha- L-fucosidase 2
GNDYGSTLFAFRPLSEVHALVPHIVDSIGRGVEKLIAEGAVDLVVPGTMPTGCFPMYLSMFPKPPGMYGGRTGCIKELNTLSWVHNAALQRRIEQ

SEQ ID NO: 98166 - protein, 108 aa, Setaria italica
  Transcript Sequence Number=SeqID_32192
  Gene Ontology: Mol. function=protein serine/threonine kinase activity; Biological process=protein amino acid phosphorylation
  Homolog annotation: Hit_ID=Q2L3C7; Match level="QueryCoverage=61%, HitCoverage=5%, E-value=4e-19, Identity=69%"; Hit description =Clavata-like kinase
  Pfam annotation: Domain name=LRRNT_2; Domain location=42-82; Score =49.8; E_value=1.1e-11; Accession=PF08263.4; Description=Leucine rich repeat N-terminal domain
  Subcellular localization annotation: CTP_CleavageSite=16; ConfidenceScore=5.05e-01
PRPSPTPSTPMPPRLRATIAARLLALLLCFSSPALLAPCHGVNEQGQALLRWKASTNATRGALDSWNAGDATPCRWLSVSCDARGDVVSLSIKSVDLGGALPSADLRP

SEQ ID NO: 98167 - protein, 408 aa, Setaria italica
  Transcript Sequence Number=SeqID_32193
  Gene Ontology: Mol. function=protein tyrosine kinase activity; Biological process=protein amino acid phosphorylation
  Homolog annotation: Hit_ID=Q2HVC0; Match level="QueryCoverage=85%, HitCoverage=43%, E-value=2e-88, Identity=49%"; Hit description =Protein kinase
  Pfam annotation: Domain name=LRR_1; Domain location=133-155; Score =9.8; E_value=4.1; Accession=PF00560.25; Description=Leucine Rich Repeat
  Pfam annotation: Domain name=LRR_1; Domain location=157-179; Score =10.0; E_value=3.8; Accession=PF00560.25; Description=Leucine Rich Repeat
  Pfam annotation: Domain name=LRR_1; Domain location=181-203; Score =13.2; E_value=0.9; Accession=PF00560.25; Description=Leucine Rich Repeat
  Pfam annotation: Domain name=LRR_1; Domain location=205-226; Score =13.6; E_value=0.77; Accession=PF00560.25; Description=Leucine Rich Repeat
  Pfam annotation: Domain name=LRR_1; Domain location=228-246; Score =6.8; E_value=15; Accession=PF00560.25; Description=Leucine Rich Repeat
  Pfam annotation: Domain name=LRR_1; Domain location=249-271; Score =6.5; E_value=17; Accession=PF00560.25; Description=Leucine Rich Repeat
  Pfam annotation: Domain name=LRR_1; Domain location=273-295; Score =10.2; E_value=3.4; Accession=PF00560.25; Description=Leucine Rich Repeat
  Pfam annotation: Domain name=LRR_1; Domain location=297-316; Score =8.5; E_value=7.2; Accession=PF00560.25; Description=Leucine Rich Repeat
  Pfam annotation: Domain name=LRR_1; Domain location=321-340; Score =11.4; E_value=2; Accession=PF00560.25; Description=Leucine Rich Repeat
  Pfam module annotation: Pfam domain module=LRR_1::LRR_1::LRR_1::LRR _1::LRR_1::LRR_1::LRR_1::LRR_1::LRR_1; Domain location=133-155::157 -179::181-203::205-226::228-246::249-271::273-295::297-316::321-340
MARGSCRHPLLIFLPLLLAMVPESTQLQSSQTWSLLKIQQLLNYPAVLSTWGNQTDFCYGGDYKTASAFVECYGDSVTQLHIIGPGGAPPLPKTFSIDAFFTTLTRLPDLRVLTLTGLGLWGPLPGKVSRLASLEIVNVSGNYLYGALPEGLSRLDNLQTFIADDNMLSGELPGWLGRLPSLAVLSLRNNSLQGPLPESVRDMGSLRSLVLASNNLTGGVPDLSALKNLQVVDLANNSLGPAFPRLGRKVASVVLSGNRFGDGLPGELASFYLLEHLDVSRNRFVGPFPPALLALPSIEYLSIAGNRFTGLLAANMSCGENLRFVDVSSNLLTGSLPSCLTGAAGPRKPAVAAASNCLSAAAAAGWQHPSLFCQNQALAVGIVPDQAHSKKSGAKAGLVAGIVAAALA

SEQ ID NO: 98168 - protein, 446 aa, Setaria italica
  misc_feature (14)..(14): Xaa can be any naturally occurring amino acid
  Transcript Sequence Number=SeqID_32194
  Gene Ontology: Mol. function=pyridoxal phosphate binding; Cellular component=mitochondrion; Biological process=metabolic process
  Homolog annotation: Hit_ID=B9T178; Match level="QueryCoverage=93%, HitCoverage=91%, E-value=0.0, Identity=77%"; Hit description =Cysteine desulfurylase, putative
  Pfam annotation: Domain name=Aminotran_1_2; Domain location=64-415; Score=-103.4; E_value=0.045; Accession=PF00155.13; Description =Aminotransferase class I and II
  Pfam annotation: Domain name=Aminotran_5; Domain location=48-411; Score=414.6; E_value=1.7e-121; Accession=PF00266.11; Description =Aminotransferase class-V
  Pfam annotation: Domain name=Beta_elim_lyase; Domain location=82-339; Score=-55.3; E_value=1.5e-06; Accession=PF01212.13; Description=Beta -eliminating lyase
  Pfam annotation: Domain name=DegT_DnrJ_EryC1; Domain location=92-417; Score=-206.1; E_value=0.052; Accession=PF01041.9; Description =DegTDnrJEryC1StrS aminotransferase family
  Pfam module annotation: Pfam domain module=Aminotran_1_2::Aminotran _5::Beta_elim_lyase::DegT_DnrJ_EryC1; Domain location=64-415::48 -411::82-339::92-417
RLLPLFLRRGAPPXRALSTAAAPAAAFPSEDEEESVTVKGVRISGRPLYMDMQATTPVDPRVLDAMLPFNLSRYGNPHSRTHLYGWESDAAVEEARARVASLVGADPREIFFTSGATECNNIAVKGVMRFYRDRRRHVITTQTEHKCVLDSCRYLQQEGFEVTYLPVRSDGLVDLAQLEDAIRPDTGLVSVMAVNNEIGVVQPLEEIGRICKEKGVPFHTDAAQALGKIPIDVNRMGIGLMSLSGHKIYGPKGVGALYLRRRPRIRVEPQMSGGGQERGIRSGTVPTPLVVGFGAACEIAAQEMDYDHRWVNALQQRLLDGIRAQVDEVVINGSMEHRYPGNLNLSFAYVEGESLLMGLKEVAVSSGSACTSASLEPSYVLRALGVEEDMAHTSIRFGIGRFTTEEEVDRAIELTVRQVKKLRDMSPLYELAKAGIDLKSIEWSQH

SEQ ID NO: 98169 - protein, 124 aa, Setaria italica
  Transcript Sequence Number=SeqID_32195
  Gene Ontology: Mol. function=protein binding; Biological process =protein metabolic process
  Homolog annotation: Hit_ID=Q6ER93; Match level="QueryCoverage=71%, HitCoverage=10%, E-value=1e-16, Identity=52%"; Hit description=Heat shock protein-related-like
LVVEDLKWAAEFWAGHVQSGRRGYYCSVEHVVTELRALACGGGGLCWLLGFGTYQGYMKCRAGQPSLESLLGLQTLTVPAGSLALSLTCAFDDSALGTVNQSMKAGPDTNGNGRRLAGRFGGRP

SEQ ID NO: 98170 - protein, 67 aa, Setaria italica
  Transcript Sequence Number=SeqID_32196
TFLAASFDRVHKFIIIVRLAANHKFIKNDIHELEGQQDIYLRGFLPGKYKAPLGDAVSYKLQHNHGY

SEQ ID NO: 98171 - protein, 47 aa, Setaria italica
  Transcript Sequence Number=SeqID_32197
IVLFLLLYNFYFFLFIWFLLWLETMIPQLCNGITIPQLDVFCGFSLS

SEQ ID NO: 98172 - protein, 73 aa, Setaria italica
  Transcript Sequence Number=SeqID_32198
LLVRVREIPGAISLSAKLEPSSEVLCSFCFEEDPNPAIPEAIRLRSSNNWPFLDAIAHSAICSSPNPVSSCNP

SEQ ID NO: 98173 - protein, 130 aa, Setaria italica
  Transcript Sequence Number=SeqID_32199
  Gene Ontology: Mol. function=cation transmembrane transporter activity; Cellular component=membrane; Biological process=cation transport
  Homolog annotation: Hit_ID=B9RUG9; Match level="QueryCoverage=61%, HitCoverage=16%, E-value=1e-21, Identity=63%"; Hit description =Cation efflux protein/ zinc transporter, putative
HGHEHEHHHHDHSGHCHQSGDHAHQNCSSIGVDQQLLEIPLSNMHSHGAEGHSSKAVLSSSESGNHKKSEHRHHIDHNMEGIFLHVLADTMGSVGVVISTLLIKYKGWLIADPICSVFNSQSKVSSVLPI

SEQ ID NO: 98174 - protein, 344 aa, Setaria italica
  misc_feature (3)..(3): Xaa can be any naturally occurring amino acid
  misc_feature (89)..(89): Xaa can be any naturally occurring amino acid
  misc_feature (263)..(263): Xaa can be any naturally occurring amino acid
  Transcript Sequence Number=SeqID_32200
  Gene Ontology: Mol. function=serine-type endopeptidase activity; Biological process=negative regulation of catalytic activity
  Homolog annotation: Hit_ID=Q9ZSP5; Match level="QueryCoverage=99%, HitCoverage=45%, E-value=1e-117, Identity=59%"; Hit description =Subtilisin-like protease
  Pfam annotation: Domain name=Inhibitor_I9; Domain location=9-70; Score=49.3; E_value=1.5e-11; Accession=PF05922.8; Description =Peptidase inhibitor I9
  Pfam annotation: Domain name=Peptidase_S8; Domain location=81-344; Score=-82.8; E_value=0.028; Accession=PF00082.14; Description =Subtilase family
  Pfam module annotation: Pfam domain module=Inhibitor_I9::Peptidase _S8; Domain location=9-70::81-344
ALXRDAADAHYELLAGVLGGDKEKARDAIFYSYTKHINGFAANLDAATAAEIARQPGVISVFPNRGRKLHTTRSWQFLGLAGPVASPTXGAWKKAKYGADTIIGNFDTGVWPESESFRDDGLGPVPSQWKGACDKGQDDKFSCNRKLIGARYFNKGYASAAGILNASMNTPRDMDGHGTHTLSTAAGSPVPGASVFGFGNGTASGGSPHARVAAYRVCFPPINGSECFDADILAAFDAAIHDGVHVLSLSLGGDPSNYFDDGXAIGSFHAVRRGIAVVCSAGNSGPGLGTASNLAPWLFTTGASTMDREFPSYIVFNHTKAKGQSLSMTNLPEKSYPLIDSAKA

SEQ ID NO: 98175 - protein, 125 aa, Setaria italica
  misc_feature (69)..(69): Xaa can be any naturally occurring amino acid
  Transcript Sequence Number=SeqID_32201
MGYMARSYGQAFHSFAWLQAVQKKPLVAHPALEADEDEVEHAVDASDGEKEEGEIEEGEAVEGSSSPPXAQPEIIDLDSDVPEKSESAAAEGSGSAAPAVATQEVELDYDQRVRSILEELEMISI

SEQ ID NO: 98176 - protein, 80 aa, Setaria italica
  Transcript Sequence Number=SeqID_32202
  Gene Ontology: Cellular component=plasma membrane
  Homolog annotation: Hit_ID=B9SX25; Match level="QueryCoverage=81%, HitCoverage=11%, E-value=2e-15, Identity=57%"; Hit description=S -adenosylmethionine-dependent methyltransferase, putative
MSSAKLAGQDPVRGRGEWLVFTKGKGVRNYVDQLARVVPLRGGVVRTALDIGCGVASFGDYLLNYGVLTMSIARGAQAQL

SEQ ID NO: 98177 - protein, 83 aa, Setaria italica
  Transcript Sequence Number=SeqID_32203
  Gene Ontology: Mol. function=DNA binding; Cellular component =chromosome; Biological process=nucleosome assembly
  Homolog annotation: Hit_ID=Q6T367; Match level="QueryCoverage=85%, HitCoverage=42%, E-value=1e-24, Identity=78%"; Hit description =Histone H3
PGDGAAAGGTPGRQQQRVKKPHRWRPGTVALREIRKYQKSTELLIPFAPFARLVREITDFYSKGKVTRWTPQALLAMQEAAEF

SEQ ID NO: 98178 - protein, 48 aa, Setaria italica
  Transcript Sequence Number=SeqID_32204
HRLKSDLRFILVCPFVSVHYYATLCVPGKLGFVRPIILGCSVHYHKPC

SEQ ID NO: 98179 - protein, 76 aa, Setaria italica
  Transcript Sequence Number=SeqID_32205
KDSGGGKLDFGVGLGAGLVSGAISGILAGDMVSEVAAYNYGYRAGLADGGAGATVYKKNSHYGVPQGKVEPNRTMV

SEQ ID NO: 98180 - protein, 116 aa, Setaria italica
  misc_feature (44)..(44): Xaa can be any naturally occurring amino acid
  Transcript Sequence Number=SeqID_32206
  Homolog annotation: Hit_ID=B6T5F9; Match level="QueryCoverage=59%, HitCoverage=20%, E-value=6e-28, Identity=79%"; Hit description =Histone mRNA exonuclease 1
HSLWKTEQGGSLNSAAFVTCGNWDLKTKIPEQCKVSKIKLPTYXMEWINLKDIYLNFYSRRVTKLHPMLLFMRGSRLDNFVQFIFKLKCVPYRLLPPFSFDRAICKTKIFSFDSPI

SEQ ID NO: 98181 - protein, 326 aa, Setaria italica
  Transcript Sequence Number=SeqID_32207
  Gene Ontology: Mol. function=3'-5' exonuclease activity; Cellular component=intracellular; Biological process=gene silencing by RNA
  Homolog annotation: Hit_ID=B6T5F9; Match level="QueryCoverage=84%, HitCoverage=83%, E-value=1e-152, Identity=89%"; Hit description =Histone mRNA exonuclease 1
  Pfam annotation: Domain name=Exonuc_X-T; Domain location=119-294; Score=30.5; E_value=6.9e-06; Accession=PF00929.16; Description =Exonuclease
  Subcellular localization annotation: CTP_CleavageSite=35; ConfidenceScore=5.79e-01
MALARVPPSSAARLLPSSLLQSFLRPFSSSASPLRSSRRRSSPIAAAFSHAVREGQVMEAPIPISRRPWKPTCLYYTQGKCTMMNDAMHLEKFSHNLMMDLPVNASAADKVKPQKLDYLLILDLEGKVEILEFPVVMIDAQSMEFIDSFHRFVRPTAMSEQRITEYIEGKYGKFGVDRVWHDTAIPFKEVLQEFEDWIGNHSLWKTEQGGSLNSAAFVTCGNWDLKTKIPEQCKVSKIKLPTYFMEWINLKDIYLNFYSRRATGMMTMMRELQMPIVGSHHLGIDDSKNIARVVQRMLADGAVMQITAKRQSATGDVKFLFKDRIR

SEQ ID NO: 98182 - protein, 71 aa, Setaria italica
  misc_feature (49)..(49): Xaa can be any naturally occurring amino acid
  misc_feature (53)..(53): Xaa can be any naturally occurring amino acid
  Transcript Sequence Number=SeqID_32208
MGGLCSKGSAVDKSPSDTTLGPGRVVDHHDRLVVKEEKKAVVGEAAAKXMQEXQHQQQQLPVSVSQTAVPG

SEQ ID NO: 98183 - protein, 62 aa, Setaria italica
  misc_feature (29)..(29): Xaa can be any naturally occurring amino acid
  Transcript Sequence Number=SeqID_32209
SCICREEIQLKRIELLFVTVVANTIGWSXVDQTLEYHVKSYVKFATPMQMLRCELEWMEMGT

SEQ ID NO: 98184 - protein, 88 aa, Setaria italica
  misc_feature (43)..(43): Xaa can be any naturally occurring amino acid
  Transcript Sequence Number=SeqID_32210
MANDGSPGGRAGRRCGSLTRVDLLTLLLAAALCSASYCLGIWXNKTDGAADSRVLGPSAALAVGAASSCGGDADEPLDFETHHAAEHR

SEQ ID NO: 98185 - protein, 30 aa, Setaria italica
  Transcript Sequence Number=SeqID_32211
KLDSPDLQCISTYYSSKYAAKIFAVLDIVP

SEQ ID NO: 98186 - protein, 609 aa, Setaria italica
  misc_feature (575)..(575): Xaa can be any naturally occurring amino acid
  misc_feature (587)..(587): Xaa can be any naturally occurring amino acid
  Transcript Sequence Number=SeqID_32212
  Gene Ontology: Biological process=axonogenesis
  Homolog annotation: Hit_ID=Q01L33; Match level="QueryCoverage=99%, HitCoverage=57%, E-value=0.0, Identity=76%"; Hit description =H0209H04.5 protein
  Pfam annotation: Domain name=Strumpellin; Domain location=1-609; Score=266.6; E_value=5.8e-77; Accession=PF10266.1; Description =Hereditary spastic paraplegia protein
LDHVLENNCACQLLVESMALFGCMILLMEHKIGGLLREKLLVAHLRYDRCFNYPNLERICELCRRHVPTPATSATFGSSPFSSDIISIQKPEDLLRRFPFPEPVVDAVITCLRNGDVYNNIRFYPDPQHRTAALSLQGGHLYVMLFYSDDLLHRGLVMREIVDRFFKDNWVVPIFLHFSVDLLVSWDAYKEAKLSLVSCLSPTSIRDISLHHYTKVTHFLADLDIHIHAINKEYVLDNSLSLLSVIRECNFALRWLLLHRMTSDKKARDLVISVGSSQQVDEGNLLQLLLKTARLEYEVKQLNVELLKTRESMWYEKRHDALECIKDLSQNYLGTWAASCKFKNKTLKDWLEHLSSELISLNYTSIGSCGRTIHRVLSTLKDIEMLHQIKESVQIKQGFSKIQKNLHDMIKILNLNQEAINILSVITDAKYAWVYLTLFETLLKKNISQDPSETIFLHTVFLKFQSWLSAPLQRTKQCESPDLQCISTYYSSKYAAKIFAVLDIVPEILLKISTAVDYVNAEQPTHPVNRINQEALQELMQMDQQLCQARQAAKLCIISEGLGNMSNNFDDLMNXGGWLKQAIKKDXSDSARKKLKYLSSYGDMESNLN

SEQ ID NO: 98187 - protein, 61 aa, Setaria italica
  Transcript Sequence Number=SeqID_32213
KAKPCLYHHDDIERLPIEHASGPRMVTLFATNPRGSPNGKQLETTTRGKDEWMMERGRRSV

SEQ ID NO: 98188 - protein, 115 aa, Setaria italica
  Transcript Sequence Number=SeqID_32214
  Gene Ontology: Mol. function=transporter activity; Cellular component= integral to membrane; Biological process=sodium ion transport
  Homolog annotation: Hit_ID=Q9FHJ8; Match level="QueryCoverage=51%, HitCoverage=8%, E-value=3e-12, Identity=61%"; Hit description=Urea active transporter-like protein
RLELLITYLDRLGRRRSRSLGHGSAVIIFLPLVESWVTICKVCEGMFTNDAVYERLDDMNLRLKAIMGAMPEAEERYQEMQKEKGIGAMEMVHHPASGTHPSTVANDDGDDLSHA

SEQ ID NO: 98189 - protein, 168 aa, Setaria italica
  Transcript Sequence Number=SeqID_32215
  Subcellular localization annotation: CTP_CleavageSite=32; ConfidenceScore=5.06e-01
RNMSTAPRRRSPVGGMILKAADEVAGRRPRTACSRSGCSSSDTGAPYETSNPYRPAGFARSRRPDPRGCTWPAPGGRPACSHPNRRDVARRSMALGRAPPSRTNTYGRRRATESTSAAAWNRYPPAAGRRGVQWCHLRRRRSANGRRRGPRSTSRTIQLLRTFLLLYK

SEQ ID NO: 98190 - protein, 45 aa, Setaria italica
  Transcript Sequence Number=SeqID_32216
SSCQIIVHKNAISFALYQFVSDIQEYSLSSKQQLRHRCRFTCLHN

SEQ ID NO: 98191 - protein, 61 aa, Setaria italica
  Transcript Sequence Number=SeqID_32217
MLVLDLGVWFIPLTLVLVPCRRIVLLLSRLEELRRIMARPRLATADIWTRFATLNSMAFMV

SEQ ID NO: 98192 - protein, 226 aa, Setaria italica
  Transcript Sequence Number=SeqID_32218
  Gene Ontology: Cellular component=cell wall
  Homolog annotation: Hit_ID=B9RSW6; Match level="QueryCoverage=93%, HitCoverage=23%, E-value=1e-48, Identity=51%"; Hit description =Inosine-uridine preferring nucleoside hydrolase, putative
NLANISLSDMDASSVIERVYVVGGHIRDSDHDKGNVFTVPSNRYAEFNMFLDPLAAKTVLESRLDITLIPLNVQRKVASFEDVLAALEQRTQHTPESRFVHGLISMLQELQRKQKLYHHMDIFLGEVLGAVYMVQGSDLEPSVEAKAVSIVANTTESTDGQILVRRKSANVLKILYNLNNGVYYNHLANSLVNNKQSAIVGSFEEQKAIWSRPQKQFMADITKDMK

SEQ ID NO: 98193 - protein, 181 aa, Setaria italica
  misc_feature (160)..(160): Xaa can be any naturally occurring amino acid
  Transcript Sequence Number=SeqID_32219
  Gene Ontology: Mol. function=oxidoreductase activity; Biological process=oxidation reduction
  Homolog annotation: Hit_ID=B9SPD4; Match level="QueryCoverage=98%, HitCoverage=70%, E-value=3e-69, Identity=69%"; Hit description=Short- chain dehydrogenase, putative
  Pfam annotation: Domain name=NAD_binding_4; Domain location=1-172; Score=-105.5; E_value=0.044; Accession=PF07993.4; Description=Male sterility protein
  Pfam annotation: Domain name=adh_short; Domain location=3-123; Score=- 20.9; E_value=0.00033; Accession=PF00106.17; Description=short chain dehydrogenase
  Pfam module annotation: Pfam domain module=NAD_binding_4::adh_short; Domain location=1-172::3-123
APSRHFLTVADVRSDSSVAELAKAAVERKQVPDVIVNNAGTINKNNKTWNVPAEDFDMVVDTNIKGTANVLRHFVPLMIEKRHGIIVNLSSGWGRSAAAEVAPYCASKWAIEGLTRSLAKELPPGLAAIALSPGVVNTDMLTSCFGSSAALYQTTETWAXPKAATMILSLSLDDNGASLTV

SEQ ID NO: 98194 - protein, 150 aa, Setaria italica
  Transcript Sequence Number=SeqID_32220
MDKLVQFGRKAWFIVRVMSGYEERRIRSYRLQLQKRLEMAQARKEELQKQPEKVILSEVRQVVQQMQALNQHLEEAETAIDEYFKPIDKNAKIITDMQMEKEEKQMKEMAKVMQEQIKMQREIAMKRAEAANLESKDAQVSEKVAEIPPK

SEQ ID NO: 98195 - protein, 707 aa, Setaria italica
  misc_feature (92)..(92): Xaa can be any naturally occurring amino acid
  misc_feature (158)..(158): Xaa can be any naturally occurring amino acid
  misc_feature (358)..(358): Xaa can be any naturally occurring amino acid
  Transcript Sequence Number=SeqID_32221
  Gene Ontology: Mol. function=transferase activity; Cellular component= endoplasmic reticulum membrane; Biological process=heparan sulfate proteoglycan biosynthetic process, polysaccharide chain biosynthetic process
  Homolog annotation: Hit_ID=B9T3V5; Match level="QueryCoverage=96%, HitCoverage=97%, E-value=0.0, Identity=58%"; Hit description =Transferase, transferring glycosyl groups, putative
  Pfam annotation: Domain name=Glyco_transf_64; Domain location=462 -698; Score=370.4; E_value=3.3e-108; Accession=PF09258.2; Description= Glycosyl transferase family 64 domain
VLAALAYSRAAFPHFPHPPATRRCRPDAEGSWSAGVFLGDSPFSLKPIEHWGISSGGGAAWPVANPVVTCADLEGAGFPSSFVANPFLFIQXGDAIYMFFEMKDPVTSQGNIAAAISKDAGATWQQLGVVLDEEWHLSYPYVFSYENKTYMMPESSKXGNLMLYYAVDFPLKWKLEKVLLERPLVDAVIVNFQGTYWLLGSDISSYGLKQRGLCIWYSSSPLGPWNPHKQNPVHNNNDNRPSARNGGRPFIYNGNLYRIGKDCGGGSCYSIKVFKVEVLTVNLYKEVAVPFVLDKPLKGRNAWDGARSHHLDIQQLPLGQLWIGVMDGDKVPSGDSVHRLTIGYMFYGVASIVVLLLXRLIGAIKCILPLRWYLPHTEKRSDTVNIEKQVFLCHKFGLLICNVNKLGSLIGGRINYRAGKGRIYIAVIILILVILTCFGTHYIFGGNGAEDPYPVKGSYSQFTLLTMTYDARLWNLKMFVEHYSKCASVREIVVVWNKGRPPSQGELKSMVPVRIRVENKNTLNNRFNIDKEIKTRAVMELDDDIMMTCDDLERGFKVWREHPDRIVGYYPRLAEGRPLEYRNERYVRQQGGYNIILTGAAFMDHELAFKRYWSKEAEIGRQIVDNFFNCEDVLLNFLFANASSTSTVEYVKPAWAIDMSKFSGVAISRNTQAHYHIRSKCLSIFSGIYGNLTLKRFFNSRGDGWDV

SEQ ID NO: 98196 - protein, 248 aa, Setaria italica
  Transcript Sequence Number=SeqID_32222
  Homolog annotation: Hit_ID=B6TMS3; Match level="QueryCoverage=100%, HitCoverage=100%, E-value=3e-94, Identity=77%"; Hit description=HPP
  Pfam annotation: Domain name=HPP; Domain location=114-245; Score =190.5; E_value=4.7e-54; Accession=PF04982.5; Description=HPP family
  Subcellular localization annotation: CTP_CleavageSite=76; ConfidenceScore=5.00e-01
MALLPCQSLPGIGCGSIALARARVQQCLAAASHAPFLPPLLRANGGGRTGRSPASVKAGNAIGFGRRRRRDLRVVVAEASAAAAAKVTPASPGGVSISDVLWPSAGAFLAMAVLGKMDQMVAFKGVSLTIAPLGAVCCVLFSAPDSPAAKKYNMFVAQIGCAALGVLALSLFGPGWLARGAALSACIAFMTITGASHPPAASLPLLFIDGPKFHNLQFWYALFPGAAGCAVLCLIQEVVVYLKKNFKF

SEQ ID NO: 98197 - protein, 831 aa, Setaria italica
  Transcript Sequence Number=SeqID_32223
  Homolog annotation: Hit_ID=UPI0000162426; Match level="QueryCoverage =87%, HitCoverage=79%, E-value=1e-127, Identity=39%"; Hit description= forkhead-associated domain-containing protein / FHA domain-containing protein
  Pfam annotation: Domain name=DUF827; Domain location=244-430; Score= -116.1; E_value=0.099; Accession=PF05701.3; Description=Plant protein of unknown function (DUF827)
  Pfam annotation: Domain name=FHA; Domain location=46-122; Score=56.8; E_value=8e-14; Accession=PF00498.18; Description=FHA domain
  Pfam annotation: Domain name=Filament; Domain location=178-453; Score= -193.6; E_value=0.079; Accession=PF00038.13; Description=Intermediate filament protein
  Pfam module annotation: Pfam domain module=DUF827::FHA::Filament; Domain location=244-430::46-122::178-453
RAVARKFADQPIQETEPGVWAVLTAISKKARLRPQGINILLSGEEHYLGRGPQRRFQISDPQISTRHCRIYKDTVLGELNRHEPVPVFIKDTSSNGTYINWKRLKKSSSPVKLNHGDVISFISVHKDSSYSFVYREVNAISCVENGATILKRKSEEGGSGSKRLKGLGIGSLDGPVSLDDVRRLEKSNADLREQLEAHVVTIETLRTEIKVAQAQHGKELEELRETTSTSYLDQTKSLRLALEEKQKQLDSLSTSNTELQNSIKDLDERLSASKQSRADAGEIISSQKAIICELEGQLSEERNLRREERDKAVQDMKSALHKVQAEAQEEIKRQAESYLRQQREQKEVIGKLQESEKETRLLVETLRSKLEDARDNLVTSEKKVRELEARLQDEQLVSANNQKKSDNLETELRKLKKELENEKAAREEAWAKVSALELEIAATIRDLSIEKQRYQGARERIILRETQLRAFYSTTEEISSLFAKQQEQLKAMQRTLEDEENYENTLMSVDLNKVPLATDDAHMKSVGCSKNTVEAPSASTQNTQVSEHSSSDEDANMTEQHAGGTAEGGSTQGLECSSPERSEDRLRSDFHGNPVPTAPEREVTDTEQVPETESQAGNVGCDDQRCDNMGETMPLEDEAQPQENEEAKDGDQPHANEDPVPIPKDGIGHCSEDKLEYDCSESKREDAHAGAIGTADLLTSEVAGSWAVETAPSVNGENESPRSVEDAGDAVGQDEEDGGSMAADALLTLVNSEGQAAGSQNNAEHAVSKITDHHRVLSAMIEIVDPEFKKQMSRSGGGNDEPMSDAETDEGSEEVDTDDDSEEPMVEDSVG

SEQ ID NO: 98198 - protein, 161 aa, Setaria italica
  misc_feature (97)..(97): Xaa can be any naturally occurring amino acid
  Transcript Sequence Number=SeqID_32224
  Subcellular localization annotation: CTP_CleavageSite=36; ConfidenceScore=5.46e-01
LPVHPLATSAVGGGGFLAVLPRSLRERRGRTCRKVVSFSSSGKGGEESAAPGETPEEARRRLAELDALLEGLVEPKMRPPMPPPPPDLYLDRDMITXRGSTDELPEFSPTYVAFSTLALVILTIFTNVMFNLYIKPSVDGVDQPVRIQRVPLVNPADRQFE

SEQ ID NO: 98199 - protein, 376 aa, Setaria italica
  Transcript Sequence Number=SeqID_32225
  Gene Ontology: Mol. function=nucleic acid binding
  Homolog annotation: Hit_ID=Q9FFD3; Match level="QueryCoverage=99%, HitCoverage=62%, E-value=1e-149, Identity=65%"; Hit description =Mutator-like transposase-like protein
  Pfam annotation: Domain name=MULE; Domain location=29-129; Score =80.2; E_value=7.4e-21; Accession=PF10551.1; Description=MULE transposase domain
  Pfam annotation: Domain name=SWIM; Domain location=277-309; Score =42.8; E_value=1.3e-09; Accession=PF04434.9; Description=SWIM zinc finger
  Pfam module annotation: Pfam domain module=MULE::SWIM; Domain location=29-129::277-309
GTGPGNAFQRLFVSFRASIYGFLNGCRPLLEIDKADLKGKYLGTLLCASAVDADHMMFPLAFGIVDSESDDNWRWFVSELRKTLGVNTDKMPILTILSERNPQVVKAVEDNFPTAFHGFCLRYVSENFRDEFKNPKLLNLFWSAVYTLTAAEFDAKVNEMMQVQDVMPWLQRFPPNLWAVAFFEGIRYGHFSLGITEILYNLSLECHELPIVQTIEHIRHQLTCWFAERQNLAQSYNSVLVPSAEKLISEAITDSRCYQVLRANKVEFEIVSSERTNIVDTQARFCSCRRWQIYGIPCAHAAAALLSCGEDPRLYAHDCFSVMKYRETYSQPIYPIPDRSHWNSSSSGLQGVVSRADVMLSPPNIRRPPGRPKMKI

SEQ ID NO: 98200 - protein, 170 aa, Setaria italica
  misc_feature (87)..(87): Xaa can be any naturally occurring amino acid
  Transcript Sequence Number=SeqID_32226
  Homolog annotation: Hit_ID=Q84S70; Match level="QueryCoverage=98%, HitCoverage=22%, E-value=2e-40, Identity=56%"; Hit description=Kelch- like protein
KGDVDAEHASSGDESSNGFDDLDCGDTPPEREEHELSDQAVEMKQQQHSDKQGKVLSFNWVLEGHAALPAQQWNPYLYANVTETEEXDAYSCKYAQEDKCAILDGHSNLPETLDAEVNQLSLGHSNLLVQLLDSESCAEAKLIDVVKELSGRIEMMERKQAWSNREVQHL

SEQ ID NO: 98201 - protein, 144 aa, Setaria italica
  Transcript Sequence Number=SeqID_32227
NADLRPCTHVTRVHGLMAPMAEPPYRSTCTRLQRCRAYAADAAINWQSLVVYSRRRQISLLVCVRSYLCCASHWRQCDVTDAVAQQCPNGAKRQAQNCEPPYGRTYLCFNIFFLSTARELYHCVQYTFASWARETASICSYSSI

SEQ ID NO: 98202 - protein, 397 aa, Setaria italica
  Transcript Sequence Number=SeqID_32228
  Gene Ontology: Cellular component=vacuole
  Homolog annotation: Hit_ID=A8Y5V3; Match level="QueryCoverage=80%, HitCoverage=87%, E-value=1e-126, Identity=64%"; Hit description =Alpha galactosidase
  Pfam annotation: Domain name=DUF231; Domain location=240-395; Score =270.2; E_value=4.6e-78; Accession=PF03005.7; Description=Arabidopsis proteins of unknown function
  Pfam annotation: Domain name=GRP; Domain location=8-75; Score=-29.7; E_value=0.096; Accession=PF07172.3; Description=Glycine rich protein family
  Pfam module annotation: Pfam domain module=DUF231::GRP; Domain location=240-395::8-75
MYARNVRARSEICVFLPLSAAVACSLLRACGAAAASTGTLGLRHHKPAKKHNSTRHGGGRPRGGGGGGAGSPGTGMAACNLFQGSWVYDDSLPMYDTAGCPFVEPEFDCQKYGRPDKMYLKYRWRPASCELPRFNGQDFLSRWKGKKILFVGDSLSLNQWESLACMLHAAAPASKVAYSRGNPVSTITFQDYGLSVAYCRSTYLVDIVEESVGRVLKLDSITGGAWLGADVLVFNTWHWWTHTGKDQPWDYVQDGGQVMKDMDRLTAFSKGMTTWARWVDSNVDTSKTKVYFQGISPTHYNGAEWGEGSRNCAQQTQPIAGSAYPAGPVPAQAAVRAALSGMSKPVYLLDVTLLSQLRRDGHPSAYSGGHPGNDCSHWCLAGVPDTWNQILYASLLA

SEQ ID NO: 98203 - protein, 82 aa, Setaria italica
  misc_feature (12)..(12): Xaa can be any naturally occurring amino acid
  Transcript Sequence Number=SeqID_32229
  Homolog annotation: Hit_ID=B6TWP6; Match level="QueryCoverage=98%, HitCoverage=25%, E-value=4e-14, Identity=52%"; Hit description=PB1 domain containing protein
RYVSSSPRHAGXLQNSFHHYQHQYAAAPVAVPHHAGRYDARGYVRVGNYLAPVAPPARPVSRGGLAPHSEMVTPKKSAIVWD

SEQ ID NO: 98204 - protein, 74 aa, Setaria italica
  misc_feature (51)..(51): Xaa can be any naturally occurring amino acid
  Transcript Sequence Number=SeqID_32230
  Gene Ontology: Mol. function=nucleic acid binding; Biological process= transposition, DNA-mediated
  Homolog annotation: Hit_ID=Q9SR14; Match level="QueryCoverage=98%, HitCoverage=9%, E-value=2e-10, Identity=39%"; Hit description =Mutator-like transposase
  Pfam annotation: Domain name=MuDR; Domain location=1-69; Score=75.4; E_value=2.1e-19; Accession=PF03108.7; Description=MuDR family transposase
VFLTMEDFRMALRQHGINKGFQVHKVKTDKTRYRAECKATGCPWRIVARKXPGLPAVVISMMPEEHNCVSTSNL

SEQ ID NO: 98205 - protein, 53 aa, Setaria italica
  Transcript Sequence Number=SeqID_32231
VCRLMCMPLHFTVFFLAPNSVKQCFDSQMAEWEQVLLHSSARQPQIVLSFLAL

SEQ ID NO: 98206 - protein, 86 aa, Setaria italica
  Transcript Sequence Number=SeqID_32232
  Gene Ontology: Mol. function=ATPase activity, coupled to transmembrane movement of substances; Cellular component=integral to membrane; Biological process=transport
  Homolog annotation: Hit_ID=Q8RVT7; Match level="QueryCoverage=98%, HitCoverage=58%, E-value=2e-34, Identity=68%"; Hit description =Multidrug resistance protein 1 homolog
MQTVALVGESGSGKSTIIALLERFYDPDSGTISLDGAELKKLKLSWLRDQMGLVSQEPVLFNDTIHANIAYGKQGEVNEEEIIAAA

SEQ ID NO: 98207 - protein, 750 aa, Setaria italica
  misc_feature (26)..(26): Xaa can be any naturally occurring amino acid
  Transcript Sequence Number=SeqID_32233
  Gene Ontology: Mol. function=ATPase activity, coupled to transmembrane movement of substances; Cellular component=integral to membrane; Biological process=transport
  Homolog annotation: Hit_ID=Q7FMW3; Match level="QueryCoverage=99%, HitCoverage=98%, E-value=0.0, Identity=52%"; Hit description=MDR -like ABC transporter
  Pfam annotation: Domain name=ABC_membrane; Domain location=202-477; Score=154.0; E_value=4.6e-43; Accession=PF00664.15; Description=ABC transporter transmembrane region
  Pfam annotation: Domain name=ABC_tran; Domain location=552-737; Score= 220.7; E_value=3.9e-63; Accession=PF00005.19; Description=ABC transporter
  Pfam annotation: Domain name=SMC_N; Domain location=516-741; Score= -121.1; E_value=0.011; Accession=PF02463.11; Description=RecFRecNSMC N terminal domain
  Pfam module annotation: Pfam domain module=ABC_membrane::ABC _tran::SMC_N; Domain location=202-477::552-737::516-741
MVGQRGAQLSGGEKQRIAIARAILKXKILLLDEATSALDVESERVVQEALNRIMVGRTTLIVAHRLSTIRSADCIAVVHQGKVVERGVHDELIKDPDGAYSQLIRLQQAHTKEMHGVPNTEGSGSIYKSRSLSLEQSIARDSPRNRGQHSFKNSNGLSGSDEPNRQVITDRQEHEESGDSKVPKKAPIRRLFKLNKPEAPVLLLAVIAAFVHGLLFPSFSIMMSGGIRTFYYPPHQLRKDSRFWALMCLLFAVISLISIQLEYFLFGMAGGKLIQRVRSLTFQSIVHQEVAWFDDPSNSSGALGARLYIDALNIRRLVGDNLAILVQCIVTVIAGFSIAFASDWKLTLIVICVIPVVGSQNYIQVKFLKGFSEDAKVVSEDASQVVTEAIGSIRTVASFCAEKRVITSYTQKCEASMKQGIRSGTVGGLGFSFSNLMMYLAYALCFYVGALFVHEGKSTFKDVFRVYFALIFTAFGVSQTSGMATDSTKAQESTVSILAIIDRKPKINSISDEGVMLEKVDGNLDFRHVNFKYPFRPDVQVLSDFTLGIPARKTVALVGESGSGKSTIIALLERFYDPDSGTISLDGAELKKLKLSWLRDQMGLVSQEPVLFNDTIHANIAYGKQGEVNEEEIIAAAKAANAHEFISSLPQGYSTTVGERGTQLSGGQKQRVAIARAILKDPRILLLDEATSALDAEAERIVQDALDQVMVSRTTIVVAHRLSTVKGADTIAVIKDGKVAEKGKHESLVG

SEQ ID NO: 98208 - protein, 152 aa, Setaria italica
  misc_feature (22)..(22): Xaa can be any naturally occurring amino acid
  Transcript Sequence Number=SeqID_32234
  Gene Ontology: Mol. function=lipid binding; Cellular component=plasma membrane
  Homolog annotation: Hit_ID=B6SYE1; Match level="QueryCoverage=91%, HitCoverage=26%, E-value=2e-47, Identity=66%"; Hit description=Lipid binding protein
ALYFKAGLLQRMVDKIPDQFFXNTASWRFLVPQLYRKYPDDSMLLNISATSPPSVRISVGRIDATVDLDVTVNVLDFGKIVPVACMSVSVAVSGAAAVSGNNLGGRVDLDYFSFTLKWSKVGKLHTVLVQVILLSYMFVLSVCFPILSPRGR

SEQ ID NO: 98209 - protein, 285 aa, Setaria italica
  Transcript Sequence Number=SeqID_32235
  Gene Ontology: Mol. function=lipid binding; Cellular component=plasma membrane
  Homolog annotation: Hit_ID=B6SYE1; Match level="QueryCoverage=97%, HitCoverage=50%, E-value=1e-115, Identity=76%"; Hit description =Lipid binding protein
  Pfam annotation: Domain name=LBP_BPI_CETP_C; Domain location=27-268; Score=66.7; E_value=8.5e-17; Accession=PF02886.9; Description=LBP BPI  CETP family, C-terminal domain
NLPKKIDLDSVAAMNVTFVNDPIFKRSSVEFDIDGLFIPSDETAVPRGMLLGDIKFALPLGSSSKMLWISLDEDVFNSVSALYFKAGLLQRMVDKIPDQFLLNTASWRFLVPQLYRKYPDDSMLLNISATSPPSVRISVGRIDATVDLDVTVNVLDFGKIVPNCTVVVACMSVSVAVSGAAAVSGNNLGGRVDLDYFSFTLKWSKVGKLHTVLVQTVLRILLKNLFVPYVNSYLEQGFQLPIIKGFSVRDAYILTSYSKMIVSCDVAFIEPEALFLVQTQGRFLV

SEQ ID NO: 98210 - protein, 164 aa, Setaria italica
  misc_feature (138)..(138): Xaa can be any naturally occurring amino acid
  Transcript Sequence Number=SeqID_32236
  Gene Ontology: Mol. function=nucleoside-triphosphatase activity; Cellular component=membrane; Biological process=transport
  Homolog annotation: Hit_ID=Q0JLC5; Match level="QueryCoverage=100%, HitCoverage=11%, E-value=7e-87, Identity=96%"; Hit description =Pleiotropic drug resistance protein 3
  Pfam annotation: Domain name=ABC_tran; Domain location=21-163; Score=- 39.0; E_value=0.0037; Accession=PF00005.19; Description=ABC transporter
YIGEMTVRETLAFSARCQGVGSRFDMLTELSRREKAANIKPDADIDAFMKASAMGGQEANVVTDYILKILGLEICADTMVGDEMLRGISGGQRKRVTTGEMLVGPARALFMDEISTGLDSSTTFQIVNSLRQSIHILXGGTAVISLLQPAPETYNLFDDIILLS

SEQ ID NO: 98211 - protein, 74 aa, Setaria italica
  Transcript Sequence Number=SeqID_32237
KDVFGLFSNFQKLDWYIPYRNKTCSSWPAMLCHWIYWCFDDAVGPVGECKGMLGTLLNKWHAWHVVKQWHARSG

SEQ ID NO: 98212 - protein, 112 aa, Setaria italica
  Transcript Sequence Number=SeqID_32238
  Gene Ontology: Mol. function=phosphotransferase activity, alcohol group as acceptor; Cellular component=phosphoinositide 3-kinase complex; Biological process=phosphoinositide-mediated signaling
  Homolog annotation: Hit_ID=P42347; Match level="QueryCoverage=68%, HitCoverage=9%, E-value=1e-22, Identity=66%"; Hit description =Phosphatidylinositol 3-kinase, root isoform
  Pfam annotation: Domain name=PI3Ka; Domain location=10-112; Score= -34.2; E_value=3.9e-05; Accession=PF00613.12; Description =Phosphoinositide 3-kinase family, accessory domain (PIK domain)
PQSCLPGYYRELYIKFPPTRPLLEKEKQLVWKFRFSLMSKKKCFTKFGRSVDWSDIKEAKQAVKLIAEWETIDVADALELLSPEFEREEVSYLGTFVCACFWFDIYVLQEGL

SEQ ID NO: 98213 - protein, 93 aa, Setaria italica
  Transcript Sequence Number=SeqID_32239
  Gene Ontology: Mol. function=peptidase activity; Cellular component =cellular_component; Biological process=lipid transport
  Homolog annotation: Hit_ID=B6SP11; Match level="QueryCoverage=70%, HitCoverage=67%, E-value=5e-23, Identity=77%"; Hit description =Nonspecific lipid-transfer protein
  Pfam annotation: Domain name=Tryp_alpha_amyl; Domain location=28-93; Score=51.8; E_value=2.6e-12; Accession=PF00234.14; Description =Protease inhibitorseed storageLTP f
  Subcellular localization annotation: CTP_CleavageSite=36; ConfidenceScore=5.29e-01
MTMKQQQVVVCAVLVLLAMAGVASAASCNVGQLTPCASALATGATPSASCCSSLKAQQGCFCTYAKNPTYARYINSPNAKKVVASCGLTVPRC

SEQ ID NO: 98214 - protein, 74 aa, Setaria italica
  Transcript Sequence Number=SeqID_32240
  Gene Ontology: Biological process=protein modification process
  Homolog annotation: Hit_ID=B2VXM8; Match level="QueryCoverage=100%, HitCoverage=46%, E-value=3e-10, Identity=43%"; Hit description=AN1 -type zinc finger protein
  Pfam annotation: Domain name=zf-AN1; Domain location=19-62; Score =20.9; E_value=0.00021; Accession=PF01428.8; Description=AN1-like Zinc finger
IQKESTLHLVLRLRGGGKCFFPECSKRTAALIGDCRFCKHSFCGTHRLPETHVCPEMASCRQQSFNKNKDKLMS

SEQ ID NO: 98215 - protein, 85 aa, Setaria italica
  Transcript Sequence Number=SeqID_32241
MAASAGEAAGATTPEAPSPFSDDWKERIIFPAAGAGVVGAAFGLLSRHRARLGAARAAVTYAANLAIVAGCYGGARELARDARAT

SEQ ID NO: 98216 - protein, 139 aa, Setaria italica
  Transcript Sequence Number=SeqID_32242
  Subcellular localization annotation: CTP_CleavageSite=58; ConfidenceScore=5.61e-01
AAGGSLLRSRGSKYVRPRGAVPPAVAAKAASRRSFSVASWRAEAGLRTAQPTGQRITNASGLVGWGPDRSAGRNSRSPGAARNRPDEAAAAAEGRRAAEYWRARGVCWEGPACPPGLLVVVGRRWDWEPHARRSPPLGF

SEQ ID NO: 98217 - protein, 107 aa, Setaria italica
  Transcript Sequence Number=SeqID_32243
RNANDRVADEAARLKASLDETQVAYERERDRKDQTGVMLALAMVSCRGHARTVEKLEGDLQELTSAAQDVVNAIAPLKDDAEPRSLVERLRATLGRVAGLCKTVCKY

SEQ ID NO: 98218 - protein, 248 aa, Setaria italica
  Transcript Sequence Number=SeqID_32244
  Gene Ontology: Mol. function=metal ion binding
  Homolog annotation: Hit_ID=B6TI40; Match level="QueryCoverage=100%, HitCoverage=100%, E-value=4e-91, Identity=71%"; Hit description=RING finger protein 5
  Pfam annotation: Domain name=zf-C3HC4; Domain location=50-90; Score =30.5; E_value=7e-06; Accession=PF00097.17; Description=Zinc finger, C3HC4 type (RING finger)
  Subcellular localization annotation: CTP_CleavageSite=25; ConfidenceScore=5.22e-01
MSGGNAWSPLSSHGFGSESSGMASRASEPVARTNSGGGGGGSKDSGSFECNICLDLAQDPVVTLCGHLFCWPCLYEWLHVHAHSQECPVCKAVVEEGKLVPLYGRGGTSAAPRARSVAGVQIPSRPTGQRPSTAPQPDHNNHYPHQNPWFMGAHAGGAPVAGGRWGNYTFSAAIGGLFPLLSFQVHGFPQATAYGPAAGFPYGYGHSFHGWHGYGFPRQAPQGQQVDVYLKVLLLVVGVLVIASLIAF

SEQ ID NO: 98219 - protein, 183 aa, Setaria italica
  misc_feature (139)..(139): Xaa can be any naturally occurring amino acid
  Transcript Sequence Number=SeqID_32245
  Gene Ontology: Mol. function=steroid hormone receptor activity; Cellular component=nucleus; Biological process=regulation of transcription, DNA-dependent
  Homolog annotation: Hit_ID=Q2HU72; Match level="QueryCoverage=99%, HitCoverage=30%, E-value=2e-40, Identity=48%"; Hit description =Steroid nuclear receptor, ligand-binding
MEPPSGFWASLLSFLKFLPYSCGLLILGFIKGVLLCPWACLIMAIGLSALIVGLWPMHLIWTYYCIIRTKLVGSVVKFLLLIAATAILIIWLIIGIPGSVFAGLVYGFLAPIMATFGAVGEGKEKPFIHCFVDGVLSLXTWSTITGSCTVVRDVKDLLFHSYFSIMDDLHLQKPPDGKPYEIS

SEQ ID NO: 98220 - protein, 178 aa, Setaria italica
  misc_feature (25)..(25): Xaa can be any naturally occurring amino acid
  misc_feature (123)..(123): Xaa can be any naturally occurring amino acid
  misc_feature (157)..(157): Xaa can be any naturally occurring amino acid
  Transcript Sequence Number=SeqID_32246
  Gene Ontology: Mol. function=oligosaccharyl transferase activity; Cellular component=membrane; Biological process=protein amino acid glycosylation
  Homolog annotation: Hit_ID=Q6XL70; Match level="QueryCoverage=49%, HitCoverage=45%, E-value=9e-30, Identity=65%"; Hit description =Putative oligosaccharyl transferase STT3 protein (Fragment)
GPESSTNSTKSEIRNEKSETAPKEXPSKKNRKKEKEVAESVPVKPKKEKRLLVLPFELSIMGILLLIVLGGFYVVHCVWAAAEAYSAPSIVLTSRSRDGLHVFDDFREAYAWLSHNTDVDDKXTVIVDNNTWNNTHIATVGTAMSSPEKAAWEIFNXLDVKYVLVVFGGLVGYLVMIS

SEQ ID NO: 98221 - protein, 35 aa, Setaria italica
  Transcript Sequence Number=SeqID_32247
TKKEKNRVRGKLKKLKSNAKTSSTLVAGRKKNPWQ

SEQ ID NO: 98222 - protein, 199 aa, Setaria italica
  misc_feature (50)..(50): Xaa can be any naturally occurring amino acid
  misc_feature (71)..(71): Xaa can be any naturally occurring amino acid
  misc_feature (130)..(130): Xaa can be any naturally occurring amino acid
  Transcript Sequence Number=SeqID_32248
  Gene Ontology: Mol. function=oligosaccharyl transferase activity; Cellular component=membrane; Biological process=protein amino acid glycosylation
  Homolog annotation: Hit_ID=Q6XL70; Match level="QueryCoverage=91%, HitCoverage=86%, E-value=2e-73, Identity=69%"; Hit description =Putative oligosaccharyl transferase STT3 protein (Fragment)
HNQQQIPIMDNLLLIVLGGFYVVHCVWAAAEAYSAPSIVLTSRSRDGLHXFDDFREAYAWLSHNTDVDDKXTVIVDNNTWNNTHIATVGTAMSSPEKAAWEIFNSLDVKYVLVVFGGLVGYPSDDINKFXWMVRIGGGVFPHIKEPDYLRDGQYRVDAQATPTMLNCLMYKLCYYRFVETDGKGFDRVRGYEIGKKHFK

SEQ ID NO: 98223 - protein, 784 aa, Setaria italica
  Transcript Sequence Number=SeqID_32249
  Gene Ontology: Mol. function=oligosaccharyl transferase activity; Cellular component=membrane; Biological process=protein amino acid glycosylation
  Homolog annotation: Hit_ID=P46977; Match level="QueryCoverage=92%, HitCoverage=96%, E-value=0.0, Identity=47%"; Hit description =Dolichyl-diphosphooligosaccharide--protein glycosyltransferase subunit STT3A
  Pfam annotation: Domain name=STT3; Domain location=23-713; Score =537.3; E_value=1.9e-158; Accession=PF02516.6; Description =Oligosaccharyl transferase STT3 subunit
MAEPVSSAAASGGGRLRNAFGGVLCAFTLLLIGVVAFSIRLFSVIKYESVIHEFDPYFNFRVTQFLSKNGIYEFWNWFDDRTWYPLGRVIGGTVYPGLTLTAGTMWWLVNALNIPLSVETVCVFTAPIFSANASWATYLLTKEAKGTGAGLMAAAILAMVPSYISRSVAGSYDNEAVAIFALIFTFYLYVKTLNTGSLFYATLNALSYFYMVCSWGGYTFIINLIPMHVLLCIVTGRYSSRLYIAYAPLVILGTLLAALVPVVGFNAVMTSEHFASFLVFIILHVVALVYYIKGLLTPRLFKVAMTLVISVGLAVCFAVVAVLVALVASSPTKGWSGRSLSLLDPTYASKYIPIIASVSEHQPPTWPSYFMDINVLAFLIPAGIISCFLPLSDASSFMVLYLVTAVYFSGVMVRLMLVLAPAACILSGIALSEVFGVLTRSIKFQLSKLFDDSSAAVSASGDSGPESSTNSTKSENRNEKSETAPKEKPSKKNRKKEKEVAESVPVKPKKEKRLLVLPFELSIMGILLLIVLGGFYVVHCVWAAAEAYSAPSIVLTSRSRDGLHVFDDFREAYAWLSHNTDVDDKVASWWDYGYQTTAMANRTVIVDNNTWNNTHIATVGTAMSSPEKAAWEIFNSLDVKYVLVVFGGLVGYPSDDINKFLWMVRIGGGVFPHIKEPDYLRDGQYRVDAQATPTMLNCLMYKLCYYRFVETDGKGFDRVRGYEIGKKHFKLTHFEEVFTTHHWMVRIYKLKPQKNRVRGKLKKLKSNAKTSSTLVAGRKKNPWQ

SEQ ID NO: 98224 - protein, 102 aa, Setaria italica
  Transcript Sequence Number=SeqID_32250
KRRKGKRFHFDDDFGYSKNKNAAFDDSIISAWSASRIRSNMQAGDRKNHYARPARSINYSPLDPPSTASASPSSPSVYRSPPTTSSSAGSAGEPSKSNSCLR

SEQ ID NO: 98225 - protein, 66 aa, Setaria italica
  Transcript Sequence Number=SeqID_32251
KFWVSPFWISFLDNFERLPHCFHCMWCTNSVLYSVFEECLKYLHSSNGVKLSPNYFLCYGRLGSKR

SEQ ID NO: 98226 - protein, 55 aa, Setaria italica
  Transcript Sequence Number=SeqID_32252
RINVELLACIEQVSIRVDFYQRKGNLLSKCNNINIKAFQSQASWYRLELKPNRSH

SEQ ID NO: 98227 - protein, 116 aa, Setaria italica
  misc_feature (31)..(31): Xaa can be any naturally occurring amino acid
  misc_feature (102)..(102): Xaa can be any naturally occurring amino acid
  Transcript Sequence Number=SeqID_32253
  Gene Ontology: Mol. function=oxidoreductase activity; Biological process=oxidation reduction
  Homolog annotation: Hit_ID=Q7XJ26; Match level="QueryCoverage=93%, HitCoverage=30%, E-value=3e-29, Identity=55%"; Hit description =Iron/ascorbate-dependent oxidoreductase
  Pfam annotation: Domain name=2OG-FeII_Oxy; Domain location=1-63; Score=10.4; E_value=0.016; Accession=PF03171.12; Description=2OG -Fe(II) oxygenase superfamily
DVGGLQVLEMACGHNVPTSPHRLLVNIGDFXEIMSNGIFKSPVHRVVTNMGKERISLAMFHGLDPEKEIEPATALLHEKQLARYRKIKAKVYLARFYEHFVXGTRFIDSEDLREVA

SEQ ID NO: 98228 - protein, 95 aa, Setaria italica
  Transcript Sequence Number=SeqID_32254
  Subcellular localization annotation: CTP_CleavageSite=5; ConfidenceScore=5.15e-01
SRCRRAASSRSPTPRRRRCRAGIPVRRKLRRWRCQRLNPVIFAIRGAPVLDPKSGSLASSSRAHSSLWASPSTAPATARLPLAFPTAAQITSIRV

SEQ ID NO: 98229 - protein, 69 aa, Setaria italica
  Transcript Sequence Number=SeqID_32255
LNMYSCSVILFPVLMDLVGLVQNCLKLEFLVKLSSDELIANILFIIFYGSDSDSNACMWLVAHLFFDSD

SEQ ID NO: 98230 - protein, 79 aa, Setaria italica
  misc_feature (21)..(21): Xaa can be any naturally occurring amino acid
  misc_feature (57)..(57): Xaa can be any naturally occurring amino acid
  Transcript Sequence Number=SeqID_32256
TDADFFDKLVDDDDAPANDAXDAALARDVSDVSRADDDPPAPPPATEAAPPEGGSPXAGAGLHTTVKQVQWASFGGGPD

SEQ ID NO: 98231 - protein, 49 aa, Setaria italica
  Transcript Sequence Number=SeqID_32257
YQTVGYLERGEYSPSLHLALRIAAYFEVAVEVVFSTEPFPRLGSGSETA

SEQ ID NO: 98232 - protein, 83 aa, Setaria italica
  Transcript Sequence Number=SeqID_32258
LSSQELICSEIPTLHSIFLDLLASTIILYCSSLVPHAGTVVMLIAEYFKKAKLPALRRKLYTIVQLLLSSMGVGRWFLVHTRA

SEQ ID NO: 98233 - protein, 144 aa, Setaria italica
  misc_feature (26)..(26): Xaa can be any naturally occurring amino acid
  Transcript Sequence Number=SeqID_32259
  Homolog annotation: Hit_ID=B9SQN9; Match level="QueryCoverage=100%, HitCoverage=8%, E-value=2e-43, Identity=60%"; Hit description =Meiotic checkpoint regulator cut4, putative
LVLRHALAKCRDSPPDDWPATAYVLXGREDLAMAKMGSVRKDNGLWNNDNLTSMSVPYMLHLQPVTIPTTASDIPTSEVLNSEDSDSVSKSIEDGMEHIFTSTTQLRFGHDLRLNEVRRPLCSARPVAIQTPTNPSVSDQDLQQ

SEQ ID NO: 98234 - protein, 138 aa, Setaria italica
  misc_feature (2)..(2): Xaa can be any naturally occurring amino acid
  Transcript Sequence Number=SeqID_32260
  Gene Ontology: Mol. function=protein serine/threonine kinase activity; Cellular component=membrane; Biological process=protein amino acid phosphorylation
  Homolog annotation: Hit_ID=Q8H0Z0; Match level="QueryCoverage=91%, HitCoverage=18%, E-value=7e-50, Identity=71%"; Hit description =Putative serine/threonine protein kinase
HXTPAYRAPEMWDLYRREVISEKVDIWALGCLLYRICYFKSAFDGESKLQILNGNYRIPEQPKYSTAVTGLIKDMLEASPNVRPDITQVWFRVNELLPLELQKRLPDGPSSAISMSLQDEGAHKRTHVMPRRNPPPPP

SEQ ID NO: 98235 - protein, 684 aa, Setaria italica
  misc_feature (302)..(302): Xaa can be any naturally occurring amino acid
  Transcript Sequence Number=SeqID_32261
  Gene Ontology: Mol. function=protein serine/threonine kinase activity; Cellular component=membrane; Biological process=protein amino acid phosphorylation
  Homolog annotation: Hit_ID=Q69L75; Match level="QueryCoverage=44%, HitCoverage=97%, E-value=1e-160, Identity=87%"; Hit description =Putative AAK1 protein
  Pfam annotation: Domain name=Pkinase; Domain location=27-293; Score =87.7; E_value=4.2e-23; Accession=PF00069.17; Description=Protein kinase domain
  Pfam annotation: Domain name=Pkinase_Tyr; Domain location=27-293; Score=-92.6; E_value=1.4e-07; Accession=PF07714.9; Description =Protein tyrosine kinase
  Pfam module annotation: Pfam domain module=Pkinase::Pkinase_Tyr; Domain location=27-293::27-293
MWRLNPFGGKAQSGLEGRTVDVGSVKITVRNAIAQGGFSCVYLACDTVHPSKLYALKHIICNDSESLDLVMKEIQVMNLLKVVGTTTTLVAHDVFDMGRTKEALLVMEFCEKSLVSAMESRGSGYYEEKKVLLIFRDACNAVFAMHGQSPPIAHRDLKAENVLLGFDGAWKICDFGSTSTNHKCFNKPEEMGVEEDIIRKHTTPAYRAPEMWDLYRREVISEKVDIWALGCLLYRICYFKSAFDGESKLQILNGNYRIPEQPKYSTAVTGLIKDMLEASPNVRPDITQARALIDWPFISMIXVWFRVNELLPLELQKRLPDGPSSAISMSLQDEGAHKRTHVMPRRNPPPPPREQSNSSLSHGSSRAGDAPLGAFWATQHAQGADNRKPLFDEEPIKPSLSSKQNQSRVDTSISIPGDRHGHSGQSSRTSKAPSNSLPNNGFAGVSDTNLFKETQSSVKVKANQAQPKPKCEKDPFNSFVADFDTHNLNIAAGKASELELELSSLKEQLKKTTLEKDEMTAKYEKLSAICRSQRQELQELKRALAETTPPSNKVSSRTQDSGPQRKEKIEGTVWELEHGMLASNSKSASSDAKTWQVFPETKTQAQARPKVDHATNGRQNLTKSTNPGPSPDAWGFGTDNYRTSAAAASTATQINRTTAQGSSSQRFSTGVAKKVEQPSGWAGF

SEQ ID NO: 98236 - protein, 29 aa, Setaria italica
  Transcript Sequence Number=SeqID_32262
VCYGVHSTYSAEENEVVNAMIHHSNLDIS

SEQ ID NO: 98237 - protein, 53 aa, Setaria italica
  Transcript Sequence Number=SeqID_32263
  Gene Ontology: Mol. function=protein serine/threonine kinase activity; Cellular component=cytoplasm; Biological process=protein amino acid phosphorylation
  Homolog annotation: Hit_ID=B6SY14; Match level="QueryCoverage=94%, HitCoverage=12%, E-value=2e-19, Identity=96%"; Hit description =Casein kinase I isoform delta-like
MDRIVGSKYKLGRKIGSGSFGEIYLATHVDTYEIVAVKIESSKTNHMSLLLHC

SEQ ID NO: 98238 - protein, 254 aa, Setaria italica
  misc_feature (91)..(91): Xaa can be any naturally occurring amino acid
  Transcript Sequence Number=SeqID_32264
  Gene Ontology: Mol. function=nucleotide binding; Biological process =defense response
  Homolog annotation: Hit_ID=Q9SED7; Match level="QueryCoverage=92%, HitCoverage=21%, E-value=1e-41, Identity=40%"; Hit description=Vrga1
ISSLQLSYQHLPGHLQRCFAYCSIFPTTWRFNRYKLVKMWIALGFVQTPSEGKRLEDLGYKYFDDLLSRSFFGSANKDQQTYYFLDDLMHXLAHHFSAQDCMKINEDIPVVIPPTVRHLSVSTDYLPQLKSKYRLGRLRTLLVLGSSSLSSSHFPGKLLAKFKNLRVLDLSESDIAELPDSISQLVHLHYLALCSIINKLPKSIYRLQYLEVLTVLFFHDNHPGGADKFVTVKHIKTCYEHKANRLVCNAMHKN

SEQ ID NO: 98239 - protein, 53 aa, Setaria italica
  Transcript Sequence Number=SeqID_32265
  Pfam annotation: Domain name=PPR; Domain location=19-53; Score=23.8; E_value=0.00072; Accession=PF01535.12; Description=PPR repeat
MCLLIRAKMDGLELKPDATAYHKLVDRLVGFSKLDKAQEYFDQMKRKGVSPSI

SEQ ID NO: 98240 - protein, 297 aa, Setaria italica
  Transcript Sequence Number=SeqID_32266
  Gene Ontology: Mol. function=nucleoside-triphosphatase activity; Cellular component=chloroplast; Biological process=protein metabolic process
  Homolog annotation: Hit_ID=Q9LLI0; Match level="QueryCoverage=95%, HitCoverage=29%, E-value=1e-137, Identity=82%"; Hit description=ClpB
  Pfam annotation: Domain name=Clp_N; Domain location=18-70; Score =60.7; E_value=5.5e-15; Accession=PF02861.12; Description=Clp amino terminal domain
  Pfam annotation: Domain name=Clp_N; Domain location=95-146; Score =43.7; E_value=7.2e-10; Accession=PF02861.12; Description=Clp amino terminal domain
  Pfam module annotation: Pfam domain module=Clp_N::Clp_N; Domain location=18-70::95-146
VLAPGEFTEMAWEGIVGAVDAARLSKQQIVESEHLMKALLEQKDGLARRIFSKAGVDNTSVLQATDEFISRQPKVSGDTSGPIIGSSFVSILDSAKKHKKEYGDEFVSVEHILQAFTSDKRFGQQLFKDLKIMENDLKEAISAVRGSQRVTDQNPEGKYQALEKYGIDLTESARRGKLDPVIGRDDEVRRCIQILCRRTKNNPVIIGEPGVGKTAIAEGLAQRIVRGDVPEPLMNRRLISLDMGALLAGAKFRGEFEERLKAVLKEVTASNGQIILFIDEIHTVVGAGAAGGAMDAG

SEQ ID NO: 98241 - protein, 111 aa, Setaria italica
  Transcript Sequence Number=SeqID_32267
  Subcellular localization annotation: CTP_CleavageSite=48; ConfidenceScore=5.34e-01
SFWSASGRPPMPACRGCGGGSLQSAEAVGANRRKRLMLWARPVSSRSRASIYGEGNSGFRKRTRGAALLLVVVRLHGPLPPISPWLFGATVPILIPEARLNRHGVGQGTAR

SEQ ID NO: 98242 - protein, 258 aa, Setaria italica
  Transcript Sequence Number=SeqID_32268
  Gene Ontology: Mol. function=lipid-A-disaccharide synthase activity; Biological process=lipid A biosynthetic process
  Homolog annotation: Hit_ID=B9SSI8; Match level="QueryCoverage=100%, HitCoverage=55%, E-value=3e-79, Identity=53%"; Hit description=Lipid- A-disaccharide synthase, putative
  Pfam annotation: Domain name=LpxB; Domain location=1-258; Score= -19.4; E_value=2e-10; Accession=PF02684.7; Description=Lipid-A -disaccharide synthetase
RVLKQLKCRSNRKVQSPLHIHYVSPSFWAWKGGESRLSKLRDFVDHMLCILPFEEEICRLNGLPATYVGHPLLDDAIGLNMELELSSDKSRHQRSCESFRLEHGLSPDATIITMLPGSRMQEVVRMLPIFLRTVQNLRHTFNELSLVIPVAPHRDVRTYVEKTVQSGPSPVVLIPGGSLKERYDAFSASRAALCTSGTAVMELMLAKLPCVVAYQAHFITECLIYLRKKINFISLPNILLNSPVVPEILFRACTAKNL

SEQ ID NO: 98243 - protein, 62 aa, Setaria italica
  Transcript Sequence Number=SeqID_32269
  Subcellular localization annotation: CTP_CleavageSite=26; ConfidenceScore=5.52e-01
MLLLPLVLPYPLPRPPPRAPPLAASVCSSSSGPPPPAPVTRVRGEPALLPRCPFSYTTARTA

SEQ ID NO: 98244 - protein, 74 aa, Setaria italica
  Transcript Sequence Number=SeqID_32270
EAEQKQEQRRRRAPAPAVAVAEPPRLHSDDRPRRLRPAVPPSPARRGLYLGGMSRVRYASSAQCGTDLRGLVIP

SEQ ID NO: 98245 - protein, 106 aa, Setaria italica
  Transcript Sequence Number=SeqID_32271
LLIARVRRCEWVLHGGPTRRNSSLGVGVKVAYLNLHLILSRTCDKKIQRMSYNRYCSCFAALSMKKSNASYLPPKKAFAIEFPTWKSLSCHVGLVNIWFGSGLFSA

SEQ ID NO: 98246 - protein, 90 aa, Setaria italica
  Transcript Sequence Number=SeqID_32272
MGRSCWKRSSRRRLLLQLLCRSLLVLLLALLLPSCCQASRGLQPFKGRPLEGGAPNNFLGFLPRGPVPPSGPSRQHNSVGLESQREKKKP

SEQ ID NO: 98247 - protein, 110 aa, Setaria italica
  Transcript Sequence Number=SeqID_32273
  Subcellular localization annotation: CTP_CleavageSite=100; ConfidenceScore=5.66e-01
VALVSGTSTRPRRPPVGDTPPPASLGSSSLPLLRAPQPPLSYTRPAPQLSCGHTSPRERRAFRRRPSRGGRRRARAPRRIPSFNSTAEPTNRLLGPRLPRAPTFAAAPPP

SEQ ID NO: 98248 - protein, 358 aa, Setaria italica
  Transcript Sequence Number=SeqID_32274
  Gene Ontology: Mol. function=nucleic acid binding; Cellular component= intracellular; Biological process=RNA processing
  Homolog annotation: Hit_ID=B9RE60; Match level="QueryCoverage=94%, HitCoverage=34%, E-value=6e-90, Identity=53%"; Hit description=RNA binding protein, putative
  Pfam annotation: Domain name=Surp; Domain location=297-340; Score =30.3; E_value=8e-06; Accession=PF01805.12; Description=Surp module
YYSSSLVIDYVLVFTAAEYARKQASKEQKERPSAIPGPIPDELVAPTTNSIGVTLLLKMGWRQGRSIRDSHADSLYESRRNARKAFLALSGSKNDEDQDQSSGKPSLDQAVVGSTEEMRVSGNTPVYVLHPKQDLHGLGYDPFKHAPEFRDRKTLQKSRDRDHKRNDVSMRGSLLTSNSGHYAPGFGIGALEELDVEDEDIYASGFAYEQTEVDIEPSKTASDSNYKLDNRKRGFHLSIRIASNSEYKLERFLPPEIPDDFDARHKFPTPVQSAEKFYDSAPLEVPPPEDTSLTLLIEGCAAMVARCGKHIEDFYKEKSKTNPQFMFLSGGDGCKYYMRKLWEHQQKYVGQQRPDSAK

SEQ ID NO: 98249 - protein, 673 aa, Setaria italica
  misc_feature (135)..(135): Xaa can be any naturally occurring amino acid
  misc_feature (272)..(272): Xaa can be any naturally occurring amino acid
  Transcript Sequence Number=SeqID_32275
  Gene Ontology: Mol. function=nucleic acid binding; Cellular component= intracellular; Biological process=RNA processing
  Homolog annotation: Hit_ID=B9RE60; Match level="QueryCoverage=68%, HitCoverage=54%, E-value=6e-73, Identity=45%"; Hit description=RNA binding protein, putative
CPSHLISFVDRKTLQKSRDRDHKRNDVSMRGSLLTSNSGHYAPGFGIGALEELDVEDEDIYASGFAYEQTEVDIEPSKTASDSNYKLDNRKRGFYLSFKIASNSEYKLERFLFQMGGGLEGVGGDGCKYYMIKLXEHQQKYVGQQRPDSAKSKTSEKLTAENRGRILGERPLDRSTKLHSPSLSAKEAVQLQSNLVDTFVKPISLDALPESEKPFSNDPAKQARFEQFLKDKYKGGLRSANVAPTSTMSEADRARERLDFETVAEAIEKGKXEKVIDHSSLFSLPGMNEQRFVAATQVESSVVPQDEKPIYPRREQFEWRPLPILCKRFDIVDPFMGKPMPVQRPRTKIDNLIFMTESNKGTKDEVESSSRSSQHASMEGITEVESQGTANDPDIELSSMQRPVDLYKAIFSDDSDDDADEILNNQPVDPLKTSEGANMALNRLVAEDFLESLGKELGLEVPPERPNVLSRPETLAAAGASGSPQYERITTALAEVKESQSSFGMVQVGNANQDAPLASAEKLALKYEKQENRTEENRSRDMHRQSQNHSPRSDSSSERHRSRKRRSHHHSWDGTPESDSASERHRNRRSKSHSRHRKGRSRTPETDSRSDTKHERKRKEKRHHRTCTSDSDSSDHEHKERYKSSSRRSSDKDRSRKHSRHHKHRRKDHEDYS

SEQ ID NO: 98250 - protein, 70 aa, Setaria italica
  Transcript Sequence Number=SeqID_32276
  Gene Ontology: Mol. function=nucleoside-triphosphatase activity; Cellular component=chloroplast envelope; Biological process=transport
  Homolog annotation: Hit_ID=B6U9M1; Match level="QueryCoverage=80%, HitCoverage=20%, E-value=1e-23, Identity=89%"; Hit description =Cobalt import ATP-binding protein cbiO 2
CSLHVPPGQLWMLLGPNGCGNMLLKVLAGFLNPSAGTVYINGPCSYVFQNPDHQVVTFNLLIVSKCSHYI

SEQ ID NO: 98251 - protein, 171 aa, Setaria italica
  misc_feature (119)..(119): Xaa can be any naturally occurring amino acid
  Transcript Sequence Number=SeqID_32277
  Gene Ontology: Cellular component=membrane
  Homolog annotation: Hit_ID=B6U1N6; Match level="QueryCoverage=100%, HitCoverage=44%, E-value=4e-64, Identity=75%"; Hit description =Nodulin-like protein
  Pfam annotation: Domain name=DUF6; Domain location=4-132; Score=21.8; E_value=0.0029; Accession=PF00892.12; Description=Integral membrane protein DUF6
LSNVLAGLWTVLQGPLIEDTSKLMNTTLQISCASVQAFLVAVATERDFSKWKLGWNVGLAAIIYRGVIVTALSYYMQMWTIAKRGPVFLAMSMPLTFVFTIVISSFIIGDAVSLGSIFXAGVLLVGGLYNVFWGKSIEERDDLTKISAAGGSKPGLELPPQQNSKADEEAP

SEQ ID NO: 98252 - protein, 444 aa, Setaria italica
  Transcript Sequence Number=SeqID_32278
  Gene Ontology: Mol. function=metal ion binding; Cellular component =plasma membrane; Biological process=multicellular organismal development
  Homolog annotation: Hit_ID=B6TJ53; Match level="QueryCoverage=96%, HitCoverage=96%, E-value=0.0, Identity=86%"; Hit description =Palmitoyltransferase ZDHHC9
  Pfam annotation: Domain name=zf-DHHC; Domain location=142-206; Score =114.2; E_value=4.4e-31; Accession=PF01529.12; Description=DHHC zinc finger domain
MYGPPSRGSGGAGASGEQPRVYQVWKGSNEFFLQGRFIFGPDVRSLFLTIFLILAPVVVFCIFVARHLINDFPDHWGISIMVIVIVFTIYDLTLLLLTSGRDPGIVPRNTHPPEPEAIDMNNDAGNGQTPQQLRLPRTKDVFVNGVLVKVKYCDTCMLYRPPRCSHCSICNNCVERFDHHCPWVGQCIGLRNYRFFYMFVFSTTLLCLYVFGFCWVYIVKIRDAEQSSIWKAMLKTPASIVLIIYCFICVWFVGGLSVFHFYLMSTNQTTYENFRYRYDRRANPYNRGIVNNFMEIFCTAVPPSKNNFRARVPVEQGLQQSRAPARGFMSPNMGKPVGDFELGRKPVSWDEPRSAADIRDLEVGLGGLLDEKEGRIAHASPDLSREALPEFTEGRAGMHSRRSSWGHRSGTSESMDSIAVQMGTAESHWGSISSVHGGTSSGAH

SEQ ID NO: 98253 - protein, 231 aa, Setaria italica
  Transcript Sequence Number=SeqID_32279
  Homolog annotation: Hit_ID=B6TFK0; Match level="QueryCoverage=93%, HitCoverage=62%, E-value=4e-87, Identity=69%"; Hit description =Pollen-specific protein SF21
  Pfam annotation: Domain name=Abhydrolase_1; Domain location=1-222; Score=2.7; E_value=0.0035; Accession=PF00561.12; Description =alphabeta hydrolase fold
  Pfam annotation: Domain name=Ndr; Domain location=1-229; Score=284.5; E_value=2.3e-82; Accession=PF03096.6; Description=Ndr family
  Pfam module annotation: Pfam domain module=Abhydrolase_1::Ndr; Domain location=1-222::1-229
FCIYHISPPGHELGAAPISPNAPIPSVDDLADQVADVLDFFGLGSVMCFGVTAGAYILTLFASKYRERVLGLILVSPLCKGPTWTEWLYSKVTSNLLYYYGMCGLVKECLLQRYFSKEVRGFSELPESDIVQACKSLLDQRQSMNVWRFVQTMNERYDLTEQLKQLQCRTLIFVGENSQFHTEAVHMTSKLDRRYCALVEVQACGSLVTEEQPHAMLIPMELLLLLVLRYL

SEQ ID NO: 98254 - protein, 90 aa, Setaria italica
  Transcript Sequence Number=SeqID_32280
  Gene Ontology: Mol. function=nucleoside-triphosphatase activity
  Homolog annotation: Hit_ID=B9S6V1; Match level="QueryCoverage=74%, HitCoverage=34%, E-value=1e-22, Identity=68%"; Hit description=ATP binding protein, putative
  Pfam annotation: Domain name=DUF265; Domain location=2-83; Score= -16.0; E_value=2.5e-05; Accession=PF03266.7; Description=Protein of unknown function, DUF265
  Subcellular localization annotation: CTP_CleavageSite=26; ConfidenceScore=5.38e-01
MIPQPSNSWNVSAISRKLFSSAFFPAVMRVVESNIPVLATIPIPRNGRDIPGVARLRNHPGAAIFTLNTGNRDTMRETIYNQLSSLLQKR

SEQ ID NO: 98255 - protein, 201 aa, Setaria italica
  Transcript Sequence Number=SeqID_32281
  Gene Ontology: Mol. function=protein transporter activity; Cellular component=nuclear pore; Biological process=protein import into nucleus, docking
  Homolog annotation: Hit_ID=Q9SMV6; Match level="QueryCoverage=100%, HitCoverage=18%, E-value=1e-93, Identity=81%"; Hit description =Exportin1 (XPO1) protein
  Pfam annotation: Domain name=IBN_N; Domain location=37-103; Score =79.4; E_value=1.3e-20; Accession=PF03810.11; Description=Importin -beta N-terminal domain
  Pfam annotation: Domain name=Xpo1; Domain location=114-201; Score =28.9; E_value=2.1e-05; Accession=PF08389.4; Description=Exportin 1 -like protein
  Pfam module annotation: Pfam domain module=IBN_N::Xpo1; Domain location=37-103::114-201
MAAEKLRDLSRPIDVPLLDATVAAFYGTGSSEERHAADQILRELQNNPDMWLQVVHILQNSQNLNTKFFALQVLENVIKYKWNILPVEQRDGIKNYISDVIVQLSGNEVSFRQERLYVNKLNIILVQVLKREWPARWTTFIPDLIAAAATSPTICENCMAILKLLSEEIFDFSRGEMTQQKIKELKGSLNWLIRLIHELCL

SEQ ID NO: 98256 - protein, 125 aa, Setaria italica
  Transcript Sequence Number=SeqID_32282
MEQDLHLRIITPLAQQVDDLSLSKRIPNILAVTRPPTPSDLIAGLDRISNTIAECIDFSEAALRPTRSAQGPSLTPFGLRNSVAAFSAKIAQSLQIQSGDQPAPIQFPDRGEFQVPRIVLTPNSY

SEQ ID NO: 98257 - protein, 174 aa, Setaria italica
  misc_feature (11)..(11): Xaa can be any naturally occurring amino acid
  misc_feature (103)..(103): Xaa can be any naturally occurring amino acid
  misc_feature (146)..(146): Xaa can be any naturally occurring amino acid
  Transcript Sequence Number=SeqID_32283
  Gene Ontology: Mol. function=nucleic acid binding
  Homolog annotation: Hit_ID=A4PBL4; Match level="QueryCoverage=94%, HitCoverage=16%, E-value=4e-72, Identity=80%"; Hit description =OsRad54 protein
KVYQRQMSKEXGPRKVIQQEQTDNKMQGSSLSTEDLRDLFTFHEQVRSEIHENLKCSRCNKDGNSLLDGNGFDLGATEHKSSLPGVQDYIDIGGFGEISGCLXKMNSSHHQIGRPSEEDLGSWGHHCDPSTVPDTILQSSAGDEVXFVFTNQVDGKLVPVESMARFSLPSILTL

SEQ ID NO: 98258 - protein, 86 aa, Setaria italica
  Transcript Sequence Number=SeqID_32284
  Gene Ontology: Mol. function=transferase activity, transferring glycosyl groups; Cellular component=chloroplast
  Homolog annotation: Hit_ID=Q7XZZ4; Match level="QueryCoverage=82%, HitCoverage=6%, E-value=1e-33, Identity=94%"; Hit description=C2 domain-containing protein, putative, expressed
  Pfam annotation: Domain name=C2; Domain location=11-86; Score=56.1; E_ value=1.3e-13; Accession=PF00168.22; Description=C2 domain
MVAEEGARRRVVVEVCNARNLMPKDGQGTACAYAVVDFDGQRRRTATRPRDLNPHWGERLEFLVHDPDAMTSETLELNLYNDKKAI

SEQ ID NO: 98259 - protein, 70 aa, Setaria italica
  Transcript Sequence Number=SeqID_32285
FKEEAWGPIDLDRGNIWIAAYLFFLYFCYHVHRSIVDAGTSSKGEEGIVVNCCANLAVADAIGTVSRLSG

SEQ ID NO: 98260 - protein, 249 aa, Setaria italica
  misc_feature (16)..(16): Xaa can be any naturally occurring amino acid
  Transcript Sequence Number=SeqID_32286
  Gene Ontology: Cellular component=endoplasmic reticulum
  Homolog annotation: Hit_ID=B9S1R9; Match level="QueryCoverage=97%, HitCoverage=38%, E-value=1e-99, Identity=69%"; Hit description =Reticulon3-A3, putative
EYTRGYLSFKPNIPKXLLLDGAHTVESHFALVNYQLKQIRTALAIASLLKRTLVMPPLWCRLDRMWFGHPGVMEGTMTRQPFLCPMDHVFEVHVMLKDLPKEEFGPHIDFREYSFLENPSLPKEVKESLLEVQLCDDHSSRCSAVNGTDKHRPLLLSRNSTEEKLLNIFSSYKSVKVIQFSSMVDAFGGFADADVEMKFRNRVKRYVGLWCCVELREIGHIYYDMYWDEKPGWKPHPPETREQDHPPWS

SEQ ID NO: 98261 - protein, 309 aa, Setaria italica
  Transcript Sequence Number=SeqID_32287
  Gene Ontology: Cellular component=endoplasmic reticulum
  Homolog annotation: Hit_ID=B9S1R9; Match level="QueryCoverage=100%, HitCoverage=48%, E-value=1e-147, Identity=77%"; Hit description =Reticulon3-A3, putative
GVDNLLVGAMDTKLLRELYLRGVPVFDMGSRMATEDAGWGSPTFHKMGREKVLLINALLPFGYELLMCDTDMVWLKNPLPYLARYPDADLLTSSDQVIPTVTDDSLENWREVTGAFNIGIFHWRPTEPAKRLSKDWKDLVLSDDKLWDQNAFNDLVRKVFGQPVEGQGDLVYSYDGKLKLGVLPASIFCSGHTYFVQGMYKQLHLEPYAVHTTFQYAGTEGKRHRLREAMLFFDQPSYYDSPGGYLSFKPNIPKSLLLDGAHTVESHFALVNYQLKQIRTALAIASLLKRTLVMPPLWCRLDRMWFGHP

SEQ ID NO: 98262 - protein, 301 aa, Setaria italica
  misc_feature (36)..(36): Xaa can be any naturally occurring amino acid
  misc_feature (39)..(39): Xaa can be any naturally occurring amino acid
  Transcript Sequence Number=SeqID_32288
  Gene Ontology: Mol. function=nucleotide binding; Biological process =defense response
  Homolog annotation: Hit_ID=Q53Q39; Match level="QueryCoverage=100%, HitCoverage=33%, E-value=1e-132, Identity=75%"; Hit description=NB -ARC domain containing protein, expressed
  Pfam annotation: Domain name=LRR_1; Domain location=235-256; Score =9.8; E_value=4; Accession=PF00560.25; Description=Leucine Rich Repeat
  Pfam annotation: Domain name=LRR_1; Domain location=258-279; Score =11.8; E_value=1.7; Accession=PF00560.25; Description=Leucine Rich Repeat
  Pfam annotation: Domain name=LRR_1; Domain location=281-299; Score =4.3; E_value=45; Accession=PF00560.25; Description=Leucine Rich Repeat
  Pfam module annotation: Pfam domain module=LRR_1::LRR_1::LRR_1; Domain location=235-256::258-279::281-299
KAFYNSINCSCPDELEKLANNIVDRCQGLPLAIVTXGGXLSALPPIKQVWNETYKQFQDELTNNDHVRAILNLSYHDLPGNLRNCFFYCSLFPEDHLMSRESLVWLWVAEGFALQNEQSTPEEVADRYLRELIQRNMLEAVENDELGRVRTCKMHDLVRDLALSVAKEEKFCFAYDFGTLVKMDKGVRRLSSCGWQDKTSLKVKIQLPRLRTAVALGIIGSSPQLLSSVLSESTYLTVLELQDSEISEVPASIGNMFNLRYIGLRRTRVKSLPDSFGKLSNLQTLDIKATKIEKLPRGVVK

SEQ ID NO: 98263 - protein, 217 aa, Setaria italica
  Transcript Sequence Number=SeqID_32289
RGARPAVRRMDAVRQALLLFVHSKLTMCPDHRFAFASLGETVSMVKKDFSSDVGSAMEAIHSLSASESRYATADLTQLFKIACQEGKMAESQGRLLRVVLIYCRSSTKPHHQWPVKPKNFTLDIIYLHDKPTADNCPQKVYDALVDALEHVSQYEGYILETGQGLARVLFRQMCILLSHPLQRCIQDDLDIPKQVAKKTPAIEAVQNEDGAPVSSQQ

SEQ ID NO: 98264 - protein, 63 aa, Setaria italica
  Transcript Sequence Number=SeqID_32290
VPSPSSRHLFPSTPPPLYCSLPPLDPLQYSSNNRKEAAKRTEEEKRIKFLCEIGVFPNLPWGF

SEQ ID NO: 98265 - protein, 98 aa, Setaria italica
  Transcript Sequence Number=SeqID_32291
WTLIWHIHLLGCNTVFFYQIAESCYSRSLFPSDLSFTKWVYLLLLLILLCVLQEQISHTFHCNLSSTVEHRYTTCFSILAVICWFHASELVLVLSKQN

SEQ ID NO: 98266 - protein, 154 aa, Setaria italica
  Transcript Sequence Number=SeqID_32292
  Gene Ontology: Mol. function=ATP binding
  Homolog annotation: Hit_ID=Q84T10; Match level="QueryCoverage=30%, HitCoverage=1%, E-value=2e-17, Identity=85%"; Hit description=Unknow protein
QTKMLLSDGLLHEHLGLGYLSKDIVISDNLSRALGIHDYGPNILIDAISSICRIDGCIESLGLEWLCAWFVTLYLTLLSHSSRNVSLTRSLEDDLLNTVRKIRCIPLSDGSFSSVEDGPIWLPYDIVNSIPESSIQNFPVMYSNLRTVSPDLLS

SEQ ID NO: 98267 - protein, 384 aa, Setaria italica
  Transcript Sequence Number=SeqID_32293
  Gene Ontology: Mol. function=protein binding; Cellular component =plasma membrane; Biological process=vesicle-mediated transport
  Homolog annotation: Hit_ID=Q10M68; Match level="QueryCoverage=98%, HitCoverage=99%, E-value=1e-155, Identity=67%"; Hit description =Serologically defined breast cancer antigen NY-BR-84, putative, expressed
  Pfam annotation: Domain name=DUF1692; Domain location=185-364; Score =315.8; E_value=8.9e-92; Accession=PF07970.4; Description=Protein of unknown function (DUF1692)
MDEFLQKLKRLDAYPKVNEDFYKRTLSGGVVTLVAAVVMLLLFISETRSYFYSATETKLVVDTSRGERLRVNFDVTFPSIPCTLLSVDTTDISGEQHHDIRHDIEKRRLDSHGNVIEARKGGIGGTKIERPLQKHGGRLDKGEQYCGTCYGAEESDEQCCNSCEEVREAYKKKGWALTNPDLIDQCTREDFVERVKTQQGEGCNVHGFLDVSKVAGNFHFAPGKGFYESNVDVPELSVLEGGFNITHKINKLSFGTEFPGVVNPLDGAQWAQPASDGTYQYFIKVVPTIYTDIRGRKIHSNQFSVTEHFRDGNVRPKPQPGVFFFYDFSPIKVIFTEENRSLLHYLTNLCAIVGGVFTVSGIIDSFIYHGQKALKKKMELGKYR

SEQ ID NO: 98268 - protein, 59 aa, Setaria italica
  Transcript Sequence Number=SeqID_32294
VVVHLVEQVLEHVALVAVEPLSLQGVPALLALLIGSIVAELGHGAASREHHGSADDSAS

SEQ ID NO: 98269 - protein, 185 aa, Setaria italica
  Transcript Sequence Number=SeqID_32295
PQRRDDDCACCGGGQEEAAAATGRYWLAPPDADVKRTTPVRSANAGVPASPSAVECHHRTEVDEEREEEDDGEDEDEDESSKKQLSPVSVLERRLFEHLPPPPHAQKAFVLFSELLEAACTPTTLLSLLANAKQFRNSSKDGGGGSTPTTTPRRFRKKNNSHARREDTLPFERDLATATALVSSE

SEQ ID NO: 98270 - protein, 98 aa, Setaria italica
  Transcript Sequence Number=SeqID_32296
HQQHYAYGAQNPLPVATPPQRPPPATAPPSPPKASSWDFLNVFENYDSYGYDSYYDYDSAAPATAYTPSRSSREVREEEGIPDLEDDEEEDSVVVKEL

SEQ ID NO: 98271 - protein, 82 aa, Setaria italica
  Transcript Sequence Number=SeqID_32297
MASSCVLFHLVIVVCLVPASIASPHHKLRLSASEVAALEAVAPPPQDQPTTFFEVDRPHRPPPGSFGPCSTLLLSHSFAYTY

SEQ ID NO: 98272 - protein, 151 aa, Setaria italica
  Transcript Sequence Number=SeqID_32298
  Gene Ontology: Mol. function=transcription regulator activity; Cellular component=nucleus; Biological process=regulation of transcription
  Homolog annotation: Hit_ID=B6UD78; Match level="QueryCoverage=100%, HitCoverage=34%, E-value=5e-44, Identity=68%"; Hit description=DNA binding protein
  Pfam annotation: Domain name=HLH; Domain location=90-128; Score=6.0; E_value=0.04; Accession=PF00010.18; Description=Helix-loop-helix DNA- binding domain
  Subcellular localization annotation: CTP_CleavageSite=32; ConfidenceScore=5.41e-01
EPLQFTNDAPFWNSSAAGFGVPAAVPDQASVRSAVKPSPAPRAATLTLKTVLEGVGESSSIISKKKASGEPAFKKPRLETPSPLPTFKVRKEKLGDRITALQQLVAPFGKTDTASVLHETIEYIKFLHDQVGVLSAPYLKNGHHHQLPHLK

SEQ ID NO: 98273 - protein, 87 aa, Setaria italica
  Transcript Sequence Number=SeqID_32299
MASSTKTARFLVLALLVVSAVIMPSSVCHGIRGVGLGSGGALDPNHPACIGPCPGRGQPYTPRPGGGPGVYYPSTPAAQSNGENLHP

SEQ ID NO: 98274 - protein, 107 aa, Setaria italica
  Transcript Sequence Number=SeqID_32300
  Pfam annotation: Domain name=ABA_WDS; Domain location=28-107; Score =146.5; E_value=8.1e-41; Accession=PF02496.8; Description=ABAWDS induced protein
MAEEKKHHHLFHRHSKDDGEEEASAGEVDYEKKEKHHKHLEQLGGLGAIAAGAYAIHEKHKAKKDPENAHGHRVKEEAAAVAALGAAGFAFHEHHQKKDAKKHAADN

SEQ ID NO: 98275 - protein, 103 aa, Setaria italica
  misc_feature (81)..(81): Xaa can be any naturally occurring amino acid
  Transcript Sequence Number=SeqID_32301
  Gene Ontology: Mol. function=ATP-dependent helicase activity; Cellular component=cytoplasm
  Homolog annotation: Hit_ID=Q6K7R9; Match level="QueryCoverage=73%, HitCoverage=10%, E-value=2e-28, Identity=73%"; Hit description=DEAD -box ATP-dependent RNA helicase 48
NLTIIQRVEANSITHHRTSDPCPFDSRFDECGISPMTVQALTDAGYVQTTVVQEAALPICLDGKDVLVKAKTGTGKSAAFXLNAMKNNTNHRVSPTICLLSSA

SEQ ID NO: 98276 - protein, 509 aa, Setaria italica
  Transcript Sequence Number=SeqID_32302
  Gene Ontology: Mol. function=ATP-dependent helicase activity
  Homolog annotation: Hit_ID=Q6K7R9; Match level="QueryCoverage=100%, HitCoverage=62%, E-value=0.0, Identity=90%"; Hit description=DEAD -box ATP-dependent RNA helicase 48
  Pfam annotation: Domain name=DEAD; Domain location=64-243; Score =234.2; E_value=3.3e-67; Accession=PF00270.21; Description=DEADDEAH box helicase
  Pfam annotation: Domain name=Helicase_C; Domain location=317-393; Score=84.3; E_value=4.3e-22; Accession=PF00271.23; Description =Helicase conserved C-terminal domain
  Pfam annotation: Domain name=ResIII; Domain location=60-238; Score= -25.0; E_value=0.0067; Accession=PF04851.7; Description=Type III restriction enzyme, res subunit
  Pfam module annotation: Pfam domain module=DEAD::Helicase_C::ResIII; Domain location=64-243::317-393::60-238
ENNDLAGRIRELREEIKNREVLGTERRRYESKGESLLTSKRFDECGISPMTVQALTDAGYVQTTVVQEAALPICLDGKDVLVKAKTGTGKSAAFLLPAIESVLNAMKNNTNHRVSPIFALVLCPTRELAIQLTAEANVLLKYHKGIGVQSLIGGTRFKLDQKRLESDPCQILVATPGRLLDHIENKSSFSVRLMGLKLLVLDEADHLLDLGFRKDIEKIADSLPRQRQTLLFSATIPKEVRRVSQLVLKRDHVFVDTVGLGAVETPTKVQQSCLVVPHELHFHMVHHLLREHIDREVDYKVIVFCTTAMVTEFMYIMLRDLKLNVREIHSRKPQLYRTRISEEFRDSNRLILVTSDVSTRGVNYPDVTLVIQVGAPPDREHYIHRLGRTGREGKSGEGIILLAPWEEYFMNEIGDLPIEKYPAPDIDQEMKQKVDDSIKIVDMSIKEAAYHAWLGYYNSIADIGRDKTMLADLANRFGASIGLEKPPALYRKTALKMGLKDVPGIRIRK

SEQ ID NO: 98277 - protein, 93 aa, Setaria italica
  misc_feature (67)..(67): Xaa can be any naturally occurring amino acid
  Transcript Sequence Number=SeqID_32303
MARLASVVRWCGGWRERRARRQKLLRRRQHSGGTVWLGRRRSCRLSVSRLVRWRLVAALLRPIRKAXMEIVAGAAAGPAGRRQLVTLPQLNFP

SEQ ID NO: 98278 - protein, 50 aa, Setaria italica
  Transcript Sequence Number=SeqID_32304
RAKTQKYMLSCTMYGKCIQNFMKCLLSGGQICSYFHIRVSKFDISCGPLL

SEQ ID NO: 98279 - protein, 109 aa, Setaria italica
  misc_feature (65)..(65): Xaa can be any naturally occurring amino acid
  Transcript Sequence Number=SeqID_32305
  Gene Ontology: Mol. function=nucleic acid binding
  Homolog annotation: Hit_ID=Q6YSJ5; Match level="QueryCoverage=96%, HitCoverage=11%, E-value=4e-50, Identity=87%"; Hit description =Protein argonaute 16
TKRLVVVGNSEDCIPNRGRWNYNNKRLLDPVKIERWAIVNFSARCDMSRISRELINCGRSKGIFXERPHTLVDEDSQSRRCSPVERVERMFEKVKTSLPGPPEFLLCVL

SEQ ID NO: 98280 - protein, 534 aa, Setaria italica
  Transcript Sequence Number=SeqID_32306
  Gene Ontology: Mol. function=nucleic acid binding; Cellular component= spliceosome; Biological process=mRNA processing
  Homolog annotation: Hit_ID=B6TAF7; Match level="QueryCoverage=94%, HitCoverage=94%, E-value=0.0, Identity=75%"; Hit description=Nucleic acid binding protein
  Pfam annotation: Domain name=PSP; Domain location=319-369; Score =71.0; E_value=4.2e-18; Accession=PF04046.8; Description=PSP
  Pfam annotation: Domain name=zf-CCHC; Domain location=260-277; Score =18.2; E_value=0.00059; Accession=PF00098.15; Description=Zinc knuckle
  Pfam module annotation: Pfam domain module=PSP::zf-CCHC; Domain location=319-369::260-277
MASDEFISLEAPCEADAKGEGGDPQVEAPETRNAGPLASELQPEVEACAVGSTSSPKPSDGNIDLEEGQVEDMDLADDDDVVVKDELLDASIQPEVSVAAVQTVIGFEVKLDKGGGAENASVFESNSISLEESPARGVKRARVESKEPSVRVIFSDLTRESKRKLMELMQQWSQWQARRQHKSKEAAEEILESGEETYYPALHVGSEKSCAVSFWVDNQARENTTMDDDSVPLYDREFTLGSTPLGDSSNTESRADKDDSRCFNCGSYSHALKDCPKPRDNVAISNARKQHNLKRNQSNAHRVQNRYYQKTPGKFDDLKAGVLGPETRECLGIGENDPPPWLHRMRELGYPPGYLDVVDDEDKPSGITIFGDSEVKLDYEEGELPEQGELSPPRKRMTVEFPGINAPIPENGDRWLWGSAPPQSSGRHHSSDSRDYRDRGPPGTDHYSSRYLSHDYGQLSPSLGRSHSDRGWRSPPRYENLPADDSAWTPHSYPSRQYSGHYSSSSEMSSRHSRERDRDRDRDRHESRHHHHRR

SEQ ID NO: 98281 - protein, 88 aa, Setaria italica
  Transcript Sequence Number=SeqID_32307
HKVKTSVKRTFCAVIPTRSNLAPDQLCHATCVQLMITSCKATVLHSNTIGVHESVGYILAIARSTVEAIGPGRGMEVTTHTNTHAKHS

SEQ ID NO: 98282 - protein, 130 aa, Setaria italica
  Transcript Sequence Number=SeqID_32308
  Gene Ontology: Mol. function=protein binding
  Homolog annotation: Hit_ID=B9SFP2; Match level="QueryCoverage=96%, HitCoverage=25%, E-value=3e-49, Identity=69%"; Hit description =Speckle-type POZ protein, putative
  Pfam annotation: Domain name=BTB; Domain location=1-87; Score=-2.0; E_ value=0.021; Accession=PF00651.23; Description=BTBPOZ domain
PVFRAQLFGPMKDKNMKCIKIEDMEAPVFKALLHFMYWDELPDIEELTGVNTTWVSTLMAQHLLAAADRYALERLKLLCELKLCEDVAINTVANTLALAEQHHCYQLKTVCLKFVALPENLKGKYQFSKS

SEQ ID NO: 98283 - protein, 142 aa, Setaria italica
  misc_feature (16)..(16): Xaa can be any naturally occurring amino acid
  misc_feature (28)..(28): Xaa can be any naturally occurring amino acid
  misc_feature (50)..(50): Xaa can be any naturally occurring amino acid
  misc_feature (75)..(75): Xaa can be any naturally occurring amino acid
  misc_feature (93)..(93): Xaa can be any naturally occurring amino acid
  misc_feature (107)..(107): Xaa can be any naturally occurring amino acid
  Transcript Sequence Number=SeqID_32309
  Gene Ontology: Mol. function=structural constituent of ribosome; Cellular component=ribonucleoprotein complex; Biological process =translation
  Homolog annotation: Hit_ID=Q943F3; Match level="QueryCoverage=96%, HitCoverage=84%, E-value=8e-27, Identity=48%"; Hit description=60S ribosomal protein L18a
  Pfam annotation: Domain name=Ribosomal_L18ae; Domain location=5-142; Score=11.5; E_value=7.9e-09; Accession=PF01775.9; Description =Ribosomal L18ae protein family
MRICDEHPKICRMKLXATNEVRAKAMFXQILSPQMKNSNYQILDINEILXKGTSPPHLWLCNQNRTGCHNMVQEXNSPSVVTASCQCQVLCIXIIKTAIVHFKLFKXCKRENSKQFHMKNVRFSLVYCNRPPARKLKAILFM

SEQ ID NO: 98284 - protein, 96 aa, Setaria italica
  Transcript Sequence Number=SeqID_32310
  Gene Ontology: Mol. function=geranylgeranyl reductase activity; Biological process=chlorophyll biosynthetic process
  Homolog annotation: Hit_ID=O81335; Match level="QueryCoverage=100%, HitCoverage=21%, E-value=4e-22, Identity=56%"; Hit description =Geranylgeranyl hydrogenase
AADAGAELVPGLVTSLSLPEGPSDPYRVHYISSSGGGGQGRGVLEVDAVVGADGANSRVAREVGAGDYRTAIAFQERIRLPDAGMAYYDDLAEMYV

SEQ ID NO: 98285 - protein, 109 aa, Setaria italica
  misc_feature (40)..(40): Xaa can be any naturally occurring amino acid
  misc_feature (67)..(67): Xaa can be any naturally occurring amino acid
  Transcript Sequence Number=SeqID_32311
  Gene Ontology: Mol. function=hydrolase activity
  Homolog annotation: Hit_ID=Q2RBB4; Match level="QueryCoverage=97%, HitCoverage=50%, E-value=6e-30, Identity=54%"; Hit description =Hydrolase, alpha/beta fold family protein, expressed
MLSDFSEFGDVYDLNFGLGEDHPPTSMALRKEYQRTILQXPSLLTSVQDSTLASILLRPFPAVLSSXKLEQQEAMIRRWPPRKVMVMDTDHSPFFSAPERLLELILESL

SEQ ID NO: 98286 - protein, 116 aa, Setaria italica
  misc_feature (84)..(84): Xaa can be any naturally occurring amino acid
  Transcript Sequence Number=SeqID_32312
  Subcellular localization annotation: CTP_CleavageSite=38; ConfidenceScore=5.24e-01
MAPPLLFYDLSLLPSSSSSIGGGGDDSSNPSSSRLQLLAATARALELGYAAVALDRTHRGLLADSHRCRTDLFPPLSSLPLPPXAALHRRHLASPASEPFRQYTRITLSLDSAAAA

SEQ ID NO: 98287 - protein, 73 aa, Setaria italica
  Transcript Sequence Number=SeqID_32313
  Gene Ontology: Mol. function=protein transporter activity; Cellular component=mitochondrial inner membrane; Biological process=protein transport
MEDSNLRGLVGEEIVMETGKAAGIGLAAGSVWGALFSMLHDGPQVGSNIKYPQLIRTGKVCGHYAANFAVIGA

SEQ ID NO: 98288 - protein, 101 aa, Setaria italica
  Transcript Sequence Number=SeqID_32314
  Gene Ontology: Mol. function=nucleic acid binding; Cellular component= chloroplast
  Homolog annotation: Hit_ID=C1MJM8; Match level="QueryCoverage=89%, HitCoverage=30%, E-value=1e-14, Identity=44%"; Hit description =Phosphohistidine phosphatase
QGLSQAVVHFIPSFYSIAAMDGQTAEHLQKAICEYSSDEILTVMCMGHNKGWEEAASMFSGDSVVLKTCNAALLEAAGKSWVEAFSLAGLGGWKLHGIVKP

SEQ ID NO: 98289 - protein, 65 aa, Setaria italica
  Transcript Sequence Number=SeqID_32315
VKVHTRLFSAHASGPLGGPWSWSYPYSISHVHILSPSQITIHFSFSRYITFAMYIYLAANQKLCT

SEQ ID NO: 98290 - protein, 127 aa, Setaria italica
  Transcript Sequence Number=SeqID_32316
  Subcellular localization annotation: CTP_CleavageSite=68; ConfidenceScore=5.88e-01
KGAAKTKFSKSQSSKKLLSSSKPASFVQSILPKLRRSHTMPSRSPSAAAPTSKEGAQVQCTRSRSRLLASPRSSFSSNSRGDDEDDGGAASSPTSTLCFRTRHSGGGTGRLHGLLASVVGGQGTTAS

SEQ ID NO: 98291 - protein, 160 aa, Setaria italica
  misc_feature (145)..(145): Xaa can be any naturally occurring amino acid
  misc_feature (147)..(147): Xaa can be any naturally occurring amino acid
  Transcript Sequence Number=SeqID_32317
  Gene Ontology: Mol. function=nucleotide binding; Biological process =defense response
  Homolog annotation: Hit_ID=A0SEC2; Match level="QueryCoverage=100%, HitCoverage=47%, E-value=1e-54, Identity=62%"; Hit description=Pib (Fragment)
AIFGIDEARRAAKHDKPKEDLVDLINQEGKDLRVIAVWGTSGDLGQTTIVNTAYENPVIKKKFPCRAWVRVFHPFNLNDFIQSLVKQFRSAMGIDVLLETEKTGKELAKEFTRYINENSYLIVLNDMSTFEEWNGIKACLPNTRXGXRIIVCSPQVEVAS

SEQ ID NO: 98292 - protein, 202 aa, Setaria italica
  Transcript Sequence Number=SeqID_32318
  Gene Ontology: Mol. function=molecular_function; Cellular component =integral to membrane; Biological process=intracellular signaling cascade
  Homolog annotation: Hit_ID=B6TCG9; Match level="QueryCoverage=100%, HitCoverage=42%, E-value=1e-90, Identity=81%"; Hit description =Presenilin
  Pfam annotation: Domain name=Presenilin; Domain location=5-193; Score= -169.6; E_value=4.8e-06; Accession=PF01080.9; Description=Presenilin
RYDRVEQDEDASRAVVEMRDLRRGQSNIGEMNRSSGSVLQMDNLEREVPVTSTELPSIQGGSSQHAVIQIEQPEEEETAPLVSAASTNNAASDEEQRQSSSSEPPLDFEMFESTRGIKLGLGDFVFYSVLVGRAAMYDLMTVYACYLAIIAGLGCTLILLSICRHALPALPISIMLGVTFYFLTRLLMEPFVVGASTNLVMF

SEQ ID NO: 98293 - protein, 127 aa, Setaria italica
  Transcript Sequence Number=SeqID_32319
  Gene Ontology: Mol. function=mismatched DNA binding; Cellular component=synaptonemal complex; Biological process=mismatch repair
  Homolog annotation: Hit_ID=Q69MM0; Match level="QueryCoverage=95%, HitCoverage=9%, E-value=4e-58, Identity=87%"; Hit description=DNA mismatch repair protein-like
IASKIDIAINIRACYVKVEDDGCGITRDELVLLGEKYTTSKFHNVMGDGELSPRSFGLNGEALASLSDISVVEIRTKARGRPNAYCKIIKGSKCLHLGIDDKREIVGTTVVVRELFYNQPVRRKQSI

SEQ ID NO: 98294 - protein, 51 aa, Setaria italica
  Transcript Sequence Number=SeqID_32320
VEQCKIIFVEQCKIMRFSCHLIILHCSTRLLDKVVMHVYILICPIFLFQET

SEQ ID NO: 98295 - protein, 41 aa, Setaria italica
  Transcript Sequence Number=SeqID_32321
YPHLLATWLHADTLRKADEIFGPENKDLYTIFESLITRNVQ

SEQ ID NO: 98296 - protein, 345 aa, Setaria italica
  Transcript Sequence Number=SeqID_32322
  Gene Ontology: Cellular component=plasma membrane
  Homolog annotation: Hit_ID=Q00RR3; Match level="QueryCoverage=91%, HitCoverage=95%, E-value=2e-48, Identity=40%"; Hit description =H0525G02.7 protein
  Pfam annotation: Domain name=DUF615; Domain location=16-290; Score= -101.9; E_value=0.034; Accession=PF04751.6; Description=Protein of unknown function (DUF615)
MAEEGEEAVPPAAVVGDDDAGEAAEQQDFGLPGELMAVLPSDPYAQLDVARRITSIALSCRLGRLEAEVARLRAQLAERDAEAEDLRERVEQLDASLAVATGRLRRVEEEKETLVRENSSLSNTVRKLNRDVAKLEVFKKTLMQSLQEDDGSDNTAPSARVAASPNFSSAPSDEDSALPTSKSSQFSETASSVSEESSKVDPDAPRPPRPHVFLPSYNNTPRMTPPGSPPRGGYASVSPPRRHSISVTSMNMFNDRPSSYSGHYSSPFDAASQTGRTRVDGKEFFRQVRNRLSYEQFGAFLANVKELNAQRQTREDTLRKADEIFGPENKDLYTIFESLITRNVQ

SEQ ID NO: 98297 - protein, 52 aa, Setaria italica
  Transcript Sequence Number=SeqID_32323
ISAVFVEVKGGFTGRIFAELKQSGGTRRIHHPHPHLMQGGDSDGVVVPVYES

SEQ ID NO: 98298 - protein, 331 aa, Setaria italica
  Transcript Sequence Number=SeqID_32324
  Gene Ontology: Mol. function=transaminase activity; Cellular component=chloroplast; Biological process=metabolic process
  Homolog annotation: Hit_ID=Q5NAM3; Match level="QueryCoverage=99%, HitCoverage=98%, E-value=1e-146, Identity=78%"; Hit description =Branched-chain amino acid aminotransferase-like
  Pfam annotation: Domain name=Aminotran_4; Domain location=78-314; Score=144.8; E_value=2.7e-40; Accession=PF01063.11; Description =Aminotransferase class IV
MQGGDSDGVVVPVYESGAEVLQKLQDNTNRSTYPAMYSSVVGGIILDPAMMVLPIDDHMVHRGHGVFDTAMLLDGCLYELDPHLDRFLRSAAKARIDTAPFPRDALRSILLQMTAASGCRKGSIRYWLSAGPGDFLLSSAGCPAPAFYAVVIAADYDQCRDGVRAVTTSVPMKPPLFATVKNVNYLPNVLSIMDAEDRGAFAAVWVDDQGYVAEGPMVNVAFITPDRELVLPAFDKILSGCTAKRLLALAPKLVDAGLLTAVATRNITAEDARRSVEMAFVGSGLPVLPVVEWDGNPIISCEVGQLMMALSDLLWEDMKSGPDRIAVPYSG

SEQ ID NO: 98299 - protein, 136 aa, Setaria italica
  misc_feature (15)..(15): Xaa can be any naturally occurring amino acid
  Transcript Sequence Number=SeqID_32325
  Gene Ontology: Mol. function=transferase activity, transferring glycosyl groups; Biological process=metabolic process
  Homolog annotation: Hit_ID=Q6Z035; Match level="QueryCoverage=70%, HitCoverage=20%, E-value=3e-28, Identity=61%"; Hit description =Putative glucosyltransferase-10
RRWRRLRGRHRGAEXVPPVTCVVLSGLVSFALDAAEEAGVPAFVLWGTSACGFVCTLRLRQLRQRGYTPLKDESYLTNGYLDTPIDWIAGIPPVRLGDVSSFVRTLEQLLHQDFFNGKELCKNINPDEAVAYGAAV

SEQ ID NO: 98300 - protein, 80 aa, Setaria italica
  Transcript Sequence Number=SeqID_32326
SPNLEKLTLRHCKFPKYPEEKKGKTKLNNTSSSEFRRLDFMCENLKVEIIYKDGDGHQLVKLLLHASSFLSKNNIKLTKS

SEQ ID NO: 98301 - protein, 120 aa, Setaria italica
  misc_feature (29)..(29): Xaa can be any naturally occurring amino acid
  Transcript Sequence Number=SeqID_32327
CSRRLSTAADSDADYHSSDGSVMPDVLAXGREACYKARDAFYACVEKHADKRPTEIATMGLLYPADCKKSRANFVSNCRPTWVKHFDRQYCAKKRVQRLLDGDEDRRGPISLPQPYTFKQ

SEQ ID NO: 98302 - protein, 137 aa, Setaria italica
  Transcript Sequence Number=SeqID_32328
  Homolog annotation: Hit_ID=Q2HUV6; Match level="QueryCoverage=100%, HitCoverage=52%, E-value=2e-24, Identity=40%"; Hit description =Cytochrome cd1-nitrite reductase-like, C-terminal haem d1
MPSFPPPGAVTVCEINRDLVAADSLSDDRAKEAYGDVLGMVFSPIPFQPDALPPIREPPAAEQTESNENVPAASVTSSISEFFKRMIFPPQEPNLLQKFDTQKISWNPHKHCLAFVSGKNQVTVHDFEDSDAKEPCI

SEQ ID NO: 98303 - protein, 248 aa, Setaria italica
  Transcript Sequence Number=SeqID_32329
  Gene Ontology: Mol. function=nucleic acid binding; Cellular component= nuclear envelope
  Homolog annotation: Hit_ID=Q2HUV6; Match level="QueryCoverage=65%, HitCoverage=60%, E-value=2e-38, Identity=49%"; Hit description =Cytochrome cd1-nitrite reductase-like, C-terminal haem d1
  Pfam annotation: Domain name=WD40; Domain location=120-160; Score =8.1; E_value=4.3; Accession=PF00400.24; Description=WD domain, G -beta repeat
  Pfam annotation: Domain name=WD40; Domain location=164-201; Score =13.7; E_value=0.76; Accession=PF00400.24; Description=WD domain, G -beta repeat
  Pfam annotation: Domain name=WD40; Domain location=57-92; Score=12.2; E_value=1.4; Accession=PF00400.24; Description=WD domain, G-beta repeat
  Pfam annotation: Domain name=eIF2A; Domain location=20-202; Score= -113.8; E_value=0.078; Accession=PF08662.3; Description=Eukaryotic translation initiation factor eIF
  Pfam module annotation: Pfam domain module=WD40::WD40::WD40::eIF2A; Domain location=120-160::164-201::57-92::20-202
FLSKRYCKRMIFPPQEPNLLQKFDTQKISWNPHKHCLAFVSGKNQVTVHDFEDSDAKEPCILTSDHVKAIEWRPNSGKMIAVACKGGICLWSASYPGNAPFMKAGVTSSSLSAFRSGDQWILVDVLRDSSAEQVSALCWKPDGRYLASASCNSPSFTIWDVSQGLGTPIRRGLSNISLLRWSPSGDYLLAAKFDGTFHFWETNTWTSEPWSSSNGYVSGANWDPEGRVALLSFSNSTTLGSIHFSSKP

SEQ ID NO: 98304 - protein, 221 aa, Setaria italica
  Transcript Sequence Number=SeqID_32330
  Gene Ontology: Mol. function=molecular_function; Cellular component =nuclear envelope
  Homolog annotation: Hit_ID=Q2HUV7; Match level="QueryCoverage=89%, HitCoverage=97%, E-value=3e-84, Identity=72%"; Hit description =Nitrous oxide reductase, N-terminal
  Subcellular localization annotation: CTP_CleavageSite=49; ConfidenceScore=5.11e-01
QISTYLASASCNSPSFTIWDVSQGLGTPIRRGLSNISLLRWSPSGDYLLAAKFDGTFHFWETNTWTSEPWSSSNGYVSGANWDPEGRVALLSFSNSTTLGSIHFSSKPPSLDAHLLPVELPEISSLIVSRGIEKLAWDASGERLALSFKDGNEMYRGLVAVYDVRRSPLVSLSLVGFIRGPGEGAKPLAFAFHNKFKQGPLLSVCWSSGWCCTYPLILHSH

SEQ ID NO: 98305 - protein, 160 aa, Setaria italica
  misc_feature (22)..(22): Xaa can be any naturally occurring amino acid
  Transcript Sequence Number=SeqID_32331
  Gene Ontology: Mol. function=nucleotide binding; Biological process =defense response
  Homolog annotation: Hit_ID=Q84KC8; Match level="QueryCoverage=100%, HitCoverage=10%, E-value=4e-15, Identity=36%"; Hit description=NBS -LRR disease resistance protein homologue
  Subcellular localization annotation: CTP_CleavageSite=61; ConfidenceScore=5.15e-01
LSVMNCPKLLSYSSSSSSCFPXPNSLEYIRLEGTVGMETLEPLSNLSSLTSLSTAGCVPLRGEGLLSLVAQGCLTRLYVAGTPALFFDHEPSWVQEQEHQSRSSKLQELSIDDVAAATATPICSFLLSSLTTLNFFEDQLLECFTKEQEALLFVNSLEEI

SEQ ID NO: 98306 - protein, 109 aa, Setaria italica
  Transcript Sequence Number=SeqID_32332
  Gene Ontology: Mol. function=binding
  Homolog annotation: Hit_ID=Q2R3K8; Match level="QueryCoverage=86%, HitCoverage=19%, E-value=6e-40, Identity=86%"; Hit description =Armadillo/beta-catenin-like repeat family protein, expressed
  Pfam annotation: Domain name=Arm; Domain location=16-56; Score=21.8; E_value=0.0028; Accession=PF00514.15; Description=Armadillobeta -catenin-like repeat
  Pfam annotation: Domain name=Arm; Domain location=62-104; Score=8.0; E_value=1.2; Accession=PF00514.15; Description=Armadillobeta-catenin- like repeat
  Pfam module annotation: Pfam domain module=Arm::Arm; Domain location =16-56::62-104
AAQAAAAGVLRNLAAFPDLLPWFRDEGALPLLLQLVSLGTPRAQELALGCLQNLTAGDGDEGQRLKVEAFQEGALACVKDFLDASRGDEPGLAPALGLLRNMASFRYIA

SEQ ID NO: 98307 - protein, 48 aa, Setaria italica
  Transcript Sequence Number=SeqID_32333
  Gene Ontology: Cellular component=plasma membrane; Biological process= protein transport
  Homolog annotation: Hit_ID=Q9SZE4; Match level="QueryCoverage=100%, HitCoverage=21%, E-value=9e-12, Identity=64%"; Hit description =Vacuolar protein sorting-associated protein 32 homolog 2
VHDQIIMLESAKATTDTVDALRSGSSAVKSIQQSLNIDDIENAIDEAN

SEQ ID NO: 98308 - protein, 157 aa, Setaria italica
  Transcript Sequence Number=SeqID_32334
  Homolog annotation: Hit_ID=B6T5P9; Match level="QueryCoverage=100%, HitCoverage=100%, E-value=1e-54, Identity=70%"; Hit description =Nicotiana lesion-inducing like
  Pfam annotation: Domain name=DoxX; Domain location=4-104; Score=-8.4; E_value=0.081; Accession=PF07681.4; Description=DoxX
  Pfam annotation: Domain name=HR_lesion; Domain location=1-138; Score =219.0; E_value=1.2e-62; Accession=PF05514.3; Description=HR-like lesion-inducing
  Pfam module annotation: Pfam domain module=DoxX::HR_lesion; Domain location=4-104::1-138
MGFISFVGRVLFASLFLLSAYQEFIEFGNDGGPAAKALKPKFNLFIKQVSKNTGLGVPHVDIKTVIAATMFLKGFGGLLFIFSSSFGAFLLFIYLAFITPIVYDFYNYEMESAQFVQLFFKFSQNLAFIGALLFFLGMKNSIPRRRSKGRTAKTKTN

SEQ ID NO: 98309 - protein, 131 aa, Setaria italica
  misc_feature (32)..(32): Xaa can be any naturally occurring amino acid
  Transcript Sequence Number=SeqID_32335
  Gene Ontology: Mol. function=UDP-glucose 4-epimerase activity; Cellular component=integral to membrane; Biological process =galactose metabolic process
  Homolog annotation: Hit_ID=B6SKL3; Match level="QueryCoverage=100%, HitCoverage=24%, E-value=6e-46, Identity=72%"; Hit description=UDP -arabinose 4-epimerase 2
AVRVLQRLFPQPGRLQFIYADLGDAKAVSFVXAYVFFVCVYISAQLRSVLHLTNSQVNKIFSENAFDAVMHFAAVAYVGESTIEPLRYYHNITSNTLTVLEAMAAHNVNTLIYSSTCATYGEPDTMPIVET

SEQ ID NO: 98310 - protein, 173 aa, Setaria italica
  Transcript Sequence Number=SeqID_32336
  Gene Ontology: Mol. function=UDP-arabinose 4-epimerase activity; Cellular component=integral to membrane; Biological process =carbohydrate metabolic process
  Homolog annotation: Hit_ID=B6SKL3; Match level="QueryCoverage=94%, HitCoverage=39%, E-value=6e-82, Identity=90%"; Hit description=UDP -arabinose 4-epimerase 2
  Subcellular localization annotation: CTP_CleavageSite=39; ConfidenceScore=5.21e-01
MPATPRSRSQARTTRPWILPGMDFTDTRRKPNFTGKIAVAAALTVMCIIVLKQSPSFSGTSVFSRHEIGVTHVLVTGGAGYIGSHATLRLLKDNYRVTIVDNLSRGNMGAVRVLQRLFPQPGRLQFIYADLGDAKAVNKIFSENAFDAVMHFAAVAYVGESTISSPTSRLLTY

SEQ ID NO: 98311 - protein, 36 aa, Setaria italica
  Transcript Sequence Number=SeqID_32337
WMDRFGELETAKAVLQDVDSLVEHGRMLMAKNAARA

SEQ ID NO: 98312 - protein, 144 aa, Setaria italica
  Transcript Sequence Number=SeqID_32338
DTLVCSEPDTNQGICKDLSRAEEKESCMSISVQHYESGGFLRSSHMKDWAMSAQIDLSDDARLMKGILVLRKCFVRKKEKRKSMPTSDSDVLHEKSRSNEHGICRSHGQKHIVEINSKQSSCDSEMIHQDHKEENYEPNERQNP

SEQ ID NO: 98313 - protein, 228 aa, Setaria italica
  Transcript Sequence Number=SeqID_32339
  Gene Ontology: Biological process=response to biotic stimulus
  Homolog annotation: Hit_ID=B6TBJ0; Match level="QueryCoverage=83%, HitCoverage=89%, E-value=3e-99, Identity=93%"; Hit description =Cyclase/dehydrase family protein
  Pfam annotation: Domain name=Polyketide_cyc; Domain location=51-188; Score=11.8; E_value=0.0046; Accession=PF03364.12; Description =Streptomyces cyclasedehydrase
  Pfam annotation: Domain name=Polyketide_cyc2; Domain location=42-192; Score=54.8; E_value=3.3e-13; Accession=PF10604.1; Description =Polyketide cyclase  dehydrase and li
  Pfam module annotation: Pfam domain module=Polyketide_cyc::Polyketide_ cyc2; Domain location=51-188::42-192
MDQQGAGADGEVPAGLGLTAAEYEQLRSTVEAHHRYAVGAGQCSSLLAQRIHAPPAAVWAIVRRFDCPQVYKHFIRSCALRPDPEAGDNLRPGRLREVSVISGLPASTSTERLDLLDDAARVFGFSITGGEHRLRNYRSVTTVNELAGPGICTVVLESYVVDVPDGNTEDDTRLFADTVIRLNLQKLKSVAEANAAAAAGPLTVPAGNLRLEWEQQQVLGVSVISLHG

SEQ ID NO: 98314 - protein, 84 aa, Setaria italica
  Transcript Sequence Number=SeqID_32340
PNAAAAVRPRTRTAALLHLAAPTTAGEARGSVGGTESEAMGHERGARRIAGVSGGAVPALPALAGVGSKRALALAVAGPGCRAG

SEQ ID NO: 98315 - protein, 101 aa, Setaria italica
  misc_feature (12)..(12): Xaa can be any naturally occurring amino acid
  Transcript Sequence Number=SeqID_32341
  Homolog annotation: Hit_ID=Q9ZTB2; Match level="QueryCoverage=97%, HitCoverage=20%, E-value=5e-31, Identity=65%"; Hit description =Nodulin
AYLTAMLGALGXSYGALRDYLMVSSGVYQEMARINADAIRGLEPKISVWSGGAGGEGGDASGGGAMKELAGVYKMLPPLLTTVHEQTGMLPPAWMGTLTGG

SEQ ID NO: 98316 - protein, 52 aa, Setaria italica
  Transcript Sequence Number=SeqID_32342
KCLVLCRPYVLERIIFLSCSITVKMFQIFVNLISLVVQLFLDSNSRTDDISV

SEQ ID NO: 98317 - protein, 82 aa, Setaria italica
  Transcript Sequence Number=SeqID_32343
AALLAFTRTADFLAELRSYVREEDGEIILKLVGGLGTAIFVLEWAALALAFALRLDDDGAEEADQVTKLTMSDSALIQHCRA

SEQ ID NO: 98318 - protein, 155 aa, Setaria italica
  Transcript Sequence Number=SeqID_32344
  Gene Ontology: Mol. function=ligase activity; Cellular component =chloroplast; Biological process=response to auxin stimulus
  Homolog annotation: Hit_ID=Q6I581; Match level="QueryCoverage=100%, HitCoverage=26%, E-value=4e-79, Identity=87%"; Hit description =Probable indole-3-acetic acid-amido synthetase GH3.5
  Pfam annotation: Domain name=GH3; Domain location=1-155; Score= -254.2; E_value=1.2e-05; Accession=PF03321.5; Description=GH3 auxin -responsive promoter
RFKEAMKDIMSQCCSPDEVIFGPDFHQSLYCHLLCGLIYSDEVQFVFSPFAHSLVHAFHTLEEVWEDLCADIRDGVLSKQVTAPSIRQAVSKILRPNPELASSIYSKCHNLSNWYGVIPALWPNAKYIYGIMTGSMEPYLKKLRHYAGHLPLMSA

SEQ ID NO: 98319 - protein, 70 aa, Setaria italica
  Transcript Sequence Number=SeqID_32345
QALLPLFLRGITLGASVHVSACMMEKRGSGGSVLCIPKYVHVTMLMVLITELACTGKKVIWVYKCTIYGV

SEQ ID NO: 98320 - protein, 157 aa, Setaria italica
  misc_feature (111)..(111): Xaa can be any naturally occurring amino acid
  Transcript Sequence Number=SeqID_32346
  Gene Ontology: Mol. function=protein binding; Cellular component =chromosome; Biological process=regulation of transcription, DNA -dependent
  Homolog annotation: Hit_ID=Q7X923; Match level="QueryCoverage=98%, HitCoverage=15%, E-value=1e-50, Identity=59%"; Hit description=FACT complex subunit SPT16
RKDVVPKLENIVMDEKKVPHSKLMDLTEKIMLSPSKISVKLKAGNVDICYPPIFQSGAKYDLRPGALSNDDDLYYDYGSLIVCAMGAKYSGYCSNVARTFLIDCSVEKCNXDAAIAALTPGSKASKSYQAAVDVVREEAPDLLPFLTKSGGTGIGIE

SEQ ID NO: 98321 - protein, 634 aa, Setaria italica
  Transcript Sequence Number=SeqID_32347
  Gene Ontology: Mol. function=acyl-CoA binding
  Homolog annotation: Hit_ID=Q2R069; Match level="QueryCoverage=92%, HitCoverage=89%, E-value=0.0, Identity=70%"; Hit description=Kelch motif family protein, expressed
  Pfam annotation: Domain name=Kelch_1; Domain location=137-183; Score =13.0; E_value=0.095; Accession=PF01344.17; Description=Kelch motif
  Pfam annotation: Domain name=Kelch_1; Domain location=188-234; Score =24.9; E_value=0.00034; Accession=PF01344.17; Description=Kelch motif
  Pfam annotation: Domain name=Kelch_1; Domain location=239-284; Score =15.1; E_value=0.052; Accession=PF01344.17; Description=Kelch motif
  Pfam annotation: Domain name=Kelch_1; Domain location=28-73; Score =23.2; E_value=0.0011; Accession=PF01344.17; Description=Kelch motif
  Pfam annotation: Domain name=Kelch_1; Domain location=86-132; Score =18.9; E_value=0.018; Accession=PF01344.17; Description=Kelch motif
  Pfam annotation: Domain name=Kelch_2; Domain location=137-183; Score =16.9; E_value=0.087; Accession=PF07646.7; Description=Kelch motif
  Pfam annotation: Domain name=Kelch_2; Domain location=188-234; Score =26.7; E_value=9.7e-05; Accession=PF07646.7; Description=Kelch motif
  Pfam annotation: Domain name=Kelch_2; Domain location=239-284; Score =16.9; E_value=0.085; Accession=PF07646.7; Description=Kelch motif
  Pfam annotation: Domain name=Kelch_2; Domain location=28-73; Score =21.4; E_value=0.0039; Accession=PF07646.7; Description=Kelch motif
  Pfam annotation: Domain name=Kelch_2; Domain location=86-132; Score =18.5; E_value=0.028; Accession=PF07646.7; Description=Kelch motif
  Pfam module annotation: Pfam domain module=Kelch_1::Kelch_1::Kelch _1::Kelch_1::Kelch_1::Kelch_2::Kelch_2::Kelch_2::Kelch_2::Kelch_2; Domain location=137-183::188-234::239-284::28-73::86-132::137 -183::188-234::239-284::28-73::86-132
DTFDLDGRSFNISENWTVLSTEGEKPIPRFYHAAAIVSSKMVVFGGDSGHHLLDDTKILNLEKLIWDPAPPKVRPSPNGHSAKLPACKGHCLVPWGNSVILVGGKTEPASDRLSVWIFNTETELWSHVEAKGDIPAARSGHTVIRAGATLILFGGEDTKGKKRHDLHMFDLKSSTWLPLNYKGAGPSPRSNHVAALYDDRILLIFGGHSKSKTLNDLYSLDFETMVWSRVKTHGHHPSPRAGCSGALCGNKWYIAGGASKKKRHVETWVFDILQYKWSVCVVPPSSSITSKKGFSMVPFYHRDKIALIAFGGNKKEPCNKVEILVVLQNEHSFSWRSAPEVDRVLYEYSPSNKELVDHLNKCAPLYSNSSVARHSLTSVIEHPPRSEPLSESLLKQPDLGTSPHGHLDQVEECSLAQKLQKQIDDDRYDDGDDSSSCQESTPKGHRSTRTGAGIQNDMAQVGTMVTGGSNVRRIARCSSDVSQSHLYNTKIADLIRRNAMLEDQLVAALASKDQLEKSLSSVIHSREQLEKMLASKDKEAEILKEKIAGLELAQEESNSLSNTVHADNVRLEREVAFLKAVTDETQKELHSTRRVLVGEQSRSFHLQVEVFHLKQRLQILEGRSGTPTKQPHNM

SEQ ID NO: 98322 - protein, 71 aa, Setaria italica
  Transcript Sequence Number=SeqID_32348
IGVAAWRHGVQLNPGADQVSEMGVHMYTFEKKIVLSRYNTCNWVQIRIQTGLGERPDPLNLFVFGSGRSVS

SEQ ID NO: 98323 - protein, 91 aa, Setaria italica
  misc_feature (15)..(15): Xaa can be any naturally occurring amino acid
  misc_feature (28)..(28): Xaa can be any naturally occurring amino acid
  Transcript Sequence Number=SeqID_32349
  Subcellular localization annotation: CTP_CleavageSite=12; ConfidenceScore=5.12e-01
SLFPSPFQLTPSAFXLATRDNCVHGPKXGAWPQFRPKPHSARREPSPMQHGYVSIPIMPSPSHINFPLFLNCRLPSWILYFGLRLEDIRCR

SEQ ID NO: 98324 - protein, 105 aa, Setaria italica
  Transcript Sequence Number=SeqID_32350
AEILFANIIADDVSECYKSQMLLETYVNSGSMSASCTIDDAGNKEIAKRRKTEQKPNFHQIWLIMIKCLLNQGSNSPFCFQILINPEKNVEDGRFELLSLTMPIP

SEQ ID NO: 98325 - protein, 721 aa, Setaria italica
  Transcript Sequence Number=SeqID_32351
  Gene Ontology: Mol. function=binding; Cellular component =intracellular; Biological process=RNA processing
  Homolog annotation: Hit_ID=Q8GTX9; Match level="QueryCoverage=97%, HitCoverage=99%, E-value=0.0, Identity=66%"; Hit description=Cell cycle control crn (Crooked neck) protein-like
  Pfam annotation: Domain name=HAT; Domain location=120-152; Score =29.6; E_value=1.3e-05; Accession=PF02184.8; Description=HAT (Half-A -TPR) repeat
  Pfam annotation: Domain name=HAT; Domain location=154-186; Score=8.1; E_value=1.2; Accession=PF02184.8; Description=HAT (Half-A-TPR) repeat
  Pfam annotation: Domain name=HAT; Domain location=188-219; Score =11.3; E_value=0.32; Accession=PF02184.8; Description=HAT (Half-A -TPR) repeat
  Pfam annotation: Domain name=HAT; Domain location=221-252; Score =37.1; E_value=7.3e-08; Accession=PF02184.8; Description=HAT (Half-A -TPR) repeat
  Pfam annotation: Domain name=HAT; Domain location=254-289; Score =11.6; E_value=0.28; Accession=PF02184.8; Description=HAT (Half-A -TPR) repeat
  Pfam annotation: Domain name=HAT; Domain location=291-325; Score=5.4; E_value=3.7; Accession=PF02184.8; Description=HAT (Half-A-TPR) repeat
  Pfam annotation: Domain name=HAT; Domain location=369-410; Score=2.5; E_value=12; Accession=PF02184.8; Description=HAT (Half-A-TPR) repeat
  Pfam annotation: Domain name=HAT; Domain location=413-449; Score=4.3; E_value=5.8; Accession=PF02184.8; Description=HAT (Half-A-TPR) repeat
  Pfam annotation: Domain name=HAT; Domain location=484-516; Score =13.4; E_value=0.14; Accession=PF02184.8; Description=HAT (Half-A -TPR) repeat
  Pfam annotation: Domain name=HAT; Domain location=518-552; Score=7.8; E_value=1.3; Accession=PF02184.8; Description=HAT (Half-A-TPR) repeat
  Pfam annotation: Domain name=HAT; Domain location=554-585; Score =23.9; E_value=0.00067; Accession=PF02184.8; Description=HAT (Half-A -TPR) repeat
  Pfam annotation: Domain name=HAT; Domain location=86-118; Score=3.4; E_value=8.1; Accession=PF02184.8; Description=HAT (Half-A-TPR) repeat
  Pfam annotation: Domain name=TPR_2; Domain location=106-139; Score =20.1; E_value=0.0092; Accession=PF07719.9; Description =Tetratricopeptide repeat
  Pfam annotation: Domain name=TPR_2; Domain location=140-173; Score =5.2; E_value=7.7; Accession=PF07719.9; Description=Tetratricopeptide repeat
  Pfam annotation: Domain name=TPR_2; Domain location=240-273; Score =17.3; E_value=0.065; Accession=PF07719.9; Description=Tetratricopepti de repeat
  Pfam annotation: Domain name=TPR_2; Domain location=437-470; Score =7.0; E_value=4.6; Accession=PF07719.9; Description=Tetratricopeptide repeat
  Pfam module annotation: Pfam domain module=HAT::HAT::HAT::HAT::HAT::HA T::HAT::HAT::HAT::HAT::HAT::HAT::TPR_2::TPR_2::TPR_2::TPR_2; Domain location=120-152::154-186::188-219::221-252::254-289::291-325::369 -410::413-449::...
  Pfam module annotation: Domain location=484-516::518-552::554-585::86- 118::106-139::140-173::240-273::437-470
  Subcellular localization annotation: CTP_CleavageSite=40; ConfidenceScore=5.13e-01
MALTTRGGGAGGGDPAKAPSASDPSLGFLTKRDTEVKLPRATRVKNKTPAPVQITAEQILREARERQEPEIRPPKQKITDTHELAEYRLRKRKEFEDVIRRVRWSVSAWVKYARWEEQQRDFARARSVYERALDVAHRDHTLWLKYAEFEMRNRFVNHARNVWDRAVSLLPRVDQLWYKYIHMEELLGAVANARQVFERWMAWRPDTAGWNSYIKFELRYGEVERARAIYERFVAEHPRPDTFIRYAKFEMKRGEVERARRVYERAADLLADDEDAEVLFVAFAEFEERCREVERARAIYKHALDRVPKGRAEELYRKFLAFEKQFGDREGIEDAIVGKRRFQYEDEVRKNPLNYDSWFDYIRLEESVGNKDRIREVYERAIANVPPAEEKRYWQRYIFLWINYALYEELDAQDMERTREVYKECLKLIPHKKFTFAKIWLMAAQFEIRQRNLKAARQILGNAIGMAPKGKIFKKYIEIELYLGNFDRCRTLYEKYIEWSPANCYAWRKYAELEKNLSETDRARSIYELAIAQPALDTPEVLWKEYLQFEIDESEFGRARDLYERLLERTKHLKVWISFAEFEASAGLGSEDSESEEKKSEVGYQEQQMERISKCRAIFERAFDYFRTSAPELKEERAMLLEEWLSKEVSFGDLGDVSLVQKKAPRKVKRKRPIPTEDGSTIAYEEYIDYIFPDEVAQAPNLKILEAAYKWKKQKTGDDDE

SEQ ID NO: 98326 - protein, 123 aa, Setaria italica
  misc_feature (14)..(14): Xaa can be any naturally occurring amino acid
  misc_feature (16)..(16): Xaa can be any naturally occurring amino acid
  misc_feature (24)..(24): Xaa can be any naturally occurring amino acid
  Transcript Sequence Number=SeqID_32352
  Gene Ontology: Mol. function=structural molecule activity; Cellular component=cytoskeleton; Biological process=multicellular organismal development
  Homolog annotation: Hit_ID=B6TWX2; Match level="QueryCoverage=100%, HitCoverage=27%, E-value=2e-62, Identity=93%"; Hit description=Actin- like protein arp6
  Pfam annotation: Domain name=Actin; Domain location=1-123; Score= -235.3; E_value=0.046; Accession=PF00022.11; Description=Actin
LYEASRQPTLFRAXCXLVVDCGFXFTHASPVLQNFTLNYGVRRMDLGGKALTNYLKELVSYRSLNVMDETLLIDDAKEKLCFVSLDVPGDLRLARLSFKDNPFRCSYILPDGITYKKGFVKDM

SEQ ID NO: 98327 - protein, 552 aa, Setaria italica
  Transcript Sequence Number=SeqID_32353
  Gene Ontology: Mol. function=2 iron, 2 sulfur cluster binding; Cellular component=peroxisome; Biological process=oxidation reduction
  Homolog annotation: Hit_ID=O23888; Match level="QueryCoverage=100%, HitCoverage=40%, E-value=0.0, Identity=85%"; Hit description =Aldehyde oxidase-2
  Pfam annotation: Domain name=Ald_Xan_dh_C2; Domain location=1-453; Score=593.8; E_value=1.8e-175; Accession=PF02738.10; Description =Aldehyde oxidase and xanthine dehydrogenase, molybdopterin binding domain
FHNVRLITRRVGGGFGGKAMKAIHVACACAVAAFKLQRPVRMYLDRKTDMIIAGGRHPMKVKYSVGFKSDGKITALHLDLGINAGISPDVSPLMPPAIIGALKKYNWGNLAFDAKVCKTNVSSKSAMRGPGDVQGSFIAEAIIEHVASALSVDTNAIRRKNLHDHESLAVFYGESAGEASTYSLVTMFDKLASSPDYHRRAEMVEHFNRSNKWKKRGISCVPITYEVNLRPTPGKVSIMNDGSIAVEVGGVEIGQGLWTKVKQMTAYGLGQLCQDGGECLLDKVRVIQADTLSMIQGGFTGGSTTSETSCEAVRLSCAALVERLKPIEESLKAKAGTVEWSALIAQASMASVNLTAHAYWTPDPTFRRYLNYGAAISEVEVDVLTGATTILRSDLLYDCGQSLNPAVDLGQVEGAFVQGVGFFTNEEYATNSDGLVINDGTWTYKIPTVDTIPKQFNVELINSARDQKRVLSSKASGEPPLLLACSVHCAMREAIRAARKEFSVCTGPANSALTFQMDVPATMPIVKELCGLDVVERYLESVSAAGPTTAKA

SEQ ID NO: 98328 - protein, 101 aa, Setaria italica
  Transcript Sequence Number=SeqID_32354
  Subcellular localization annotation: CTP_CleavageSite=20; ConfidenceScore=5.07e-01
IVSVPLDGAAAGVGKARHPSAAIRRRGRLADLYRRCVSFIGATPHGRLAFAGSRGVFLVNPVTDALRGVDTVGYCQKAVVAAAAGHGCSLFVSLGSLFAPP

SEQ ID NO: 98329 - protein, 54 aa, Setaria italica
  Transcript Sequence Number=SeqID_32355
KYLICYALALHVCSYEALISNVIIFYFIVISHYIATMHFFCAFVVGTLEWDSSC

SEQ ID NO: 98330 - protein, 108 aa, Setaria italica
  Transcript Sequence Number=SeqID_32356
ITACRETRVRLFYLIICPSCNSSIHIQIETRIACIYLCLSFPLFFSPLLFPLCSLLDRQIVALDISWRKQARAEAAAERRKGILKILQHSLCLLLHQICPLCDLKEVR

SEQ ID NO: 98331 - protein, 327 aa, Setaria italica
  Transcript Sequence Number=SeqID_32357
  Gene Ontology: Mol. function=substrate-specific transmembrane transporter activity; Cellular component=integral to membrane; Biological process=transmembrane transport
  Homolog annotation: Hit_ID=B6U4F9; Match level="QueryCoverage=100%, HitCoverage=64%, E-value=1e-169, Identity=89%"; Hit description =Sugar transport protein 5
  Pfam annotation: Domain name=Sugar_tr; Domain location=1-307; Score =49.2; E_value=1.6e-11; Accession=PF00083.16; Description=Sugar (and other) transporter
GYLVANLINYGTSRIPGWGWRLSLGLAAIPAAVMVAGAVFIPDTPSSLVLRGKHDDARAALQRVRGKGVDIGAEFADILAAAEHARRNEEGAFRRILRREYRPYLVMAVAFPVFLNLTGVAVTAFFSPILFRTVGFESDAALMGAVILGVMNIGGILASGFAMDRYGRKLLFVIGGALMFTCQVTMASIIGSHLGNGSKMPKGYAVAVLIATFVFSASFSWSWGALYWTVPGEIYPVEVRSAGQGAAVALNLGLNFLQAQFFLAMLCCFRYGAFLFYASWLVVMTAFAVALVPETKGVPLESMGHVFARHWYWGRFVKDQKLGDEST

SEQ ID NO: 98332 - protein, 83 aa, Setaria italica
  Transcript Sequence Number=SeqID_32358
IVMLNLLNGHSRYLSLQFLIAIMMLYSGIKRSGMTVTIICRSSVWWLWKRPVSLKPEHIRDEKVKVLTSFILLCYQLTIKTGI

SEQ ID NO: 98333 - protein, 100 aa, Setaria italica
  misc_feature (57)..(57): Xaa can be any naturally occurring amino acid
  Transcript Sequence Number=SeqID_32359
  Gene Ontology: Mol. function=protein serine/threonine kinase activity; Biological process=protein amino acid phosphorylation
  Homolog annotation: Hit_ID=Q2RAY4; Match level="QueryCoverage=71%, HitCoverage=12%, E-value=5e-09, Identity=40%"; Hit description=D -mannose binding lectin family protein, expressed
  Subcellular localization annotation: CTP_CleavageSite=29; ConfidenceScore=5.27e-01
SLLIFLQSLSPCSSAPAPSQLGAGSTLSVEDHARPFLVSPDATFSCGFLEAGENAFXFSVWYTSLADKNAAWTASPGSIRRRREGRANVGWRRRRGAAGL

SEQ ID NO: 98334 - protein, 205 aa, Setaria italica
  Transcript Sequence Number=SeqID_32360
  Gene Ontology: Mol. function=glucose-6-phosphate dehydrogenase activity; Cellular component=cytoplasm; Biological process =carbohydrate metabolic process
  Homolog annotation: Hit_ID=C0PFX0; Match level="QueryCoverage=99%, HitCoverage=39%, E-value=1e-115, Identity=95%"; Hit description =Glucose-6-phosphate 1-dehydrogenase
  Pfam annotation: Domain name=G6PD_C; Domain location=1-194; Score =284.8; E_value=2e-82; Accession=PF02781.8; Description=Glucose-6 -phosphate dehydrogenase, C-terminal domain
VVIGQYDGYKDDPTVPDDSNTPTYASVVLRVHNERWEGVPFILKAGKALNSRKAEIRVQFKDAPGDIFRCKKQGRNEFVIRLQPSEAMYMKLTVKKPGLEMATEQSELDLSYGMRYQDVKIPEAYERLILDTIRGDQQHFVRRDELRAAWEIFTPLLHDIDAGKLKSVPYQPGTRGPQEADDMSRRMGYVQTHGYIWVPPTLAKF

SEQ ID NO: 98335 - protein, 128 aa, Setaria italica
  misc_feature (94)..(94): Xaa can be any naturally occurring amino acid
  Transcript Sequence Number=SeqID_32361
  Homolog annotation: Hit_ID=B6SRP0; Match level="QueryCoverage=84%, HitCoverage=18%, E-value=3e-13, Identity=44%"; Hit description =Fucosyltransferase 7
GARWTPSSAGETWVSTGVRVVMNAVSDQGAAVPLATVPDPGDRLLGGLLSPDFDDRSCLSRYRAARYRRASRHALSPHLVSALRRYESLHRLCXPGTPAYARALGRLRANASGDGADPSGTRCDYLVW

SEQ ID NO: 98336 - protein, 53 aa, Setaria italica
  Transcript Sequence Number=SeqID_32362
LASATISEKTISILGASEPLNDMLSDFLPVINYFQTSSLIGVMAQSCSSSLPL

SEQ ID NO: 98337 - protein, 266 aa, Setaria italica
  Transcript Sequence Number=SeqID_32363
  Gene Ontology: Mol. function=nucleoside-triphosphatase activity; Cellular component=membrane; Biological process=transport
  Homolog annotation: Hit_ID=Q8GU83; Match level="QueryCoverage=100%, HitCoverage=18%, E-value=1e-125, Identity=81%"; Hit description=PDR -like ABC transporter
  Pfam annotation: Domain name=AAA; Domain location=54-249; Score= -39.7; E_value=0.077; Accession=PF00004.21; Description=ATPase family associated with various cellular activities (AAA)
  Pfam annotation: Domain name=ABC_tran; Domain location=52-266; Score =37.6; E_value=5.7e-09; Accession=PF00005.19; Description=ABC transporter
  Pfam module annotation: Pfam domain module=AAA::ABC_tran; Domain location=54-249::52-266
  Subcellular localization annotation: CTP_CleavageSite=46; ConfidenceScore=5.04e-01
EAECRVVQGKPLPTIWNAAISNLSAASRMLGFNRQHAKVRILNGVSGVVKPSKLTLLLGPPGCGKSTLLKALAGKLSANLKVTGEIEYNGVKLSDFVPEKTAAYIDQYDLHVPEMTVRETIDFSARFQGVGNRTAIMKEVIRREKEAGITPDPDVDTYMKAISMEGLERSMQTDYIMKIMGLDICADIMVGDAMRRGISGGEKKRLTTGEMIVGPSKALFMDEISTGLDSSTTFQIVSCLQQMAHISESTILVSLLQPAPETYELF

SEQ ID NO: 98338 - protein, 112 aa, Setaria italica
  Transcript Sequence Number=SeqID_32364
  Gene Ontology: Mol. function=nucleoside-triphosphatase activity; Cellular component=membrane; Biological process=transport
  Homolog annotation: Hit_ID=Q8GU83; Match level="QueryCoverage=100%, HitCoverage=7%, E-value=6e-52, Identity=83%"; Hit description=PDR -like ABC transporter
LLMVNGFPELAMAVSKLPVFYKQRDYNFYPAWAYAVPAFILKVPISLVESIAWTSISYFLIGYTPEASRFLCHLLVLFLIHTGSLSMFRCVASYCQTMVAGSVGGVMSFLVI

SEQ ID NO: 98339 - protein, 89 aa, Setaria italica
  Transcript Sequence Number=SeqID_32365
  Gene Ontology: Mol. function=nucleoside-triphosphatase activity; Cellular component=membrane; Biological process=transport
  Homolog annotation: Hit_ID=Q8GU83; Match level="QueryCoverage=100%, HitCoverage=6%, E-value=9e-41, Identity=86%"; Hit description=PDR -like ABC transporter
MGVDRVHANYYMGSLFYALILLMVNGFPELAMAVSKLPVFYKQRDYNFYPAWAYAVPAFILKVPISLVESIAWTSISYFLIGYTPEASR

SEQ ID NO: 98340 - protein, 354 aa, Setaria italica
  misc_feature (60)..(60): Xaa can be any naturally occurring amino acid
  misc_feature (331)..(331): Xaa can be any naturally occurring amino acid
  Transcript Sequence Number=SeqID_32366
  Gene Ontology: Mol. function=nucleoside-triphosphatase activity; Cellular component=membrane; Biological process=transport
  Homolog annotation: Hit_ID=Q8GU83; Match level="QueryCoverage=92%, HitCoverage=22%, E-value=1e-161, Identity=81%"; Hit description=PDR -like ABC transporter
  Pfam annotation: Domain name=ABC2_membrane; Domain location=195-354; Score=14.9; E_value=0.00092; Accession=PF01061.16; Description=ABC-2 type transporter
RSVRWRAQAPRPRAPRGGGFPAACRAGEMIVGPSKALFMDEISTGLDSSTTFKIVSCLQXMAHISESTILVSLLQPAPETYELFDDIILMAEGKIVYHGSKSCIMSFFESCGFKCPERKGAADFLQEVLSRKDQQQYWSRHTETYNFVTADQFCDKFRVSQIGQNLAGEISTPYEKSEGHKNALSYSIYSLSKLELLKACFARELLLMKRNAFIHITKTLQLGLLAAITGTVFLRTHMGVDRVHANYYMGSLFYALILLMVNGFPELAMAVSKLPVFYKQRDYNFYPAWAYAVPAFILKVPISLVESIAWTSISYFLIGYTPEASSFSEPXRFLCHLLVLFLIHTGSLSMFRCV

SEQ ID NO: 98341 - protein, 53 aa, Setaria italica
  Transcript Sequence Number=SeqID_32367
  Gene Ontology: Mol. function=heat shock protein binding
  Homolog annotation: Hit_ID=B6T323; Match level="QueryCoverage=83%, HitCoverage=33%, E-value=5e-17, Identity=93%"; Hit description =Mitochondrial import inner membrane translocase subunit TIM14
  Pfam annotation: Domain name=DnaJ; Domain location=7-51; Score=-12.9; E_value=0.082; Accession=PF00226.23; Description=DnaJ domain
LSISFPCCFRERATMDKIKEAHKRVMVANHPDAGGSHYVASKINEAKDILMGK

SEQ ID NO: 98342 - protein, 211 aa, Setaria italica
  Transcript Sequence Number=SeqID_32368
  Gene Ontology: Mol. function=heat shock protein binding; Cellular component=integral to membrane; Biological process=intracellular protein transmembrane transport
  Homolog annotation: Hit_ID=B6T323; Match level="QueryCoverage=59%, HitCoverage=94%, E-value=8e-62, Identity=89%"; Hit description =Mitochondrial import inner membrane translocase subunit TIM14
  Pfam annotation: Domain name=DnaJ; Domain location=152-208; Score =7.8; E_value=0.00078; Accession=PF00226.23; Description=DnaJ domain
  Subcellular localization annotation: CTP_CleavageSite=59; ConfidenceScore=5.52e-01
PRRRRPRNRPNLQLGPASASTPPLSCTARTRAAFIYRRIRPPVRRPVRPPRAVTFLLAPCDLPSQHPGGVLTTLWSLPPPPPELEPDTGRPAARSIELDMATPLIAGLSVAAAAMSGRYMIRTWQAFRTRAAMPRVRRFYPGGFQGEMNRREAALILGVRERATMDKIKEAHKRVMVANHPDAGGSHYVASKINEAKDILMGKGKSGASVF

SEQ ID NO: 98343 - protein, 77 aa, Setaria italica
  Transcript Sequence Number=SeqID_32369
  Subcellular localization annotation: CTP_CleavageSite=44; ConfidenceScore=5.26e-01
ATSSYLIMTHSRKSLSTKSGSVANLYGICSYTVAMRSTGNQFLRCAATNYYIDLTISMDSPSQRIKLRHSNIVPHTN

SEQ ID NO: 98344 - protein, 313 aa, Setaria italica
  misc_feature (6)..(6): Xaa can be any naturally occurring amino acid
  misc_feature (280)..(280): Xaa can be any naturally occurring amino acid
  Transcript Sequence Number=SeqID_32370
  Gene Ontology: Biological process=protein localization
  Homolog annotation: Hit_ID=Q6K796; Match level="QueryCoverage=90%, HitCoverage=6%, E-value=1e-121, Identity=73%"; Hit description =Vacuolar protein sorting 13C protein-like
KWNEHXIFEVPEQASANLEIEVTNLASKTGKGEVIGSLSIPIGRGATTLKRAPSMRILQQSSDVKRVLTCPLTKKGQVPSFEDRKNCGVLVLSSCYVERSTHSNFQTLKDSMSNAESDFWIGLSPDGPWESFTAALPVTILPKSLNNNHFAFEVSMRNGRKHATLRGLAVIVNDADIKLEVSICPVNMLNSSVLNTRSVSSTNAIDEVFENQWYRPIMGWGPNPSNDHRNDLKQWSTRDCSYSSKVFFETDLPSGWRWTSPWKIEKSNFVDNDGWAYSAXFQNLNWPSSSWLSSKSPHDFVRRRRWVRSRQKL

SEQ ID NO: 98345 - protein, 152 aa, Setaria italica
  misc_feature (141)..(141): Xaa can be any naturally occurring amino acid
  misc_feature (147)..(147): Xaa can be any naturally occurring amino acid
  Transcript Sequence Number=SeqID_32371
  Gene Ontology: Biological process=protein localization
  Homolog annotation: Hit_ID=Q6K796; Match level="QueryCoverage=96%, HitCoverage=3%, E-value=2e-57, Identity=74%"; Hit description =Vacuolar protein sorting 13C protein-like
NLKYLYVSILDSSCGMVTPLFDTTIANINLATHGRFETMNAVLICSIAASTFNRHLEAWEPLIEPFDGIFKFETYDTSEHPPSKVGKRIRVAATSPLNANLSSANLELLIETLVSWRRQIDLEKNSSMKNADTVGNMKKAXDDSSCXALNEM

SEQ ID NO: 98346 - protein, 111 aa, Setaria italica
  misc_feature (86)..(86): Xaa can be any naturally occurring amino acid
  Transcript Sequence Number=SeqID_32372
  Gene Ontology: Cellular component=integral to membrane
  Homolog annotation: Hit_ID=O24564; Match level="QueryCoverage=90%, HitCoverage=7%, E-value=5e-18, Identity=52%"; Hit description =Embryogenesis transmembrane protein
TFLLTGSYVMGSCRKTKNSIYISLLVCLVLAYVVVHVLIAIHVIPEGWKKALAGKIEKLSCRYIWTKEPSFGHNQRNADNDMDYEXGTARRGDADDKYWERRRKLLLMLAV

SEQ ID NO: 98347 - protein, 200 aa, Setaria italica
  Transcript Sequence Number=SeqID_32373
  Subcellular localization annotation: CTP_CleavageSite=52; ConfidenceScore=5.05e-01
KLIQGSTTGMKCYPQFYRSITSTGRKTLVHTPLEKSTHKHTVGRHSHNSSVRSNLMQANYVTTYQILDHTQLYKDLTYQSDAAKQVVQFLTKLHKAKYHTPQGSYQVYAIKKPSPWQGGKPYYQAAEHHARASYPSRPQRAGRRGTGPWSTRYQARATRSISARSARLSSCQTRKALTRTRRHLAAHGTIPNRSSRSLLG

SEQ ID NO: 98348 - protein, 86 aa, Setaria italica
  Transcript Sequence Number=SeqID_32374
  Gene Ontology: Mol. function=binding
PQSLLEEKIAAQEKLALAEYDLRLAKEDLSQLKLELQKQKESSPEDSNGLLLGDSTREGSISQQDKREVKISALGPLKDNERKDLN

SEQ ID NO: 98349 - protein, 93 aa, Setaria italica
  Transcript Sequence Number=SeqID_32375
  Gene Ontology: Mol. function=ubiquitin-protein ligase activity; Cellular component=ubiquitin ligase complex; Biological process =ubiquitin-dependent protein catabolic process
  Homolog annotation: Hit_ID=Q84VE7; Match level="QueryCoverage=100%, HitCoverage=13%, E-value=4e-22, Identity=69%"; Hit description=Arm repeat protein
LVRTGPASTKKDALAALLSLAGERENVGKLVDAGVAQAALSAISEEETAAAVLAALAKRGGAEAIVGIDGAVARLVAEMRRGTEWARENATAA

SEQ ID NO: 98350 - protein, 82 aa, Setaria italica
  Transcript Sequence Number=SeqID_32376
  Subcellular localization annotation: CTP_CleavageSite=50; ConfidenceScore=5.03e-01
YSSHNAQNNWDGFLLQSLNPSRSRCGRRLRGDRSKRNTVEIAVVAEDELGAGAVADPNAYLSPPLSVPDPAPRRCHHAATAA

SEQ ID NO: 98351 - protein, 75 aa, Setaria italica
  Transcript Sequence Number=SeqID_32377
VLRQPAATMEVVRGVLLGRKGKVAGTMQGVVPVVSQLPSASELLRVRLAQLPELLNPTGDLQTNFLKKIDSSLTV

SEQ ID NO: 98352 - protein, 86 aa, Setaria italica
  Transcript Sequence Number=SeqID_32378
  Gene Ontology: Mol. function=ubiquitin-protein ligase activity; Cellular component=ubiquitin ligase complex; Biological process =ubiquitin-dependent protein catabolic process
  Homolog annotation: Hit_ID=B9R8Q6; Match level="QueryCoverage=98%, HitCoverage=10%, E-value=5e-22, Identity=61%"; Hit description =Ubiquitin-protein ligase, putative
DNKEELGKGDTIRTIIKFLSNDHFQERELAVSLLYELSKLDPICQRIGAVYGAILLLVGMGSSKSENLVAVEKAENTLKNLEKHET

SEQ ID NO: 98353 - protein, 125 aa, Setaria italica
  Transcript Sequence Number=SeqID_32379
  Gene Ontology: Mol. function=protein binding; Cellular component =integral to membrane; Biological process=auxin mediated signaling pathway
  Homolog annotation: Hit_ID=P0C0X5; Match level="QueryCoverage=77%, HitCoverage=17%, E-value=3e-32, Identity=74%"; Hit description =Probable auxin efflux carrier component 1b
TISFRVDSDVVSLADAAKGELEADAHVADDGRMRVTVRKSTCSRSEAACSHSHSHSQSMQQPRVSNLSGVEIYSLQSSRNPTPRGSSFNHAEFFNIVGAKGAGGDEEKGAGGGYSPQPHAQAAKR

SEQ ID NO: 98354 - protein, 83 aa, Setaria italica
  Transcript Sequence Number=SeqID_32380
  Gene Ontology: Biological process=ubiquitin-dependent protein catabolic process
  Homolog annotation: Hit_ID=Q5VMP0; Match level="QueryCoverage=100%, HitCoverage=11%, E-value=1e-14, Identity=51%"; Hit description=F -box/LRR-repeat MAX2 homolog
PAVRGRLRSVKLVRWHQRPPGLDAGADLEPLLRDCPALRALDLSEFYCWTEDIGPALAAHPAAAAALTELDLGLAGATDGFHA

SEQ ID NO: 98355 - protein, 136 aa, Setaria italica
  Transcript Sequence Number=SeqID_32381
  Gene Ontology: Mol. function=nuclease activity
KDELHTMLEKAATDLEIIEKDIVATTDKIQECEGLILQKEKESAMTSYKRLRLDSAAARAELTAATETDDNEEVEILHKEAEAAESKALELKTCYDLQLEDDEFMFQPVVPIAFITNSTGQHLVEIASSFGLSPQK

SEQ ID NO: 98356 - protein, 69 aa, Setaria italica
  Transcript Sequence Number=SeqID_32382
INNRVFSIMLHLVAWTCVISITIDAGTDRISVDRHQLAPLSNFTLNAFRVPPSCRQCSHSSNGSSQDKS

SEQ ID NO: 98357 - protein, 58 aa, Setaria italica
  Transcript Sequence Number=SeqID_32383
ASSPWLIGTTPTNHQSESDHHGLVALRPLEIKLDPCGLPLVRSNRIAGDGFVFPRKLG

SEQ ID NO: 98358 - protein, 508 aa, Setaria italica
  Transcript Sequence Number=SeqID_32384
  Gene Ontology: Mol. function=glutathione gamma-glutamylcysteinyltransf erase activity; Cellular component=cytoplasm; Biological process =phytochelatin biosynthetic process
  Homolog annotation: Hit_ID=Q8GZS7; Match level="QueryCoverage=99%, HitCoverage=99%, E-value=0.0, Identity=75%"; Hit description =Phytochelatins synthase
  Pfam annotation: Domain name=Phytochelatin; Domain location=4-219; Score=488.8; E_value=7.2e-144; Accession=PF05023.6; Description =Phytochelatin synthase
  Pfam annotation: Domain name=Phytochelatin_C; Domain location=222 -484; Score=588.7; E_value=6.4e-174; Accession=PF09328.2; Description= Domain of unknown function (DUF1984)
  Pfam module annotation: Pfam domain module=Phytochelatin::Phytochelati n_C; Domain location=4-219::222-484
MAAAVASLYRRVLPSPPAVDFASPEGKRLFAEALAAGTMEGFFPLVSCFQTQSEPAFCGLASLAVVLNALSIDPGRRWKGPWRWFDESMLDCCEPLDKVKAEGITFGKVACLARCSGANVQSFRANLATIDDLRRHLVRCVSSQDCHLIASYHRQAFKQTGTGHFSPIGGYHAGQDMALILDVARFKYPPHWVPLRLLWDAMNMTDDSTGLLRGFMLISRKTAAPSSLYTVSCRDENWKSMAKYCVEDLPNLLKGDNLDNVQTLLSRLIESLPAEAEALIKWVVEVRRKEEGDPSLSKEEKERLFLKENVLQQVRDTRLFAIVHDLQYANNPCCNCSSSSEEDSLTRIAAAVCCQGAAMLSGNLASRHGFCCKETCLKCIQANGDGLKTVISASVVSEGNEHGVDMLLPMSSPGASSCNSNLKNNVVKYPSSADVLTVLLLALHPSTWLGIKDEKLKAELQTLVSTDNLPDDLKREIMHLRRQLYYLKTCKEKEEYEDDDLPSPKWLG

SEQ ID NO: 98359 - protein, 389 aa, Setaria italica
  Transcript Sequence Number=SeqID_32385
  Gene Ontology: Mol. function=nutrient reservoir activity; Cellular component=cell wall
  Homolog annotation: Hit_ID=Q9SFB1; Match level="QueryCoverage=86%, HitCoverage=92%, E-value=1e-115, Identity=60%"; Hit description =F17A17.37 protein
  Pfam annotation: Domain name=DUF642; Domain location=61-386; Score =741.9; E_value=4.8e-220; Accession=PF04862.4; Description=Protein of unknown function, DUF642
  Subcellular localization annotation: CTP_CleavageSite=40; ConfidenceScore=5.01e-01
MELPWGMLLLLVLSVSSSSSSSAAVATLAVSAPPPAPAPRHAQDAEGLLINGNFETAPRKLNKTLIVGRHSLPGWTLRGHVEYVSGGPQPGGMFFAVPHGVHALRLGSRASASQNVTVRPGALYALTFAATRTCAQDENLRIAVAPSLSAPADVAVRTLYSGASADTWAWGFRASSPVAQVTFANPGVQEDPACGPLLDAVAIKELPTPYPTKDNLIKNAGFEIGPQVFKNSSVGVLLPPKQKDTTSPLPGWIIESLKAVRFIDAAHFSVPEGQYAVELVAGRESAIAQVIRTVPNRAYNLSFAVGDAKNGCHGSMLVEAFAGNVTQKVPFESAGKGAFKAAGFRFVASGVRTRLTFYSSYYHTKASDGVSLCGPVLDQVKVVPLPVKA

SEQ ID NO: 98360 - protein, 158 aa, Setaria italica
  misc_feature (149)..(150): Xaa can be any naturally occurring amino acid
  Transcript Sequence Number=SeqID_32386
  Homolog annotation: Hit_ID=B9S4A9; Match level="QueryCoverage=100%, HitCoverage=24%, E-value=6e-45, Identity=53%"; Hit description =Pentatricopeptide repeat-containing protein, putative
  Pfam annotation: Domain name=PPR; Domain location=113-147; Score=7.2; E_value=1.3; Accession=PF01535.12; Description=PPR repeat
  Pfam annotation: Domain name=PPR; Domain location=42-76; Score=28.7; E_value=2.3e-05; Accession=PF01535.12; Description=PPR repeat
  Pfam annotation: Domain name=PPR; Domain location=77-111; Score=6.1; E_value=1.7; Accession=PF01535.12; Description=PPR repeat
  Pfam module annotation: Pfam domain module=PPR::PPR::PPR; Domain location=113-147::42-76::77-111
VVTLGLLSETDLGNALLTMYSRSGDLLSAQLTFKRLEVKDTITWTSIMQAFANHGCGYHALQGFAQMLRHGYKPSSTTFTSILSACSHVGLVEKGRKIFKSIYHGYGIEPSIEHYSCLVDLLGRAGYVREAKELVDSMPQGMRDEAILXXLLGACVTH

SEQ ID NO: 98361 - protein, 91 aa, Setaria italica
  misc_feature (18)..(18): Xaa can be any naturally occurring amino acid
  Transcript Sequence Number=SeqID_32387
  Gene Ontology: Mol. function=nucleoside-triphosphatase activity; Cellular component=nucleus; Biological process=transcription from RNA polymerase II promoter
  Homolog annotation: Hit_ID=Q01JZ0; Match level="QueryCoverage=100%, HitCoverage=20%, E-value=1e-43, Identity=94%"; Hit description =OSIGBa0116M22.9 protein
YEVGLKQRLLRYAASALXFTERCVDPYLVSWNRIVLLHGPPGTGKTSLCKALAQKLSIRFKSRYSMCQLTEVNAHSLFSKWFSESGKLVAK

SEQ ID NO: 98362 - protein, 113 aa, Setaria italica
  Transcript Sequence Number=SeqID_32388
  Gene Ontology: Mol. function=nucleic acid binding
HHLQPQHHYQQPPLSREEVEEERWRYPAHQLRVSPPGARKRYRCAMHDSGDLESTSSSGPPPRRQRQQLHPSYSPPPEGSFVDREISYSGYSSHEGFVTHSDSNNGNRKMPMS

SEQ ID NO: 98363 - protein, 199 aa, Setaria italica
  misc_feature (50)..(50): Xaa can be any naturally occurring amino acid
  Transcript Sequence Number=SeqID_32389
  Gene Ontology: Mol. function=ubiquitin-protein ligase activity; Cellular component=ubiquitin ligase complex; Biological process =ubiquitin-dependent protein catabolic process
  Homolog annotation: Hit_ID=B6TXU1; Match level="QueryCoverage=95%, HitCoverage=46%, E-value=1e-39, Identity=46%"; Hit description =Ubiquitin-protein ligase
  Pfam annotation: Domain name=U-box; Domain location=10-85; Score =86.0; E_value=1.3e-22; Accession=PF04564.7; Description=U-box domain
MEEETQPKVEVPCYFLCPISLQMMRDPVTLPSGITYDRDGIERWLLIAGXTCPLTKQPVPADCEPTPNHTLRRLIQSWSALHAAAGVERVPTPKPPIDRARVAELVSRIAATSRTTAPQELLAALRELRDVVAESERNRKLVAAVPAAVDVLATVFVASAATKAESVAVCDEALEIISSLQLSEQCLARVIFETNEALV

SEQ ID NO: 98364 - protein, 465 aa, Setaria italica
  Transcript Sequence Number=SeqID_32390
  Gene Ontology: Mol. function=DNA-directed RNA polymerase activity; Cellular component=nucleus; Biological process=transcription
  Homolog annotation: Hit_ID=C0JAC0; Match level="QueryCoverage=97%, HitCoverage=24%, E-value=0.0, Identity=80%"; Hit description=DNA -directed RNA polymerase
  Pfam annotation: Domain name=RNA_pol_Rpb1_1; Domain location=11-429; Score=20.2; E_value=6.1e-13; Accession=PF04997.4; Description=RNA polymerase Rpb1, domain 1
MADLRGIEAASEEVDSIHFSFYGDDEIKRSSVKKITKSERLDAKNLPVPGGLLDPAMGPINDTDTCKSCGQHSVRCPGHFGHIELAKPLFNPLLFTSLKNLLHVTCFHCHKFRLNKEQVDRYVNELELLVKGDVARAKNLEDSGKRASPSEEDEDITEATSCDKPSPEKDKKTWTSVQLKEVLSIFSKIMKKRQKKCAKCDMKSPTFSSPIFGWLVKDTSASAVRANAIADFKLKGDGGAHSSGETGVSGFDEERTSPQSKGSINEVRHLSDDTIKEFVASSGKKHLLPTEVESILKGLWKNEARFCMLLCDFQQDTLSVSEKRKGYEMFFLNSLLVAPNRFRPSTSSSLGIMEHPQNVLLSKVQEANLALQHNSASSNHMDVLRRWMDLQRSVNVLYDSSKGIVKSEKNAHGIRQLLEKKEGILRQKMMGKRVNYACRSVISPDPYLAVNEIGIPPVFATTVDV

SEQ ID NO: 98365 - protein, 127 aa, Setaria italica
  misc_feature (10)..(10): Xaa can be any naturally occurring amino acid
  Transcript Sequence Number=SeqID_32391
  Gene Ontology: Mol. function=DNA-directed RNA polymerase activity; Cellular component=nucleus; Biological process=transcription
  Homolog annotation: Hit_ID=C0JAC0; Match level="QueryCoverage=73%, HitCoverage=5%, E-value=2e-25, Identity=65%"; Hit description=DNA -directed RNA polymerase
EEYSQLVYGXSCVPSNWGPRQPGIKVSAFMDDDALGFVLPAILKPKPLWTGKQVITTILNHLTKGRSPFTVEQKGKISEEHLTPKKFEVSKDKDPPTQEKKIKILPLKKKKIKILTLKKKKMKMKKK

SEQ ID NO: 98366 - protein, 387 aa, Setaria italica
  Transcript Sequence Number=SeqID_32392
  Gene Ontology: Mol. function=DNA-directed RNA polymerase activity; Cellular component=nucleus; Biological process=transcription
  Homolog annotation: Hit_ID=C0JAC0; Match level="QueryCoverage=85%, HitCoverage=18%, E-value=1e-170, Identity=88%"; Hit description=DNA -directed RNA polymerase
  Pfam annotation: Domain name=RNA_pol_Rpb1_2; Domain location=16-201; Score=305.4; E_value=1.2e-88; Accession=PF00623.12; Description=RNA polymerase Rpb1, domain 2
  Pfam annotation: Domain name=RNA_pol_Rpb1_3; Domain location=204-329; Score=10.3; E_value=3.3e-05; Accession=PF04983.10; Description=RNA polymerase Rpb1, domain 3
  Pfam module annotation: Pfam domain module=RNA_pol_Rpb1_2::RNA_pol _Rpb1_3; Domain location=16-201::204-329
QLLEKKEGILRQKMMGKRVNYACRSVISPDPYLAVNEIGIPPVFATRLTYPEKVTPWNAKKLQEAVRNGADIHPGATHYRDNSNIYKLQAAPAKRRAIAKMLPASRGSISQPGKDPNCEFESKVVYRHLQDGDIVLVNRQPTLHKPSMMAHFVRVLPGEKTIRMHYANCSTYNADFDGDEMNVHFPQDEISRAEAMNIVDANKQYIGPRSGDAVRGLIQDHIVGAVLLTKQDTLLSREEYSQLVYGSCVPSNWGPRQPGIKVSAIKDDDALGFVLPAILKPKPLWTGKQVITTILNHLTKGRSPFTVEQKGKISEEHLTPKKFEVSKDKDPPTQEKKDKDPSAQEKKDKDPHAQEKKDEDEEEVELVKKKEEEEEEVELVEDDDEGE

SEQ ID NO: 98367 - protein, 64 aa, Setaria italica
  Transcript Sequence Number=SeqID_32393
  Pfam annotation: Domain name=ENT; Domain location=1-64; Score=53.2; E_ value=1e-12; Accession=PF03735.6; Description=ENT domain
SAYAAVLRAFCAQSDLLSRAKHGCLAELRNELKILESEHRECLGKARSNKQINFFEYWLALPKE

SEQ ID NO: 98368 - protein, 97 aa, Setaria italica
  misc_feature (26)..(26): Xaa can be any naturally occurring amino acid
  Transcript Sequence Number=SeqID_32394
  Gene Ontology: Mol. function=protein binding
  Homolog annotation: Hit_ID=Q7XXK8; Match level="QueryCoverage=93%, HitCoverage=7%, E-value=5e-15, Identity=47%"; Hit description =OSJNBa0073L13.12 protein
KDTTRRSSRSRENVIYFDGWDGLGAXSAVLRTVAQRLAASTSDEQPAPDAVQFHHIIHIDCSKWESRRAVQRAIAEQLKLPARVMEMLDRQDEEDDI

SEQ ID NO: 98369 - protein, 134 aa, Setaria italica
  misc_feature (106)..(106): Xaa can be any naturally occurring amino acid
  misc_feature (121)..(121): Xaa can be any naturally occurring amino acid
  Transcript Sequence Number=SeqID_32395
MEGNKLLAIGFVVLLGINLSKAREFDWEHPTTGANSQGGGGGAGGGSSNGYGSGSGSGYGSSGASNSPGGLYGTGDSMARGEGGGGGGGNNGGYGAGSGSAVGNGXHCWLLWWWIFRCWRXWRWGWPRRRSPQW

SEQ ID NO: 98370 - protein, 479 aa, Setaria italica
  Transcript Sequence Number=SeqID_32396
  Gene Ontology: Mol. function=kinase activity; Cellular component =integral to membrane
  Homolog annotation: Hit_ID=O80656; Match level="QueryCoverage=89%, HitCoverage=89%, E-value=1e-119, Identity=49%"; Hit description =T14N5.8 protein
  Pfam annotation: Domain name=DUF300; Domain location=17-314; Score =496.6; E_value=3.3e-146; Accession=PF03619.8; Description=Domain of unknown function
MALPEQSFSLLGSYALPLWATIIAGVFVVISLSLSLYLLLNHLSAYKNPEEQKFLVGVILMVPCYAVESYISLVNPSISVDIEILRDGYEAFAMYCFGRYLVACLGGEDRTIEFLKKEGGSGSDAPLLGQASEQRYVHHPFPMNYLLKPWPLGEWFYLVIKFGLVQYMIIKSICAILAVILESFGVYCEGEFKLNCGYSYTAVALNFSQSWALYCLVQFYAAIKDELAHIKPLAKFLTFKSIVFLTWWQGIAIALLFNWGLLRGPIAQELQFKSSIQDFIICIEMGVASVVHLYVFPAKPYELMGDRFVGDVSVLGDYASVDCPLDPDEVKDSERPTKFRLPQPDDCVRCSTGIKESVRDVVLGGGEYIVNDLKFTVNHAVEPINEKLHMISQNIKKHEKGKKKTNDDSCINSPTSMNRVISGIDDPLLNGSLSDNSGPKKARRHRKKSGYMSAESGGESSDHGLGGYEIRGHRWITRE

SEQ ID NO: 98371 - protein, 49 aa, Setaria italica
  Transcript Sequence Number=SeqID_32397
TECIMQSQDLEVMNIKWVFDERADFESFYDLLANPKDLDSNPLSKVWST

SEQ ID NO: 98372 - protein, 172 aa, Setaria italica
  Transcript Sequence Number=SeqID_32398
  Subcellular localization annotation: CTP_CleavageSite=36; ConfidenceScore=5.21e-01
FVCSRRTFCFLLASFLFCCFLHLASWKRVVFKPPFQAAPTKPSLFFAFTEETGPFFQISFSVQFLDKKRFDFFRQFLALASLLLIFVMAAIDLDTNQLSSSSSSSSDQELMKALEPFIRSASSPTSSTSTTTSPFSYPYVYHSALPQDSYYYQPAAAASSCTALPPPPPAPT

SEQ ID NO: 98373 - protein, 242 aa, Setaria italica
  Transcript Sequence Number=SeqID_32399
  Gene Ontology: Mol. function=protein binding; Cellular component =protein complex; Biological process=biological_process
  Homolog annotation: Hit_ID=B9RK59; Match level="QueryCoverage=100%, HitCoverage=58%, E-value=1e-106, Identity=74%"; Hit description=PCI domain-containing protein, putative
  Pfam annotation: Domain name=DUF1722; Domain location=148-229; Score=- 47.6; E_value=0.1; Accession=PF08349.3; Description=Protein of unknown function (DUF1722)
YSSFEKAASAFLQEFRNWETPWAMEAMHTVTLEIRLLAEKADSELVTTGKNPDKLQAAGSFLMKVFGALAVKGPKRIGALYVTCQLFKIYFRLGTVNLCRSVIRSIETARNFDFEDFPVKDKVTYMYYTGRLEVFNENFLVADQKLTYALMHCNPQSESNLRRILKFLIPVKLSIGVLPKRTLLERYNLLEYADVVTSLRRGDLRLLRQALDRHEDQFLKSGVYLVLEKLELQVYQRLVKKV

SEQ ID NO: 98374 - protein, 180 aa, Setaria italica
  Transcript Sequence Number=SeqID_32400
  Gene Ontology: Mol. function=protein binding; Cellular component =protein complex
  Homolog annotation: Hit_ID=B9RK59; Match level="QueryCoverage=88%, HitCoverage=39%, E-value=6e-54, Identity=61%"; Hit description=PCI domain-containing protein, putative
ASLRRRLLHAPGSTPLSDALAALPDFPRLAGDRFPHLADFLVPLLRAIHSHSLQRFADAYSSFEKAASAFLQEFRNWETPWAMEAMHTVTLEIRLLAEKADSELVTTGKNPDKLQAAGSFLMKVFGALAVKGPKRIGALYVTCQLFKIYFRLGTVNLCRSVIRSIETARNFDFEDFLGLW

SEQ ID NO: 98375 - protein, 105 aa, Setaria italica
  Transcript Sequence Number=SeqID_32401
  Gene Ontology: Mol. function=4 iron, 4 sulfur cluster binding; Cellular component=nucleus; Biological process=base-excision repair
  Homolog annotation: Hit_ID=Q9SJQ6; Match level="QueryCoverage=82%, HitCoverage=8%, E-value=2e-20, Identity=44%"; Hit description =Protein ROS1
IIFYFTFTVALINLVTYLLVCQFEERVPEDLCPYLLVIISCPNDYTVEGTVLIPCRTANRGKFPLNGTYFQANEVFADHSSSRHPITIPRECIGMLDRSIVYFGS

SEQ ID NO: 98376 - protein, 107 aa, Setaria italica
  misc_feature (42)..(42): Xaa can be any naturally occurring amino acid
  Transcript Sequence Number=SeqID_32402
  Gene Ontology: Mol. function=4 iron, 4 sulfur cluster binding; Biological process=base-excision repair
  Homolog annotation: Hit_ID=Q7XZV0; Match level="QueryCoverage=87%, HitCoverage=14%, E-value=1e-16, Identity=50%"; Hit description=PG3
MAAVAEAEADLGPRKFSPWGGSLIDSVVGTFLTQNVADNLSXAKFPPRKRCHKAEDCSNTAPLVDGVDENLNPNEAYDTFDSVDSDFGEYIDSEEEDGHDTEAKGHY

SEQ ID NO: 98377 - protein, 154 aa, Setaria italica
  misc_feature (139)..(139): Xaa can be any naturally occurring amino acid
  Transcript Sequence Number=SeqID_32403
  Gene Ontology: Mol. function=4 iron, 4 sulfur cluster binding; Cellular component=nucleus; Biological process=base-excision repair
  Homolog annotation: Hit_ID=Q7XZV0; Match level="QueryCoverage=81%, HitCoverage=17%, E-value=2e-34, Identity=59%"; Hit description=PG3
ETPTRRKRSKRGRKRKQMILAHQGTLTGASSSALVPLWGSAQLDIARYGNHGKRLWNKVLGLTEETLRVCDVLAKWDGSDSESFEGFDIGSGPEWDQTRHVFERLVDIFIAAMLDLLGPRKFSPWGGSLIDSVVGTFLXQNVADNLSSHAFMNL

SEQ ID NO: 98378 - protein, 66 aa, Setaria italica
  Transcript Sequence Number=SeqID_32404
RHNIALSTLQRLIRETPHSFFLLRFHIPASVGIKTLYPQCQNVMLSSEFNAFCDLSNRCVLVTVFP

SEQ ID NO: 98379 - protein, 953 aa, Setaria italica
  misc_feature (241)..(241): Xaa can be any naturally occurring amino acid
  Transcript Sequence Number=SeqID_32405
  Gene Ontology: Mol. function=4 iron, 4 sulfur cluster binding; Cellular component=nucleus; Biological process=base-excision repair
  Homolog annotation: Hit_ID=Q7XZV0; Match level="QueryCoverage=72%, HitCoverage=92%, E-value=0.0, Identity=52%"; Hit description=PG3
  Pfam annotation: Domain name=EndIII_4Fe-2S; Domain location=589-605; Score=21.5; E_value=0.0035; Accession=PF10576.1; Description=Iron -sulfur binding domain of endonucle
KKQQQQQEEGVASGSDAGGAAPVPTPEKVEPTPRRRWKKSTKGVLRFKVVKDKVVKPKVTPKTATPRKVKKDKKQQMPEDGSHSAGAASSNSARRKLDLDSSQSKPCFSRAELMNNLKCLAKSHALNAEPTRRKRSKRGRKRKQMILAHQGTLTGASSSALVPLWGSAQLDIARYGNHGKRLWNKVLGLTEETLRVCDVLAKWDGSDSESFEGFDIGSGPEWDQTRHVFERLVDIFIAAMXIYAMLDLLGPRKFSPWGGSLIDSVVGTFLTQNVADNLSSHAFMNLAAKFPPRKRCHKAEDCSNTAPLVDGVDENLNPNEAYDTFDSVDSDFGEYIDSEEEDGHDTEAKGHYGEEYNRLIENFIDNLKENGISTWDSDLMNLVKDKSGNPICTERTLRKFVASLRPVPSSIWKELREEAYRKGYSDTSRTSDAVDWESVLHAPIAEVAKCIELRGQHYILALRIQVFLMNVKKAQDGSFDLDWLRYISREKAKNFLLSIHGIGVKSADCIRLLSLRHKAFPVDVNVARIVTRLGWVKLQPINGAEFHLINSYPIMRDVQRYLWPRLCTIDKEKLYELHCLMITFGKVMCTKINPNCSACPFSAQCKYSNSSLARKSLPPPEKHEHEHGEQQSSMVASGRFLLSNDSCMPSAQHMYQHQIEISRTAETPPIHNCEPIVEMPQSPEYEYEAPNEQEDFYEDHICDLEDIIPGVQYDGEIDLCSSKHVLNSRSWTPKCGKDLVVMNPKSSFGPNKKLKNVGRLRTEHNAYVLPDDHVILEEFEERVPEDLCPYLLVIISCPNDYTVEGTVLIPCRTANRGKFPLNGTYFQANEVFADHSSSRHPITIPRECIGMLDRSIVYFGSSIHSIARGQTRHDIEECFKKGYVCVRGFHRRTRTPMRLCSTLHANTIKKEAIKKEAMKKEGGETPTKRARTSPEGKSKEKKASSANQVPMAA

SEQ ID NO: 98380 - protein, 149 aa, Setaria italica
  misc_feature (28)..(28): Xaa can be any naturally occurring amino acid
  misc_feature (126)..(126): Xaa can be any naturally occurring amino acid
  Transcript Sequence Number=SeqID_32406
  Gene Ontology: Mol. function=binding
  Homolog annotation: Hit_ID=Q6H7U7; Match level="QueryCoverage=97%, HitCoverage=24%, E-value=5e-40, Identity=59%"; Hit description =Armadillo/beta-catenin repeat protein-like
  Pfam annotation: Domain name=Arm; Domain location=40-80; Score=5.7; E_ value=2.3; Accession=PF00514.15; Description=Armadillobeta-catenin -like repeat
  Pfam annotation: Domain name=Arm; Domain location=82-122; Score=17.1; E_value=0.072; Accession=PF00514.15; Description=Armadillobeta -catenin-like repeat
  Pfam module annotation: Pfam domain module=Arm::Arm; Domain location =40-80::82-122
AVSMGVIQSLLQLIYPDLPYSYKAREVXALQPFWFFCFSSANSIDDLISSDVLGWLLFYLNNGDYAVLECTLKILRHLSEVSEEYNRMMGRAGYLSALSSLLGAKSCRVREMAAQVLSSLLLLHPXRTIFVQDSDNLDRLLQLLDPARR

SEQ ID NO: 98381 - protein, 287 aa, Setaria italica
  Transcript Sequence Number=SeqID_32407
  Gene Ontology: Mol. function=protein serine/threonine kinase activity; Biological process=protein amino acid phosphorylation
  Homolog annotation: Hit_ID=B6SWL2; Match level="QueryCoverage=100%, HitCoverage=37%, E-value=1e-138, Identity=78%"; Hit description =Receptor-like kinase
  Pfam annotation: Domain name=Pkinase; Domain location=122-287; Score=- 2.5; E_value=2.4e-08; Accession=PF00069.17; Description=Protein kinase domain
  Pfam annotation: Domain name=Pkinase_Tyr; Domain location=122-287; Score=-59.7; E_value=9.2e-10; Accession=PF07714.9; Description =Protein tyrosine kinase
  Pfam module annotation: Pfam domain module=Pkinase::Pkinase_Tyr; Domain location=122-287::122-287
PADIRGDGSGNGCVMWKDNIVDVRYIDNGQDLYVRLGKSESATGKRNIVAKIFLPVMASALALTSAGLYLVWICKLRAKRRNRDILKKAILGYSNAPNELGDENIELPFVSFGEIAAATNNFSENNMLGQGGFGKVYKGTLGQNIEVAIKRLGQGSGQGVEEFINEVVLIAKLQHRNLLGFLYFDAANKYLLDWPTRFKIIKGISRGLLYLHQDSRLTIIHRDLKPSNILLDADMSPKISDFGMARIFGGNQQEANTNRVVGTYGYMSPEYAMEGAFSVKSDTYGFG

SEQ ID NO: 98382 - protein, 203 aa, Setaria italica
  Transcript Sequence Number=SeqID_32408
  Subcellular localization annotation: CTP_CleavageSite=42; ConfidenceScore=5.51e-01
MAPKSLVLAALLTVVVAAGQVTRCAGLGASPNASVVISGAVPCSTGNNINVATAPAFPNATVQFMCYGKAMAGATADSSGNFVITIPGASRSQLTAIMSNQCNLVVTTPLAACDASLAGASGKLVSPMKFLGITTGSGGGGGDLGLGGIISVIIQILTGILSGILNLRPPGLLINPLDPFMHGSNISWSYWSGRGPVDLSSTL

SEQ ID NO: 98383 - protein, 103 aa, Setaria italica
  Transcript Sequence Number=SeqID_32409
GKNCHKILEEPTPWNGRKMTLSPDALHLLEVTEFLVFFRFLFFPSFHWQLGIAENILGDMKTVVGLGLCVIKKSRHSELICCLLDWFPCECGCVVQTRTIRFA

SEQ ID NO: 98384 - protein, 93 aa, Setaria italica
  Transcript Sequence Number=SeqID_32410
  Gene Ontology: Mol. function=electron carrier activity; Cellular component=endoplasmic reticulum membrane; Biological process =oxidation reduction
  Homolog annotation: Hit_ID=O48958; Match level="QueryCoverage=91%, HitCoverage=16%, E-value=9e-24, Identity=63%"; Hit description=4 -hydroxyphenylacetaldehyde oxime monooxygenase
RWLVSSPEAAREVMRTHDAHCCSRPAMPGARRLTYGFKDVAFAPYGDHVREMRRLFILELQSMRRVNAAWDAREAQVDKLVENLTRAGPNPVK

SEQ ID NO: 98385 - protein, 189 aa, Setaria italica
  misc_feature (168)..(168): Xaa can be any naturally occurring amino acid
  Transcript Sequence Number=SeqID_32411
  Gene Ontology: Mol. function=electron carrier activity; Cellular component=endoplasmic reticulum membrane; Biological process =oxidation reduction
  Homolog annotation: Hit_ID=O48958; Match level="QueryCoverage=100%, HitCoverage=36%, E-value=3e-59, Identity=60%"; Hit description=4 -hydroxyphenylacetaldehyde oxime monooxygenase
PHRSLWALARQHGPVMLLRLGSVPTVVVSSPEAAREVMRTHDAHCCSRPAMPGARRLTYGFKDVAFAPYGDHVREMRRLFILELQSMRRVNAAWDAREAQVDKLVENLTRAGPNPVKLDEHIFSAVDGIIGTVVFGKIYGTEHFKMQFLDMLSEAMDMLGSFSAEDFXPHNAAGRLIDRLTGLISRRDR

SEQ ID NO: 98386 - protein, 284 aa, Setaria italica
  Transcript Sequence Number=SeqID_32412
  Gene Ontology: Mol. function=nucleic acid binding; Cellular component= nucleus; Biological process=mRNA processing
  Homolog annotation: Hit_ID=B6T7D3; Match level="QueryCoverage=66%, HitCoverage=66%, E-value=2e-89, Identity=83%"; Hit description =Splicing factor U2af 38 kDa subunit
  Pfam annotation: Domain name=RRM_1; Domain location=82-140; Score =11.1; E_value=0.019; Accession=PF00076.14; Description=RNA recognition motif. (a.k.a. RRM, RBD, o
  Pfam annotation: Domain name=zf-CCCH; Domain location=13-39; Score =35.4; E_value=2.2e-07; Accession=PF00642.16; Description=Zinc finger C-x8-C-x5-C-x3-H type (and similar)
  Pfam annotation: Domain name=zf-CCCH; Domain location=149-174; Score =23.9; E_value=0.00065; Accession=PF00642.16; Description=Zinc finger C-x8-C-x5-C-x3-H type (and similar)
  Pfam module annotation: Pfam domain module=RRM_1::zf-CCCH::zf-CCCH; Domain location=82-140::13-39::149-174
MAEHLASIFGTEKDRVNCPFYFKIGACRHGDRCSRLHNKPSISPTLLLCNMYQRPDMITPGVDAQGNSIDPERIQEDFEDFYEDIFEELSKHGEIESLHVCDNLADHMIGNVYVQFREEEQAARALQALQGRYYSGRPIIAEFSPVTDFREATCRQFEEHSCNRGGYCNFMHVKQIRRDLRRKLFGHLHRFRRSQSRSSRSPSPYRYRRSSSRSRDRDDDYDYYYHYRSGSGSRRSSERHRSHDSDGSRRRRGRSRSRSPVREGSEERRARIEQWNREREAAQV

SEQ ID NO: 98387 - protein, 83 aa, Setaria italica
  Transcript Sequence Number=SeqID_32413
MARASMAALLFLHILLSPFAEETTAAAAGKPNIVHDDLNPVQVTNPITTVPSTNPTPTIITVPSTNPTITIPSLNPLPTPITD

SEQ ID NO: 98388 - protein, 189 aa, Setaria italica
  Transcript Sequence Number=SeqID_32414
  Gene Ontology: Mol. function=transferase activity, transferring glycosyl groups; Cellular component=1,3-beta-glucan synthase complex; Biological process=cell wall organization and biogenesis
  Homolog annotation: Hit_ID=Q9LYS6; Match level="QueryCoverage=97%, HitCoverage=10%, E-value=2e-32, Identity=41%"; Hit description =Putative callose synthase 6
VGEIRTLGMFRARFKSMPEAFSKCIAAKQREQALNQGSFFCVWNSFINSLREEDLISDREKHILMAPSSSINLSVTQWPPFLVASKVPAALHMAMNSKEGDEHELIEKVKLDRDRYNAVIECYESLMIILNNLLLDSNDRNIVNEIDRKVTYSMTNKTFLEDFEMIEIGKVSATLAKLLQLLKSEPING

SEQ ID NO: 98389 - protein, 97 aa, Setaria italica
  misc_feature (85)..(85): Xaa can be any naturally occurring amino acid
  Transcript Sequence Number=SeqID_32415
SEEKGKSDRRKSMPRSHRPPIHRRAPPITAQIIDRCPNRLLRRGIEREAGATRRGGGRADAGLRARSGSACRAPWISATALGGGXKLRAGGDGRRCS

SEQ ID NO: 98390 - protein, 69 aa, Setaria italica
  Transcript Sequence Number=SeqID_32416
  Subcellular localization annotation: CTP_CleavageSite=34; ConfidenceScore=5.00e-01
SRASSPASEGALPNGEVKMASLPKPSGAPENPLRQAYRWSRSPNNRLPVAPPPPPFVLGKKYPHCVVLR

SEQ ID NO: 98391 - protein, 89 aa, Setaria italica
  Transcript Sequence Number=SeqID_32417
  Gene Ontology: Mol. function=small conjugating protein ligase activity; Cellular component=integral to membrane; Biological process=regulation of protein metabolic process
  Homolog annotation: Hit_ID=B6TT84; Match level="QueryCoverage=95%, HitCoverage=19%, E-value=1e-17, Identity=58%"; Hit description =Ubiquitinating enzyme
LGSLDYKKEDRRALAIKSREAPPKFGSPERQKLIEEVNSQPNLRLKNACHFCIFDNVLFQPQIHEQMLTKAPPVPQALPNGPNDESNQL

SEQ ID NO: 98392 - protein, 61 aa, Setaria italica
  Transcript Sequence Number=SeqID_32418
GQVLSRVVHTLDKRCPIPRLRGFAMRSYNFYNPVRFVNGCCLVIDEIKVGSYYVTPLYVGH

SEQ ID NO: 98393 - protein, 68 aa, Setaria italica
  Transcript Sequence Number=SeqID_32419
PTRLYQSGLRIMVLFSLLEGSLGEPARAHQQSLNKKKMPKATHHSMMVASAQGGNWICSNKSSSESTK

SEQ ID NO: 98394 - protein, 180 aa, Setaria italica
  Transcript Sequence Number=SeqID_32420
  Gene Ontology: Mol. function=small conjugating protein ligase activity; Cellular component=integral to membrane; Biological process=regulation of protein metabolic process
  Homolog annotation: Hit_ID=B6TT84; Match level="QueryCoverage=89%, HitCoverage=52%, E-value=5e-52, Identity=67%"; Hit description =Ubiquitinating enzyme
MLTALVALIAFMPTNPGGALGSLDYKKEDRRALAIKSREAPPKFGSPERQKLIEEIHEQMLTKAPPVPQALPNGPNDESNQLPAADSFGEHADKADEGGSVSVSSDLTEPQSESGVAENTAEPPVAEVTNPHLPEASHRENIPRVPLAPQNPVVAIQKPKHDRLLNLRTDNLGTRTTRTN

SEQ ID NO: 98395 - protein, 873 aa, Setaria italica
  Transcript Sequence Number=SeqID_32421
  Gene Ontology: Mol. function=phosphogluconate dehydrogenase (decarboxylating) activity; Cellular component=integral to membrane; Biological process=metabolic process
  Homolog annotation: Hit_ID=Q9LM23; Match level="QueryCoverage=99%, HitCoverage=87%, E-value=0.0, Identity=52%"; Hit description =T10O22.24
  Pfam annotation: Domain name=DUF1537; Domain location=485-713; Score=- 89.1; E_value=0.056; Accession=PF07005.3; Description=Protein of unknown function, DUF1537
  Pfam annotation: Domain name=F_bP_aldolase; Domain location=764-873; Score=-76.6; E_value=3.2e-08; Accession=PF01116.12; Description =Fructose-bisphosphate aldolase class-II
  Pfam annotation: Domain name=NAD_binding_2; Domain location=1-155; Score=114.0; E_value=4.9e-31; Accession=PF03446.7; Description=NAD binding domain of 6-phosphogluconate dehydrogenase
  Pfam annotation: Domain name=PE; Domain location=88-182; Score=-27.9; E_value=0.092; Accession=PF00934.12; Description=PE family
  Pfam module annotation: Pfam domain module=DUF1537::F_bP _aldolase::NAD_binding_2::PE; Domain location=485-713::764-873::1 -155::88-182
MGFGMASHLLKSGFHVVAYDVYKPTMARVEDLGGSTKGSPEEVAKDVEILIIMVANEFQADSVLYGNAGAVPVLSAGTSVILSSTVSPGFVIRLNKRLEAECRDIKLVDAPVSGGVKRAADGTLTIMASGTDEALHGTGAVLSALSEKLYIIKGGCGAASSVKMVNQLLAGVHIASAAEAMAFAARLNLRTRRVFEIMQHSRGYSWMFGNRVPHMLDNDYTPYSAVDIFVKDLGIVSCESSNSRIPVHVSNIAHQLFISGSASGWGRYDDAAVVKVYETLTGVKVEGKPPMLSKEDVLRSLPAEWPEDPMDDIVSITSCSSKKILVVLDDDPTGTQTVHDIEVLTEWPVEALVEQFLKLPTCFFILTNSRSMTADKVMLLVQTICRNLEAAAKNVPGVSYTVVLRGDSTLRGHFPEEVDAAVSVLGEMDAWIICPFFLQGGRYTINDIHYVADSDRLIPAGETEFAKDATFGYKSSNLRQWVEEKTRGRVSEKQLSTISIDLLRKQGPNAVCQQLCSLEKGSVCIVNAASEKDMAVFASGMIQAELKGKKFLCRTAASFVSARIGIKPKPPICPIDLGLKRALTGGLIVVGSYVPKTTKQVDELRSQCGSSLRVIEVSVEMVSMKSTEDRDQEISRVVELGNAYIQSRKDTLVVTSRQLITGKTPEESLEINCKVSSALVEIVKRIDSKPHYIIAKGGITSSDIATKALEARRAKVMGQALAGVPLWQLGPESRFPGVPYIVFPGNVGDNSALAKVVKNWASPSRSSTKELLLNAEKGGYAIGAFNVYNLEGVEAVVAAAEAENSPAILQIHPSALKQGGVPLVASCIAAAEQSSVPITVHYDHGTSKSDLLQALEMGFDSVMVDGSHLTFRG

SEQ ID NO: 98396 - protein, 252 aa, Setaria italica
  Transcript Sequence Number=SeqID_32422
  Gene Ontology: Mol. function=phosphogluconate dehydrogenase (decarboxylating) activity; Biological process=metabolic process
  Homolog annotation: Hit_ID=Q9LM23; Match level="QueryCoverage=95%, HitCoverage=16%, E-value=2e-74, Identity=60%"; Hit description =T10O22.24
  Pfam annotation: Domain name=F_bP_aldolase; Domain location=1-252; Score=344.0; E_value=2.9e-100; Accession=PF01116.12; Description =Fructose-bisphosphate aldolase class-II
GVEAVVAAAEAENSPAILQIHPSALKQGGVPLVASCIAAAEQSSVPITVHYDHGTSKSDLLQALEMGFDSVMVDGSHLTLGENILYTKSISSLAHAKGLLVEAELGRLSGSEDGLTVEEYEARFTDVAKAEEFIDETSIDALAVCIGNVHGKYPSSGPNLRLDLLKDLRALTLKKGVSLVLHGASGLPHELVQECINLGVRKFNVNTEVRNSYLESLKKPEKDLIQVMASAKEAMKAVVAEKLHLFGSAGKA

SEQ ID NO: 98397 - protein, 137 aa, Setaria italica
  misc_feature (105)..(105): Xaa can be any naturally occurring amino acid
  misc_feature (127)..(127): Xaa can be any naturally occurring amino acid
  Transcript Sequence Number=SeqID_32423
  Gene Ontology: Mol. function=transferase activity, transferring glycosyl groups; Biological process=metabolic process
  Homolog annotation: Hit_ID=B6TCK9; Match level="QueryCoverage=100%, HitCoverage=30%, E-value=7e-24, Identity=40%"; Hit description =Anthocyanidin 5,3-O-glucosyltransferase
DAAEELGLPAYLFFTSGASPLAAYLHIPVMRSDVSFGDMGRSLLHFPGVHPVPASDLPEVLLGPRNEQYEATIGLFEQLPRAKGILANTFEWLEPRAVKAIQEGXPRPGEPVPRLFCVGPLVGEERXGEGKHECLTW

SEQ ID NO: 98398 - protein, 134 aa, Setaria italica
  misc_feature (15)..(15): Xaa can be any naturally occurring amino acid
  Transcript Sequence Number=SeqID_32424
  Subcellular localization annotation: CTP_CleavageSite=78; ConfidenceScore=5.29e-01
YSLCRPWLVSLVFFXFFFFCITNSFSFLKGCCVFFCFLQLNHIFFNLHLSPSPPSQCTDSSKNPNAKRRRRENKSKSKIEHKKEERQWASVRPDLIPDVAEVGVGTPMLYTTTRLPATAPEQTPCRSPPARRRG

SEQ ID NO: 98399 - protein, 110 aa, Setaria italica
  Transcript Sequence Number=SeqID_32425
  Subcellular localization annotation: CTP_CleavageSite=46; ConfidenceScore=5.55e-01
KQARSPHGSCGLVPPPPSSSLQAVGRTRKAPSERRRLRPGAWDAMVAMGAAHRASAGFPAARSGGGSWPEERHGDILHHGRDPCGPEDGERRWRRAGASPRVSTGKRRSN

SEQ ID NO: 98400 - protein, 124 aa, Setaria italica
  misc_feature (12)..(12): Xaa can be any naturally occurring amino acid
  misc_feature (36)..(36): Xaa can be any naturally occurring amino acid
  Transcript Sequence Number=SeqID_32426
ASGNLNPNVLAXLFSMYREWQEENAKRISQKQEEIXNKIETADALAVKLLQRFNYSLYSMRSTSHNLAEVHPLQIEVGELKGRLTEVISNCDALCKRIAAEGPESLRSSVEPFTAGRAEAEGSG

SEQ ID NO: 98401 - protein, 113 aa, Setaria italica
  Transcript Sequence Number=SeqID_32427
FSPKSQEEIENKIETADALAVLLLQRFNSSLYSMRSTSHNLAEVHPLQIEVGELKGRLTEVISNCDALCKRIAAEGPESLRSSVEPFTAGRAEAEGSGSLGSKQEPPVEKSNS

SEQ ID NO: 98402 - protein, 207 aa, Setaria italica
  Transcript Sequence Number=SeqID_32428
  Gene Ontology: Mol. function=microtubule motor activity; Cellular component=microtubule associated complex; Biological process =microtubule-based movement
  Homolog annotation: Hit_ID=Q93XF4; Match level="QueryCoverage=100%, HitCoverage=21%, E-value=7e-72, Identity=67%"; Hit description =Kinesin heavy chain (Fragment)
  Subcellular localization annotation: CTP_CleavageSite=83; ConfidenceScore=5.03e-01
KHKEVANNTNADEDLVSDRKSSLSISASPSLSPMQDPTLCSSPKIHNKARKSITSPGLSPSKLRVSESPGDGNVEVCRNSEVRSSLQSSKLSPTDSLAASLQRGLHIIEYHQQNPAPRRSFVGLSFDHFAVNPRQSIANVSSAVQVLPEDRGTMLCSSCKKPMNANENQTEDINSAKQIVLALGATSNESDSASVKDDNNTKAIASK

SEQ ID NO: 98403 - protein, 194 aa, Setaria italica
  Transcript Sequence Number=SeqID_32429
  Gene Ontology: Mol. function=transferase activity, transferring glycosyl groups; Cellular component=integral to membrane; Biological process=protein amino acid glycosylation
  Homolog annotation: Hit_ID=B9R916; Match level="QueryCoverage=91%, HitCoverage=26%, E-value=1e-80, Identity=75%"; Hit description =Galactosyltransferase, putative
  Pfam annotation: Domain name=Galactosyl_T; Domain location=3-154; Score=-40.8; E_value=0.00072; Accession=PF01762.13; Description =Galactosyltransferase
LELVAAGALLPLLLGHSYDLVVLKTIAICEYGVRVVSARYIMKCDDDTFVRLESVITEVRKIRNGESLYIGNMNYHHKPLRNGKWAVTYEEWPEEDYPIYANGPGYVISSDIADSILSEFVNHKLRLFKMEDVSMGMWVERFNNTRLVKYVHSVKFCQFGCIDDYYTAHYQSPRQMLCLWDKLQAGKAQCCNMR

SEQ ID NO: 98404 - protein, 169 aa, Setaria italica
  misc_feature (167)..(167): Xaa can be any naturally occurring amino acid
  Transcript Sequence Number=SeqID_32430
  Homolog annotation: Hit_ID=Q7XNB7; Match level="QueryCoverage=76%, HitCoverage=19%, E-value=2e-11, Identity=32%"; Hit description =OSJNBa0029C04.11 protein
FIEQERRAEAAAVTVGVAEESVPYTTVITDASRFFVIFKRLFVNLILSFLERTRSQATFLRLTPEQAYKIIEIELSLMYDTLHSKAAVIHTWYGRLFRCLTLLSTSTACLLFNVHHKGKHQSYNSIDVCITNILFGGALCLEVYAIGMMLISYWTYAALQSCNFRFXSN

SEQ ID NO: 98405 - protein, 52 aa, Setaria italica
  Transcript Sequence Number=SeqID_32431
  Gene Ontology: Mol. function=DNA-directed RNA polymerase activity; Cellular component=DNA-directed RNA polymerase II, holoenzyme; Biological process=transcription
  Homolog annotation: Hit_ID=Q9FLM8; Match level="QueryCoverage=100%, HitCoverage=100%, E-value=2e-17, Identity=82%"; Hit description=DNA directed RNA polymerase II polypeptide K
  Pfam annotation: Domain name=DNA_RNApol_7kD; Domain location=11-42; Score=84.4; E_value=3.9e-22; Accession=PF03604.5; Description=DNA directed RNA polymerase, 7 kDa subunit
  Pfam annotation: Domain name=PhnA_Zn_Ribbon; Domain location=10-38; Score=10.1; E_value=0.053; Accession=PF08274.4; Description=PhnA Zinc-Ribbon
  Pfam module annotation: Pfam domain module=DNA_RNApol_7kD::PhnA_Zn _Ribbon; Domain location=11-42::10-38
MDPQQPEPVSYLCGDCGSENTLKPGDVIQCRDCGYRILYKKRTHRIVQYEAR

SEQ ID NO: 98406 - protein, 205 aa, Setaria italica
  Transcript Sequence Number=SeqID_32432
  Homolog annotation: Hit_ID=B6TBY5; Match level="QueryCoverage=76%, HitCoverage=76%, E-value=3e-58, Identity=72%"; Hit description =Proline-rich protein
  Pfam annotation: Domain name=DUF1210; Domain location=30-202; Score =232.9; E_value=8.1e-67; Accession=PF06735.3; Description=Protein of unknown function (DUF1210)
RAKKSLVLPLTPLEFETTKKLNIYKCLSKTGRTLDFFPASVNCVSLSTGLQVAIKCKDTNGEYETKAVSELQSSGAFSVPLAADLHGADCHAQLRSAANAPCPGQEPSRIAPMSGGTFVAIPGKTHYPSAECASAFLCAPIKKHFLDHFHKKPVPEYHPVPEHKPAPVYHPPTPEYHPPTPEYHPPTPVYGQPKPTPIYHPPAEH

SEQ ID NO: 98407 - protein, 135 aa, Setaria italica
  Transcript Sequence Number=SeqID_32433
  Gene Ontology: Mol. function=DNA binding; Cellular component =chromosome; Biological process=nucleosome assembly
  Homolog annotation: Hit_ID=A9PCS9; Match level="QueryCoverage=88%, HitCoverage=88%, E-value=1e-36, Identity=67%"; Hit description =Histone H2A
  Pfam annotation: Domain name=CBFD_NFYB_HMF; Domain location=25-89; Score=20.5; E_value=0.0023; Accession=PF00808.15; Description =Histone-like transcription factor (CBFNF-Y) and archaeal histone
  Pfam annotation: Domain name=Histone; Domain location=19-92; Score =114.3; E_value=4e-31; Accession=PF00125.16; Description=Core histone H2AH2BH3H4
  Pfam module annotation: Pfam domain module=CBFD_NFYB_HMF::Histone; Domain location=25-89::19-92
  Subcellular localization annotation: CTP_CleavageSite=37; ConfidenceScore=5.24e-01
MAGRGKAIGSGAAKKSMSRSSKAGLQFPVGRIARFLKAGKYAERVGAGAPVYLAAVLEYLAAEVLELAGNAARDNKKTRIVPRHIQLAVRNDEELSRLLGTVTIASGGVMPNIHNLLLPKKAGGGSAKAAAGDED

SEQ ID NO: 98408 - protein, 135 aa, Setaria italica
  Transcript Sequence Number=SeqID_32434
  Gene Ontology: Mol. function=DNA binding; Cellular component =chromosome; Biological process=nucleosome assembly
  Homolog annotation: Hit_ID=Q43208; Match level="QueryCoverage=82%, HitCoverage=82%, E-value=9e-44, Identity=80%"; Hit description =Histone H2A.4
  Pfam annotation: Domain name=CBFD_NFYB_HMF; Domain location=25-89; Score=20.5; E_value=0.0023; Accession=PF00808.15; Description =Histone-like transcription factor (CBFNF-Y) and archaeal histone
  Pfam annotation: Domain name=Histone; Domain location=19-92; Score =114.3; E_value=4e-31; Accession=PF00125.16; Description=Core histone H2AH2BH3H4
  Pfam module annotation: Pfam domain module=CBFD_NFYB_HMF::Histone; Domain location=25-89::19-92
  Subcellular localization annotation: CTP_CleavageSite=37; ConfidenceScore=5.14e-01
MAGRGKAIGAGAAKKATSRSSKAGLQFPVGRIARFLKAGKYAERVGAGAPVYLAAVLEYLAAEVLELAGNAARDNKKTRIVPRHIQLAVRNDEELTKLLGGATIASGGVMPNIHQHLLPKKAGSSKASSHDDDDN

SEQ ID NO: 98409 - protein, 213 aa, Setaria italica
  misc_feature (140)..(140): Xaa can be any naturally occurring amino acid
  Transcript Sequence Number=SeqID_32435
  Gene Ontology: Mol. function=structural constituent of cell wall
  Homolog annotation: Hit_ID=B6TBY5; Match level="QueryCoverage=97%, HitCoverage=98%, E-value=2e-75, Identity=70%"; Hit description =Proline-rich protein
  Pfam annotation: Domain name=DUF1210; Domain location=34-210; Score =314.7; E_value=1.9e-91; Accession=PF06735.3; Description=Protein of unknown function (DUF1210)
LAAPWQEGWLLGVCAALMAIAVASAAEGQVASVVVGLARCADCTRKNMKAETAFKGLQVAIKCKDTNGEYETKAVSELQSSGAFSVPLAADLHGADCHAQLHSAANAPCPGQEPSRIAPMSGGTFVAIPGKTHYPSAECXASAFLCAPIKKHFLDHFHKKPVPEYHPVPEHKPAPVYHPPTPEYHPPTPEYHPPTPVYGQPKPTPIYHPPAEH

SEQ ID NO: 98410 - protein, 65 aa, Setaria italica
  misc_feature (33)..(33): Xaa can be any naturally occurring amino acid
  Transcript Sequence Number=SeqID_32436
NTRLSCRFHPSFFVCRRHDDQKRYYELRDGDPXYAAKFYDCCGAEDPDAPGCTTDFHRSYDDAQD

SEQ ID NO: 98411 - protein, 89 aa, Setaria italica
  Transcript Sequence Number=SeqID_32437
  Pfam annotation: Domain name=CHORD; Domain location=9-82; Score= -26.3; E_value=0.082; Accession=PF04968.4; Description=CHORD
MDSGVTPAAEKLCRRCKGSYDPSANTRLSCRFHPSFFVCRRHDDQKRYYELRDGDPPYAAKFYDCCGAEDPDAPGCTTDFHRSYDDAQD

SEQ ID NO: 98412 - protein, 187 aa, Setaria italica
  Transcript Sequence Number=SeqID_32438
  Gene Ontology: Mol. function=cysteine-type peptidase activity; Biological process=proteolysis
AIQKMEEASRFRVQVPSISTPRPNPFDPSNGSEEIVELPQIPDSAPSVLLPWRKPFDIPFDHIVDRDSRLQETWTPRLRFPSAQRRKHENLYLKQSTYLRHHNGTKTEKPEVSEKDASDNHSDNDSEQAWNNCKLFGSLERHVGDEIKILSAAISDVCVLEVNEGTKSTDPVIGTDSFYIQKSISST

SEQ ID NO: 98413 - protein, 65 aa, Setaria italica
  Transcript Sequence Number=SeqID_32439
YSVVARHGSASIPDHQLDHAPLAVRPELPCLQSPAVPPGLGGPSLPDPPPTRPPPTHRASPTCLL

SEQ ID NO: 98414 - protein, 109 aa, Setaria italica
  Transcript Sequence Number=SeqID_32440
  Gene Ontology: Mol. function=protein kinase activity; Cellular component=mitochondrion; Biological process=protein amino acid phosphorylation
  Homolog annotation: Hit_ID=B9RN20; Match level="QueryCoverage=100%, HitCoverage=17%, E-value=4e-49, Identity=86%"; Hit description =Ubiquinone biosynthesis protein coq-8, putative
  Pfam annotation: Domain name=ABC1; Domain location=60-109; Score= -11.6; E_value=0.00031; Accession=PF03109.8; Description=ABC1 family
NAERIALALCRMRGAALKVGQMLSIQDESLVPPPVLAALDIVRQGADVMPRKQLNSVLDAELGPNWSSKLRSFDYDPLAAASIGQVHRAVLKDGSDVVMKIQYPGVADS

SEQ ID NO: 98415 - protein, 51 aa, Setaria italica
  Transcript Sequence Number=SeqID_32441
KGKSCFHYNRLNCKYSIAKTKGNMENCGSKFLILYSQTHNCQDLELSGLVK

SEQ ID NO: 98416 - protein, 70 aa, Setaria italica
  Transcript Sequence Number=SeqID_32442
  Gene Ontology: Mol. function=translation initiation factor activity; Biological process=regulation of translational initiation
  Homolog annotation: Hit_ID=UPI0000447C06; Match level="QueryCoverage =87%, HitCoverage=12%, E-value=3e-12, Identity=52%"; Hit description =similar to CGI-09 protein
AIYHQYLEPLAKCMHTLQVSKRAIGLQLSEPWLREYQVLPSRTHPHMQMNAFGGYILSGIRIRSEPVSHQ

SEQ ID NO: 98417 - protein, 93 aa, Setaria italica
  Transcript Sequence Number=SeqID_32443
  Gene Ontology: Mol. function=phosphotransferase activity, alcohol group as acceptor; Biological process=phosphoinositide-mediated signaling
  Homolog annotation: Hit_ID=Q53RI7; Match level="QueryCoverage=91%, HitCoverage=4%, E-value=2e-34, Identity=80%"; Hit description =Phosphatidylinositol 3-and 4-kinase, putative
VVLERKEVAFRLIVHMLGAEGGLETEQVGKVRNAAARQVRSLTDFLKIRKRDWREQGAQLRARINTKLMCCQAAVVVLVRSVSTIDTNSKSSK

SEQ ID NO: 98418 - protein, 766 aa, Setaria italica
  Transcript Sequence Number=SeqID_32444
  Gene Ontology: Mol. function=phosphotransferase activity, alcohol group as acceptor; Cellular component=Golgi-associated vesicle; Biological process=phosphoinositide-mediated signaling
  Homolog annotation: Hit_ID=Q53RI7; Match level="QueryCoverage=96%, HitCoverage=37%, E-value=0.0, Identity=80%"; Hit description =Phosphatidylinositol 3-and 4-kinase, putative
CSLGSGKVLGNCLVNGQVGKVRNAAARQVRSLTDFLKIRKRDWREQGAQLRARINTKLMCCQAAVVVLVRSVSTIDTNSKSSKDMLQQTLAWFIEATKSCILSSWRKLKICEELFCTLLNGIGQITVSRGGQLLPVLLIPLKPLVVSTCSQADMTGSSPGALFEAVVKLSCEIIEFGWTKDRALVDTFIMRLAAYVRERNDYEEEDGKGKEAVPVIRLNVIRLLAELCVFLKKWEVVDMILPLFIEHLEEGDASSPSSLRLRLLDAISRVACLGFEKSYRESIVLMTRSYLDKVKALGVSENNTVPSEATTERTETLPAGFLLVASNLTSTKLRSDYRHRLLSLCSDVGLVAESKSGRSGADLMGPLLPAVAEICSDFDPVSTVEPSLLKLFRNLWFYIVLFGLAPPIQKNGAPTKPVSTSLNTMESSSAIALQAVAGPYMWNSQWCVAVQRIAQGTPPLVVSSVKWLEDELELNALHNPGSRRGSGNENSAVGQRTALSAALGGRVEVAAMSTISGVKATYLLAVAFLEILRFSCNGGILSATSTLNTSNSAFSCVFEYLLTPNLTPAVSQCLTAVVHRAFETVLSWLEDRISDIGEGADVRESVLSVHACFLIKSMSQRDEHVRDVSVKLLTQLKEKFPQVLWNSSCLDLLLISVHNELTSGPVSDPAWVATVRSLYQKIAREWLTSALSYAPCTTQGLIQENFCKPSGVQRTQHTADVVSLLSEIRICSGKNDWNGIRTANIPAVMDSAAAASGDQKKKHLTS

SEQ ID NO: 98419 - protein, 189 aa, Setaria italica
  Transcript Sequence Number=SeqID_32445
VWPHVGAVAHHRSPRGPAQIRKETGQPVMGDQIRLQRIADPPPAGLTVRGAGSPALPPCEMTRANPDEQVQLPLPPRWPEPHAEHCSEHSYPPTCRSMQARGRSGGQPGSCTTSPSTPASTMDGEETQVRMQREEEDATGAAWSRHWSPPPLPAGCSGGGPRGTAGGDLRAAGWGAPRVAPQRSAEGRA

SEQ ID NO: 98420 - protein, 87 aa, Setaria italica
  Transcript Sequence Number=SeqID_32446
  Gene Ontology: Mol. function=hydrolase activity, acting on ester bonds; Biological process=lipid metabolic process
  Homolog annotation: Hit_ID=B4FSE4; Match level="QueryCoverage=100%, HitCoverage=23%, E-value=1e-40, Identity=88%"; Hit description =Anther-specific proline-rich protein APG
ALQFNAAAKDLLQELNAKLPGARMSLSDCYSIVMELIDRPQKYGFKTSHTSCCDVDTTVGGLCLPTATLCDDRRDFVFWDAYHTSDA

SEQ ID NO: 98421 - protein, 418 aa, Setaria italica
  Transcript Sequence Number=SeqID_32447
  Homolog annotation: Hit_ID=B9SFN4; Match level="QueryCoverage=63%, HitCoverage=63%, E-value=7e-34, Identity=39%"; Hit description =Synapse-associated protein, putative
  Pfam annotation: Domain name=BSD; Domain location=178-239; Score =76.4; E_value=1.1e-19; Accession=PF03909.9; Description=BSD domain
ERGADAEVAAAEGEEGDEAGEGPDGGWSFGGLVKTFASRSETVLGGYRRDLQDLGSGLRLETAALRAAAARAASALPGALEASASAASDRLESVGQAVDDLGAAAAGLLSHANEALRSAEGDGEDGDGASRPSDASASGASWRASLPSKKYTRFEAQVLALRADPATFTEEPEDSEGFARWNSSFSIDEVKEQIEGVLRESPGLESFVERLVPSVVDYETFWSRYFFAVDKLRQAEDVRTKLVSRAMSKEEDEELSWDVDDDDEDANTSDHKEGTNSMVDKKEEKSADPFNHETEGSGKQEAAVGTDSTEDKEVASAEAKDGNGESSVETLTPKSSNGVGQEEKAEAGDSSKESDFSVVSQPSAQEEDLSWEEIEDVGDQDEKKGASPRSSSTNKVEDLRKRLNSVEDDEDLSWDIDD

SEQ ID NO: 98422 - protein, 283 aa, Setaria italica
  Transcript Sequence Number=SeqID_32448
  Gene Ontology: Mol. function=RNA binding; Cellular component=nucleus; Biological process=apposition of dorsal and ventral imaginal disc -derived wing surfaces
  Homolog annotation: Hit_ID=B6TVQ3; Match level="QueryCoverage=100%, HitCoverage=100%, E-value=1e-156, Identity=95%"; Hit description =Nucleic acid binding protein
MDGLHGTDACFSPARAMSPQVRPPGPPDVGSQYLADLLQEHQKLGPFMQVLPICSRLLNQEIMRVSNMRRQHGAGEFEKFPIASPNQMHPSPPMPNFCGNGYSPWNGMHSERVGVPQGAMGWQGPPQSPSSYIVKKILRLEVPTDTYPNFNFIGRLLGPRGNSLKRIEASTGCRVFIRGKGSIKDSGKEEQLKGRPGYEHLSEPLHILIEAELPANVIDARLAKAQEILEELLKPVDESQDYYKRQQLRELAMLNSPLREESPHPGGAPPSPFSNGGMKRVKQ

SEQ ID NO: 98423 - protein, 71 aa, Setaria italica
  Transcript Sequence Number=SeqID_32449
  Gene Ontology: Mol. function=protein dimerization activity; Cellular component=nucleus
  Homolog annotation: Hit_ID=Q7XRI2; Match level="QueryCoverage=64%, HitCoverage=2%, E-value=1e-12, Identity=76%"; Hit description =P0076O17.10 protein
FAAVSNGSGNKHSVNNVNNLNRGASAASDNKIKLLKDAHSWADSNLIEDVLAAVNNNVSQASDLLKAMVSP

SEQ ID NO: 98424 - protein, 387 aa, Setaria italica
  misc_feature (17)..(17): Xaa can be any naturally occurring amino acid
  Transcript Sequence Number=SeqID_32450
  Gene Ontology: Mol. function=sequence-specific DNA binding; Cellular component=nucleus; Biological process=regulation of transcription, DNA-dependent
  Homolog annotation: Hit_ID=Q7XTS2; Match level="QueryCoverage=92%, HitCoverage=37%, E-value=1e-102, Identity=49%"; Hit description =OSJNBa0008M17.13 protein
  Pfam annotation: Domain name=MULE; Domain location=7-104; Score =108.4; E_value=2.5e-29; Accession=PF10551.1; Description=MULE transposase domain
  Pfam annotation: Domain name=SWIM; Domain location=287-323; Score =32.6; E_value=1.6e-06; Accession=PF04434.9; Description=SWIM zinc finger
  Pfam module annotation: Pfam domain module=MULE::SWIM; Domain location=7-104::287-323
FNYFGDVLCLDTTYKIXNGYGRPLALFLGVNHHKQTIIFGAAMLYDESFESYKWLFESFKIAMHGKQPTVALIDQSIPLSSAMAAAWPNTTQRICAWHVYQNSLKHLNHVFQGSKTFAKDFSKCVFGYEDGDEFLFAWRSMLEKYDLRHNEWLSKVFDEKEQWALAYDRHIFCADIISALQVESFSSILKKFLSPQLELLSFFKHYERAVDEHRYAELQADFQASQSYPRIPPAKMLKQAAHTYTPVVFEIFRKEFELFMDSVLFSCGEAGTTSEYKVASSEKPKEHFVRFDSSDCSCVCTCRKFEFMGIPCCHMLKVLDYRNIKELPQKYLLKRWRRTAKSTNEDNEGNATNANGSSLNVPAPAANHHGLQSFSAMIQDASVSSMH

SEQ ID NO: 98425 - protein, 133 aa, Setaria italica
  Transcript Sequence Number=SeqID_32451
  Subcellular localization annotation: CTP_CleavageSite=53; ConfidenceScore=5.09e-01
DSWLFLVWSTVLSPDSWILSRTPLCLLCLFVCCGSRRSKIGVMMACFDSSFLCASAGAESFHHYLLIGENLHFLSPLSSFSLFASSIPILPLGFPISLYACMVGMDCFWYSQSFREHVIVKAATRSTKLSVSI

SEQ ID NO: 98426 - protein, 132 aa, Setaria italica
  misc_feature (50)..(50): Xaa can be any naturally occurring amino acid
  Transcript Sequence Number=SeqID_32452
  Subcellular localization annotation: CTP_CleavageSite=27; ConfidenceScore=5.29e-01
AVGGREDEARGRAMKALRRSSTSSSATAAAPSPRAPSSPRSYSWIHRRSXLPVTSSASAAASSLATSGTSAADGSDSAPAHVAAAASSPSLAPSSPNVDRGGIKSPWSRRKRKRALSGQHWNRLFSSNGKLR

SEQ ID NO: 98427 - protein, 90 aa, Setaria italica
  Transcript Sequence Number=SeqID_32453
ICHYLKLDHERRLPPGFVLRRCRASNPGWDRSFNDSRSSTYSWIIKDLLELQLNEEAVSCRFHCELKLINAKCPFITQYTSQTRKQTRKM

SEQ ID NO: 98428 - protein, 236 aa, Setaria italica
  Transcript Sequence Number=SeqID_32454
  Gene Ontology: Mol. function=nucleoside-triphosphatase activity; Cellular component=membrane; Biological process=transport
  Homolog annotation: Hit_ID=B6SWU8; Match level="QueryCoverage=94%, HitCoverage=34%, E-value=1e-110, Identity=88%"; Hit description =ATPase, coupled to transmembrane movement of substances
  Pfam annotation: Domain name=ABC2_membrane; Domain location=2-190; Score=112.9; E_value=1e-30; Accession=PF01061.16; Description=ABC-2 type transporter
  Subcellular localization annotation: CTP_CleavageSite=62; ConfidenceScore=5.18e-01
TFTSLRMFQIIAPALVAGAMWWRSSPVAVQDRLGLLFFISIFWGVFASFNAVFAFPQERPVLARERASGMYALSSYFMSRMVGDLPMELALPTAFTVVVYLMTGLNPSPAAFALTLAVILSYVLVAGGLGLAVGAIMMDAKRASTLVTVIMLAYLLTGGFYVHNVPGFMVWAKYTSFTYYCYRLLIAVQYGGHLRRLLPPEAVDGEAGPGACVAALVAMFFGYRLLAYLALRRVRK

SEQ ID NO: 98429 - protein, 96 aa, Setaria italica
  misc_feature (23)..(23): Xaa can be any naturally occurring amino acid
  misc_feature (41)..(41): Xaa can be any naturally occurring amino acid
  Transcript Sequence Number=SeqID_32455
MVPTTRNLLHHDGNSRGKPCYPXGQYCVGIAAQLEASAAAXRQQDHRKPSRSTRLAMADDEPAAAAGTSSQGGAAAGDDEDWLQLSLAGVAVASSS

SEQ ID NO: 98430 - protein, 83 aa, Setaria italica
  misc_feature (13)..(13): Xaa can be any naturally occurring amino acid
  Transcript Sequence Number=SeqID_32456
  Homolog annotation: Hit_ID=B6TWE7; Match level="QueryCoverage=73%, HitCoverage=17%, E-value=5e-28, Identity=96%"; Hit description=PHI-1
LDPYSGAYLVLTXPDVQVDEFCRAVCGFHYFTFASVVGVTVPYLWVGNSATQCPGKCAYPFAAAEYGAGAGAGGGGGGRGRAG

SEQ ID NO: 98431 - protein, 113 aa, Setaria italica
  Transcript Sequence Number=SeqID_32457
  Gene Ontology: Mol. function=substrate-specific transmembrane transporter activity; Cellular component=integral to membrane; Biological process=transmembrane transport
  Homolog annotation: Hit_ID=B8XSN4; Match level="QueryCoverage=99%, HitCoverage=21%, E-value=2e-36, Identity=74%"; Hit description =Hexose carrier
FAVAGAEEDAGRRYGGGVTAFVALSCATAAMGGAIFGYDIGTAGGVSSMDPFLRGFFPDVYRRMKGGTGRVSNYCKFDSQLLTLFTSSLYIAGLLTAVLLASRVTARRGRRPS

SEQ ID NO: 98432 - protein, 43 aa, Setaria italica
  Transcript Sequence Number=SeqID_32458
KVLMGAKSGPKPTFSLVAPSLSSPLFTKPVINEVNVVISHPRC

SEQ ID NO: 98433 - protein, 44 aa, Setaria italica
  Transcript Sequence Number=SeqID_32459
YILIGIKVALCYISLASLVLGRILLHAYFLTDLKGSSGSSLTNE

SEQ ID NO: 98434 - protein, 362 aa, Setaria italica
  Transcript Sequence Number=SeqID_32460
  Gene Ontology: Mol. function=rRNA binding; Cellular component =nucleolus; Biological process=ribosome biogenesis
  Homolog annotation: Hit_ID=Q5VPH4; Match level="QueryCoverage=100%, HitCoverage=100%, E-value=1e-165, Identity=79%"; Hit description =Putative RNA processing factor 1
  Pfam annotation: Domain name=Brix; Domain location=138-333; Score =230.7; E_value=3.8e-66; Accession=PF04427.10; Description=Brix domain
MAKEKKRKEPPSDAAPPQGGEGEGKRERKGKKAKKHKAEAILPSQIKNKEKRSELHAKLKREKKAEKRKLARERSQAIRRAEELGEQPPERQVPRTIENTREPDETVCRPDDQELFAGNDADEFNAVLKQHIIPKVLITTCRFNSGRGPAFIEELMQVIPNSHYVKRGTYELKKIVEYAQNRDFTSLIVVHTNRREPDALLIMGLPDGPTAHFKLSKLILRKDIKNHGNPTSHKPELVLNNFTTRLGHRVGRMIQSLFPQDPNFRGRRVVTFHNQRDYIFFRHHRYIFETKESKVASKDKKAKTSESKSQPEKQVICRLQECGPRFTLKLLTLQHGTFDTKSGEYEWVHKPDMDTSRRRFFL

SEQ ID NO: 98435 - protein, 123 aa, Setaria italica
  misc_feature (84)..(84): Xaa can be any naturally occurring amino acid
  Transcript Sequence Number=SeqID_32461
  Gene Ontology: Mol. function=protein serine/threonine kinase activity; Biological process=protein amino acid phosphorylation
  Homolog annotation: Hit_ID=Q7XGR6; Match level="QueryCoverage=100%, HitCoverage=16%, E-value=9e-36, Identity=60%"; Hit description =Protein kinase domain containing protein
NILRLLGCCLRVDVPLLVYEYAAKGSLEDILHGKENQQLEPLTLRSRLDIAIGSGQGLAYMHSYTENGIQHADVKPGNILLDRXSLPKISDFGLSKIFMAGKDYTMNVIGCLPYMDPVYKETG

SEQ ID NO: 98436 - protein, 119 aa, Setaria italica
  Transcript Sequence Number=SeqID_32462
ESSRRSALGSESNRVDDDQESESPAATRIGVGVSRWIGDVFLFRSDPVLNHRLRSGLRRQPMYSSGKQIKGIHSQIDRSHCFALCSTPAIDPSDRASSVLLSPDPRRWTLRKAKVTRWR

SEQ ID NO: 98437 - protein, 92 aa, Setaria italica
  Transcript Sequence Number=SeqID_32463
  Subcellular localization annotation: CTP_CleavageSite=62; ConfidenceScore=5.60e-01
RYPLPLPFPFLSCIVWSHSVPPPPRLPPSPNSGASSDHRSGAVRGWRPSWWTGVAAGGAAQRAATAAQRCEQAAEESGGWKVLASCCASARA

SEQ ID NO: 98438 - protein, 69 aa, Setaria italica
  Transcript Sequence Number=SeqID_32464
  Gene Ontology: Mol. function=binding; Cellular component=chloroplast; Biological process=photosynthesis
  Homolog annotation: Hit_ID=A1E9S5; Match level="QueryCoverage=75%, HitCoverage=30%, E-value=2e-23, Identity=100%"; Hit description =Photosystem I assembly protein ycf3
GRKLSSTVLGEGTAYSDRGEQAILQGDSEIAEAWFDQAAEYWKQAIALTPGNYIEAQNWLKITKRFEFE

SEQ ID NO: 98439 - protein, 197 aa, Setaria italica
  misc_feature (81)..(81): Xaa can be any naturally occurring amino acid
  Transcript Sequence Number=SeqID_32465
  Gene Ontology: Mol. function=substrate-specific transmembrane transporter activity; Cellular component=integral to membrane; Biological process=transmembrane transport
  Homolog annotation: Hit_ID=B6SSR3; Match level="QueryCoverage=100%, HitCoverage=38%, E-value=1e-73, Identity=74%"; Hit description =Solute carrier family 2, facilitated glucose transporter member 8
VLSYVVPVFIAEIAPKNLRGGLATSNQLLICSGSSATYIIGALVAWRNLVLVGLVPCVLLLGGLFFIPESPRWLANVGREXEFHISLQKLRGEDADISEEAIEIKEYIESLHSFPKARLQDLFLSKNIYAVIVGVGLMVFQQLGGINGVGFYASYIFSSAGFSGKLGTILIGIIQIPITLFGAILMDKSGRRVLLMV

SEQ ID NO: 98440 - protein, 64 aa, Setaria italica
  Transcript Sequence Number=SeqID_32466
  Gene Ontology: Mol. function=zinc ion binding; Cellular component =intracellular
  Homolog annotation: Hit_ID=B6SS63; Match level="QueryCoverage=100%, HitCoverage=11%, E-value=7e-11, Identity=60%"; Hit description =Nucleic acid binding protein
  Subcellular localization annotation: CTP_CleavageSite=36; ConfidenceScore=5.18e-01
LDFLGLGMSPTGASASRGFSAFIQPIGGAVGMAGIGAGAVETFVAGRGPQATPCERNSSTSPIL

SEQ ID NO: 98441 - protein, 90 aa, Setaria italica
  Transcript Sequence Number=SeqID_32467
LKNFNVRAEKHQLSFHINLKLPKVQDPAVLVKLFGDQSGSCSWLSNRRPETGAGERLDGEHDTAPALTPKGICEVRQPAPRNVPFVRSLT

SEQ ID NO: 98442 - protein, 71 aa, Setaria italica
  Transcript Sequence Number=SeqID_32468
DQSDWGTDSASQIYQASTLNPRMYSIVNLALNHEAKVDMVGPAIHNRGSLLMGMRALKGYKQGFANKKENS

SEQ ID NO: 98443 - protein, 156 aa, Setaria italica
  Transcript Sequence Number=SeqID_32469
  Subcellular localization annotation: CTP_CleavageSite=32; ConfidenceScore=5.70e-01
MARGLVAAALWSPARLGASTSPSYTGQPVRVTARSVGGRGRRRGLMVVRAGGPPSTNQLILAFVLPLSLFVGTLVTAARVADDLDERFLREMEINKAIMEENEASDEEEDDDREYDEEDDEAGEDDEQAPVEEKEPVVVGAAAAATRTRNRPRRQV

SEQ ID NO: 98444 - protein, 77 aa, Setaria italica
  Transcript Sequence Number=SeqID_32470
SLVEASHEVTRELQVHATATATHPCARRSRADDRPPLPWPANSRPRGGGGRVAAAAERGLRPPLLQQLQVQAAEEDV

SEQ ID NO: 98445 - protein, 80 aa, Setaria italica
  Transcript Sequence Number=SeqID_32471
  Subcellular localization annotation: CTP_CleavageSite=45; ConfidenceScore=5.30e-01
RSLSSSNDSSGRSAISGKENGIIHVMEKGSGSTLTINTNMDVKVSTSMASSSSGFPNGPSQSVDPIAVVVTSSNAAGDTI

SEQ ID NO: 98446 - protein, 66 aa, Setaria italica
  Transcript Sequence Number=SeqID_32472
  Subcellular localization annotation: CTP_CleavageSite=11; ConfidenceScore=5.07e-01
PERWDSHLRPTCPAAGSLPRASGLPLAGRRFWKLLARPPTPPPRPATGASWTHQPASAKPAWTHQR

SEQ ID NO: 98447 - protein, 46 aa, Setaria italica
  Transcript Sequence Number=SeqID_32473
  Gene Ontology: Mol. function=5'-3' exoribonuclease activity; Cellular component=intracellular; Biological process=nucleobase, nucleoside, nucleotide and nucleic acid metabolic process
  Homolog annotation: Hit_ID=Q10C49; Match level="QueryCoverage=100%, HitCoverage=6%, E-value=2e-12, Identity=76%"; Hit description=5'-3' exoribonuclease, putative, expressed
MGVPAFYRWLADRYPLTVSDAEEEEPVELEPGAFVPVDLRRPNPNG

SEQ ID NO: 98448 - protein, 100 aa, Setaria italica
  Transcript Sequence Number=SeqID_32474
  Pfam annotation: Domain name=GRP; Domain location=1-97; Score=-11.2; E_value=0.0011; Accession=PF07172.3; Description=Glycine rich protein family
MATKHLALAILVLLSVGMVATAAGPRKLGYGPGGGGGGGGSGGGGGYGGSGYGSGSGYGEGGGSGGAAGGYGHGGGSGGGQGGGSGYGSGSGYGSGGGHY

SEQ ID NO: 98449 - protein, 93 aa, Setaria italica
  Transcript Sequence Number=SeqID_32475
  Gene Ontology: Mol. function=structural molecule activity; Cellular component=COPI vesicle coat; Biological process=intracellular protein transport
  Homolog annotation: Hit_ID=Q53PC7; Match level="QueryCoverage=100%, HitCoverage=9%, E-value=2e-33, Identity=78%"; Hit description =Coatomer subunit beta-1
LLQMAAVDLIRKVCRSKGRVDKGRYIKIIISLLSAPSSAVVYECAGALVSLSSAPTAVRAAANTYCQLLSSQSDNNVKLIILDRLHELRTSHR

SEQ ID NO: 98450 - protein, 146 aa, Setaria italica
  Transcript Sequence Number=SeqID_32476
  Gene Ontology: Mol. function=structural molecule activity; Cellular component=COPI vesicle coat; Biological process=intracellular protein transport
  Homolog annotation: Hit_ID=Q53PC7; Match level="QueryCoverage=95%, HitCoverage=14%, E-value=6e-78, Identity=98%"; Hit description =Coatomer subunit beta-1
  Pfam annotation: Domain name=Coatamer_beta_C; Domain location=5-146; Score=110.7; E_value=5e-30; Accession=PF07718.4; Description =Coatamer beta C-terminal region
IRIISNLDVTVINRTKETLQNLCLELATMGDLKLVDRPQNYTLAPESSKQIRANIKVSSTETGVIFGNIVYETSNVMERSVVVLNDIHIDIMDYISPATCADVAFRNMWAEFEWENKVAVNTVIQEEKEFLNHIIKSTNMKCLTPP

SEQ ID NO: 98451 - protein, 147 aa, Setaria italica
  Transcript Sequence Number=SeqID_32477
  Gene Ontology: Mol. function=structural molecule activity; Cellular component=COPI vesicle coat; Biological process=intracellular protein transport
  Homolog annotation: Hit_ID=Q53PC7; Match level="QueryCoverage=100%, HitCoverage=15%, E-value=4e-69, Identity=83%"; Hit description =Coatomer subunit beta-1
MEKPCSLLVHFDKGSAAMANEIKADLEGGDGPAKADAMRRAISLLLNGETLPQLFITIVRYVLPSEDHTVQKLLLLYLEIIDRRDPAGRALPEMILICQNLRNNLQSPNEYIRGVTLRFLCRLSEPEVLEPLVPSVLSNLEHRHHFI

SEQ ID NO: 98452 - protein, 86 aa, Setaria italica
  Transcript Sequence Number=SeqID_32478
  Gene Ontology: Mol. function=structural molecule activity; Cellular component=COPI vesicle coat; Biological process=intracellular protein transport
  Homolog annotation: Hit_ID=Q53PC7; Match level="QueryCoverage=77%, HitCoverage=7%, E-value=4e-31, Identity=97%"; Hit description =Coatomer subunit beta-1
FKFANALLIFLAFVYGNFRSALDGECGFLAANLYAKSVFGEDALVNISIEKQADGKLSGYIRIRSKTQGIALSLGDKITLKQKGGS

SEQ ID NO: 98453 - protein, 617 aa, Setaria italica
  misc_feature (481)..(481): Xaa can be any naturally occurring amino acid
  Transcript Sequence Number=SeqID_32479
  Gene Ontology: Mol. function=structural molecule activity; Cellular component=COPI vesicle coat; Biological process=intracellular protein transport
  Homolog annotation: Hit_ID=Q53PC7; Match level="QueryCoverage=99%, HitCoverage=64%, E-value=0.0, Identity=79%"; Hit description =Coatomer subunit beta-1
  Pfam annotation: Domain name=Adaptin_N; Domain location=14-558; Score= 182.9; E_value=8.8e-52; Accession=PF01602.12; Description=Adaptin N terminal region
  Pfam annotation: Domain name=HEAT; Domain location=127-163; Score =18.3; E_value=0.032; Accession=PF02985.14; Description=HEAT repeat
  Pfam module annotation: Pfam domain module=Adaptin_N::HEAT; Domain location=14-558::127-163
MEKPCTLLVHFDKGSPSMANEIKAELESGDGPAKADAMRRAISLLLNGESLPHLFITVVRYVQSCDDHAVQKLLLLYLETVDKRDAATGKVLPEMILICQNLRNNLQSPNEYIRGVTLRFLCRLTEPELLEPLVPSILSNLEHRHQFVRRHALSAVSAIYQLPHGDQLIPDAPELVERLLASEQDASARRNAFLMLCACAQERAVAYLLSNADRVTEWPDLLQMAVLDLIRKVCRSQNRANKGRYITIITSLLSAPSTAVVYECAGALVSLSSAPTAVRAAANTYCQLLSSQSDNNVKLILLDRLYELRTSHRDVMVGVVMDVLRALASPNLDVKRKVLDLVLDLLTPRNVEEVVLSLKKEVVKTQAGDLEKGGEYRQMLVQTIHACAVEYPEVAGSVVHLLMDFLGDTNVAAAVDVVLFVREIIETNPKLRVSIIQRLIDTFSQIRASRVCICALWILAEYSLSLSEVESAIATIKQCLXDLPFFTVSEEGESTDSSKPSQPVVNCVTVSSRRPAVLADGTYATQSAATETAISAPAATLGSLASSQNLRSLILSGDFFLAAAVACNLTKLVLRLEEVQPSKVEVNKACTGALLIMVSILELGQSSYLPHQDCKDT

SEQ ID NO: 98454 - protein, 126 aa, Setaria italica
  misc_feature (12)..(12): Xaa can be any naturally occurring amino acid
  Transcript Sequence Number=SeqID_32480
  Gene Ontology: Mol. function=structural molecule activity; Cellular component=COPI vesicle coat; Biological process=intracellular protein transport
  Homolog annotation: Hit_ID=Q53PC7; Match level="QueryCoverage=100%, HitCoverage=13%, E-value=1e-68, Identity=96%"; Hit description =Coatomer subunit beta-1
  Pfam annotation: Domain name=Coatamer_beta_C; Domain location=1-121; Score=27.7; E_value=5.6e-10; Accession=PF07718.4; Description =Coatamer beta C-terminal region
HIDIMDYISPAXCADVAFRNMWAEFEWENKVAVNTVIQEEKEFLNHIIKSTNMKCLTPPSALDGECGFLAANLYAKSVFGEDALVNISIEKQADGKLSGYIRIRSKTQGIALSLGDKITLKQKGGS

SEQ ID NO: 98455 - protein, 586 aa, Setaria italica
  Transcript Sequence Number=SeqID_32481
  Gene Ontology: Mol. function=structural molecule activity; Cellular component=COPI vesicle coat; Biological process=intracellular protein transport
  Homolog annotation: Hit_ID=Q53PC7; Match level="QueryCoverage=95%, HitCoverage=59%, E-value=0.0, Identity=93%"; Hit description =Coatomer subunit beta-1
  Pfam annotation: Domain name=Coatamer_beta_C; Domain location=305 -581; Score=549.1; E_value=5.4e-162; Accession=PF07718.4; Description= Coatamer beta C-terminal region
FCYLVPFLTLVLILPKVLSSIVSKKYPEVAASVVHLLMDFLGDPNVAAAVDVVLFVREIIETNPKLRVSIIQRLIDTFYQIRASRVCSCALWILGEYSLSLSEVESAIATIKQCLGDLPFYTVSDEGDTTDSAKPAQAVVNSVTVSSRRPVVLADGTYATQSAATETISTPSVAPGSLSSTLNLRSLILSGDFFLAAVVACNLTKLVLRLEEVQPSKVEVNKACTGALLIMVSILELGQSSYLPHPIDNDSHDRIILCVRCLCNPGEDVRKVWLQSCRQSFVNMLAEKQFRETEEMKAKAQISHAQPDDLIDFYHLKSRKGMSQLELEDAVQDDLMAATGQFTKDADDSNKLNRILQLTGFSDPVYAEAFVTVHHYDIVLDVTVINRTKETLQNLCLELATMGDLKLVDRPQNYTLAPESSKQIRANIKVSSTETGVIFGNIVYETSNVMERSVVVLNDIHIDIMDYISPATCADVTFRNMWAEFEWENKVAVNTVIQDEKEFLNHIIKSTNMKCLTPPSALDGECGFLAANLYAKSVFGEDALVNISIEKQLDGKLSGYIRIRSKTQGIALSLGDKITLKQKGGS

SEQ ID NO: 98456 - protein, 100 aa, Setaria italica
  Transcript Sequence Number=SeqID_32482
  Gene Ontology: Mol. function=transferase activity, transferring glycosyl groups; Biological process=metabolic process
  Homolog annotation: Hit_ID=B6TRF2; Match level="QueryCoverage=100%, HitCoverage=20%, E-value=9e-26, Identity=60%"; Hit description =Transferase, transferring glycosyl groups
ALGLELAGTTFLWALKKPNGLLLEADGDILPPGFEERTRDRGLVAMGWVPQPIILAHSSVGAFLTHGGWASTIEGVMSGHPMLFLTFLDEQRINAQLIER

SEQ ID NO: 98457 - protein, 124 aa, Setaria italica
  misc_feature (16)..(16): Xaa can be any naturally occurring amino acid
  Transcript Sequence Number=SeqID_32483
  Gene Ontology: Mol. function=electron carrier activity; Biological process=oxidation reduction
  Homolog annotation: Hit_ID=B6SYC8; Match level="QueryCoverage=90%, HitCoverage=21%, E-value=4e-38, Identity=75%"; Hit description =Cytochrome P450 CYP71Y10
RAVLGDRCRDRDASCXALDRSLELSAGFNPGRTLWPSSRLVGWLSGAVRRAEQCRDTVYGILDGIISEHLEMMDSAGGAGEAEDLLDVLLKIQRDGSLQIPLDMDVLKAVIFVSTRLLLVPITS

SEQ ID NO: 98458 - protein, 163 aa, Setaria italica
  misc_feature (17)..(17): Xaa can be any naturally occurring amino acid
  Transcript Sequence Number=SeqID_32484
  Gene Ontology: Mol. function=binding; Cellular component=chloroplast
  Homolog annotation: Hit_ID=B9RJ83; Match level="QueryCoverage=100%, HitCoverage=12%, E-value=1e-44, Identity=52%"; Hit description =Androgen induced inhibitor of proliferation (As3) / pds5, putative
  Pfam annotation: Domain name=HEAT; Domain location=15-47; Score=2.2; E_value=26; Accession=PF02985.14; Description=HEAT repeat
  Pfam annotation: Domain name=HEAT; Domain location=51-86; Score=7.0; E_value=6.9; Accession=PF02985.14; Description=HEAT repeat
  Pfam annotation: Domain name=HEAT; Domain location=88-124; Score =10.9; E_value=2.3; Accession=PF02985.14; Description=HEAT repeat
  Pfam module annotation: Pfam domain module=HEAT::HEAT::HEAT; Domain location=15-47::51-86::88-124
RLLAFSNLHFGQENKLXFTEFLRRFSDKSAEVRIAAIDAAKACYMDKSSGNEAREILLSLQGRLLDFDEKVRIRAVNTVCDLAKSNLSSFPHEVILHAAERLRDKKASVRKNVMHKLLELYRDYCDKCSNGTATVNTHYEQIPAKLIVLCFDNDVESFRPQNM

SEQ ID NO: 98459 - protein, 154 aa, Setaria italica
  Transcript Sequence Number=SeqID_32485
  Gene Ontology: Mol. function=oxidoreductase activity, acting on the CH-CH group of donors; Cellular component=glyoxysome; Biological process=metabolic process
  Homolog annotation: Hit_ID=Q96329; Match level="QueryCoverage=98%, HitCoverage=34%, E-value=7e-59, Identity=67%"; Hit description=Acyl -coenzyme A oxidase 4, peroxisomal
  Pfam annotation: Domain name=Acyl-CoA_dh_1; Domain location=5-148; Score=73.8; E_value=6.2e-19; Accession=PF00441.16; Description=Acyl -CoA dehydrogenase, C-terminal dom
  Pfam annotation: Domain name=Acyl-CoA_dh_2; Domain location=14-137; Score=1.1; E_value=0.00017; Accession=PF08028.3; Description=Acyl -CoA dehydrogenase, C-terminal doma
  Pfam module annotation: Pfam domain module=Acyl-CoA_dh_1::Acyl-CoA_dh_ 2; Domain location=5-148::14-137
VPEDDSLSLAFSRVMAAWVSIGIAVGVYDACRRYLGERKQWRVPLAAFQLNQEKLVRMLGNIQAMWLFGWRLCKLHGSGKMTIGQASLGKAWITKQARETVALGRELFGGNGIVTDFHVGKAFCDMETVYTYEGSYEINALIVAREITGISSIR

SEQ ID NO: 98460 - protein, 56 aa, Setaria italica
  Transcript Sequence Number=SeqID_32486
CLWVYPFLQSPLLLCSRPVDLSSIRRIVSESLRYPGVLAQLSASLLQPHVSYLKDP

SEQ ID NO: 98461 - protein, 49 aa, Setaria italica
  Transcript Sequence Number=SeqID_32487
LIYYKQITHYCVGYVTSSLLFASSAAVSYYSATIFSWNCTDFWSPLSEC

SEQ ID NO: 98462 - protein, 86 aa, Setaria italica
  misc_feature (3)..(3): Xaa can be any naturally occurring amino acid
  Transcript Sequence Number=SeqID_32488
  Gene Ontology: Mol. function=serine-type endopeptidase activity; Cellular component=plasma membrane; Biological process=protein modification process
  Homolog annotation: Hit_ID=O64955; Match level="QueryCoverage=96%, HitCoverage=100%, E-value=4e-41, Identity=99%"; Hit description =Polyubiquitin (Fragment)
  Pfam annotation: Domain name=ubiquitin; Domain location=11-79; Score =138.0; E_value=2.9e-38; Accession=PF00240.15; Description=Ubiquitin family
PPXGGMQIFVKTLTGKTITLEVESSDTIDNVKAKIQDKEGIPPDQQRLIFAGKQLEDGRTLADYNIQKESTLHLVLRLRGGMQIFV

SEQ ID NO: 98463 - protein, 175 aa, Setaria italica
  Transcript Sequence Number=SeqID_32489
  Gene Ontology: Mol. function=nucleic acid binding; Cellular component= endoplasmic reticulum
  Homolog annotation: Hit_ID=B6SM05; Match level="QueryCoverage=97%, HitCoverage=98%, E-value=3e-91, Identity=92%"; Hit description =Transport protein particle component, Bet3 containing protein
  Pfam annotation: Domain name=TRAPP; Domain location=9-175; Score =210.3; E_value=5.1e-60; Accession=PF04051.8; Description=Transport protein particle (TRAPP) component
MVREVAESCVDGVVMEMVAAYCGRFYAAKPELAARRIEAIGFQVGHQLSERYTMERPRFSDHLEAIKFICKDFWSELFKKQIDNLKTNHRGTFVLQDNRFRWLTRVSLDPPAESTDATDNDSAPLGDTAAQTTSMLLYFPCGLIRGALTNLGISCSVSADMSNLPACSFVVRIKT

SEQ ID NO: 98464 - protein, 78 aa, Setaria italica
  Transcript Sequence Number=SeqID_32490
  Subcellular localization annotation: CTP_CleavageSite=50; ConfidenceScore=5.75e-01
FAATATATASTTSLPPSYTCSSCCSLPQSVSQQLALASLLLPLTSTSNTYLSGVNGLLAQPQPLPRLLFLSLRAWCGA

SEQ ID NO: 98465 - protein, 277 aa, Setaria italica
  Transcript Sequence Number=SeqID_32491
  Gene Ontology: Mol. function=ATP-dependent helicase activity; Cellular component=nucleolus
  Homolog annotation: Hit_ID=B6SV06; Match level="QueryCoverage=76%, HitCoverage=34%, E-value=1e-118, Identity=97%"; Hit description =Nucleolar RNA helicase 2
  Pfam annotation: Domain name=Helicase_C; Domain location=89-165; Score=121.6; E_value=2.6e-33; Accession=PF00271.23; Description =Helicase conserved C-terminal domain
PQNRQSMLFSATMPSWIRKISNKYLKDPVIIDLVGDSDQKLPEGISLYSIASDNFGKPSILGPLIKEHANGGKCIVFTQTKREADRLAYVMGRSYPCQALHGDISQNQRERTLSGFRDGRFNILVATDVAARGLDIPNVDLVVHYEIPNTSELFVHRSGRTARAGKKGSAILIYTYEQTRAVRVIEQDIGCRFTELPKMAVADEAADMFNVMRDTRSRSVGSRRTGGTFGRESYGGFGDHRSGGFGDFDSFGGSFDRGGGSRDSGSGIPLVGFLVGF

SEQ ID NO: 98466 - protein, 107 aa, Setaria italica
  Transcript Sequence Number=SeqID_32492
  Gene Ontology: Mol. function=nucleic acid binding; Cellular component= ribonucleoprotein complex; Biological process=nuclear mRNA splicing, via spliceosome
  Homolog annotation: Hit_ID=Q2EIH1; Match level="QueryCoverage=100%, HitCoverage=23%, E-value=1e-53, Identity=90%"; Hit description=U1 small nuclear ribonucleoprotein 70K
  Pfam annotation: Domain name=RRM_1; Domain location=16-86; Score =92.3; E_value=1.7e-24; Accession=PF00076.14; Description=RNA recognition motif. (a.k.a. RRM, RBD, o
DPQSDPNATGDPYKTLFVARLNYETSEHRIKKEFEAYGPIKRVRLVTDKETKKPRGYAFVEYAHTRDMKNAYKQADGRKLDNKRLLADVERGRTVPNWRPRRLGGGV

SEQ ID NO: 98467 - protein, 148 aa, Setaria italica
  misc_feature (135)..(136): Xaa can be any naturally occurring amino acid
  Transcript Sequence Number=SeqID_32493
  Gene Ontology: Mol. function=nucleic acid binding; Cellular component= ribonucleoprotein complex; Biological process=nuclear mRNA splicing, via spliceosome
  Homolog annotation: Hit_ID=Q94LP1; Match level="QueryCoverage=64%, HitCoverage=20%, E-value=4e-36, Identity=73%"; Hit description =Putative U1 small nuclear ribonucleoprotein
  Pfam annotation: Domain name=RRM_1; Domain location=29-89; Score =19.3; E_value=0.0032; Accession=PF00076.14; Description=RNA recognition motif. (a.k.a. RRM, RBD, o
LSSLVRGWAIYFPIWTNLDFAFSSDCVDVVHDFNPHVEWKFYTCKVRLVTDKETKKPRGYAFVEYAHTRDMKNAYKQADGRKLDNKRLLADVERGRTVPNWRPRRLGGGVGSSRIGAEGADHKCAARVQQLVGQXXSEEPRRSDRSCR

SEQ ID NO: 98468 - protein, 64 aa, Setaria italica
  Transcript Sequence Number=SeqID_32494
HLNFLITRVQQLVGQPRSEEPRRDDHHADRNFEKSRKRVREKDQDERTRERSHDRTCDRESREG

SEQ ID NO: 98469 - protein, 65 aa, Setaria italica
  Transcript Sequence Number=SeqID_32495
KQSQSKNTSSSLVTRVHIVNPWNPLIHCFQILHLFQACLFPCFLFAVPTAIIQMQYLESLNSIVS

SEQ ID NO: 98470 - protein, 106 aa, Setaria italica
  misc_feature (19)..(19): Xaa can be any naturally occurring amino acid
  misc_feature (73)..(73): Xaa can be any naturally occurring amino acid
  Transcript Sequence Number=SeqID_32496
  Gene Ontology: Mol. function=nucleic acid binding
  Homolog annotation: Hit_ID=Q6E0J0; Match level="QueryCoverage=66%, HitCoverage=14%, E-value=9e-12, Identity=57%"; Hit description=U1 snRNP
RGRDHGKDYEHADNRDWRXHLHERGAYGNGAPRHERNMAGYGQDYGYNEQRKSHDAYGYGQDGLGQETEHSEXHEHGYGTIGKTLGHISTEPGAPEQGEAYEKGDY

SEQ ID NO: 98471 - protein, 137 aa, Setaria italica
  misc_feature (8)..(8): Xaa can be any naturally occurring amino acid
  misc_feature (30)..(30): Xaa can be any naturally occurring amino acid
  Transcript Sequence Number=SeqID_32497
  Gene Ontology: Mol. function=phosphotransferase activity, alcohol group as acceptor; Cellular component=chromosome
  Homolog annotation: Hit_ID=Q9M3G7; Match level="QueryCoverage=100%, HitCoverage=3%, E-value=3e-34, Identity=54%"; Hit description =Serine/threonine-protein kinase ATM
FLAFRRAXLKVLGCEEHLVTHLFQSASALXKGIKVSLAAAALYELKEHCFHQDGGIMPNTYFLSRLEEAKLLRAQGQHDMAISLGKYILQKHSDKKDVSDVYRLVGKWLAETRSSNSGTIIEDYLRPSMDLTEFKKS

SEQ ID NO: 98472 - protein, 118 aa, Setaria italica
  Transcript Sequence Number=SeqID_32498
  Gene Ontology: Mol. function=DNA binding; Biological process =regulation of transcription
  Homolog annotation: Hit_ID=B6TUH8; Match level="QueryCoverage=98%, HitCoverage=55%, E-value=4e-36, Identity=65%"; Hit description=NAC domain-containing protein 78
ETVTSSGCIVGLKKTLIFCTGEPSKGFKTNWIMHEYHLQDGGYNVSGSSTSSSSSSSRKSQRKRVHSSTESNSWVVCRVFESSCGSQVSFHDEGTELSCLDEVFLSLDDYDEVSLPNN

SEQ ID NO: 98473 - protein, 132 aa, Setaria italica
  Transcript Sequence Number=SeqID_32499
  Gene Ontology: Mol. function=DNA-directed DNA polymerase activity; Cellular component=nucleus; Biological process=nucleobase, nucleoside, nucleotide and nucleic acid metabolic process
  Homolog annotation: Hit_ID=Q9LRE6; Match level="QueryCoverage=100%, HitCoverage=11%, E-value=2e-70, Identity=97%"; Hit description=DNA polymerase delta catalytic subunit
TIEGRVQFDLLQAMQRDYKLSSYSLNSVSAHFLGEQKEDVHHSIISDLQNGNSETRRRLAVYCLKDAYLPQRLLDKLMYIYNYVEMARVTGVPISFLLSRGQSIKVLSQLLRKAKQKNLVIPNIKGQGSGQD

SEQ ID NO: 98474 - protein, 129 aa, Setaria italica
  Transcript Sequence Number=SeqID_32500
  Gene Ontology: Mol. function=positive transcription elongation factor activity; Cellular component=nucleus; Biological process=regulation of transcription, DNA-dependent
  Homolog annotation: Hit_ID=B6TR90; Match level="QueryCoverage=88%, HitCoverage=88%, E-value=3e-61, Identity=96%"; Hit description =Transcription elongation factor SPT4
  Pfam annotation: Domain name=RpoE2; Domain location=29-105; Score= -19.9; E_value=0.059; Accession=PF04035.5; Description=Archaeal DNA -directed RNA polymerase subunit E'' (RpoE'' or RpoE2)
  Pfam annotation: Domain name=Spt4; Domain location=27-129; Score =241.7; E_value=1.9e-69; Accession=PF06093.5; Description =Transcription initiation protein Spt4
  Pfam module annotation: Pfam domain module=RpoE2::Spt4; Domain location=29-105::27-129
MRGGGGGGMMDDDDRVTHAQIPTSFGPELRACLRCRLVKTYDQFRQNGCENCPFLEMDKEHDNVVNCTTPNFTGIISLMDPSRSWAARWLRIGRFIPGCYTLAVSEELPEEYQGICQDNNVQYVPPKRV

SEQ ID NO: 98475 - protein, 48 aa, Setaria italica
  Transcript Sequence Number=SeqID_32501
HDAKACLRFRTRNVKSNCRLPLCAYILSSYTRLLKGCFDMISMNKTFR

SEQ ID NO: 98476 - protein, 165 aa, Setaria italica
  Transcript Sequence Number=SeqID_32502
  Gene Ontology: Mol. function=DNA binding; Cellular component=nucleus; Biological process=regulation of transcription
  Homolog annotation: Hit_ID=Q2R2L6; Match level="QueryCoverage=81%, HitCoverage=43%, E-value=2e-70, Identity=87%"; Hit description=Myb -like DNA-binding domain containing protein, expressed
  Pfam annotation: Domain name=Myb_DNA-binding; Domain location=15-62; Score=44.0; E_value=5.8e-10; Accession=PF00249.23; Description=Myb -like DNA-binding domain
  Pfam annotation: Domain name=Myb_DNA-binding; Domain location=68-113; Score=41.8; E_value=2.7e-09; Accession=PF00249.23; Description=Myb -like DNA-binding domain
  Pfam module annotation: Pfam domain module=Myb_DNA-binding::Myb_DNA -binding; Domain location=15-62::68-113
MGRPPCCDNGVGVKKGPWTPEEDIVLVSYIQQHGPGNWRSVPENTGLMRCSKSCRLRWTNYLRPGIKRGNFTPHEEGIIIHLQALLGNKWAAIASYLPQRTDNDIKNYWNTHLKKKVKRLQQPAADSFQTAPSNAVTSPNYYSPTSSSHHSLQGMQPMNSYPNTT

SEQ ID NO: 98477 - protein, 190 aa, Setaria italica
  Transcript Sequence Number=SeqID_32503
  Gene Ontology: Cellular component=plastoglobule
  Homolog annotation: Hit_ID=Q1QA24; Match level="QueryCoverage=90%, HitCoverage=70%, E-value=3e-21, Identity=36%"; Hit description=SOUL heme-binding protein
  Pfam annotation: Domain name=SOUL; Domain location=3-190; Score =165.9; E_value=1.2e-46; Accession=PF04832.4; Description=SOUL heme -binding protein
RRRGVHLRPPREWKGDPDGGFTVLANYIGALGKPQNTKPEKIAMTAPVITSGAGDGEASSEKIAMTAPVITTGGEPEPVAMTAPVITDDQQAPGKVTMQFLLPSKYAKAEDAPRPTDERVVIREVPERKYGVARFSGVAAEKTVREKAEGLRAALEKDGYTVKGPFVLARYNPPFTLPPLRTNEVMIPVE

SEQ ID NO: 98478 - protein, 197 aa, Setaria italica
  Transcript Sequence Number=SeqID_32504
  Gene Ontology: Mol. function=actin binding; Cellular component =cytoskeleton
  Homolog annotation: Hit_ID=Q5QNA6; Match level="QueryCoverage=79%, HitCoverage=11%, E-value=5e-41, Identity=61%"; Hit description=SCAR -like protein 2
MFRMETHQLPAASWESLLASVLVLQTSTAQGQINQRPEYLKSLSWSEPRNEPSENRSATQDVPTNTSTTSTGASEVSNSQGEPLKEPLENRFATQGIPTNTSTASTVVPSVKLWTNAGLFGLEPSKPPVFGAQDTPREDTPPGFEVPQPSHSTEFTELHCSKPIESAVVDVPNGNTSITSSFVGKLVGIRPGSTNLN

SEQ ID NO: 98479 - protein, 105 aa, Setaria italica
  Transcript Sequence Number=SeqID_32505
  Gene Ontology: Mol. function=actin binding; Cellular component =cytoskeleton
  Homolog annotation: Hit_ID=Q5QNA6; Match level="QueryCoverage=65%, HitCoverage=5%, E-value=1e-15, Identity=65%"; Hit description=SCAR -like protein 2
SVFWTSTSLACPCGSCSAAGEDVLPGQRCAHVVGKQTSISELLESEESAENCTEMYSTNMRNDMHMVSASSFSSIAQRFLANTLQRRTSPKYTDLPMSSERSMRN

SEQ ID NO: 98480 - protein, 82 aa, Setaria italica
  Transcript Sequence Number=SeqID_32506
GNLASNHHLPDDVVARSPYDNCSLFIPFNIRRSSNHIIWQGTLLQIMWLLDRLFIPFNIRRSSNHIIWQGTLLQIITCIIHT

SEQ ID NO: 98481 - protein, 137 aa, Setaria italica
  misc_feature (30)..(30): Xaa can be any naturally occurring amino acid
  Transcript Sequence Number=SeqID_32507
  Gene Ontology: Mol. function=actin binding; Cellular component =cytoskeleton
  Homolog annotation: Hit_ID=Q5QNA6; Match level="QueryCoverage=96%, HitCoverage=10%, E-value=4e-28, Identity=56%"; Hit description=SCAR -like protein 2
EFTELHCSKPIESAVVDVPNGNTSITSSFXGKLVGIRPGSTNLNGTGANQSAARIPDQVHSRTDGPSDFSSSSFEHNSMIGKQTSISELLESEESAENCTEMYSTNMRNDMHMVSASSFSSIAQRFLANTLQRRTSP

SEQ ID NO: 98482 - protein, 113 aa, Setaria italica
  Transcript Sequence Number=SeqID_32508
  Gene Ontology: Mol. function=actin binding; Cellular component =cytoskeleton
  Homolog annotation: Hit_ID=Q5QNA6; Match level="QueryCoverage=100%, HitCoverage=8%, E-value=5e-21, Identity=54%"; Hit description=SCAR -like protein 2
  Subcellular localization annotation: CTP_CleavageSite=70; ConfidenceScore=5.38e-01
GNTSITSSFVGKLVGIRPGSTNLNGTGANQSAARIPDQVHSRTDGPSDFSSSSFEHNSMIGKQTSISELLESEESAENCTEMYSTNMRNDMHMVSASSFSSIAQRFLANTLQR

SEQ ID NO: 98483 - protein, 118 aa, Setaria italica
  misc_feature (111)..(111): Xaa can be any naturally occurring amino acid
  Transcript Sequence Number=SeqID_32509
  Gene Ontology: Mol. function=actin binding; Cellular component =cytoskeleton
  Homolog annotation: Hit_ID=Q5QNA6; Match level="QueryCoverage=100%, HitCoverage=9%, E-value=2e-24, Identity=49%"; Hit description=SCAR -like protein 2
HKGMDTLEQQDALLKKTKSPLVLNHHDEIPGETDNYMDALNTLESETETEAESQTKNQVMPLPSFNAEAPQVGATDDIVSQHPDSSVADFTDTCQDSNISCTSERAVDFPXLSNADSP

SEQ ID NO: 98484 - protein, 53 aa, Setaria italica
  Transcript Sequence Number=SeqID_32510
  Gene Ontology: Mol. function=actin binding; Cellular component =cytoskeleton
  Homolog annotation: Hit_ID=Q5QNA6; Match level="QueryCoverage=100%, HitCoverage=3%, E-value=8e-20, Identity=90%"; Hit description=SCAR -like protein 2
KTFNLRRTNASKTDTSSQSTANSNVVAILEKANAIRQAVASDEGGDDDNWSDI

SEQ ID NO: 98485 - protein, 461 aa, Setaria italica
  misc_feature (97)..(97): Xaa can be any naturally occurring amino acid
  Transcript Sequence Number=SeqID_32511
  Gene Ontology: Mol. function=actin binding; Cellular component =cytoskeleton
  Homolog annotation: Hit_ID=Q5QNA6; Match level="QueryCoverage=96%, HitCoverage=33%, E-value=0.0, Identity=72%"; Hit description=SCAR -like protein 2
MPLVRFEVRNEVGLGDPDLYGGGGGGGGGVGGAAVGTGAAGKRGAAAAGEEEPKALLEGVAVAGLVGILRQLGDLAEFAADVFHDLHEQVIATSARXGRKVLTRVQNIEAALPSLEKAVKNQKSHIHFAYVPGSDWHTQLQNEQNHLLSSDLPRFMMDSYEECRDPPRLYLLDKFDNAGAGACLKRYSDPSYFKKAWDMMRADKTTNHQREKRSQKIKRKGSRLREPYHGQATSRHRSGELQRSLTAGQPVNRPFASPSTDGQSFSEHRSTTDARCNPENISRSSSFSSKTRLSSVDQALDTKPSTVPHENGHGKSSNTKLHKPSDLPLRIQHSSTSVDDAGDDLKQGSLPDDVVARSPYVKWDEKAAIIMSTSSVYCDDVVMDKAEDAEPTCISSAQKEIDHKGMDTLEQQDALLKKTKSPLVLNHHDEIPGETDNYMDALNTLESETETEAESQTKKSK

SEQ ID NO: 98486 - protein, 446 aa, Setaria italica
  Transcript Sequence Number=SeqID_32512
  Gene Ontology: Mol. function=actin binding; Cellular component =cytoskeleton
  Homolog annotation: Hit_ID=Q5QNA6; Match level="QueryCoverage=100%, HitCoverage=33%, E-value=1e-143, Identity=63%"; Hit description=SCAR- like protein 2
  Pfam annotation: Domain name=WH2; Domain location=348-366; Score=1.3; E_value=23; Accession=PF02205.12; Description=WH2 motif
  Pfam annotation: Domain name=WH2; Domain location=383-401; Score =15.7; E_value=0.18; Accession=PF02205.12; Description=WH2 motif
  Pfam module annotation: Pfam domain module=WH2::WH2; Domain location =348-366::383-401
TLQRRTSPKYTDLPMSSERPNADASVNDESTLNPIAEPSGTVFTDESQFENRSENGMNGLSKSSIFSSRQYSEKSSPPLEYMKISFHPMSAFEMSKLNLDFCDGNLHENSDDMMLPTFQLLSESSIPQPGSGSESEDDTFGRSYSYSSYDDLSPRLYSNSEVWDQEDGVGLEEHELYGDSNQIGSSTVPLSSYAGFEQMNLSGVKSTISLADIGDQNGLGTLESHSVEELPNFDTLMSRNDDQNDEASIPHNPLNLPPAEDQLPPPPPLPPMQWRMMRQTTPLEEERGITAKDMFRKSSCLPHVHTSAQEEHPLPAALQDPQGHAKEVDVQKTDGVKEIINPSSIIDIKSSLLQQIRDKSEQLKPNGHERSKTVGSDIKSLDEREELLQQIRSKTFNLRRTNASKTDTSSQSTANSNVVAILEKANAIRQAVASDEGGDDDNWSDI

SEQ ID NO: 98487 - protein, 112 aa, Setaria italica
  Transcript Sequence Number=SeqID_32513
  Gene Ontology: Mol. function=potassium ion transmembrane transporter activity; Cellular component=integral to membrane; Biological process=potassium ion transport
  Homolog annotation: Hit_ID=Q84MS3; Match level="QueryCoverage=100%, HitCoverage=13%, E-value=2e-45, Identity=79%"; Hit description =Probable potassium transporter 16
TMIKIVFIALYANDEGDGGTFALYSLISRYAKVCLIPNQQAEDELVSRYRHRAKPSATLRRAQWMKNLLETSKAAKVSLFFLTIFATALAISDSMLTPPISVLAAVNGLKLR

SEQ ID NO: 98488 - protein, 123 aa, Setaria italica
  Transcript Sequence Number=SeqID_32514
  Gene Ontology: Mol. function=transferase activity
  Homolog annotation: Hit_ID=Q9FQA4; Match level="QueryCoverage=100%, HitCoverage=51%, E-value=5e-48, Identity=75%"; Hit description =Glutathione S-transferase GST 35
VQYIDETFVGNGPSLLPADPYERAVARFWAAYIEEKLVAPWDQVFRVKTDEERAEAMKQMFAAVDVLEGGLKECSRGKCFFGGDNVGYVDVILGGAASYAKANEALFGAKLFDAAKTPLLAAW

SEQ ID NO: 98489 - protein, 69 aa, Setaria italica
  Transcript Sequence Number=SeqID_32515
VRDLGSNRWRILEEQVTQGLDHLLLTAGSPRSRNQRFDIYAGDSAINSNRGTAEIVPLKKNQPSNPFNR

SEQ ID NO: 98490 - protein, 86 aa, Setaria italica
  Transcript Sequence Number=SeqID_32516
  Gene Ontology: Mol. function=protein serine/threonine kinase activity; Biological process=protein amino acid phosphorylation
  Homolog annotation: Hit_ID=Q8H8P1; Match level="QueryCoverage=94%, HitCoverage=25%, E-value=9e-30, Identity=71%"; Hit description =Putative receptor-like kinase, 5'-partial (Fragment)
VYTRKVIGTYGYMSPEYAMDGLISIKSDVFSFGVMVLEIITGKRNRGSYEPELDVNLLGYAWMLWREGRSLELLDEALGGSFHHSR

SEQ ID NO: 98491 - protein, 227 aa, Setaria italica
  misc_feature (111)..(111): Xaa can be any naturally occurring amino acid
  Transcript Sequence Number=SeqID_32517
  Gene Ontology: Mol. function=nucleotide binding; Cellular component =membrane; Biological process=defense response
  Homolog annotation: Hit_ID=Q5Z5Z4; Match level="QueryCoverage=87%, HitCoverage=18%, E-value=2e-26, Identity=36%"; Hit description =Putative Pib
MAKSPYFPVAGIEKDSVLQQLISKCGGLPKVIVAIADILAQAFNWTEKASILNGSFVPNLETSPEFCCLHGLFSWMRCYLGALPRHIRKHVAYLLIFPGDSSIRRRRLVMXWGAEGYSTDTENHTSDENGEELSSGLVKQTMIQPPPLTTTTDMRMVSFEVNTIFREYMISRPLKENIATAIELFVLKGACSPTSRRRGRHLVIEQSWDRDRIVFQNIDFSRLRSLT

SEQ ID NO: 98492 - protein, 98 aa, Setaria italica
  Transcript Sequence Number=SeqID_32518
  Subcellular localization annotation: CTP_CleavageSite=81; ConfidenceScore=5.29e-01
GYAPSSHGHGHAPPQPHHRPQNHQQQHQHPGGHGYHHRRTGSNGSSAASETSSRGSKFSPPRPYQPRYSSNTTNNSLPGVAAASRRPRPRPRRRARAR

SEQ ID NO: 98493 - protein, 77 aa, Setaria italica
  misc_feature (33)..(33): Xaa can be any naturally occurring amino acid
  Transcript Sequence Number=SeqID_32519
  Gene Ontology: Mol. function=methyltransferase activity; Biological process=metabolic process
  Homolog annotation: Hit_ID=Q8S271; Match level="QueryCoverage=98%, HitCoverage=25%, E-value=5e-24, Identity=74%"; Hit description =Embryo-abundant protein EMB-like
HGLSAVQVAEHYDSVLATDVSEDQLLHAAPHPXVRYLHTPDATPGEDLVATLGGEGSVDLITVAEAVHWFDLPAFYD

SEQ ID NO: 98494 - protein, 95 aa, Setaria italica
  Transcript Sequence Number=SeqID_32520
  Homolog annotation: Hit_ID=C5IYF1; Match level="QueryCoverage=71%, HitCoverage=12%, E-value=2e-09, Identity=45%"; Hit description =Putative serine-threonine protein kinase
  Pfam annotation: Domain name=LRRNT_2; Domain location=31-71; Score =42.0; E_value=2.3e-09; Accession=PF08263.4; Description=Leucine rich repeat N-terminal domain
MSGPTTCCRFPQLLVLLLFLLLAGGGRSQPAAGDRETLLTVKKDWGSPSQLKSWDPAAAPDHCNWTGVACATGGGGVVTGLTLSHLNLTGSVPAS

SEQ ID NO: 98495 - protein, 367 aa, Setaria italica
  Transcript Sequence Number=SeqID_32521
  Gene Ontology: Mol. function=Rab GTPase activator activity; Cellular component=intracellular; Biological process=regulation of Rab GTPase activity
  Homolog annotation: Hit_ID=A0B9X8; Match level="QueryCoverage=92%, HitCoverage=75%, E-value=1e-144, Identity=71%"; Hit description =OSIGBa0135C09.4 protein
  Pfam annotation: Domain name=TBC; Domain location=124-339; Score= -22.3; E_value=5.9e-06; Accession=PF00566.10; Description=TBC domain
MASSPRSPPPAPPPEFEITRQSRVFAALSKKVIDLDELRMLAAQGVPDAAGVRSTVWKLLLGYLPNDRSLWEQELAKKRSQYAAFQDEFLSNPVEIARQGEKEGHYHDNAEHVDNGLLHRSEVTQEEHPLSLGKTSVWNQFFEYSEIMEQIDRDVKRTHPDMHFFCGDSSFAKSNQESLKNILLIFAKLNAGIRYVQGMNEILAPLFFVFRSDPDDKNAKFAEADSFFCFVELLSGFRDNFCQKLDNSAVGIRGTLAKLSQLVAKYDAELQHHLEITTEVNPQFYAFRWITLLLTQEFNFADTIHIWDTLLSDPDGPQETLLRICCAMLILVRKRLLAGDFTSNLKLLQNYPPTNISHLLYVANKLH

SEQ ID NO: 98496 - protein, 67 aa, Setaria italica
  Transcript Sequence Number=SeqID_32522
ERRTSRRAVRTVQKSKECALGTHRVQPPTTRVVDGPNYISSQRCDQGGWRKSRTHRRIESCGDIRKP

SEQ ID NO: 98497 - protein, 64 aa, Setaria italica
  misc_feature (47)..(47): Xaa can be any naturally occurring amino acid
  Transcript Sequence Number=SeqID_32523
  Gene Ontology: Mol. function=acyltransferase activity; Cellular component=integral to membrane
  Homolog annotation: Hit_ID=B0LF77; Match level="QueryCoverage=100%, HitCoverage=12%, E-value=9e-24, Identity=81%"; Hit description =Diacylglycerol acyltransferase
KFWAFFGIMVQIPLVFLTRYLQEKFQNIMVGNMIFWFFFSILGQPIXCLLYYHDVMNRQAQASR

SEQ ID NO: 98498 - protein, 541 aa, Setaria italica
  misc_feature (386)..(386): Xaa can be any naturally occurring amino acid
  Transcript Sequence Number=SeqID_32524
  Gene Ontology: Mol. function=protein binding; Cellular component =chloroplast; Biological process=regulation of transcription, DNA -dependent
  Homolog annotation: Hit_ID=B9SAI4; Match level="QueryCoverage=34%, HitCoverage=50%, E-value=4e-76, Identity=72%"; Hit description =Nuclear inhibitor of protein phosphatase-1, putative
  Pfam annotation: Domain name=FHA; Domain location=446-526; Score =63.4; E_value=8.4e-16; Accession=PF00498.18; Description=FHA domain
MASAVERRREEHTRRSRSPAGDRERRGTPPRRRSPSERRKSSPARARSPHAKPGASHRDRERSPPKEKAKERARSPRSPAKASLSHKEKDRSPPRERAKDQRVRSPKHAREQSRSSSPARRRGSRSPSPRTKRLRRGQGEREATQVTDSDRRKSSHREERDTGRHREPDEGRDTSRDRKVEREAAQVTNGDRRKSSHREERESGGKHREHDEGRDASRDRKAEREDAKGTAKDKKSDRDDGKDHSRDRRAGRDDRSGASKETLSSRDDDRQDSRGGRLDRDDWKAASSREQRVDRSDKRDSTREKLSDWEESNGGSGRSSRRGRSASPDEHRHRGRHESHPSPRVPRSGTRTEDINSRGGEASRSGDPDALARMNSTAEALEAKEXKPSFELSGKLAEETNRVAGVNLLYTEPQEARMSEIRWRLYVFKGGEPLNEPLYVHRLTCYLFGRERKVADIPTDHPSCSKQHAVLQYRLVEKEQPDGMMAKKVRPYLMDLDSTNGTFINENRIEPRRYYELFEKDTIKFGNSSREYVLLHENSTG

SEQ ID NO: 98499 - protein, 125 aa, Setaria italica
  Transcript Sequence Number=SeqID_32525
  Gene Ontology: Mol. function=G-protein coupled receptor activity; Cellular component=integral to membrane; Biological process=G -protein coupled receptor protein signaling pathway
  Homolog annotation: Hit_ID=B6SHE2; Match level="QueryCoverage=88%, HitCoverage=34%, E-value=1e-50, Identity=87%"; Hit description=G protein-coupled receptor
MVVLCQLSKSVEKISIFSFISPGTSLATTVLRSIGSDYGRPGSWCWIQQGSMAKVLHLITFYLPLWGAILYNGFTYYEVNRMLNNATRMAAGISDRSNQSDMRADRKAFNRWGYYPLILIRFIGS

SEQ ID NO: 98500 - protein, 279 aa, Setaria italica
  Transcript Sequence Number=SeqID_32526
  Gene Ontology: Mol. function=G-protein coupled receptor activity; Cellular component=integral to membrane; Biological process=G -protein coupled receptor protein signaling pathway
  Homolog annotation: Hit_ID=B6SHE2; Match level="QueryCoverage=100%, HitCoverage=86%, E-value=1e-156, Identity=94%"; Hit description=G protein-coupled receptor
  Pfam annotation: Domain name=7tm_1; Domain location=1-231; Score= -97.3; E_value=0.016; Accession=PF00001.13; Description=7 transmembrane receptor (rhodopsin family)
  Pfam annotation: Domain name=Dicty_CAR; Domain location=1-279; Score=- 64.3; E_value=0.022; Accession=PF05462.3; Description=Slime mold cyclic AMP receptor
  Pfam module annotation: Pfam domain module=7tm_1::Dicty_CAR; Domain location=1-231::1-279
LCYLLFRELRKFSFKLVFYLAVSDMFCSLFTILGDPSNAFYCFAHDYSAHFFCVASFLWTTTIAFTLHRTVVKHKTDVEEFGSIFHLYVWGTSLATTVLRSIGSDYGRPGSWCWIQQGSMAKVLHLITFYLPLWGAILYNGFTYYEVNRMLNNATRMAAGISDRSNQSDMRADRKAFNRWGYYPLILIGSWAFATINRLYDFTNPGHKIFWLSFLDVGFAGLMGLFNSISYGLNSSVRRAISERIDMFLPERIKRSLPTLSRLRSQQENELTSLIVEGN

SEQ ID NO: 98501 - protein, 134 aa, Setaria italica
  Transcript Sequence Number=SeqID_32527
KEEQEHFVCYTYNKHATKNLMAEKARKKEFALLSLILCILQYLIRGKDLKVISKNTIFEVPFSQYKRCRNDDMGVELALSVWITAEGSVSGERIKHLKPIHSPFYHSVQWFEQGFPYITMHLGSAAIHESSATE

SEQ ID NO: 98502 - protein, 326 aa, Setaria italica
  misc_feature (14)..(14): Xaa can be any naturally occurring amino acid
  Transcript Sequence Number=SeqID_32528
  Gene Ontology: Mol. function=phosphatidate cytidylyltransferase activity; Cellular component=integral to membrane; Biological process=phospholipid biosynthetic process
  Homolog annotation: Hit_ID=B6TTP9; Match level="QueryCoverage=99%, HitCoverage=75%, E-value=1e-175, Identity=92%"; Hit description =Phosphatidate cytidylyltransferase
  Pfam annotation: Domain name=CTP_transf_1; Domain location=4-283; Score=321.9; E_value=1.3e-93; Accession=PF01148.12; Description =Cytidylyltransferase family
REQLPGFRLLNWHXFFTAMLYTYGRFLSRQLVNTVTSDHLLYKVVSGLIKYQMFICYFLYIAGFVWFILTLKKKAYKYQFKQYAWTHMILLTVFAQSSFTVANIFEGIFWFLLPASLIVINDIFAYLFGFFLGRTPLIKLSPKKTWEGFIGASVTTIISAFLLANVMGRSQWLTCPRKDLSTGWLYCDPGPMFKPEHYSLGEWVPHWFPWKELAIMPVQWHALALGLFASIIAPFGGFFASGFKRAFKIKDFGDSIPGHGGITDRMDCQMVMAVFAYIYHQSFIAPQNFSVEIILDQIIRNLTYEEQKYLYQQLGEIFHERQLMQS

SEQ ID NO: 98503 - protein, 113 aa, Setaria italica
  Transcript Sequence Number=SeqID_32529
  Gene Ontology: Mol. function=phosphatidate cytidylyltransferase activity; Cellular component=integral to membrane; Biological process=phospholipid biosynthetic process
  Homolog annotation: Hit_ID=B4FI16; Match level="QueryCoverage=100%, HitCoverage=29%, E-value=1e-56, Identity=91%"; Hit description =Phosphatidate cytidylyltransferase
MQRDTSSSDVSASHTGRVRRRRQPSEATADGNRANGQPLLVNDQNKYRSMLIRTYSTVWMIGGFVFIVYMGHLYIWAMVVVIQIYMARELFNLLRKYSEEKQLPGFRLLNWHF

SEQ ID NO: 98504 - protein, 71 aa, Setaria italica
  Transcript Sequence Number=SeqID_32530
  Subcellular localization annotation: CTP_CleavageSite=33; ConfidenceScore=5.56e-01
YVPTSTFTCGGGGTSYAITFCPSTTSVKSVGTDAASVGGGLVGSSSWPVAPRHGSSLVLLGVAIAALAPVF

SEQ ID NO: 98505 - protein, 56 aa, Setaria italica
  Transcript Sequence Number=SeqID_32531
FVNSSRYQHHKALSSTIPVIASSNVIPQRFKLSYDRHVGFLSKEICYEFIPEGRHC

SEQ ID NO: 98506 - protein, 64 aa, Setaria italica
  Transcript Sequence Number=SeqID_32532
DLNWERLLNWSQHSPFDYLELGDLKRTKKLHVVQYQKRRRHRISYLFSCHSVRNFCSQLLHLTA

SEQ ID NO: 98507 - protein, 79 aa, Setaria italica
  Transcript Sequence Number=SeqID_32533
MSERVTQMRSSWVTLSDMFLDKDDPSKITFKTPTGLGRTYPASAFAKEGGDDGGKPVGKEAPAAAANGGNEAAAAVSGK

SEQ ID NO: 98508 - protein, 172 aa, Setaria italica
  Transcript Sequence Number=SeqID_32534
  Gene Ontology: Mol. function=protein binding; Cellular component =apoplast
  Pfam annotation: Domain name=DUF538; Domain location=25-141; Score =188.8; E_value=1.5e-53; Accession=PF04398.4; Description=Protein of unknown function, DUF538
MGSQAIEEHRAGAEVYHGAALCAEKSTELLSEVHLPLGLLPLADMEEVGYNRSTGFVWLRQKKALTHTFKQIGRQVSYASEVTAFVEDRRMKRMTGVKTKELLIWVTLSDMFLDKDDPSKITFKTPTGLGRTYPASAFAKEGGDDGGKPVGKEAPAAAANGGNEAAAAVSGK

SEQ ID NO: 98509 - protein, 396 aa, Setaria italica
  Transcript Sequence Number=SeqID_32535
  Gene Ontology: Mol. function=phosphotransferase activity, alcohol group as acceptor; Cellular component=cytoplasm; Biological process =metabolic process
  Homolog annotation: Hit_ID=B9SPS4; Match level="QueryCoverage=96%, HitCoverage=39%, E-value=1e-149, Identity=69%"; Hit description =Galactokinase, putative
  Pfam annotation: Domain name=GHMP_kinases_C; Domain location=270-367; Score=40.2; E_value=8.3e-09; Accession=PF08544.5; Description=GHMP kinases C terminal
  Pfam annotation: Domain name=GHMP_kinases_N; Domain location=42-110; Score=77.9; E_value=3.7e-20; Accession=PF00288.18; Description=GHMP kinases N terminal domain
  Pfam module annotation: Pfam domain module=GHMP_kinases_C::GHMP _kinases_N; Domain location=270-367::42-110
RVSTTQLYWQVYQSSVRWAAYVAGTILVLMTELGVQFTDSMSILVSSAVPEGKGVSSSASVEVATMSAIAAAYGLNITPRDLALLCQKVENHVVGAPCGVMDQMASACGEANKLLAMVCQPAEVKELVSIPTHLRFWGLDSGIRHSVGGGDYGSVRVGTYMGRKMIKCAASDLVSDSSTSEAPVQSDCYKENGTGLLKSEAAMEYLCNLPPHRFEAAYAKDIPEVISGDAFLEKYGDHSDTVTVIDPKRSYSVKAPTRHPIYENFRVETFKTLLAAGNTDEQLSALGELMYQCHNSYSACGLGSDGTDRLVDLVQEMQHRTTSEGGSPSLFGAKITGGGSGGTVCVIGKNCARSSEEIVEIQQRYKAATGYLPVLFDGSSPGAAKFGYLKIRRRRS

SEQ ID NO: 98510 - protein, 81 aa, Setaria italica
  Transcript Sequence Number=SeqID_32536
  Homolog annotation: Hit_ID=P93048; Match level="QueryCoverage=67%, HitCoverage=63%, E-value=7e-19, Identity=74%"; Hit description =GAG1At protein
MGGETTGAGGGGFRARMEHYLYSGEKKHVLAGIAIFAAVFGVPWYFMTRGAKHQSHQDYMEKANKARSERLSSGQPSALKE

SEQ ID NO: 98511 - protein, 137 aa, Setaria italica
  misc_feature (23)..(23): Xaa can be any naturally occurring amino acid
  Transcript Sequence Number=SeqID_32537
  Gene Ontology: Mol. function=phosphatidylinositol N-acetylglucosaminyl transferase activity; Cellular component=integral to membrane; Biological process=GPI anchor biosynthetic process
  Homolog annotation: Hit_ID=B9SQ90; Match level="QueryCoverage=90%, HitCoverage=40%, E-value=2e-32, Identity=57%"; Hit description =Phosphatidylinositol N-acetylglucosaminyltransferase subunit C, putative
  Pfam annotation: Domain name=GPI2; Domain location=13-137; Score= -20.5; E_value=2.4e-05; Accession=PF06432.3; Description =Phosphatidylinositol N-acetylglucosaminyltra
SSDGNRIRLQPMWRKVAYGGRAXGYDDNHTDESFLEEMVMNANVVKRDLLKVMIDSVSISQYLCIVALVVSTWTLTLNLDINETTLLKLDVGLLLVGFSVLLLTTCPFSLKLLAKYVLNISFFISGLYVLAPILPIT

SEQ ID NO: 98512 - protein, 56 aa, Setaria italica
  Transcript Sequence Number=SeqID_32538
ATLVLKFFSRFVYLLGAKAADLFSFSFWSCSDHSSITLALKIKIVKRCDDFCLQKK

SEQ ID NO: 98513 - protein, 175 aa, Setaria italica
  Transcript Sequence Number=SeqID_32539
  Gene Ontology: Mol. function=electron carrier activity; Biological process=oxidation reduction
  Homolog annotation: Hit_ID=B6ST66; Match level="QueryCoverage=99%, HitCoverage=32%, E-value=2e-42, Identity=54%"; Hit description =Cytochrome P450 CYP92C5
QVKEHLLNFTMRNIVRMALGEKWSPPGSDGRRSSEGDEAFRRSLKESFTATGLLGNVGEWVPWLGWLDVQGCVRRMKRVHVLFDQFNEQILNEHQKDRQRRAGAGMDDDMDLVNVLLQLAEDGQEEPTETRLTRDGVKAFLLDIIGGGTETAAATMEWAILELLRHPDATAAATE

SEQ ID NO: 98514 - protein, 236 aa, Setaria italica
  Transcript Sequence Number=SeqID_32540
  Gene Ontology: Mol. function=microtubule motor activity; Cellular component=microtubule associated complex; Biological process =microtubule-based movement
  Homolog annotation: Hit_ID=Q2QM62; Match level="QueryCoverage=100%, HitCoverage=23%, E-value=1e-119, Identity=90%"; Hit description =Kinesin motor protein, putative, expressed
  Pfam annotation: Domain name=Kinesin; Domain location=1-236; Score =231.3; E_value=2.4e-66; Accession=PF00225.15; Description=Kinesin motor domain
GTGKTFTMEGIEGARGGRTTELLEELFRIIKEREGIFLYEVTVSVLEVYNEQIHDLLLTGSQPGATTKRLEVRQVAEGVHQVPGLGEARVISNMNEAWEVLQTGSKARVVGSTNANEHSSRSHCIHCVMVKGENLVNGECTKSKLWLIDLAGSERVAKTDAQGERLKEAQNINKSLSALGDVISALATKTSHIPFRNSKLTHLLQDSLSGDSKTLMFVQISPNENDVGETLCSLNF

SEQ ID NO: 98515 - protein, 100 aa, Setaria italica
  Transcript Sequence Number=SeqID_32541
  Gene Ontology: Mol. function=nucleic acid binding; Cellular component= nucleus; Biological process=DNA replication
  Homolog annotation: Hit_ID=B6SL03; Match level="QueryCoverage=100%, HitCoverage=16%, E-value=2e-48, Identity=90%"; Hit description =Replication protein A 70 kDa DNA-binding subunit
  Pfam annotation: Domain name=Rep_fac-A_C; Domain location=1-90; Score= 29.2; E_value=1.9e-09; Accession=PF08646.2; Description=Replication factor-A C terminal domai
IKVSDPTGEAWVSVFNEHAERIIGCSADELDRIRKEEGDDSYIQKLKEATWVPHLFRVSVAQHEYMNERRQRITVRTEAPVDYAAESKYLLEEIAKLTAC

SEQ ID NO: 98516 - protein, 428 aa, Setaria italica
  misc_feature (41)..(41): Xaa can be any naturally occurring amino acid
  Transcript Sequence Number=SeqID_32542
  Gene Ontology: Mol. function=nucleic acid binding; Cellular component= nucleus; Biological process=DNA replication
  Homolog annotation: Hit_ID=B6SL03; Match level="QueryCoverage=100%, HitCoverage=68%, E-value=0.0, Identity=82%"; Hit description =Replication protein A 70 kDa DNA-binding subunit
  Pfam annotation: Domain name=Rep_fac-A_C; Domain location=266-418; Score=197.6; E_value=3.5e-56; Accession=PF08646.2; Description =Replication factor-A C terminal domai
NLRTYKNARGEGCVFNVELTDEDGTQIQATMFNEAAKKFYXMFELGKVYYVSKGSLRIANKQFKTVQNDYEMTLNESAVVEEAEGETFIPPVQYNFVKIDQLGSYVNGRELVDIVGVVQSVSPTMSIRRKLDNETIPKRDIVVADDSGKTVSISLWNDLATTTGQELLDMVDSSPIIAIRSLRVSDFQGVSLSTVGKSTLMVNPDLPEVHNLKSWYDNEGKGTSMAPIGADMGAARAGGLRSMYSDRVFLSHITSDPNMGQEKPVFFSLNAIISHIKPDQNMWYRACKTCNKKVTEAVGGGYWCEGCNKNDAECSLRYIMVIKVSDPTGEAWVSVFNEHAERIIGCSADELDRIRKEVNSGLRKLGSFSIQFPECNSCFLVCLCLISVAQHEYMNERRQRITVRTEAPVDYAAESKYLLEEIAKLTAC

SEQ ID NO: 98517 - protein, 130 aa, Setaria italica
  Transcript Sequence Number=SeqID_32543
  Gene Ontology: Mol. function=nucleic acid binding
  Homolog annotation: Hit_ID=B9UK63; Match level="QueryCoverage=97%, HitCoverage=41%, E-value=2e-51, Identity=80%"; Hit description =R1MYB1 protein
  Pfam annotation: Domain name=Myb_DNA-binding; Domain location=4-51; Score=52.1; E_value=2.1e-12; Accession=PF00249.23; Description=Myb -like DNA-binding domain
KLTGVPWTEEEHRMFLAGLDKLGKGDWRGISRHFVTTRTPTQVASHAQKYFLRQNSLTQKKRRSSLFDAVEAAKKVAMPRIASVSGLPFPSLSPRSVDARTNGAVVLPPFLNLMSSTSPFAGGGGASQSQ

SEQ ID NO: 98518 - protein, 79 aa, Setaria italica
  Transcript Sequence Number=SeqID_32544
SSIIVNTSLVGLQSSYLLRYLHHIKFLSINYQELSIRLQLREDVWEELKICHQMIFTAGDGELVIASKIRNSSQHHEQT

SEQ ID NO: 98519 - protein, 58 aa, Setaria italica
  Transcript Sequence Number=SeqID_32545
FAWSLISPAMCLYSPHFLYHFTGCFQVLQHSRLTHRYDAPISGAITPYLSFLVVTVSP

SEQ ID NO: 98520 - protein, 90 aa, Setaria italica
  misc_feature (73)..(73): Xaa can be any naturally occurring amino acid
  Transcript Sequence Number=SeqID_32546
  Gene Ontology: Mol. function=inositol or phosphatidylinositol phosphatase activity; Biological process=abscisic acid mediated signaling
  Homolog annotation: Hit_ID=B6SWI5; Match level="QueryCoverage=100%, HitCoverage=13%, E-value=1e-40, Identity=91%"; Hit description=Type I inositol-1,4,5-trisphosphate 5-phosphatase CVP2
DESLESAPYKLRRRNSETLRAQYINTKELRVCVGTWNAGGKAPPEDLDISEWLGTGGDAEPADIYVLGFQGSXVPLNAGNVFGAEDGRPA

SEQ ID NO: 98521 - protein, 103 aa, Setaria italica
  Transcript Sequence Number=SeqID_32547
  Gene Ontology: Mol. function=catalytic activity; Cellular component =mitochondrion; Biological process=metabolic process
  Homolog annotation: Hit_ID=B6UAJ5; Match level="QueryCoverage=87%, HitCoverage=34%, E-value=2e-26, Identity=65%"; Hit description =Methylglutaconyl-CoA hydratase
  Pfam annotation: Domain name=ECH; Domain location=1-103; Score=-28.2; E_value=7e-05; Accession=PF00378.12; Description=Enoyl-CoA hydrataseisomerase family
NHVGRISEQYYCYQERKLMSSSEVGEYARSLRSTFSSFEALPIPTIAVIEGAALGGENAELGLPETGLAIIPGAGGTQRLPRIVGGSRAKELIFTGRRCDAAE

SEQ ID NO: 98522 - protein, 161 aa, Setaria italica
  Transcript Sequence Number=SeqID_32548
  Gene Ontology: Mol. function=catalytic activity; Cellular component =mitochondrion; Biological process=metabolic process
  Homolog annotation: Hit_ID=B6UAJ5; Match level="QueryCoverage=80%, HitCoverage=43%, E-value=8e-43, Identity=70%"; Hit description =Methylglutaconyl-CoA hydratase
  Pfam annotation: Domain name=ECH; Domain location=1-112; Score=51.5; E_value=3.2e-12; Accession=PF00378.12; Description=Enoyl-CoA hydrataseisomerase family
ALLKLFYVHILTGLRNYSLFEQALPIPTIAVIEGAALGGGLELALSCDLRICGENAELGLPETGLAIIPGAGGTQRLPRIVGGSRAKELIFTGRRCDAAEAVMMGLANYCVPAGEAYQKALDIAREIMQKVRIILNPTSEHREVHHEFTFLNKHLHATVYK

SEQ ID NO: 98523 - protein, 225 aa, Setaria italica
  Transcript Sequence Number=SeqID_32549
  Gene Ontology: Mol. function=catalytic activity; Cellular component =mitochondrion; Biological process=metabolic process
  Homolog annotation: Hit_ID=B6UAJ5; Match level="QueryCoverage=92%, HitCoverage=66%, E-value=3e-91, Identity=82%"; Hit description =Methylglutaconyl-CoA hydratase
  Pfam annotation: Domain name=ECH; Domain location=1-148; Score=112.7; E_value=1.3e-30; Accession=PF00378.12; Description=Enoyl-CoA hydrataseisomerase family
  Subcellular localization annotation: CTP_CleavageSite=39; ConfidenceScore=5.06e-01
TPTQSILSKVVLVVSSVPGAFCAGADLKVWALKERKLMSSSEVGEYARSLRSTFSSFEALPIPTIAVIEGAALGGGLELALSCDLRICGENAELGLPETGLAIIPGAGGTQRLPRIVGGSRAKELIFTGRRCDAAEAVMMGLANYCVPAGEAYQKALDIAREIMQKGPLGIRMAKKAINQGTQVADMSSALAVEGECYEQLLHTQDRLEALAAFAEKRKPVYTGK

SEQ ID NO: 98524 - protein, 68 aa, Setaria italica
  Transcript Sequence Number=SeqID_32550
  Subcellular localization annotation: CTP_CleavageSite=55; ConfidenceScore=5.18e-01
GCLCLEPSCLLLFRLKFFFLLSLLPFDLFSASFLTLSHQVASPPAPSLPPCPWLRSSRRVGSSLCRRQ

SEQ ID NO: 98525 - protein, 138 aa, Setaria italica
  Transcript Sequence Number=SeqID_32551
  Subcellular localization annotation: CTP_CleavageSite=42; ConfidenceScore=5.42e-01
CWANLQDAGSAEASRRRDCGSAGRGGSKRERSGCGVGFRRLRSSTTRGPRRRLARERQVRRRGTRGGSEEEEREEDQKKRNERRITCAAGARSPEPEKTNRNGGEPGREADLRGVGGGAGEGGGAAEGLGEEAGVTGR

SEQ ID NO: 98526 - protein, 112 aa, Setaria italica
  misc_feature (24)..(24): Xaa can be any naturally occurring amino acid
  Transcript Sequence Number=SeqID_32552
  Subcellular localization annotation: CTP_CleavageSite=69; ConfidenceScore=5.71e-01
PPLSDPASSPAAGSPVAPPPPSPXPCFSPSPSAAPPPSPAPPPTPRRSASLPGTEPPKPYPAPAPLPLRAASPCTPAVPASRRLRTPGVLQVSPTLSGPHVPVTHLESSPLV

SEQ ID NO: 98527 - protein, 86 aa, Setaria italica
  Transcript Sequence Number=SeqID_32553
MGAGAEVMHQVVPLLEAPFHRCVVKSVEVVEEVVAVAPAPVQLAASPKAVVEVAVEVSDLVSFSILAEQRFRLSCSNSCFDKNYMA

SEQ ID NO: 98528 - protein, 132 aa, Setaria italica
  misc_feature (40)..(40): Xaa can be any naturally occurring amino acid
  misc_feature (100)..(100): Xaa can be any naturally occurring amino acid
  Transcript Sequence Number=SeqID_32554
  Gene Ontology: Mol. function=aspartic-type endopeptidase activity; Cellular component=nucleus; Biological process=RNA-dependent DNA replication
  Homolog annotation: Hit_ID=Q10HG0; Match level="QueryCoverage=95%, HitCoverage=5%, E-value=2e-33, Identity=53%"; Hit description =Retrotransposon protein, putative, unclassified
SQAGPIKIRQDEVKFTFDVSKCDRIFDELVKAGKIKFSHXVPPVDELKRHAYCKWHNSTNDCNVFHRQIQSAIKEGQLKFHGIQINQNPFPINTLELTNXKCIWPDQAEKAKGKNVIIGEERPEKKVPLKKT

SEQ ID NO: 98529 - protein, 321 aa, Setaria italica
  misc_feature (149)..(149): Xaa can be any naturally occurring amino acid
  misc_feature (196)..(196): Xaa can be any naturally occurring amino acid
  misc_feature (269)..(269): Xaa can be any naturally occurring amino acid
  misc_feature (282)..(282): Xaa can be any naturally occurring amino acid
  Transcript Sequence Number=SeqID_32555
LPVSILLHVTKQEHELKVEHDCNIEPLHWFWSGTKLGARQVPEDLDLAVLDVEALGPLLLGEEPRLDVRLAQAVSRQVVDADAETLPHEALAPRDRDHAGPARELRLVEAGHQVLRRALAGAGRRRRRVRDLDAALAEAGREVPHGSLXGPFGEHLASRSPLGSQRRAPLLCSSHRSNPHHPASPPHNAGEEMTNXRQIGHADTEVVVEDCSIRQCRHRRPQDPTLYYKRQHRQPPRKQGAAERLVAAQDFLTTPPLSTATQPRDAATXPQSPRNRSDGAIXPPGFLQKMARASAFIPQQWHQERNANGSFPQTRRTLQLQ

SEQ ID NO: 98530 - protein, 121 aa, Setaria italica
  Transcript Sequence Number=SeqID_32556
  Gene Ontology: Mol. function=protein serine/threonine kinase activity; Cellular component=plasma membrane; Biological process =protein amino acid phosphorylation
  Homolog annotation: Hit_ID=B2C5V1; Match level="QueryCoverage=100%, HitCoverage=39%, E-value=2e-52, Identity=76%"; Hit description=Pto -like protein (Fragment)
  Pfam annotation: Domain name=Pkinase; Domain location=1-121; Score= -92.5; E_value=0.0055; Accession=PF00069.17; Description=Protein kinase domain
  Pfam annotation: Domain name=Pkinase_Tyr; Domain location=1-111; Score=-152.7; E_value=0.0014; Accession=PF07714.9; Description =Protein tyrosine kinase
  Pfam module annotation: Pfam domain module=Pkinase::Pkinase_Tyr; Domain location=1-121::1-111
FCAEGSRRLLVYEYMNRGSLDRSLFGRTGPVLEWGERMEVALGAARGLAYLHTGCDQKIVHCDVKPENILLADGGQVKIADFGLAKLMSPEQSELFTTMRGTRGYLAPEWLSNAAISDRAD

SEQ ID NO: 98531 - protein, 212 aa, Setaria italica
  Transcript Sequence Number=SeqID_32557
KNVKVTELSLYEDAILDACCHNIPADDELWYRVVEVSVLLLTITQRSNPRSSWYDRMLSEMLGHLERQPLNKERRVAWLTLVGPVFDAMGLFLLAHFRRLFLLFFQWMHTDDDKTVLLVLEQMHAIIKLTWIRKSPHTSRLVDELALLYKESATRSSREVIRSHILEMLVLLQKCKGQQFEEAWKKHERDPDLTMLLSSFNQLCIKNSSPGC

SEQ ID NO: 98532 - protein, 58 aa, Setaria italica
  Transcript Sequence Number=SeqID_32558
VKKIILHQFGENKCFCRSYLVNVQCAFDFFCTMATNLTRMVCVNYIYTSSPQENFLKM

SEQ ID NO: 98533 - protein, 79 aa, Setaria italica
  Transcript Sequence Number=SeqID_32559
  Homolog annotation: Hit_ID=Q2EF47; Match level="QueryCoverage=72%, HitCoverage=19%, E-value=4e-19, Identity=89%"; Hit description =Phosphoenolpyruvate carboxylase kinase 1
TPKEPLRELEADPLDLALAEQEPKVHLLVSAPPPASRHVVALHAAFEDADAVHLVLDLCEGGDLFSLVSARGPLPEPEA

SEQ ID NO: 98534 - protein, 261 aa, Setaria italica
  Transcript Sequence Number=SeqID_32560
  Gene Ontology: Mol. function=phosphotransferase activity, alcohol group as acceptor; Cellular component=cytoplasm; Biological process =nuclear-transcribed mRNA catabolic process, nonsense-mediated decay
  Homolog annotation: Hit_ID=Q10D72; Match level="QueryCoverage=99%, HitCoverage=6%, E-value=1e-132, Identity=87%"; Hit description =Phosphatidylinositol 3-and 4-kinase family protein, expressed
INILKDEAARVAANSTLSSAEKNKINAAKYSAVMTPIIVALERRLASTSREPKTSHEMWFHKEFNAKLKSAITTLKTPPGSPTALGEIWQPFDSIAASLATHQRKSCILLSEIAPQLAVLSTSDIPMPGFEKQILDSSESFAGNHGIVTVSSFCKEVTILSTKTRPKKLVLQGSDGQRYTYLLKGREDLRLDSRIMQLLEAINSLLYSSSDTRSRNIALRFYSVTPVSGRAGLIQWVENVSSIYNVYKSWQKRSQLAQAEA

SEQ ID NO: 98535 - protein, 90 aa, Setaria italica
  Transcript Sequence Number=SeqID_32561
  Gene Ontology: Mol. function=DNA binding; Biological process =regulation of transcription, DNA-dependent
  Homolog annotation: Hit_ID=B6UGA7; Match level="QueryCoverage=98%, HitCoverage=39%, E-value=4e-36, Identity=80%"; Hit description=DNA binding protein
RTGEKSLSITPLGSDSGYFVNITVLNNMQKTTDRLSVPITKAEFAVMRTALSFALPHIMGWDQVLTRHPAPQASSKPRVERPHPDSEWER

SEQ ID NO: 98536 - protein, 181 aa, Setaria italica
  misc_feature (8)..(8): Xaa can be any naturally occurring amino acid
  misc_feature (48)..(48): Xaa can be any naturally occurring amino acid
  Transcript Sequence Number=SeqID_32562
  Gene Ontology: Mol. function=DNA binding; Cellular component =chloroplast; Biological process=regulation of transcription, DNA -dependent
  Homolog annotation: Hit_ID=B6UGA7; Match level="QueryCoverage=99%, HitCoverage=77%, E-value=2e-82, Identity=83%"; Hit description=DNA binding protein
  Pfam annotation: Domain name=Whirly; Domain location=53-181; Score =226.1; E_value=9.1e-65; Accession=PF08536.3; Description=Whirly transcription factor
MLRLSRFXPVRKQERFDPKEALWSGSLTFQQAVSTSAANLDENSSGKXFASYTVFKGKAALSIHPILPSFSKMESGASRINRNGSVMLTFFPAVGQRKYDYTKKQLFSLSPTEVGSLISLGPAESCEFFHDPSMKSSHEGQVKKSLSITPLGSDSGYFVNITVLNNMQKTTDRLSVPITKT

SEQ ID NO: 98537 - protein, 94 aa, Setaria italica
  Transcript Sequence Number=SeqID_32563
  Subcellular localization annotation: CTP_CleavageSite=39; ConfidenceScore=5.29e-01
LYSEVSPFFICCYGKHGQVLGSTKKGCSTFPNGSLFGTACSKSWHLVTESDQVGTSTVMSLLVLSSLPWKACTSLLKRFSMCCIQRGDSTKACT

SEQ ID NO: 98538 - protein, 137 aa, Setaria italica
  Transcript Sequence Number=SeqID_32564
  Gene Ontology: Mol. function=protein serine/threonine kinase activity; Biological process=protein amino acid phosphorylation
  Homolog annotation: Hit_ID=Q7XL08; Match level="QueryCoverage=100%, HitCoverage=18%, E-value=5e-54, Identity=73%"; Hit description =OSJNBa0065J03.1 protein
  Pfam annotation: Domain name=Pkinase; Domain location=1-137; Score= -82.8; E_value=0.0015; Accession=PF00069.17; Description=Protein kinase domain
  Pfam annotation: Domain name=Pkinase_Tyr; Domain location=1-137; Score=-144.7; E_value=0.00041; Accession=PF07714.9; Description =Protein tyrosine kinase
  Pfam module annotation: Pfam domain module=Pkinase::Pkinase_Tyr; Domain location=1-137::1-137
ISRLRHRNLVQLVGWCHGRDELLLVYELVPNRSLDIHLHGDGDGTFLTWPMRLNIILGLGSALLYLHEEWEQCVVHRDVKPSNVMLDVSFNAKLGDFGLARFIDHAVGVQTMTAVSGTPGYVDPESLITGKASAESD

SEQ ID NO: 98539 - protein, 156 aa, Setaria italica
  Transcript Sequence Number=SeqID_32565
  Homolog annotation: Hit_ID=B9RDS4; Match level="QueryCoverage=98%, HitCoverage=6%, E-value=3e-66, Identity=75%"; Hit description=CRP, putative
  Pfam annotation: Domain name=Med12; Domain location=85-146; Score =99.4; E_value=1.2e-26; Accession=PF09497.2; Description =Transcription mediator subunit Med12
NCPEETLTKEYAQAGYKETVEGIEEAREIVLSQIPHFCKPDVVVKCKEALKKRLRAINESRAQKRKAGQVYGVPLSGSLLIKSGVYPEQRPCNEDTRRKWAEALAQPNKRLRSLSEHVPHGYRRKSLFEVLTRYNVPLLRATWFVKVTYLNQLQAR

SEQ ID NO: 98540 - protein, 82 aa, Setaria italica
  misc_feature (4)..(4): Xaa can be any naturally occurring amino acid
  misc_feature (11)..(11): Xaa can be any naturally occurring amino acid
  misc_feature (24)..(24): Xaa can be any naturally occurring amino acid
  Transcript Sequence Number=SeqID_32566
  Gene Ontology: Mol. function=orotidine-5'-phosphate decarboxylase activity; Biological process='de novo' pyrimidine base biosynthetic process
  Homolog annotation: Hit_ID=Q7FZ76; Match level="QueryCoverage=97%, HitCoverage=18%, E-value=5e-16, Identity=53%"; Hit description=UMP synthase
  Pfam annotation: Domain name=Pribosyltran; Domain location=7-82; Score=11.9; E_value=0.00076; Accession=PF00156.19; Description =Phosphoribosyl transferase domain
SLLXSLVPATXPYDLLCGVPYTAXPFAAVLSAAASVPMLLSRYDTKRVEGAYRAGQAVLIVEDLVTSGASVLETVAPLRDEG

SEQ ID NO: 98541 - protein, 114 aa, Setaria italica
  Transcript Sequence Number=SeqID_32567
  Gene Ontology: Mol. function=transferase activity, transferring hexosyl groups; Cellular component=integral to membrane
  Homolog annotation: Hit_ID=Q9LF80; Match level="QueryCoverage=98%, HitCoverage=24%, E-value=5e-47, Identity=76%"; Hit description =Putative glycosyltransferase 3
  Pfam annotation: Domain name=Glyco_transf_34; Domain location=1-114; Score=-55.2; E_value=0.00045; Accession=PF05637.4; Description =galactosyl transferase GMA12MNN10 family
MDSDAIFTDMAFELPFSRYEGRNLVVHGYPDLLFEKRSWISLNAGIFLLRNCQWSLDLLDAWVPMGPRGPSRVEAGKLLTASLSGRPPFEADDQSALIHLLLIQKDKWMEKVQI

SEQ ID NO: 98542 - protein, 126 aa, Setaria italica
  Transcript Sequence Number=SeqID_32568
  Gene Ontology: Mol. function=methyltransferase activity; Cellular component=cytoplasm; Biological process=rRNA processing
  Homolog annotation: Hit_ID=Q852A4; Match level="QueryCoverage=92%, HitCoverage=28%, E-value=2e-47, Identity=80%"; Hit description =Putative FtsJ cell division protein
  Pfam annotation: Domain name=FtsJ; Domain location=19-126; Score= -43.0; E_value=0.0029; Accession=PF01728.11; Description=FtsJ-like methyltransferase
APRGATADFFYRESQRLGYVARSALKLIQMQKQHRLITPGAAVLDLGCAPGAWLQVACQNLGPLEKGGVVVGVDVKKVKVPSAHCDSRVRTVCADVMTLMKQQARAMSPQERGFFVILSVAFIRFA

SEQ ID NO: 98543 - protein, 84 aa, Setaria italica
  Transcript Sequence Number=SeqID_32569
  Gene Ontology: Mol. function=transporter activity; Cellular component= membrane; Biological process=oligopeptide transport
  Homolog annotation: Hit_ID=B6SWT0; Match level="QueryCoverage=100%, HitCoverage=15%, E-value=4e-26, Identity=73%"; Hit description =Peptide transporter PTR2-B
MPSGSEPLLARADGMLPDAAVDHRGLPAERGTTGGWRSALFIIAVEIAERFAFYGVSANLISYLTGPLGEGTAAAAAAINAWNG

SEQ ID NO: 98544 - protein, 147 aa, Setaria italica
  misc_feature (46)..(46): Xaa can be any naturally occurring amino acid
  misc_feature (73)..(73): Xaa can be any naturally occurring amino acid
  Transcript Sequence Number=SeqID_32570
  Gene Ontology: Mol. function=microtubule motor activity; Cellular component=microtubule associated complex; Biological process =microtubule-based movement
  Homolog annotation: Hit_ID=Q0DV28; Match level="QueryCoverage=100%, HitCoverage=15%, E-value=1e-69, Identity=84%"; Hit description =Armadillo repeat-containing kinesin-like protein 1
  Pfam annotation: Domain name=Arm; Domain location=9-49; Score=18.4; E_ value=0.029; Accession=PF00514.15; Description=Armadillobeta-catenin -like repeat
GAIANLCGNEKLHLMLKQDGGIKALLGMFRSGHADVIAQIARGIAXLCKCESRVISQGHRKGRSLLIEDGVLXWMVANSTRFSASTRRHIELAFCHLAQNEDNTCDIIASGGIKELLRISRESPREDTRNLAKKALDSNPAFLREVQ

SEQ ID NO: 98545 - protein, 47 aa, Setaria italica
  Transcript Sequence Number=SeqID_32571
IFSISQHQGQATASANLLCLKFVFILLFVNHDWTLHMVVDTDNKPVS

SEQ ID NO: 98546 - protein, 196 aa, Setaria italica
  Transcript Sequence Number=SeqID_32572
  Gene Ontology: Mol. function=protein transporter activity; Cellular component=mitochondrial inner membrane; Biological process=protein transport
  Homolog annotation: Hit_ID=B6TSD6; Match level="QueryCoverage=87%, HitCoverage=63%, E-value=2e-73, Identity=81%"; Hit description=SAM domain family protein
  Pfam annotation: Domain name=SAM_1; Domain location=128-189; Score =21.2; E_value=0.0012; Accession=PF00536.22; Description=SAM domain (Sterile alpha motif)
  Pfam annotation: Domain name=Tim17; Domain location=4-118; Score= -17.4; E_value=0.009; Accession=PF02466.11; Description =Tim17Tim22Tim23 family
  Pfam module annotation: Pfam domain module=SAM_1::Tim17; Domain location=128-189::4-118
  Subcellular localization annotation: CTP_CleavageSite=73; ConfidenceScore=5.35e-01
MDGAKQKPRPGGGGTSSAAPPLGADPKALASFKQAQALAGGPLVQARNFAVMTGANAGISCVMRRIRGKEDVQGSMAAAFGSGALFSIVSGMGTPNPVTNAITTGVAFAVFQGGFFMIGQKFSQPQSEDTYYSRGRSMLQTLGLQNYEKNFKKGLLTDQTLPLLTDSALRDVKIPPGPRLLILDHIKRDPELTRAN

SEQ ID NO: 98547 - protein, 78 aa, Setaria italica
  Transcript Sequence Number=SeqID_32573
MIQIRINCINPRYCGTSGKRNPGIVIIGLLHCLVLIRSRTKPMGTWLPFKLLVVCAKLRPQYCMLFSTYQDTGTKGFL

SEQ ID NO: 98548 - protein, 67 aa, Setaria italica
  misc_feature (1)..(8): Xaa can be any naturally occurring amino acid
  misc_feature (10)..(10): Xaa can be any naturally occurring amino acid
  Transcript Sequence Number=SeqID_32574
XXXXXXXXFXFFFFFLRFAKSRKFHFLGSFQLWLDITGEGKEGVANPQYKLLKEKTSCIRYPSHICY

SEQ ID NO: 98549 - protein, 65 aa, Setaria italica
  misc_feature (7)..(7): Xaa can be any naturally occurring amino acid
  Transcript Sequence Number=SeqID_32575
KVLVNEXTSVRSKRILHEVPKDTVTRLLHVIDRQIRCSQGLSIDEKENVGAEPYPMSLVFGIFNS

SEQ ID NO: 98550 - protein, 53 aa, Setaria italica
  Transcript Sequence Number=SeqID_32576
LIFVSGPSKVSSVFVNLWGQSTILSYMYIRALYAKLFVNLLLFFAWQSSGQLF

SEQ ID NO: 98551 - protein, 76 aa, Setaria italica
  Transcript Sequence Number=SeqID_32577
  Gene Ontology: Mol. function=cyclin-dependent protein kinase activity; Biological process=protein amino acid phosphorylation
  Homolog annotation: Hit_ID=Q6K5F8; Match level="QueryCoverage=100%, HitCoverage=10%, E-value=5e-33, Identity=85%"; Hit description =Cyclin-dependent kinase G-1
NRLLTYDPEKRISADDALNHEWFREVPLPKTKDFMPTFPALNEQDRRIKKYKKSPDPLVEQQMKEQGSTGDRGLFG

SEQ ID NO: 98552 - protein, 81 aa, Setaria italica
  Transcript Sequence Number=SeqID_32578
NRKFPSKLNICTLENEEPNRKFPSKVNSYMTRRARNQANNLKAVPEDIIAVINHYSIQYKAVFNKIKIGNERGRSIAFITQ

SEQ ID NO: 98553 - protein, 692 aa, Setaria italica
  Transcript Sequence Number=SeqID_32579
  Gene Ontology: Mol. function=cyclin-dependent protein kinase activity; Cellular component=cytoplasm; Biological process=protein amino acid phosphorylation
  Homolog annotation: Hit_ID=Q6K5F8; Match level="QueryCoverage=85%, HitCoverage=85%, E-value=0.0, Identity=68%"; Hit description=Cyclin -dependent kinase G-1
  Pfam annotation: Domain name=Pkinase; Domain location=348-639; Score =352.0; E_value=1.1e-102; Accession=PF00069.17; Description=Protein kinase domain
  Pfam annotation: Domain name=Pkinase_Tyr; Domain location=348-639; Score=26.4; E_value=1.7e-15; Accession=PF07714.9; Description =Protein tyrosine kinase
  Pfam module annotation: Pfam domain module=Pkinase::Pkinase_Tyr; Domain location=348-639::348-639
MAAARHAGYRSHEVARGRELDLERSRRSKEYHHHHHRHPSRDRDSDRRRDAGRSGGREVSNRHRRHHSPYPPPRSRPSRREEDREPGEVSSGSGSEESGGRPLKARAPREDGVLGVCKDGSAVLPSKKRKHSPVIPDENVSELQAIDGFRSRRGIDTSVAELPLPSPPPLSDESPIDVVGRCPTMNLGVSVVTHEAEWSHEHEKNGVMEGEEDCPTTRNILTSRWADADQDEEEATVPKKKRSVSPGNLSALRSTKKVTSPELGEALRVKTRGSSSCSSNSVCSENWNIEVDGGDRMDVEEDGIDASAGCSLDVDSGSDARRSRTPEAVQPPRRCFNMLQSCRSIDEFERLNTINEGTYGVVFRVRDKKTGEIVALKKVKMDKEREGFPLTSLREINILLSFDHPSIVDVKEVVVGGHDDDTFMVMEYMEHDLKGVMETMKQPYTQSEVKCLMLQLLEGVKYLHDNWVLHRDLKTSNILLNNRGEVKICDFGLSRQYGSPLKPYTQPVVTLWYRAPELLLGAKEYSTAIDMWSLGCIMAELLSKEPLFTGKNEIGQLDKIFRILGTPNEERWPGYSKLPGAKGKFVKQPYNRLRERFPPVSFTGGLTLSEAGFDLLTRLLTYDPEKRISADDALNHEWFREVPLPKTKDFMPTFPALNEQDRRIKKYKKSPDPLVEQQMKEQGSTGDRGLFG

SEQ ID NO: 98554 - protein, 66 aa, Setaria italica
  Transcript Sequence Number=SeqID_32580
DSRASVCYSCPVPLGKFENLYEQRYKKTIDYEGFGVAGLEELVEKFKDVVGLHEDHASKSKFLIAN

SEQ ID NO: 98555 - protein, 130 aa, Setaria italica
  Transcript Sequence Number=SeqID_32581
NCPSTPIILKKEKRGSCALEESTIGACQQLGSSSDDLSEDERNINPDIDGAYLFDDHLDSFRREIQELLVCYSCPVPLGKFENLYEQRYKKTIDYEGFGVAGLEELVEKFKDVVGLHEDHASKSKFLIAN

SEQ ID NO: 98556 - protein, 134 aa, Setaria italica
  Transcript Sequence Number=SeqID_32582
  Subcellular localization annotation: CTP_CleavageSite=4; ConfidenceScore=5.17e-01
ISATAPSPTSSRRPFLYTPVLQYLLPAPSHPRNLFLDIFPSSCAPDCCARDLSARGGLLDMETYRSRPRRSQQRLGFCRNGGLLRGIQKKQPGNRTEKTTKRWALSLCLPFLLPTFKYPRLDRRTNRQIRASAP

SEQ ID NO: 98557 - protein, 93 aa, Setaria italica
  misc_feature (18)..(18): Xaa can be any naturally occurring amino acid
  Transcript Sequence Number=SeqID_32583
  Gene Ontology: Mol. function=protein serine/threonine phosphatase activity; Cellular component=protein serine/threonine phosphatase complex; Biological process=protein amino acid dephosphorylation
  Homolog annotation: Hit_ID=B6TZR2; Match level="QueryCoverage=53%, HitCoverage=12%, E-value=6e-21, Identity=94%"; Hit description =Protein phosphatase 2C
TFRRPLLSSDPAITVHQXQPTDRFIIFASDGLWEHLSNQEAVDMVQSSPRNVCILILCLFFCNLVLLRHSASCFFVYLIKITRIHFCSSLIML

SEQ ID NO: 98558 - protein, 398 aa, Setaria italica
  Transcript Sequence Number=SeqID_32584
  Gene Ontology: Mol. function=protein serine/threonine phosphatase activity; Cellular component=protein serine/threonine phosphatase complex; Biological process=protein amino acid dephosphorylation
  Homolog annotation: Hit_ID=B6TZR2; Match level="QueryCoverage=99%, HitCoverage=99%, E-value=0.0, Identity=85%"; Hit description=Protein phosphatase 2C
  Pfam annotation: Domain name=PP2C; Domain location=50-328; Score =112.0; E_value=2e-30; Accession=PF00481.13; Description=Protein phosphatase 2C
MLSAVMEYLRSCWGPASPAGRSRRGSDAAGRQDGLLWYKDGGRVVDGEFSMAVVQANNLLEDHSQVESGPLSATEPDLQGTFVGVYDGHGGPETARYINDHLFNHLRRFASEHKCMSADVIRKAFRATEEGFISLVSSQWSLRPQLAAVGSCCLVGVVCSGTLYVASLGDSRAVLGRLVKGTGEVLAMQLSAEHNASYEEVRRELQASHPDDPHIVVLKHNVWRVKGIIQITRSIGDVYLKKPEFNREPLHNKFRIQGTFRRPLLSSDPAITVHQIQPTDRFIIFASDGLWEHLSNQEAVDMVQSSPRNGIARRLVKAAMQEAAKKREMRYSDLKKIDRGVRRHFHDDITVIVVFFDSNAMTTAAWSRPSVSLRGGGVPIPSNTLALLSVPTELNSSY

SEQ ID NO: 98559 - protein, 104 aa, Setaria italica
  Transcript Sequence Number=SeqID_32585
  Pfam annotation: Domain name=Pentapeptide; Domain location=33-72; Score=20.6; E_value=0.0067; Accession=PF00805.14; Description =Pentapeptide repeats (8 copies)
IYIILLKPAVLPRLLNINTSHFLVPNLISIRTTCEARSDFQGAKLSGTNLQGANLQRAYLREVDLRDTVCFCSWFHSLVFPPFFSLITKPKDLGHFCLLHVLHK

SEQ ID NO: 98560 - protein, 301 aa, Setaria italica
  Transcript Sequence Number=SeqID_32586
  Gene Ontology: Mol. function=voltage-gated potassium channel activity; Cellular component=voltage-gated potassium channel complex; Biological process=potassium ion transport
  Homolog annotation: Hit_ID=B6TKK7; Match level="QueryCoverage=94%, HitCoverage=94%, E-value=1e-138, Identity=86%"; Hit description =Potassium channel tetramerisation domain-containing protein 9
  Pfam annotation: Domain name=K_tetra; Domain location=12-103; Score =93.1; E_value=1e-24; Accession=PF02214.14; Description=K+ channel tetramerisation domain
  Pfam annotation: Domain name=Pentapeptide; Domain location=129-168; Score=31.6; E_value=3.3e-06; Accession=PF00805.14; Description =Pentapeptide repeats (8 copies)
  Pfam annotation: Domain name=Pentapeptide; Domain location=169-208; Score=28.9; E_value=2.1e-05; Accession=PF00805.14; Description =Pentapeptide repeats (8 copies)
  Pfam annotation: Domain name=Pentapeptide; Domain location=209-248; Score=37.5; E_value=5.4e-08; Accession=PF00805.14; Description =Pentapeptide repeats (8 copies)
  Pfam annotation: Domain name=Pentapeptide; Domain location=254-293; Score=50.3; E_value=7.5e-12; Accession=PF00805.14; Description =Pentapeptide repeats (8 copies)
  Pfam module annotation: Pfam domain module=K_tetra::Pentapeptide::Pent apeptide::Pentapeptide::Pentapeptide; Domain location=12-103::129 -168::169-208::209-248::254-293
MQSPESSSSSSVLLNIGGKKYATTVETLTQREPDSMLAAMFSGRHTLPHHPTTGTVFVDRDGKHFRHVLNWLRDGAIPVLSESEYQQLLREAEYYQLLGLADYINERLGWKKVDSSEAELTRKDVIKCIQAQRVRFRGVNLSGLDLSKLDLSEVDFSYACIKNTDFSCANLYKAKFGQVEASSSSFQNAILRECEFVGANLQDSILDGANLRSANLQDACLTRCSFIETDLHSAHLQTANLTSANLSGANLEAANLKGAKLSGTNLQGANLQRAYLREVDLRDTLLTGAKLGGANLLGAIR

SEQ ID NO: 98561 - protein, 63 aa, Setaria italica
  misc_feature (55)..(55): Xaa can be any naturally occurring amino acid
  Transcript Sequence Number=SeqID_32587
  Homolog annotation: Hit_ID=O04530; Match level="QueryCoverage=100%, HitCoverage=9%, E-value=4e-11, Identity=60%"; Hit description =F20P5.12 protein
MDLYVFATPYRIAWDYYMRSNENHTFEIKAWEEAAELEYVKQHGIAVFLMPSGMXGTLLSLID

SEQ ID NO: 98562 - protein, 82 aa, Setaria italica
  Transcript Sequence Number=SeqID_32588
  Gene Ontology: Mol. function=ribonuclease III activity
  Homolog annotation: Hit_ID=B6SGY5; Match level="QueryCoverage=43%, HitCoverage=20%, E-value=1e-09, Identity=80%"; Hit description=RNA binding protein
  Subcellular localization annotation: CTP_CleavageSite=61; ConfidenceScore=5.18e-01
MATPPPPILLCLLLLVASPFLPRAAAAAGPAPLSSSSFDAGLAKLQARIGYAFRAPDLLRRAMTHASYSRENGRALAVLGLA

SEQ ID NO: 98563 - protein, 140 aa, Setaria italica
  Transcript Sequence Number=SeqID_32589
  Gene Ontology: Mol. function=structural constituent of ribosome; Cellular component=ribonucleoprotein complex; Biological process =translation
  Homolog annotation: Hit_ID=Q9TJN6; Match level="QueryCoverage=80%, HitCoverage=82%, E-value=1e-38, Identity=76%"; Hit description=30S ribosomal protein S17, chloroplastic
  Pfam annotation: Domain name=Ribosomal_S17; Domain location=42-110; Score=122.7; E_value=1.2e-33; Accession=PF00366.12; Description =Ribosomal protein S17
  Subcellular localization annotation: CTP_CleavageSite=33; ConfidenceScore=5.34e-01
MLLSSPFVVSPPPLRVSPSPQQPQGCRPVGLLRIEAAKQLTGRVVTTKADKTVGVEVVRLAPHPKYKRRERIKKKYQAHDPENQFKVGDVVELRSSRPISKTKHFVAIPLPPRDTRRKSQLLPPLQSQADGDQPPPSTAD

SEQ ID NO: 98564 - protein, 153 aa, Setaria italica
  Transcript Sequence Number=SeqID_32590
  Gene Ontology: Mol. function=aspartate-tRNA ligase activity; Cellular component=cytoplasm; Biological process=tRNA aminoacylation for protein translation
  Homolog annotation: Hit_ID=B6RMV6; Match level="QueryCoverage=60%, HitCoverage=46%, E-value=4e-19, Identity=46%"; Hit description =Aspartyl transcarbamylase (Fragment)
MSSEPPPTAASASPADELATDLSAATLSKKQLKKDARKAEKAEKAAQRQQQQQQPADAEDPFAANYGDVPVEEIQSKAISGRSWTKIGDLDAAAAGRSVLIRGATQAIRPVSKKMAFVVLRQSMSTVQCVLVASADAGVSTQMVRFATALSKE

SEQ ID NO: 98565 - protein, 463 aa, Setaria italica
  misc_feature (79)..(79): Xaa can be any naturally occurring amino acid
  Transcript Sequence Number=SeqID_32591
  Gene Ontology: Mol. function=aspartate-tRNA ligase activity; Cellular component=cytoplasm; Biological process=tRNA aminoacylation for protein translation
  Homolog annotation: Hit_ID=B9SBT1; Match level="QueryCoverage=99%, HitCoverage=84%, E-value=0.0, Identity=73%"; Hit description =Aspartyl-tRNA synthetase, putative
  Pfam annotation: Domain name=tRNA-synt_2; Domain location=137-459; Score=310.9; E_value=2.6e-90; Accession=PF00152.12; Description=tRNA synthetases class II (D, K and N)
  Pfam annotation: Domain name=tRNA_anti; Domain location=14-102; Score= 26.9; E_value=8.1e-05; Accession=PF01336.17; Description=OB-fold nucleic acid binding domain
  Pfam module annotation: Pfam domain module=tRNA-synt_2::tRNA_anti; Domain location=137-459::14-102
  Subcellular localization annotation: CTP_CleavageSite=47; ConfidenceScore=5.60e-01
LTRLLDAAAAGRSVLIRGATQAIRPVSKKMAFVVLRQSMSTVQCVLVASADAGVSTQMVRFATALSKESIVDVEGVVSXLPKEPLKATTQQVEIQVRKIYCINRAIPTLPINLEDAARSEAEFEKAEQAGEKLVRVGQDTRLNYRAIDLRTPANQAIFRIQCQVENKFREFLLSKDFVGIHTPKLISGSSEGGAAVFKLLYNGQPACLAQSPQLYKQMAICGGYERVFEVGPVFRAENSNTHRHLCEFVGLDAEMEIKEHYFEVCDIIDGLFVSIFKHLTENCKKELETINRQYPFEPLQYLEKTLKLTYEEGIQMLKEAGTEIEPMGDLNTEAEKKLGRLVKEKYGTDFFILYRYPLAVRPFYTMPCYDNPAYTNSFDVFIRGEEIISGAQRIHTPELLAKRATECGIDVSTISAYIESFSYGAPPHGGFGVGLERVVMLFCALNNIRKTSMFPRDPQRLVP

SEQ ID NO: 98566 - protein, 163 aa, Setaria italica
  misc_feature (55)..(55): Xaa can be any naturally occurring amino acid
  misc_feature (142)..(142): Xaa can be any naturally occurring amino acid
  misc_feature (155)..(155): Xaa can be any naturally occurring amino acid
  Transcript Sequence Number=SeqID_32592
  Homolog annotation: Hit_ID=Q01IY4; Match level="QueryCoverage=65%, HitCoverage=38%, E-value=4e-46, Identity=77%"; Hit description =OSIGBa0106G07.13 protein
RQTLRLRPLTSRARPPSSLLVPIPPSLPAADPAEAGPTSSGGGTTGEVRGGRSAXPMASWHDGLAAPPRVLISPRPSDASAQGNVLSLRHPRSGDETGYLFIDGQLQEINWFKERYGAWFLGDYVCEDGGLYYCTPVDPIFXFLPTFEAARMSNXEDPGKFRQ

SEQ ID NO: 98567 - protein, 359 aa, Setaria italica
  Transcript Sequence Number=SeqID_32593
  Gene Ontology: Mol. function=rRNA (adenine-N6,N6-)-dimethyltransferase activity; Cellular component=nucleus; Biological process=rRNA modification
  Homolog annotation: Hit_ID=B6TPK7; Match level="QueryCoverage=100%, HitCoverage=100%, E-value=1e-178, Identity=88%"; Hit description =Dimethyladenosine transferase
  Pfam annotation: Domain name=Methyltransf_11; Domain location=61-155; Score=14.4; E_value=0.0042; Accession=PF08241.4; Description =Methyltransferase domain
  Pfam annotation: Domain name=Methyltransf_12; Domain location=61-149; Score=10.0; E_value=0.056; Accession=PF08242.4; Description =Methyltransferase domain
  Pfam annotation: Domain name=RrnaAD; Domain location=27-289; Score =254.0; E_value=3.6e-73; Accession=PF00398.12; Description=Ribosomal RNA adenine dimethylase
  Pfam module annotation: Pfam domain module=Methyltransf _11::Methyltransf_12::RrnaAD; Domain location=61-155::61-149::27-289
MAWGKIQKKRHGAAGGAGGGGGRLQGGIPFEKSKGQHILRNPALVDSIVAKAGLKPTDTVLEIGPGTGNLTKRLLEAGVKAVVAVELDPRMVLELNRRFQGHPLSSRLKVIQGDVLKCDLPYFDICVANIPYQISSPLTFKLLSHRPIFRCAVIMFQREFAMRLVAQPGDSLYCRLSVNVQLLSRVSHLLKVGRNNFRPPPKVDSSVVRIEPRKPLPPVSFKEWDGLVRICFNRKNKTLGSIFKQKRVLELLEKNYKTMQSLQLTQDAEMGEEKMSADDVALLANMVEDLSMETGDEKEDDEMEMDDADMVGGGAASFKEKIMGILQQGDFAEKRGSKLGQDDFSNLLSLFNKAGIHFS

SEQ ID NO: 98568 - protein, 101 aa, Setaria italica
  Transcript Sequence Number=SeqID_32594
  Subcellular localization annotation: CTP_CleavageSite=38; ConfidenceScore=5.11e-01
ISIKKSNPIIKSRTYFMSQAFFGILGQRPSRSFLDCTRLGNLQGLGIDITLAGRVSLQEEITAQQPLRTAEGLAVAAEREHFSSNIWFTGALTANECKQQH

SEQ ID NO: 98569 - protein, 88 aa, Setaria italica
  Transcript Sequence Number=SeqID_32595
  Subcellular localization annotation: CTP_CleavageSite=56; ConfidenceScore=5.36e-01
AEQPAAICCKPSRPTLSLPQALSSDAVPHRTDHCQATSTAMVRCKQPNLTTMQQPLAATITSNTCTWARQHPFSSPRGRVAALGYDLP

SEQ ID NO: 98570 - protein, 66 aa, Setaria italica
  Transcript Sequence Number=SeqID_32596
CILQMAAASQGICKIHDPTNTKHLNRALMTYDVLRSLFSPQIQYFLCCPPAEVPHLLRMRMKKSFV

SEQ ID NO: 98571 - protein, 369 aa, Setaria italica
  Transcript Sequence Number=SeqID_32597
  Gene Ontology: Mol. function=cysteine-type peptidase activity; Cellular component=nuclear membrane; Biological process=proteolysis
  Homolog annotation: Hit_ID=B6U6F6; Match level="QueryCoverage=96%, HitCoverage=72%, E-value=1e-147, Identity=72%"; Hit description=SUMO protease
  Pfam annotation: Domain name=Peptidase_C48; Domain location=183-368; Score=173.9; E_value=4.6e-49; Accession=PF02902.11; Description=Ulp1 protease family, C-terminal catalytic domain
GAFPHSSPTPPPPRTLGLEQYVELVNTVSRPAPPTPTATTDAAREKEAVPLEVVAIEEDGDERKQQDEQEVVSGSVEVRRVPLYKELYEESSRKRDAKLKTLEFEVRLAEEGRLGLERLADFLPRITPKKEEVPEPFVPLTDEDEEIVRAALHGRNSREKLAVHEPSNIVITREILQCLNNQEWLNDEVINLYLDLLKERELRQPSKFLKCHFFNTFFYKKLISGGYDYKAVRRWTTKRKLGYSLIECDKIFVPIHKEVHWCLAVINIKDKKFQYLDSLGSMDMKVLRILARYFVDEVKDKGGQQIDALSWKQEGVKNLPLQENGWDCGMFMLKYIDFYSRDMDLIFGQKHMRYFRRRTAKEILNLRAE

SEQ ID NO: 98572 - protein, 123 aa, Setaria italica
  Transcript Sequence Number=SeqID_32598
  Homolog annotation: Hit_ID=Q2QP06; Match level="QueryCoverage=82%, HitCoverage=15%, E-value=3e-29, Identity=66%"; Hit description =Calmodulin-binding protein, putative, expressed
  Subcellular localization annotation: CTP_CleavageSite=34; ConfidenceScore=5.37e-01
PSSSRRLPWSSNDDGDSGAGGELSRPRRRWQSVMLQVRGTRMKTTTEGLFGFRRIMEPEFMGMLLPVFGSMLRRVVSEEVEKAMFRQFSAPASPPRLLVDWNQRPRYQLAFLNGLKPVYTMTK

SEQ ID NO: 98573 - protein, 123 aa, Setaria italica
  misc_feature (32)..(32): Xaa can be any naturally occurring amino acid
  Transcript Sequence Number=SeqID_32599
LGNYIHPLKDPHVHRQLPNLMSDLWNQQQSLXNANLVNSTFHHQIADSILQIPKVSSTCIDCLCWKPSIHGICSTKEAYKYLSAQTTHSLPNQGPRAISSDALSILNRIWQHKTIPPRIKAFA

SEQ ID NO: 98574 - protein, 92 aa, Setaria italica
  Transcript Sequence Number=SeqID_32600
KILQEYVYLVCCVIAILLLLCLCDAEGSSGLPTKDPSASLHKVRQDEANLSRYLFTAGISSILLAIMAILFKLRRHRKRLVVESLCGRGGCL

SEQ ID NO: 98575 - protein, 110 aa, Setaria italica
  Transcript Sequence Number=SeqID_32601
  Gene Ontology: Mol. function=oxidoreductase activity; Cellular component=extracellular region; Biological process=oxidation reduction
  Homolog annotation: Hit_ID=Q339K6; Match level="QueryCoverage=91%, HitCoverage=16%, E-value=8e-45, Identity=82%"; Hit description =Laccase-15
  Pfam annotation: Domain name=Cu-oxidase_2; Domain location=1-88; Score=105.3; E_value=2.1e-28; Accession=PF07731.6; Description =Multicopper oxidase
QGDSNPMHLHGHDMYLLAQGLGNYDAAKDVARYNLVNPPMKNTVHVPNLGWAAVRFVADNPGVWFMHCHYEFHLSMGMAAVFIVEDGPTTGRSLPPPPMDFATCGNYESL

SEQ ID NO: 98576 - protein, 120 aa, Setaria italica
  misc_feature (48)..(48): Xaa can be any naturally occurring amino acid
  Transcript Sequence Number=SeqID_32602
  Gene Ontology: Mol. function=peptide-N4-(N-acetyl-beta-glucosaminyl)as paragine amidase activity
  Homolog annotation: Hit_ID=B6UCE2; Match level="QueryCoverage=85%, HitCoverage=17%, E-value=1e-18, Identity=47%"; Hit description =Peptide-N4-asparagine amidase A
PTPQDVWFVDANLHLWLDPRCAATTAGVVSYDAPPLDTTIAFRPEGPXNEFYYTTAFRHVSASGWVQTASYGRITAAWTQRLGYENTNRIQDGSLQAVNQTTDAYSGAHVADPAGVLYSQ

SEQ ID NO: 98577 - protein, 62 aa, Setaria italica
  Transcript Sequence Number=SeqID_32603
LACQSNMIAEFVASGVKITLLVPMLDGDIYPQKHSLFSAALEFSLVALEDILFIAFKILETI

SEQ ID NO: 98578 - protein, 107 aa, Setaria italica
  Transcript Sequence Number=SeqID_32604
  Gene Ontology: Mol. function=Rho guanyl-nucleotide exchange factor activity
  Homolog annotation: Hit_ID=B4F9P8; Match level="QueryCoverage=100%, HitCoverage=22%, E-value=3e-31, Identity=61%"; Hit description =Pollen-specific kinase partner protein
INSGILSEMQVPLSYLETLPKSGRVGVGDAIYRYMSSGDQFSPEHLLNFLNLSSEHEALEIADRVEAAMYVWRRKASTTHVVSKWENVTELNADGDKNLVLASRARS

SEQ ID NO: 98579 - protein, 145 aa, Setaria italica
  Transcript Sequence Number=SeqID_32605
  Gene Ontology: Mol. function=Rho guanyl-nucleotide exchange factor activity
  Homolog annotation: Hit_ID=B4F9P8; Match level="QueryCoverage=77%, HitCoverage=23%, E-value=1e-32, Identity=63%"; Hit description =Pollen-specific kinase partner protein
  Pfam annotation: Domain name=PRONE; Domain location=1-129; Score= -251.8; E_value=0.0024; Accession=PF03759.5; Description=PRONE (Plant- specific Rop nucleotide
PIPSCAFLSPVACLRLEIADRVEAAMYVWRRKASTTHVVSKWENVTELNADGDKNLVLASRARSLLLCLKQRFPGLSQTTLDTSRIQYNKDIGQAILDSYSRVLESLAHNIVSWIDDILIADENAKKGHKIRMQKQVFTQLSPQR

SEQ ID NO: 98580 - protein, 145 aa, Setaria italica
  misc_feature (10)..(10): Xaa can be any naturally occurring amino acid
  misc_feature (37)..(37): Xaa can be any naturally occurring amino acid
  Transcript Sequence Number=SeqID_32606
  Gene Ontology: Cellular component=integral to membrane; Biological process=auxin mediated signaling pathway
  Homolog annotation: Hit_ID=Q651V6; Match level="QueryCoverage=97%, HitCoverage=21%, E-value=9e-39, Identity=64%"; Hit description =Probable auxin efflux carrier component 2
LAQPGSGARXPGLDEQVANKFASGKQGSDATAYPAPXPGMMPPPRKKELGGSNSNSNKELHMFVWSSSASPVSEANLRNAVNHAASTDFAGVPPPAAPVDGATPKGVSGTVTPIKKVDAAAAANGDVEIEDGLKSPATGLGAKFP

SEQ ID NO: 98581 - protein, 208 aa, Setaria italica
  misc_feature (35)..(35): Xaa can be any naturally occurring amino acid
  Transcript Sequence Number=SeqID_32607
  Gene Ontology: Mol. function=protein serine/threonine kinase activity; Cellular component=ubiquitin ligase complex; Biological process=ubiquitin-dependent protein catabolic process
  Homolog annotation: Hit_ID=B9RK56; Match level="QueryCoverage=72%, HitCoverage=19%, E-value=2e-24, Identity=35%"; Hit description=ATP binding protein, putative
RRAARWAAATMVPAGGRVALVHVIPPVSFVPSPSXGERVPVEKMEREVVEIYAQDRRARAQEVFLPFRRLCARRTVETVVLEGDSVAEALVSYAAESGVRSLVVGSASLSWLRRMLRIQDVPFMVLKTMPSSCNVFVVSRRRLTMKFANLARTSKSNNSKIQSISHKAFNQIQRDWLQDKQSLNNLADDEIPKYSGNSSSDSCSQVCS

SEQ ID NO: 98582 - protein, 99 aa, Setaria italica
  Transcript Sequence Number=SeqID_32608
  Gene Ontology: Mol. function=nucleoside-triphosphatase activity
  Homolog annotation: Hit_ID=Q259B3; Match level="QueryCoverage=86%, HitCoverage=9%, E-value=8e-21, Identity=79%"; Hit description =H0901F07.7 protein
LADFAATAAGRAACVEGRVAVGRSREESERLIEQTAAAVFLSAPLDFAGVEDVSAVVAAATGGRLLAVREICAVGRSIRAARGVFDQLQSLAEETQDGR

SEQ ID NO: 98583 - protein, 305 aa, Setaria italica
  misc_feature (26)..(26): Xaa can be any naturally occurring amino acid
  misc_feature (36)..(36): Xaa can be any naturally occurring amino acid
  Transcript Sequence Number=SeqID_32609
  Homolog annotation: Hit_ID=A6MZW8; Match level="QueryCoverage=75%, HitCoverage=80%, E-value=8e-56, Identity=53%"; Hit description=DNA binding protein (Fragment)
  Subcellular localization annotation: CTP_CleavageSite=66; ConfidenceScore=5.73e-01
KSCRISSSSPNQPASTTQQKQKNNRXQQQSRQNQQXRNQGSQQAKLMKSLGRGNMLMPQTPIDSTPANAASTPPKKHVPEKLVQHGQGVFPANTVPTPSTPQPGNQPKLVTSLPQSPKKVQDIGNQGLMQGSLSQTLLATQQAPLPSKSTLTTQLQQRQINPSQNSIERAMVQQNRQMNSDCRTDLHIDQVQHNQMVPTSLPQSADSGSPVVPLVNPQKQEVSHNPASVTPSSKLLTSPKDPSLGNETLSSQELLQRQVSGGFPIHGHGVVGQWNQQARQLLQSQHQQRPVVQGSVYTPSNSGPG

SEQ ID NO: 98584 - protein, 184 aa, Setaria italica
  Transcript Sequence Number=SeqID_32610
  Gene Ontology: Biological process=DNA repair
  Homolog annotation: Hit_ID=Q6JDV7; Match level="QueryCoverage=39%, HitCoverage=10%, E-value=3e-17, Identity=61%"; Hit description=DNA -directed polymerase kappa
LLQKAAFLCALFSEGSADFFLSVGLGLGGTETPEQRQRKSISCERTFTATSDSSLLFDKLANLAGATTDDLQRGCGGARARGRSCLLHHLSLLATAVQAHVGHLVLVPRQPPSPALPCRTEQGRRQLAADLPWDGPPSASLGSSHARPPERIPWQLTCAAPRQRVPRHPSVVLTKGLKGKTLTL

SEQ ID NO: 98585 - protein, 74 aa, Setaria italica
  misc_feature (58)..(58): Xaa can be any naturally occurring amino acid
  Transcript Sequence Number=SeqID_32611
  Subcellular localization annotation: CTP_CleavageSite=22; ConfidenceScore=5.30e-01
MDSPPPPPPSLPPVTLPWPDLLAGAASSTRRLIAAHSRHFLALSSLLLLPLALLLLAXLPCPFLPASASNPAAP

SEQ ID NO: 98586 - protein, 283 aa, Setaria italica
  misc_feature (108)..(108): Xaa can be any naturally occurring amino acid
  Transcript Sequence Number=SeqID_32612
  Gene Ontology: Mol. function=omega peptidase activity; Cellular component=extracellular region; Biological process=glutamine metabolic process
  Homolog annotation: Hit_ID=B6UBJ6; Match level="QueryCoverage=87%, HitCoverage=72%, E-value=1e-116, Identity=81%"; Hit description =Gamma-glutamyl hydrolase
  Pfam annotation: Domain name=Peptidase_C26; Domain location=63-278; Score=131.1; E_value=3.6e-36; Accession=PF07722.5; Description =Peptidase C26
SCQWTRHAAPTLLLPLLLPALLVLALAPSSARAAEPGVIRLPSGKAGARACAAPADPAAYDRPVIGIVSHPGDGAGGRISNGTATSYIGASYVKFVEAAGARVISLVXNEPEERLLEKLSLVNGVLFTGGSEKQGVYFETIKKSFQYALDRNDAGEPFPVFAQCLGFELVSMIVSKDNNILEMFDAQNQASTLQFPSYSFEGTVFQRFDSDLIKKVSTSCLVMQNHRYGISPKRFRENGELSSFFRILTTSPDENGKVYVSTVQANKYPITCTQWHPEKAIFE

SEQ ID NO: 98587 - protein, 111 aa, Setaria italica
  misc_feature (108)..(108): Xaa can be any naturally occurring amino acid
  Transcript Sequence Number=SeqID_32613
  Gene Ontology: Mol. function=protein serine/threonine kinase activity; Biological process=protein amino acid phosphorylation
  Homolog annotation: Hit_ID=C4P7T0; Match level="QueryCoverage=100%, HitCoverage=21%, E-value=2e-56, Identity=94%"; Hit description=CBL -interacting protein kinase 18
  Pfam annotation: Domain name=Pkinase; Domain location=1-110; Score= -39.5; E_value=3.9e-06; Accession=PF00069.17; Description=Protein kinase domain
YFVMEYVRGGELFARVAEGRLREDDARRYFQQLVSSVAFCHARGVFHRDIKPENLLVDDAGDLKVSDFGLSAVADQMRHDGLFHTFCGTPAYVAPEVLSRRGYDAAKXDLW

SEQ ID NO: 98588 - protein, 286 aa, Setaria italica
  misc_feature (38)..(38): Xaa can be any naturally occurring amino acid
  Transcript Sequence Number=SeqID_32614
  Gene Ontology: Mol. function=nucleic acid binding
  Homolog annotation: Hit_ID=Q69NK8; Match level="QueryCoverage=100%, HitCoverage=46%, E-value=1e-128, Identity=77%"; Hit description=Zinc finger CCCH domain-containing protein 59
  Pfam annotation: Domain name=CwfJ_C_1; Domain location=59-180; Score =155.9; E_value=1.2e-43; Accession=PF04677.7; Description=Protein similar to CwfJ C-terminus 1
  Pfam annotation: Domain name=CwfJ_C_2; Domain location=189-285; Score= 99.7; E_value=1e-26; Accession=PF04676.6; Description=Protein similar to CwfJ C-terminus 2
  Pfam annotation: Domain name=zf-CCCH; Domain location=1-20; Score =8.2; E_value=0.13; Accession=PF00642.16; Description=Zinc finger C -x8-C-x5-C-x3-H type (and similar)
  Pfam annotation: Domain name=zf-CCCH; Domain location=26-52; Score =19.2; E_value=0.0044; Accession=PF00642.16; Description=Zinc finger C-x8-C-x5-C-x3-H type (and similar)
  Pfam module annotation: Pfam domain module=CwfJ_C_1::CwfJ_C_2::zf -CCCH::zf-CCCH; Domain location=59-180::189-285::1-20::26-52
KFTSSGSCPRGSKCNFRHDEEAVEHYQRNVCFDFLNKXKCERGLDCKFSHSLETSVGDARPRSERRRAESRCWFCLSSPDVESHLVISIGEAYYCALAKGPLVPNHVLMIPVEHCPSTLMMPAEAEVELGRYKNALAKYFEKQGKTAVYFEWVSQHTRHANLQAVPVPLSKADAVNKIFHIAAKRLGFEFSVVNPGDGAKVARESLISQSESKSSLFYVELPEGKILLHTIDSNEKFPAQFGREVLAGLLSMADRADWRNCKVSNEEEIQMVDDFKQGFREFDPAE

SEQ ID NO: 98589 - protein, 194 aa, Setaria italica
  misc_feature (15)..(15): Xaa can be any naturally occurring amino acid
  misc_feature (137)..(137): Xaa can be any naturally occurring amino acid
  misc_feature (147)..(147): Xaa can be any naturally occurring amino acid
  misc_feature (163)..(163): Xaa can be any naturally occurring amino acid
  Transcript Sequence Number=SeqID_32615
  Gene Ontology: Mol. function=molecular_function; Cellular component =cytoplasm; Biological process=biological_process
  Homolog annotation: Hit_ID=Q8H925; Match level="QueryCoverage=69%, HitCoverage=26%, E-value=8e-50, Identity=73%"; Hit description =Putative WD domain containing protein
  Pfam annotation: Domain name=WD40; Domain location=145-185; Score =32.6; E_value=1.6e-06; Accession=PF00400.24; Description=WD domain, G-beta repeat
REIVCASSEPGSSPXRIFTCDLEGQELEVWAGDRIPKVSDLAVTPDGRHLIFVSCNDIWIRELPKGREWRFREKQAISSLSLSGDGQSLIVNLSSQEIHLWKINESSTVPEKFKGHKQEKFVIRSCFGGSNSLFIAXKKGNLRKRPXIEVLHGHTMIVNCVKXWNPARPHMLASASDDRTVRIWLARKPGSTCS

SEQ ID NO: 98590 - protein, 389 aa, Setaria italica
  Transcript Sequence Number=SeqID_32616
  Gene Ontology: Mol. function=molecular_function; Cellular component =cytoplasm; Biological process=biological_process
  Homolog annotation: Hit_ID=Q8H925; Match level="QueryCoverage=86%, HitCoverage=72%, E-value=1e-147, Identity=68%"; Hit description =Putative WD domain containing protein
  Pfam annotation: Domain name=WD40; Domain location=124-162; Score =28.2; E_value=3.3e-05; Accession=PF00400.24; Description=WD domain, G-beta repeat
  Pfam annotation: Domain name=WD40; Domain location=296-337; Score =18.7; E_value=0.024; Accession=PF00400.24; Description=WD domain, G -beta repeat
  Pfam annotation: Domain name=WD40; Domain location=341-380; Score =49.1; E_value=1.7e-11; Accession=PF00400.24; Description=WD domain, G-beta repeat
  Pfam annotation: Domain name=WD40; Domain location=79-117; Score =43.6; E_value=7.9e-10; Accession=PF00400.24; Description=WD domain, G-beta repeat
  Pfam module annotation: Pfam domain module=WD40::WD40::WD40::WD40; Domain location=124-162::296-337::341-380::79-117
AMVSCEGAVAPDAVVGWGIAVFLDLVEVLPPWFHVPTGRLEHLVESAVTKQVASCIYHNLPDEITMLEDHKCHEQHIPSECAQILCGHNNEVWFVRFSNNGDYLASSSSDCTAIIWKVEKDDTLTKKHCLQGHHKPISFVAWSPNDRMLLTCGTGEFLKLWNVDTGECNLKFRGSADYIISSCAWFPNSEKIVCASSEPGSSPNRIFTCDLEGQELEVWAGDRIPKVSDLAVTPDGRHLIFVSCNDIWIRELPKGREWRFREKQAISSLSLSGDGQSLIVNLSSQEIHLWKINESSTVPEKFKGHKQEKFVIRSCFGGSNSLFIASGSEDSQVYIWKRHLETPIKVLHGHTMIVNCVSWNPARPHMLASASDDRTVRIWLARKPGSTCS

SEQ ID NO: 98591 - protein, 56 aa, Setaria italica
  Transcript Sequence Number=SeqID_32617
IWDLCCKWQTHNCISMSLFLLDYVNQEIIRLMVSAFSLISFLTCFPGQPILYIVFQ

SEQ ID NO: 98592 - protein, 235 aa, Setaria italica
  Transcript Sequence Number=SeqID_32618
  Gene Ontology: Mol. function=heat shock protein binding; Cellular component=chloroplast envelope
  Homolog annotation: Hit_ID=C0LN96; Match level="QueryCoverage=88%, HitCoverage=75%, E-value=2e-81, Identity=69%"; Hit description=BAX.1
  Pfam annotation: Domain name=DnaJ; Domain location=45-95; Score=-8.5; E_value=0.031; Accession=PF00226.23; Description=DnaJ domain
VALPPRLRGPRCSISLSIGGGGSASEDRGFSYEHVPVFPRYRLRDPYKLLGVDRDASEEEIRGARNFLVQQYAGHEPSEEAIEGAYEKIIMKSYQQRKKTKINLKTKLKKRVEESPSWVKALIGYFEVPSMDIISRRLFFFAFIAGWSIATSAENGPAFQLAISLFSCIYFLNDKMKNLLRASTTGFGVLVGGWIIGSLLVPLIPTFIIPPSWSLELLTSLVAYVFLFLGCTFLK

SEQ ID NO: 98593 - protein, 109 aa, Setaria italica
  Transcript Sequence Number=SeqID_32619
APDHLPIDRSVGPQRPEHISQHFSTVLNMLRYQMSSTGLSSEIRAPDRRAYQIRRPDPHAPITAARGAPPCAVPCRAIATEGRSVAARSGQCDGYKQMSEQSSRMTVHG

SEQ ID NO: 98594 - protein, 140 aa, Setaria italica
  misc_feature (83)..(83): Xaa can be any naturally occurring amino acid
  Transcript Sequence Number=SeqID_32620
  Gene Ontology: Cellular component=chloroplast
PAAPRGRGSLTVRLGPEPATLWEDLVSSAGLVLDAFLLPQVATNAFASVAGAAGVRALSPWFYVGGTVVRAMPHVYDVIRARXGYVPNLRPSYVYASPRYDRFGAGWDVAVPCGATLLAVLVFLQQRVRLAAAPLFPSRR

SEQ ID NO: 98595 - protein, 212 aa, Setaria italica
  Transcript Sequence Number=SeqID_32621
  Gene Ontology: Cellular component=mitochondrion
  Homolog annotation: Hit_ID=B6SVF2; Match level="QueryCoverage=99%, HitCoverage=38%, E-value=1e-113, Identity=89%"; Hit description=GTP binding protein
  Pfam annotation: Domain name=PPR; Domain location=129-163; Score =35.6; E_value=2e-07; Accession=PF01535.12; Description=PPR repeat
  Pfam annotation: Domain name=PPR; Domain location=164-198; Score =23.3; E_value=0.00099; Accession=PF01535.12; Description=PPR repeat
  Pfam annotation: Domain name=PPR; Domain location=24-58; Score=30.7; E_value=6e-06; Accession=PF01535.12; Description=PPR repeat
  Pfam annotation: Domain name=PPR; Domain location=59-93; Score=38.4; E_value=2.9e-08; Accession=PF01535.12; Description=PPR repeat
  Pfam annotation: Domain name=PPR; Domain location=94-128; Score=23.8; E_value=0.00071; Accession=PF01535.12; Description=PPR repeat
  Pfam module annotation: Pfam domain module=PPR::PPR::PPR::PPR::PPR; Domain location=129-163::164-198::24-58::59-93::94-128
NKVKKGHAIYKEMKRKAKFVPDLKTYTVLMEGWGHEKDLLMVRTVYQEMLDAGIRPDVVAFGMLISAFCKSGKCDEAIKVFHEMEVSASMPSPHVYCMLINGLGSEERLDEALKYFQLYKESGFPMEVPTCNAVVGAYCRASKFQHAFKMVDEMRKCKIGPNSRTYDIILHHLIKSQKFEEAYDVFQKMGMDGCEPQLNTYTMMVGMFCSNE

SEQ ID NO: 98596 - protein, 116 aa, Setaria italica
  Transcript Sequence Number=SeqID_32622
  Gene Ontology: Mol. function=drug transporter activity; Cellular component=membrane; Biological process=multidrug transport
  Homolog annotation: Hit_ID=Q10A00; Match level="QueryCoverage=99%, HitCoverage=23%, E-value=1e-33, Identity=61%"; Hit description=MATE efflux family protein, expressed
LPVMLSSGVTALNHLLVCWLLVYKIGMGNKGAALACAISYLINVSILSIYVRLAPACENTRRGFSKEAFHGIPTFLRLAVPSALMVCLEWWSFELLVLLSGLLPNPKLETSVLSIS

SEQ ID NO: 98597 - protein, 77 aa, Setaria italica
  Transcript Sequence Number=SeqID_32623
DPLSSCLDLFVLMRFPPMLIFPNFPTGDLEWVMESAFTSAVARPQSSQMIARAAIKNQDSSIRHFKTDWAYFAHCAK

SEQ ID NO: 98598 - protein, 88 aa, Setaria italica
  Transcript Sequence Number=SeqID_32624
  Gene Ontology: Mol. function=protein serine/threonine kinase activity; Biological process=protein amino acid phosphorylation
  Homolog annotation: Hit_ID=Q2L3U3; Match level="QueryCoverage=100%, HitCoverage=25%, E-value=3e-23, Identity=59%"; Hit description =CLAVATA-like kinase
  Pfam annotation: Domain name=LRR_1; Domain location=16-38; Score =16.4; E_value=0.12; Accession=PF00560.25; Description=Leucine Rich Repeat
  Pfam annotation: Domain name=LRR_1; Domain location=40-62; Score =16.0; E_value=0.15; Accession=PF00560.25; Description=Leucine Rich Repeat
  Pfam annotation: Domain name=LRR_1; Domain location=64-86; Score=9.1; E_value=5.6; Accession=PF00560.25; Description=Leucine Rich Repeat
  Pfam module annotation: Pfam domain module=LRR_1::LRR_1::LRR_1; Domain location=16-38::40-62::64-86
LGGALPSADLRPLGRSLKTLVLSGTNLTGAIPKELGDLAELTTLDLSKNQLSGAIPAELCRLRKLQSLALNTNSLRGAIPDGIGNLTS

SEQ ID NO: 98599 - protein, 105 aa, Setaria italica
  misc_feature (97)..(97): Xaa can be any naturally occurring amino acid
  Transcript Sequence Number=SeqID_32625
  Gene Ontology: Biological process=response to stress
  Homolog annotation: Hit_ID=B6U6A2; Match level="QueryCoverage=100%, HitCoverage=58%, E-value=4e-36, Identity=72%"; Hit description =Universal stress protein family protein
DLCNGIAEAKVEIVVTEGELGETVVATVNNLGATTLVVGLHDKSFLYSAPSPYTRVRSLGCRVLAVRQHATARDGFLNAELTQIETISLHIPPPKIXVPMFTFPL

SEQ ID NO: 98600 - protein, 193 aa, Setaria italica
  Transcript Sequence Number=SeqID_32626
  Gene Ontology: Mol. function=transferase activity, transferring glycosyl groups; Cellular component=integral to membrane; Biological process=cell wall organization and biogenesis
  Homolog annotation: Hit_ID=B6SWB6; Match level="QueryCoverage=100%, HitCoverage=22%, E-value=8e-90, Identity=82%"; Hit description=CSLF3- cellulose synthase-like family F; beta1,3;1,4 glucan synthase
YKVKGALLQPYRLLIIIRLIAVLLFFAWRIRHNKSDVMWFWTMSIVGDVWFGFSWLLNQLPKFNPVKTIPDLVALKRHFDLPDGTSRLPGIDVFVTTANPVDEPILYTMNCVLSILAVDYPVNRLACYLSDDSGALVLYEALVEVGKFAPLWVPFCRKYCIEPRAPESYFEMVAPPQAGRESQEFLNDYRRVQ

SEQ ID NO: 98601 - protein, 92 aa, Setaria italica
  Transcript Sequence Number=SeqID_32627
  Gene Ontology: Mol. function=1,3-beta-glucan synthase activity; Cellular component=1,3-beta-glucan synthase complex
  Homolog annotation: Hit_ID=Q8S5U9; Match level="QueryCoverage=55%, HitCoverage=3%, E-value=7e-18, Identity=84%"; Hit description=1,3 -beta-glucan synthase component family protein, expressed
GCTSRSYSSLRVAYIDEVEDRVGDKKMETAYYSTLVKVALTKDSDSADPVQNLDQVIYRILGLVMVHNFVKNHVSFGTALICNARDGGKWPP

SEQ ID NO: 98602 - protein, 58 aa, Setaria italica
  Transcript Sequence Number=SeqID_32628
  Gene Ontology: Mol. function=1,3-beta-glucan synthase activity; Cellular component=1,3-beta-glucan synthase complex; Biological process=cell wall organization and biogenesis
  Homolog annotation: Hit_ID=Q8S5U9; Match level="QueryCoverage=75%, HitCoverage=2%, E-value=2e-19, Identity=97%"; Hit description=1,3 -beta-glucan synthase component family protein, expressed
MSLHSNIPIAFTILGYNSTLRGGNVTHHEYVQVGKGRDVGLNQISKFEAKVANGNGEQ

SEQ ID NO: 98603 - protein, 124 aa, Setaria italica
  misc_feature (84)..(84): Xaa can be any naturally occurring amino acid
  Transcript Sequence Number=SeqID_32629
  Gene Ontology: Mol. function=transferase activity, transferring glycosyl groups; Cellular component=1,3-beta-glucan synthase complex; Biological process=1,3-beta-glucan biosynthetic process
  Homolog annotation: Hit_ID=UPI0001A7B147; Match level="QueryCoverage =99%, HitCoverage=5%, E-value=3e-43, Identity=66%"; Hit description =ATGSL12 (glucan synthase-like 12); 1,3-beta-glucan synthase/ transferase, transferring glycosyl groups
PECICYIYHHMAFEMYGMLAGNVSALTGEYVKPAYGGEKEAFLRKVVTPIYHTIAKEAERSKREKGNHSEWRNYDDLNEYFWYXFSLGLFVHSLDFILLICRSADCFRLGWPMRADADFLYQPF

SEQ ID NO: 98604 - protein, 96 aa, Setaria italica
  Transcript Sequence Number=SeqID_32630
  Gene Ontology: Mol. function=1,3-beta-glucan synthase activity; Cellular component=1,3-beta-glucan synthase complex; Biological process=1,3-beta-glucan biosynthetic process
  Homolog annotation: Hit_ID=Q8S5U9; Match level="QueryCoverage=88%, HitCoverage=5%, E-value=8e-40, Identity=93%"; Hit description=1,3 -beta-glucan synthase component family protein, expressed
YACCCLTVHHLIFQIAQACKPLARRVGLWGSVRALARAYEIIMGVLLFTPITILAWFPFVSEFQTRMLFNQAFSRGLQISRILGGQKKGRSSRNKD

SEQ ID NO: 98605 - protein, 83 aa, Setaria italica
  misc_feature (23)..(23): Xaa can be any naturally occurring amino acid
  Transcript Sequence Number=SeqID_32631
  Gene Ontology: Mol. function=1,3-beta-glucan synthase activity; Cellular component=1,3-beta-glucan synthase complex; Biological process=1,3-beta-glucan biosynthetic process
  Homolog annotation: Hit_ID=Q8S5U9; Match level="QueryCoverage=100%, HitCoverage=4%, E-value=6e-40, Identity=97%"; Hit description=1,3 -beta-glucan synthase component family protein, expressed
IFTRGEGLQTIDMNQDNYMEEAXLKMRNLLQEFLKEHGVRRPSILGVREHIFTGSVSSLAWFMSNQEHSFVTIGQRLLANPLK

SEQ ID NO: 98606 - protein, 294 aa, Setaria italica
  misc_feature (260)..(260): Xaa can be any naturally occurring amino acid
  Transcript Sequence Number=SeqID_32632
  Gene Ontology: Mol. function=1,3-beta-glucan synthase activity; Cellular component=1,3-beta-glucan synthase complex; Biological process=1,3-beta-glucan biosynthetic process
  Homolog annotation: Hit_ID=Q5Z5B8; Match level="QueryCoverage=98%, HitCoverage=15%, E-value=1e-129, Identity=73%"; Hit description =Putative callose synthase 1 catalytic subunit
KKWCKYLGRKSSLWLPTIQQEMQQRKLLYMGLYLLIWGEAANLRFMPECICYIYHHMAFEMYGMLAGNVSALTGEYVKPAYGGEKEAFLRKVVTPIYHTIAKEAERSKREKGNHSEWRNYDDLNEYFWSADCFRLGWPMRADADFFYQPSNLPDERNESTRKGKQKGKVNFVELRSFWHIFRSFYRLWSFFILALQVMIILAWNGGSLANIFDYTVFKKILSIFITSAILNLGQATLDIIFNWKARRTMEFAVKLRYVPXKFTMAALWVVLLPVTYAYTWENPSGIIRAIKKLV

SEQ ID NO: 98607 - protein, 1452 aa, Setaria italica
  misc_feature (291)..(291): Xaa can be any naturally occurring amino acid
  Transcript Sequence Number=SeqID_32633
  Gene Ontology: Mol. function=1,3-beta-glucan synthase activity; Cellular component=1,3-beta-glucan synthase complex; Biological process=1,3-beta-glucan biosynthetic process
  Homolog annotation: Hit_ID=Q8S5U9; Match level="QueryCoverage=100%, HitCoverage=91%, E-value=0.0, Identity=83%"; Hit description=1,3 -beta-glucan synthase component family protein, expressed
  Pfam annotation: Domain name=Glucan_synthase; Domain location=559 -1322; Score=868.8; E_value=3e-258; Accession=PF02364.7; Description =1,3-beta-glucan synthase component
VMIILAWNGGSLANIFDYTVFKKILSIFITSAILNLGQATLDIIFNWKARRTMEFAVKLRYVLKFTMAALWVVLLPVTYAYTWENPSGIIRAIKNWFGNGRNHPPLFVLSVVLYLSPSMLAAILFLLPFLRRKLESSDFKLVRLIMWWSQPRLFVGRGMHESAFSLFMYTMFWIALLLTKFAFSYYVEIKPLVEPTKDIMKTPIRTFQWHEFFPREKSNIGVVIALWAPIILVYFMDTQIWYTIFSTLLGGIYGAFQRLGEIRTLGMLRSRFDSIPLAINSCLIPVETSDXKRKKGLKSYLHNRFKEMEHADKENIAARFAQMWNEIVTSFREEDLIDNREKELLLVPYVSDQALGVVQWPPFLLASKIPIAVDMAKDSNGKDRDLKKRLANDYYFSCAIEECYASFKNIINDLVQGPQEKRVMNKIFVEVDKCIAEDKVITDLNMRALPDLFNKFVDLVNYLEKNDEKDRSAVIKIFQDMLEVVTRDIFEDQLSILESSHGGSNGRNEGTTTWDQEYQLFQPSGAIRFPLQVTATDAWLEKIKRLELLLTVKESAMDVPSNLEARRRLTFFTNSLFMDMPDAPKVRNMLSFSALTPYYNEPVLFSIKELEEENEDGVSTLFYLQKIYPDEWKNFQERVGWEEEFKETEELKEELRLWASYRGQTLARTVRGMMYYRKALILEAFLDMAKREDLMEGYKAAESVTDEQWKIQQRSLFAQCEAVADMKFTYVVSCQQYGNDKRAALSSAQDILQLMRNYSSLRVAYIDEVEDRVGDKKMETAYYSTLVKVALTKDSDSADPVQNLDQVIYRIKLPGPAMLGEGKPENQNHAIIFTRGEGLQTIDMNQDNYMEEALKMRNLLQEFLKEHGVRRPSILGVREHIFTGSVSSLAWFMSNQEHSFVTIGQRLLANPLKVRFHYGHPDVFDRLFHLTRGGVSKASKSINLSEDIFAGYNSTLRGGNVTHHEYVQVGKGRDVGLNQISKFEAKVANGNGEQTLSRDIYRLGHRFDFFRMLSCYFTTVGFYFSTLLTVVTVYVFLYGRLYLALSGLEEGLSHGRFIHNHPLQVALASQSLVQLGFLMALPMMMEIGLERGFGKALSEFVMMNLQLATVFFTFSLGTKTHYYGRMLLHGGAQYRGTGRGFVVFHAKFAENYRLYSRSHFVKGIELMILLIIYQLFGQSYRSTIAYIFITSSMWFLVLTWLFAPFLFNPSGFEWAKIVDDWSDWNKWISNRGGIGVSPDKSWESWWEVEQEHLKYSGTIGLLVEIILAVRFFIYQYGLVYHLRITRDKSILVYLISWLVIVVVLLVMKTVSVGRRRFSADFQLFFRLIKFLIFVSFIAILIVLIVFLHMALRDIFVCFLAFLPTGWGILLIAQACKPLARRVGLWGSVRALARAYEIIMGVLLFTPITILAWFPFVSEFQTRMLFNQAFSRGLQISRILGGQKKERSSRNKD

SEQ ID NO: 98608 - protein, 59 aa, Setaria italica
  Transcript Sequence Number=SeqID_32634
  Gene Ontology: Mol. function=binding
  Homolog annotation: Hit_ID=B9RTA1; Match level="QueryCoverage=91%, HitCoverage=10%, E-value=7e-18, Identity=77%"; Hit description =Chaperone binding protein, putative
  Pfam annotation: Domain name=TPR_1; Domain location=11-44; Score =18.0; E_value=0.039; Accession=PF00515.20; Description =Tetratricopeptide repeat
MSTTAQDKENVSVLVQRALLYESTEKYRLGAEDLRLVLKIDPTNRLARSTIHRLNKLAD

SEQ ID NO: 98609 - protein, 349 aa, Setaria italica
  Transcript Sequence Number=SeqID_32635
  Gene Ontology: Mol. function=binding; Cellular component=cytoplasm; Biological process=single fertilization
  Homolog annotation: Hit_ID=B9RTA1; Match level="QueryCoverage=96%, HitCoverage=73%, E-value=1e-60, Identity=41%"; Hit description =Chaperone binding protein, putative
  Pfam annotation: Domain name=TPR_1; Domain location=227-260; Score =4.3; E_value=1.8; Accession=PF00515.20; Description=Tetratricopeptide repeat
  Pfam annotation: Domain name=TPR_1; Domain location=267-300; Score =29.6; E_value=1.3e-05; Accession=PF00515.20; Description =Tetratricopeptide repeat
  Pfam annotation: Domain name=TPR_1; Domain location=301-334; Score =18.0; E_value=0.039; Accession=PF00515.20; Description =Tetratricopeptide repeat
  Pfam annotation: Domain name=TPR_2; Domain location=227-260; Score =2.0; E_value=19; Accession=PF07719.9; Description=Tetratricopeptide repeat
  Pfam annotation: Domain name=TPR_2; Domain location=267-300; Score =21.4; E_value=0.0038; Accession=PF07719.9; Description =Tetratricopeptide repeat
  Pfam annotation: Domain name=TPR_2; Domain location=301-334; Score =15.9; E_value=0.17; Accession=PF07719.9; Description=Tetratricopeptid e repeat
  Pfam module annotation: Pfam domain module=TPR_1::TPR_1::TPR_1::TPR _2::TPR_2::TPR_2; Domain location=227-260::267-300::301-334::227 -260::267-300::301-334
  Subcellular localization annotation: CTP_CleavageSite=59; ConfidenceScore=5.71e-01
SAAAPQASRPTGANPNASANSSTFSMGGMASALPKTTAAPMGSGGYGVGGRPMKPAGMAATAGAQPMGQKKDPFGSIDPFAAKPGSMNAAKQASSAKPDQGFGAFQGVSSITNAGFGSFQSADAGFGSFQSSGATKPSSFTSPPPPAPAPTPAAAAANSSVDPLDNLFASTTAAPAATTASNGGGGGDMFGEMDGWVDVEAEFGGGDSGGATTELDGLPPPPSGLTVSAAKSKGMDSYKGGQYADAIKWLSWAVVLIEKSGKDADIVEVLSSRASSYKEVGEYKKAIADCSKVLDQDKENVSVLVQRALLYESTEKYRLGAEDLRLVLKIDPTNRLARSTIHRLNKLAD

SEQ ID NO: 98610 - protein, 103 aa, Setaria italica
  Transcript Sequence Number=SeqID_32636
  Gene Ontology: Mol. function=alpha-L-fucosidase activity; Biological process=carbohydrate metabolic process
  Homolog annotation: Hit_ID=B6U1Y8; Match level="QueryCoverage=100%, HitCoverage=21%, E-value=8e-39, Identity=82%"; Hit description=Alpha- L-fucosidase 1
AEDGRRNGYWIELRRPPEAANRPFNVVRTQEHVALGQRVERHEVYVDGAPVANGTTVGHKRLHRLPRAVAGRAVRIWITARRGPPLLSAVGLHHDPFVEAGAM

SEQ ID NO: 98611 - protein, 111 aa, Setaria italica
  Transcript Sequence Number=SeqID_32637
WKVGYCSSHLVQCLWLYCTAMKKGRHVASGSPWDGIPGLLRRMTTDDALFFVNKRGRLLQFMVALRKFKWKDCHSPPDTKIAFIVDQEVFRRNIIFVVGRNGRLYQYNRIR

SEQ ID NO: 98612 - protein, 208 aa, Setaria italica
  Transcript Sequence Number=SeqID_32638
TSLIGLFLVCWCAHVHTTAMKATLGSYNGSLYLVDVHGNLHIRERNGDELLWINCTAMKKGRHVASGSPWDGIPGLLRRMTTDDALFFVNKRGRLLQFMVALRKFKWKDCHSPPDTKIAFIVDQEVFRRNIIFVVGRNGRLYQYNRITELWHRHYQSPHLILSRSPGTAMRPSPLSLAGSLFMVSEHGGLVEYHFSPQDGWEWVEHGT

SEQ ID NO: 98613 - protein, 108 aa, Setaria italica
  Transcript Sequence Number=SeqID_32639
IWLWLRHEHTTAMKGTLGSYNGSLYLVDVHGNLHIRERNGDELLWINCTAMKKGRHVASGSPWDGIPGLLRRMTTDDALFFVNKRGRLLQFMVEVQTEFNLSHDSLVR

SEQ ID NO: 98614 - protein, 88 aa, Setaria italica
  Transcript Sequence Number=SeqID_32640
  Homolog annotation: Hit_ID=B6U1Y2; Match level="QueryCoverage=97%, HitCoverage=12%, E-value=2e-37, Identity=84%"; Hit description =Ankyrin-like protein
EYPNELSCKLCNVDARADYIPCLDNVQAINKLRSTKHYEHRERHCPEKPPTCLVPLPEGYSNPIRWPKSRDQIWYNNVPDTKLIEYKG

SEQ ID NO: 98615 - protein, 36 aa, Setaria italica
  Transcript Sequence Number=SeqID_32641
MGSGSGHGAAAAAAVVLVSWLCAAVVGVGAIGANWG

SEQ ID NO: 98616 - protein, 52 aa, Setaria italica
  Transcript Sequence Number=SeqID_32642
LAQTAYRQLLLHVTSSDHGYAPIAYYRTHSFLHHRRHYSFPITLNKASEFRR

SEQ ID NO: 98617 - protein, 126 aa, Setaria italica
  Transcript Sequence Number=SeqID_32643
  Gene Ontology: Mol. function=lipoic acid binding; Cellular component =glycine cleavage complex; Biological process=glycine catabolic process
  Homolog annotation: Hit_ID=B6UHJ7; Match level="QueryCoverage=88%, HitCoverage=67%, E-value=7e-40, Identity=76%"; Hit description =Glycine cleavage system H protein 1
  Pfam annotation: Domain name=GCV_H; Domain location=38-126; Score =111.1; E_value=3.8e-30; Accession=PF01597.11; Description=Glycine cleavage H-protein
MNIFVTVALLLPLQFVSHLMLCIFLVLTHFFPSVLKDLKYADTHEWVKVEDGSATIGITDHAQDHLGDVVYVELPEVGNSVYQGKNFGAVESVKATSDINSPVSGEVVEVNGKLSEEPGFGSNCLS

SEQ ID NO: 98618 - protein, 95 aa, Setaria italica
  misc_feature (57)..(57): Xaa can be any naturally occurring amino acid
  Transcript Sequence Number=SeqID_32644
SKDWQNEPVSSRISSARDWNFDSDGAFEGSSHSDCAFGDSDGENCPGAGPGPRMERXLLSSVLKPQGNFVHAKLFAWKDAQVAKLIENDEGSEVC

SEQ ID NO: 98619 - protein, 158 aa, Setaria italica
  Transcript Sequence Number=SeqID_32645
  Gene Ontology: Mol. function=lipoic acid binding; Cellular component =glycine cleavage complex; Biological process=glycine catabolic process
  Homolog annotation: Hit_ID=B6UHJ7; Match level="QueryCoverage=91%, HitCoverage=90%, E-value=2e-60, Identity=81%"; Hit description =Glycine cleavage system H protein 1
  Pfam annotation: Domain name=GCV_H; Domain location=35-155; Score =229.6; E_value=8.1e-66; Accession=PF01597.11; Description=Glycine cleavage H-protein
SLYFVLRPFHPPPSCARHVSAFRYELRFYSILKDLKYADTHEWVKVEDGSATIGITDHAQDHLGDVVYVELPEVGNSVYQGKNFGAVESVKATSDINSPVSGEVVEVNGKLSEEPGLVNASSYDQGWIIKVKLSDSGELSSLMDDEKYLKFCEEEDKH

SEQ ID NO: 98620 - protein, 158 aa, Setaria italica
  Transcript Sequence Number=SeqID_32646
  Gene Ontology: Mol. function=lipoic acid binding; Cellular component =glycine cleavage complex; Biological process=glycine catabolic process
  Homolog annotation: Hit_ID=B6UHJ7; Match level="QueryCoverage=94%, HitCoverage=93%, E-value=2e-77, Identity=93%"; Hit description =Glycine cleavage system H protein 1
  Pfam annotation: Domain name=GCV_H; Domain location=35-155; Score =251.1; E_value=2.7e-72; Accession=PF01597.11; Description=Glycine cleavage H-protein
MAMAASSRLMWASRAAAYLRISTFPRAFSTVMKDLKYADTHEWVKVEGDSATVGITDHAQDHLGDVVYVELPEVGISVSQGKNFGAVESVKATSDINSPVSGEVVEVNEKLSEEPGLVNASPYDKGWIIKVKLSDSGELNSLMDDEKYSKFCEEEDNH

SEQ ID NO: 98621 - protein, 152 aa, Setaria italica
  Transcript Sequence Number=SeqID_32647
  Gene Ontology: Mol. function=protein binding; Cellular component =chromosome; Biological process=regulation of transcription, DNA -dependent
  Homolog annotation: Hit_ID=Q6K7T6; Match level="QueryCoverage=90%, HitCoverage=26%, E-value=7e-39, Identity=60%"; Hit description =Putative tesmin/TSO1-like CXC domain-containing protein
  Pfam annotation: Domain name=CXC; Domain location=1-41; Score=80.5; E_ value=6.1e-21; Accession=PF03638.7; Description=TesminTSO1-like CXC domain
HNKGCHCKKSGCLKKYCECFQANILCSKNCKCMDCKNFDGSEELRAIIQGDNSCDRNNIQQAANVALNGAIGSSGYRFSPVRRKRPPEDPHYQRLNVEGNMMQMQFQEVSHLDASQIASSTGLEGSTGNFHSKSKRLARSLTSLGLVLVILS

SEQ ID NO: 98622 - protein, 105 aa, Setaria italica
  Transcript Sequence Number=SeqID_32648
  Pfam annotation: Domain name=DUF679; Domain location=34-105; Score= -18.9; E_value=1.5e-09; Accession=PF05078.4; Description=Protein of unknown function (DUF679)
MEEGIKAEPKKEGAATDPAKGSTSTVGVMADATFKSIGDVLRLLPTATVIVYEVLNPIVTNTGDCHVGYKIATGILLGLCGFFCAFSTFTDSYVGADGKAKYGLV

SEQ ID NO: 98623 - protein, 56 aa, Setaria italica
  Transcript Sequence Number=SeqID_32649
  Gene Ontology: Mol. function=metal ion binding; Biological process =metal ion transport
YLNHLISSQISTIVLKVDLECERCYKKMRRVLCKIQDKMNIKTISFDVILSAHNQS

SEQ ID NO: 98624 - protein, 91 aa, Setaria italica
  Transcript Sequence Number=SeqID_32650
  Gene Ontology: Mol. function=RNA binding; Cellular component=nucleus; Biological process=rRNA processing
  Homolog annotation: Hit_ID=B6T4G7; Match level="QueryCoverage=57%, HitCoverage=16%, E-value=7e-20, Identity=86%"; Hit description =Fibrillarin-2
STMPAEAVFAAEVEKLKADQFKPSEQVTLEPFERDHACVVGGYRIPKKTTSTKPRLSLDSTKLLQTQHKFNIAAPKPNTCESSFSGIQHII

SEQ ID NO: 98625 - protein, 198 aa, Setaria italica
  Transcript Sequence Number=SeqID_32651
  Gene Ontology: Mol. function=RNA binding; Cellular component=nucleus; Biological process=rRNA processing
  Homolog annotation: Hit_ID=B6T4G7; Match level="QueryCoverage=100%, HitCoverage=64%, E-value=1e-112, Identity=97%"; Hit description =Fibrillarin-2
  Pfam annotation: Domain name=Fibrillarin; Domain location=1-191; Score=437.1; E_value=2.8e-128; Accession=PF01269.9; Description =Fibrillarin
  Pfam annotation: Domain name=FtsJ; Domain location=16-192; Score= -56.6; E_value=0.027; Accession=PF01728.11; Description=FtsJ-like methyltransferase
  Pfam module annotation: Pfam domain module=Fibrillarin::FtsJ; Domain location=1-191::16-192
QNEDGTKVEYRVWNPFRSKLAAAVLGGVDNIWIAPGTRVLYLGAASGTTVSHVSDIVGPDGLVYAVEFSHRSGRDLVNMAKKRTNVIPIIEDARHPARYRMLVGMVDVIFSDVAQPDQARILALNASYFLKNGGHFVISIKANCIDSTMPAEAVFAAEVEKLKADQFKPSEQVTLEPFERDHACVVGGYRMPKKQKAT

SEQ ID NO: 98626 - protein, 306 aa, Setaria italica
  Transcript Sequence Number=SeqID_32652
  Gene Ontology: Mol. function=RNA binding; Cellular component=nucleus; Biological process=rRNA processing
  Homolog annotation: Hit_ID=B6T4G7; Match level="QueryCoverage=78%, HitCoverage=77%, E-value=1e-136, Identity=97%"; Hit description =Fibrillarin-2
  Pfam annotation: Domain name=Fibrillarin; Domain location=68-299; Score=582.1; E_value=6e-172; Accession=PF01269.9; Description =Fibrillarin
  Pfam annotation: Domain name=FtsJ; Domain location=124-300; Score= -56.6; E_value=0.027; Accession=PF01728.11; Description=FtsJ-like methyltransferase
  Pfam module annotation: Pfam domain module=Fibrillarin::FtsJ; Domain location=68-299::124-300
MRPPARGRGGRGGRFDGGGRSGGGGRGFGGGRGGRGDRGGRGGGGRTPRGRGGGMRGGRGGGMRGGSKAVVVAHKHAGIFISKSKEDALCTKNMVPGESVYSEKRVSVQNEDGTKVEYRVWNPFRSKLAAAVLGGVDNIWIAPGTRVLYLGAASGTTVSHVSDIVGPDGLVYAVEFSHRSGRDLVNMAKKRTNVIPIIEDARHPARYRMLVGMVDVIFSDVAQPDQARILALNASYFLKNGGHFVISIKANCIDSTMPAEAVFAAEVEKLKADQFKPSEQVTLEPFERDHACVVGGYRMPKKQKAT

SEQ ID NO: 98627 - protein, 128 aa, Setaria italica
  misc_feature (110)..(110): Xaa can be any naturally occurring amino acid
  Transcript Sequence Number=SeqID_32653
  Gene Ontology: Biological process=ubiquitin-dependent protein catabolic process
  Homolog annotation: Hit_ID=B9IC61; Match level="QueryCoverage=85%, HitCoverage=32%, E-value=2e-22, Identity=47%"; Hit description=F-box family protein
  Pfam annotation: Domain name=F-box; Domain location=16-63; Score =25.4; E_value=0.00023; Accession=PF00646.25; Description=F-box domain
SSMVGPEGYGRGWGQTSLGDMPESCVAAVLLYLDPLEICQVACLNRAFRGAASADCIWAAKLPANHRYLAALAAAADDDCGCDGAAEGNGRCCSSAAIKKEIYARLCRPXPFDGGTKEFWIEKDKGGF

SEQ ID NO: 98628 - protein, 50 aa, Setaria italica
  Transcript Sequence Number=SeqID_32654
SSNLYTSSAVFVWLWNLPFKGICKCSLHRFFPCMLWFLIILALYEFKKRY

SEQ ID NO: 98629 - protein, 49 aa, Setaria italica
  Transcript Sequence Number=SeqID_32655
  Subcellular localization annotation: CTP_CleavageSite=33; ConfidenceScore=5.35e-01
TAPSAVTRPPQSPPRPAPPPRLPPATAPPPPPSASSPSSARSPPPSCSR

SEQ ID NO: 98630 - protein, 58 aa, Setaria italica
  Transcript Sequence Number=SeqID_32656
GMFVLYYYSHLVSKSDKQRTTETNRKMNKLQCMASHRTPLAKELCSNLNQPTLSLCAS

SEQ ID NO: 98631 - protein, 95 aa, Setaria italica
  misc_feature (4)..(4): Xaa can be any naturally occurring amino acid
  Transcript Sequence Number=SeqID_32657
PTVXLLGSKSNAMILILNPQPLRDHIQCGEGRSGAPSPTLGLPLPTLGIVSPGLRLCEDAMEVRSWWWRRDWLVPWPPLLGSLSPVGLQVCSELG

SEQ ID NO: 98632 - protein, 265 aa, Setaria italica
  Transcript Sequence Number=SeqID_32658
  Homolog annotation: Hit_ID=Q9M6Q8; Match level="QueryCoverage=66%, HitCoverage=51%, E-value=2e-66, Identity=73%"; Hit description =Putative phloem transcription factor M1
  Subcellular localization annotation: CTP_CleavageSite=34; ConfidenceScore=5.27e-01
IWFPFGLLNYFLTCFLGLISKLFVLLSSSLPSIQSSMGMGQSAQPVAQGGLMAGSQLGQGGIGANQNVSVLGPTAISSAPAMMPTPGMAQPTGVNSLGVTNNSAMNMPIGQHPNAQQLPPKYVRIWEGTLSGQRQGQPVFICKLEGYRSGTASETLAADWPETMQIVRLIAQEHMNNKQYVGKADLLVFRTLNQHGFLGQLQEKKLCAVIQLPSQTLLLSMSDKAGRLIGMLFPGVPTQQPPMQQQQLQQQQQLQQQQLQQQHMH

SEQ ID NO: 98633 - protein, 725 aa, Setaria italica
  misc_feature (71)..(71): Xaa can be any naturally occurring amino acid
  Transcript Sequence Number=SeqID_32659
  Gene Ontology: Cellular component=nucleus; Biological process =regulation of transcription, DNA-dependent
  Homolog annotation: Hit_ID=Q7XYY2; Match level="QueryCoverage=92%, HitCoverage=80%, E-value=1e-170, Identity=51%"; Hit description =Phytochrome and flowering time 1 protein
MAAAAAERQLVVAVEGTAALGPYWSTIVGDYVEKIVRSFCANEVPGQKLAGAPPELALVVFHTHGPYSAFXVQRSGWTKDIDSFLSWLSGIPFSGGGFSEASTCEGLAEALMILQGTPNTTQSHPNHEAQKHCVLVAASNPYPLPTPVYCLPTQSTDHKENTESSKEPSIADAETVAKSFAQCSVSLSVISPKQLPTLKAIYNAGKRNPRAADPSVDHAKNPHFLVLLSENFMEARTALSRPLHGNLAPNQTVTKMDTTPSVTMAGPTSNANPSVNGPMMGRQPVGVGGISTATVKVEPATVPPMVSAPAFSHVTPISNVSSQGISALQTSSPSLISQEANFANDNVQEHKPIIHPVQQPVRPGGHGSLLNNLSQVRLMNSTSLGGGATSMGLPNIGATPIQVHMSNMISSGMTSTPSVISSMSAPGQPISTQQMVQSTAIGSFGSNTSTVSGNSNIAVSSSLPSIQSSMGMGQSAQPVAQGGLMAGSQLGQGGIGANQNVSVLGPTAISSAPAMMPTPGMAQPTGVNSLGVTNNSAMNMPIGQHPNAQQLPPKYVRIWEGTLSGQRQGQPVFICKLEGYRSGTASETLAADWPETMQIVRLIAQEHMNNKQYVGKADLLVFRTLNQHGFLGQLQEKKLCAVIQLPSQTLLLSMSDKAGRLIGMLFPGDMVVFKPQVPTQQPPMQQQQLQQQQQLQQQQLQQQHMHMQPQGLPLQQQPSQMQPIV

SEQ ID NO: 98634 - protein, 343 aa, Setaria italica
  misc_feature (9)..(9): Xaa can be any naturally occurring amino acid
  Transcript Sequence Number=SeqID_32660
  Gene Ontology: Mol. function=cation transmembrane transporter activity; Cellular component=membrane; Biological process=cation transport
  Homolog annotation: Hit_ID=B6TZ73; Match level="QueryCoverage=100%, HitCoverage=83%, E-value=0.0, Identity=89%"; Hit description=Metal tolerance protein C3
  Pfam annotation: Domain name=Cation_efflux; Domain location=49-329; Score=209.7; E_value=7.9e-60; Accession=PF01545.13; Description =Cation efflux family
REYYEKQLXTLRTFEEVEALCMPGEFDSDGSDHGAFDDMVEQKQSEFAMKISNYTNIVLLVFKVYATIRTGSMAIAASTLDSLLDLMAGGILWFTHLSMKRVNIYMYPIGKLRVQPVGIIVFAAIMATLGFQVLVKAIEQLVENKPGAKMTSEQLIWLYSIMLSATAVKLALWFYCKSSGNSIVRAYAKDHYFDVITNVVGLVAAVLGDKFVWWIDPAGAVLLAVYTIVNWSKTVLENAVTLVGRCAPPEMLQMLTYLAMKHDTRVKRVDTVRAYSFGVLYFVEVDIELSEDMPLREAHTIGESLQEKIEKLPEVERAFVHIDFESTHKPEHKVRSRLPATDP

SEQ ID NO: 98635 - protein, 292 aa, Setaria italica
  Transcript Sequence Number=SeqID_32661
  Gene Ontology: Mol. function=protein serine/threonine kinase activity; Cellular component=plasma membrane; Biological process =protein amino acid phosphorylation
  Homolog annotation: Hit_ID=Q01KL3; Match level="QueryCoverage=79%, HitCoverage=54%, E-value=9e-82, Identity=61%"; Hit description =OSIGBa0147J19.12 protein
  Pfam annotation: Domain name=Pkinase; Domain location=3-218; Score =8.7; E_value=5.2e-09; Accession=PF00069.17; Description=Protein kinase domain
  Pfam annotation: Domain name=Pkinase_Tyr; Domain location=2-218; Score=-77.7; E_value=1.5e-08; Accession=PF07714.9; Description =Protein tyrosine kinase
  Pfam module annotation: Pfam domain module=Pkinase::Pkinase_Tyr; Domain location=3-218::2-218
RFCFDRDTQRAPGLRVLENGSLEKYLYGDEEDTAAAPPRLEWKTLHGIAVGTAKGIRYLHEECQQRIVHYDIKPANILLTSDFTPKVADFGLARLGERENTHMSLTGGGRGTPGYAAPELWMALPATEKCDVYSFGMVLFEILGRRRNFDPDHGESKEWFPRWVWERYEQGEIRSVVSCDGIEEADREKAEMMCKVALWCVQFQPAARPTMSSVVRMLEGEMPIVPPVNPFHYLMDSSGGGSTSSGLWSGTYQSSRDTAGRDSEVSSMSPAAKSDDAMIQDVKRTHASVSMI

SEQ ID NO: 98636 - protein, 78 aa, Setaria italica
  Transcript Sequence Number=SeqID_32662
  Gene Ontology: Mol. function=pyruvate kinase activity
  Homolog annotation: Hit_ID=B4FRW5; Match level="QueryCoverage=96%, HitCoverage=13%, E-value=5e-15, Identity=60%"; Hit description =Pyruvate kinase
  Subcellular localization annotation: CTP_CleavageSite=35; ConfidenceScore=5.33e-01
TLTLMASAGTTRPSPYLVAGSSPAARRHVAAHRIRALAAGTTGEAAMDVVSEAELREKGFMGMRKTKLVCTVGPACLD

SEQ ID NO: 98637 - protein, 83 aa, Setaria italica
  Transcript Sequence Number=SeqID_32663
  Subcellular localization annotation: CTP_CleavageSite=68; ConfidenceScore=5.03e-01
MTERITSGLDGNRNSYASQAVNSDFSDETAGPSPSAQSTSSQVSDDHNPLKVNPRNPVFRPFVMSPPQQRQVDNSGLTFVPTG

SEQ ID NO: 98638 - protein, 46 aa, Setaria italica
  Transcript Sequence Number=SeqID_32664
EFVSHPLFQFYLHKGWHAIGFQFKYTSVSCGPFYLGKMVNIFLFHG

SEQ ID NO: 98639 - protein, 58 aa, Setaria italica
  Transcript Sequence Number=SeqID_32665
AGRQEHRRRAQERRAGGHQSAVAAACTASSPTRHCSPRQRARLGRDQLLGLVCPLPIA

SEQ ID NO: 98640 - protein, 142 aa, Setaria italica
  Transcript Sequence Number=SeqID_32666
  Gene Ontology: Mol. function=structural constituent of ribosome; Cellular component=intracellular; Biological process=translation
  Homolog annotation: Hit_ID=B6TJY8; Match level="QueryCoverage=93%, HitCoverage=69%, E-value=9e-31, Identity=56%"; Hit description=60S ribosomal protein L7/L12
MSLCTIARRLCLSRPSSSSRLSAVWAHLYSTEAAKDTGAKKYKYPDVYDPYGPMPPPSEKVVDLADRIAALPPEEIKQIAPALLLRLNQEPPQAISGQGFSFGAQGGSGAGAAKAEEKKAEKTVFDVKLEKFDAAAKIKIIK

SEQ ID NO: 98641 - protein, 43 aa, Setaria italica
  Transcript Sequence Number=SeqID_32667
TWTCLSHNVRSLLCSVDELGHVCLTMLDHFCVLLMFELTLRNY

SEQ ID NO: 98642 - protein, 280 aa, Setaria italica
  Transcript Sequence Number=SeqID_32668
  Gene Ontology: Mol. function=threonine-type endopeptidase activity; Cellular component=proteasome core complex; Biological process =ubiquitin-dependent protein catabolic process
  Homolog annotation: Hit_ID=B4FI86; Match level="QueryCoverage=100%, HitCoverage=100%, E-value=1e-152, Identity=93%"; Hit description =Proteasome subunit beta type
  Pfam annotation: Domain name=Proteasome; Domain location=58-240; Score=235.7; E_value=1.1e-67; Accession=PF00227.18; Description =Proteasome A-type and B-type
MAMKLDMSALETNFAVPCGDDGDGMYFSAEAPDVPSMVLPTCADFDGFQAATKDMVKNKKGTTTLAFIFDKGVIVAADSRASMGGYISSQTVRKIIEINPYMLGTMAGGAADCQFWHRNLGNKCRLHELSNKRRISIAGASKLLANILYSYRGMGLSIGTMIAGWDEKGPGLYYVDSEGARLVGNRFSVGSGSLYAYGILDEGYRFNMSVEEAGELARRAIYGATFRDAASGGCVSVYHVGPDGWKKLSGDDVGELHYHYYPVQKTPVEQEMTDAPSASA

SEQ ID NO: 98643 - protein, 58 aa, Setaria italica
  Transcript Sequence Number=SeqID_32669
SIPSPWHAGLPPVSPGIRLAGVGALAPLRPGACWISPQPAVSREGKRGILVPHLVMHC

SEQ ID NO: 98644 - protein, 58 aa, Setaria italica
  Transcript Sequence Number=SeqID_32670
FAISRTCVINIICLCFIARLHFDTGMAFGKSFFVKTFAQAASGLQPRQSKLAFWTSSY

SEQ ID NO: 98645 - protein, 65 aa, Setaria italica
  Transcript Sequence Number=SeqID_32671
  Subcellular localization annotation: CTP_CleavageSite=15; ConfidenceScore=5.05e-01
ICCLSALRASLLVTRSGASTSRRSLVPCCLPCAWWIACSCLCLPQPSPRCLPFCLLARLNNTQHG

SEQ ID NO: 98646 - protein, 111 aa, Setaria italica
  Transcript Sequence Number=SeqID_32672
  Gene Ontology: Mol. function=transcription regulator activity; Cellular component=nucleus; Biological process=regulation of transcription
  Homolog annotation: Hit_ID=B6T879; Match level="QueryCoverage=88%, HitCoverage=42%, E-value=2e-13, Identity=44%"; Hit description=DNA binding protein
LSPVCLVSPVACLSIKSLKAEKSELRDEKTRLKAERERLEQMLKGVSAAAAPAPFVPHPAATGPSFHPAAFVQAGKFVTYPSYAPPPAFWQWIPPTSLDTSKDPAHWPPVA

SEQ ID NO: 98647 - protein, 232 aa, Setaria italica
  Transcript Sequence Number=SeqID_32673
  Gene Ontology: Mol. function=transcription regulator activity; Cellular component=nucleus; Biological process=regulation of transcription
  Homolog annotation: Hit_ID=Q9FH37; Match level="QueryCoverage=94%, HitCoverage=93%, E-value=3e-45, Identity=50%"; Hit description =Transcription factor ILR3
  Pfam annotation: Domain name=HLH; Domain location=68-119; Score=35.3; E_value=2.4e-07; Accession=PF00010.18; Description=Helix-loop-helix DNA-binding domain
MSCGGQAGGWLLDYGLVEEEIQGSEFMYMVDDPAVSSVILGFDAPRKEDGVQDNPGAKKRSRPESSAPPGTKACREKLRRDRLNERFNELCAILEPGKPPKADKVAILSDAARLLSQLRAEAQKLKQSNESLQDSIKSLKAEKSELRDEKTRLKAERERLEQMLKGVSAAAAPAPFVPHPAATGPSFHPAAFVQAGKFVTYPSYAPPPAFWQWIPPTSLDTSKDPAHWPPVA

SEQ ID NO: 98648 - protein, 107 aa, Setaria italica
  Transcript Sequence Number=SeqID_32674
  Subcellular localization annotation: CTP_CleavageSite=9; ConfidenceScore=5.14e-01
MGATLLQAVAALVGRLQRAARRMAAGAGGAGKGSPPRAVVAPWKKTFSLAPSGKAAREAEAGVWRKEILMGERCQPLDFSGVIYYDAEGRRLAQPPPPRSPMRSPLP

SEQ ID NO: 98649 - protein, 194 aa, Setaria italica
  Transcript Sequence Number=SeqID_32675
  Homolog annotation: Hit_ID=B6TE25; Match level="QueryCoverage=100%, HitCoverage=47%, E-value=3e-88, Identity=84%"; Hit description=HIT zinc finger family protein
DILKRLHLEEEMESDGEDEPMLSEELIQKVMSGEEIKLEDLSDDEIKRFRQALASGELSKMIEPWTPWWKTPSARSIPLSPDGIQLIRQVNTKGTATSDPMTDQEPSINEIPEGPESPLPSLKQLTRAEPSPLLAVHLVDILYSYCFTLRLYNGDWHSDPLGASTVALSMSKVMGEDAKPETVPEALTACIEET

SEQ ID NO: 98650 - protein, 107 aa, Setaria italica
  Transcript Sequence Number=SeqID_32676
  Gene Ontology: Mol. function=calcium ion binding; Cellular component =flagellin-based flagellum; Biological process=ciliary or flagellar motility
  Homolog annotation: Hit_ID=Q5ZD81; Match level="QueryCoverage=100%, HitCoverage=42%, E-value=2e-44, Identity=83%"; Hit description =Probable calcium-binding protein CML12
  Pfam annotation: Domain name=efhand; Domain location=35-63; Score =34.0; E_value=5.9e-07; Accession=PF00036.24; Description=EF hand
  Pfam annotation: Domain name=efhand; Domain location=71-99; Score =40.3; E_value=7.6e-09; Accession=PF00036.24; Description=EF hand
  Pfam module annotation: Pfam domain module=efhand::efhand; Domain location=35-63::71-99
DADGNGTVEFDELASSLAPLLLGPCRPAVAVDQAQLAEAFRAFDRDGNGFISAAELARSMARMGHPICYDELTDMMREADTDGDGVISFQEFTAIMAKSAVDFLGLA

SEQ ID NO: 98651 - protein, 44 aa, Setaria italica
  Transcript Sequence Number=SeqID_32677
MGNSLRCCLACMLPCGALDVVRVVHLSGHVDEFTCPLAAADVLR

SEQ ID NO: 98652 - protein, 303 aa, Setaria italica
  Transcript Sequence Number=SeqID_32678
  Gene Ontology: Mol. function=hydrolase activity; Cellular component =integral to membrane; Biological process=G-protein coupled receptor protein signaling pathway
  Homolog annotation: Hit_ID=B9RYU6; Match level="QueryCoverage=97%, HitCoverage=61%, E-value=1e-123, Identity=68%"; Hit description =Valacyclovir hydrolase, putative
  Pfam annotation: Domain name=Abhydrolase_1; Domain location=56-297; Score=74.2; E_value=4.6e-19; Accession=PF00561.12; Description =alphabeta hydrolase fold
  Pfam annotation: Domain name=DUF1234; Domain location=27-195; Score= -88.2; E_value=0.062; Accession=PF06821.5; Description=AlphaBeta hydrolase family of unknown
  Pfam module annotation: Pfam domain module=Abhydrolase_1::DUF1234; Domain location=56-297::27-195
NPADTDRLFVHVEAPQGGGGAATEEDVLFIHGFISSSGFWTETVLPHVSPAARSRRRLFAVDLLGFGRSPKPADSLYTLREHVEMIERSVIERHGVRSFHIVAHSLGSILALALAVKYPAAVRSLTLVAPPYFPVPRGEVGTQYVLRTVAPRRVWPPIAFGASVACWYEHLSRTVSIVLCKHHRLWELAFRVFTLYRVRTYLMDGFFCHTHIASWHTLHNIICGSAGKIDKCLEVVRDQLTCDVTIYHGRDDELLPVQCSYAVKAKVPRAQVKVIDGKDHVTIVVGRQKDLARELEEIWDRKR

SEQ ID NO: 98653 - protein, 214 aa, Setaria italica
  misc_feature (59)..(59): Xaa can be any naturally occurring amino acid
  Transcript Sequence Number=SeqID_32679
  Gene Ontology: Mol. function=protein binding; Cellular component =cytoplasm; Biological process=vesicle docking during exocytosis
  Homolog annotation: Hit_ID=B6U2C0; Match level="QueryCoverage=100%, HitCoverage=32%, E-value=1e-111, Identity=89%"; Hit description =SNARE-interacting protein KEULE
LTVKIMSFSCKMADITEERVSLVEDLYKQRQPLPSMDAIYFMQPTKENIRIFMSDMSGXNPLYKKAYVFFSSPIQGDLLAHIKKESTVLTRISALSEMNLEYFAIDSQGFVTDHDKALAELFTEDAECSHKYNACLNTMGTRIATVFASMREFPRVHYRVARTIDASTLTTLRDLVPTKLAASVWNCLARYKSTIPEFPQTETCELLIVDRSID

SEQ ID NO: 98654 - protein, 97 aa, Setaria italica
  Transcript Sequence Number=SeqID_32680
  Gene Ontology: Mol. function=binding
QGMLAEALDAISSLVSASLSATLFPLKWQLIRDRLNRLHAGLADITVTGADDDNGEDRCDAFASLLRDVAATAREALELVPRSQGRHYGGGKLRLRS

SEQ ID NO: 98655 - protein, 88 aa, Setaria italica
  Transcript Sequence Number=SeqID_32681
VGEAEVGDPVGGRVRELLAATHGGWRGGGAHGGRWSRTTRRRNWARALGAGGGGIRNSNAQRARLARGRSVGGADGLKKSLWNSGFEF

SEQ ID NO: 98656 - protein, 351 aa, Setaria italica
  Transcript Sequence Number=SeqID_32682
  Gene Ontology: Mol. function=transcription regulator activity; Cellular component=nucleus; Biological process=regulation of transcription, DNA-dependent
  Homolog annotation: Hit_ID=A1IIY3; Match level="QueryCoverage=100%, HitCoverage=57%, E-value=1e-128, Identity=67%"; Hit description =Ethylene signal transcription factor
  Pfam annotation: Domain name=EIN3; Domain location=10-351; Score =687.5; E_value=1.1e-203; Accession=PF04873.5; Description=Ethylene insensitive 3
DVSDEEIEPEDLARRMWKDRVRLRRIKERQQKLALQQAELEKSRPKPISDQAMRKKMSRAQDGILKYMLKLMEVCNARGFVYGIIPDKGKPVSGASDNIRAWWKEKVKFDKNGPAAIEKYESENLVTSNAQSGGIKNQHSLMDLQDATLGSLLSSLMQHCDPPQRKYPLEKGTPPPWWPSGNEEWWIASGLPSGQIPPYKKPHDLKKVWKVGVLTGVIKHMSPNFDKIRNHVRKSKCLQDKMTAKESLIWLGVLQREERLVHRTDNGVLATHHSLLEDRHGETNSSSNEYDVDGFEDAPLSTSSKDDEQDPSPVAQSAENHVPETREGEAYNKRSSQVVPSKAGTKEPPKR

SEQ ID NO: 98657 - protein, 59 aa, Setaria italica
  Transcript Sequence Number=SeqID_32683
  Homolog annotation: Hit_ID=Q10KZ9; Match level="QueryCoverage=88%, HitCoverage=15%, E-value=2e-11, Identity=57%"; Hit description =Nodulation protein, putative, expressed
TKIFDVLDFLKVPKMKLASRHVKIHTKPLSEQIENWDEVYSALNGTQYESFLNAADYIV

SEQ ID NO: 98658 - protein, 207 aa, Setaria italica
  misc_feature (47)..(47): Xaa can be any naturally occurring amino acid
  misc_feature (66)..(66): Xaa can be any naturally occurring amino acid
  Transcript Sequence Number=SeqID_32684
  Gene Ontology: Mol. function=metal ion binding; Cellular component =integral to membrane; Biological process=ubiquitin-dependent protein catabolic process
  Homolog annotation: Hit_ID=B6TA24; Match level="QueryCoverage=97%, HitCoverage=46%, E-value=2e-69, Identity=73%"; Hit description=RING -H2 finger protein ATL2C
  Pfam annotation: Domain name=zf-C3HC4; Domain location=2-43; Score =36.2; E_value=1.3e-07; Accession=PF00097.17; Description=Zinc finger, C3HC4 type (RING finger)
DCAVCLCEFSADDQLRLLPKCSHAFHLECIDTWLLSHSTCPLCRRSXLLAELSPTCSPRVMVLESXSSRDMGAPATRATDDADGEPSGLALAQEGAEEVVEVKLGKFMCVEGNANANAAANVVRGAGTSTDGNCYANAKAGLGQRRCHSMGSYEYVMDERASLRVAIKPPKKKPAVSKSRRGGAMSECEFGASKRGETLLRCVTAMV

SEQ ID NO: 98659 - protein, 78 aa, Setaria italica
  misc_feature (43)..(43): Xaa can be any naturally occurring amino acid
  Transcript Sequence Number=SeqID_32685
  Gene Ontology: Mol. function=binding
  Homolog annotation: Hit_ID=Q7XIB9; Match level="QueryCoverage=84%, HitCoverage=7%, E-value=9e-13, Identity=62%"; Hit description =Putative BLE2 protein
RARAAAKRETRLNWFVCFVAFGEWAGNAFGTLAFLWATVVLLXGGFCTALNAEDFWFATVMIFIEAFRCVTYASLPFI

SEQ ID NO: 98660 - protein, 127 aa, Setaria italica
  Transcript Sequence Number=SeqID_32686
KCGIDTAHSLLGNLSSLGGFSQCSNVNRHVLEKMTAWRYGSFSPGQSELSVVDGEKLHNEIALKTNGNLHLKDHGAGFGMVLSSAGCMAEKGSARYVISEMPPWRQNTFNKGNYHMKTDYSVFDKIS

SEQ ID NO: 98661 - protein, 413 aa, Setaria italica
  misc_feature (77)..(77): Xaa can be any naturally occurring amino acid
  Transcript Sequence Number=SeqID_32687
  Gene Ontology: Mol. function=oxidoreductase activity, acting on the CH-CH group of donors; Cellular component=mitochondrion; Biological process=metabolic process
  Homolog annotation: Hit_ID=B9SK49; Match level="QueryCoverage=91%, HitCoverage=92%, E-value=0.0, Identity=83%"; Hit description=Acyl -CoA dehydrogenase, putative
  Pfam annotation: Domain name=Acyl-CoA_dh_1; Domain location=261-410; Score=214.2; E_value=3.4e-61; Accession=PF00441.16; Description=Acyl- CoA dehydrogenase, C-terminal dom
  Pfam annotation: Domain name=Acyl-CoA_dh_2; Domain location=276-399; Score=50.4; E_value=7e-12; Accession=PF08028.3; Description=Acyl-CoA dehydrogenase, C-terminal doma
  Pfam annotation: Domain name=Acyl-CoA_dh_M; Domain location=154-205; Score=95.5; E_value=1.9e-25; Accession=PF02770.11; Description=Acyl -CoA dehydrogenase, middle domain
  Pfam annotation: Domain name=Acyl-CoA_dh_N; Domain location=35-150; Score=167.6; E_value=3.7e-47; Accession=PF02771.8; Description=Acyl -CoA dehydrogenase, N-terminal domain
  Pfam module annotation: Pfam domain module=Acyl-CoA_dh_1::Acyl-CoA_dh_ 2::Acyl-CoA_dh_M::Acyl-CoA_dh_N; Domain location=261-410::276 -399::154-205::35-150
MQRWLPAILRRAAPAVSGGGGGAARLFSSSSLLFDETQEQFKESVHKFAQEAIAPHAAAIDASNHFPKGVDLWKLMXGDFNLHGLTAPEEYGGMGLGYMYHCIAMEEISRASGSVGLSYGAHSNLCINQLVRHGNPAQKQKYLPKLISGEHVGALAMSEPNSGSDVVSMKCKAEKVDGGYVINGNKMWCTNGPSAQTLVVYAKTDLSAGSKGITAFIIEKGMPGFSTAQKLDKLGMRGSDTCELVFENCFVPHENVLGEEGKGVYVMMSGLDLERLVLAAGPIGLMQACLDAVLPYVRQREQFGRPIGEFQFIQGKMADMYTSLQSSRSFVYSVARDCDNGKVDRKDCAGVILFAAERATQVALQAIQCLGGNGYINEYPTGRLLRDAKLFEIGAGTSEIRRMIIGRELFKED

SEQ ID NO: 98662 - protein, 45 aa, Setaria italica
  Transcript Sequence Number=SeqID_32688
  Gene Ontology: Mol. function=protein serine/threonine kinase activity; Biological process=protein amino acid phosphorylation
  Homolog annotation: Hit_ID=Q6ZI44; Match level="QueryCoverage=84%, HitCoverage=10%, E-value=4e-16, Identity=97%"; Hit description =Serine/threonine-protein kinase SAPK6
MADVWSCGVTLYVMLVGAYPFEDPDDPKNFRKTIGVIVHSFVHQT

SEQ ID NO: 98663 - protein, 198 aa, Setaria italica
  Transcript Sequence Number=SeqID_32689
  Gene Ontology: Mol. function=protein serine/threonine kinase activity; Biological process=protein amino acid phosphorylation
  Homolog annotation: Hit_ID=B6TAU8; Match level="QueryCoverage=89%, HitCoverage=49%, E-value=2e-80, Identity=82%"; Hit description =Serine/threonine-protein kinase SAPK7
MAGSGSGPTRQDWRVIPISMADVWSCGVTLYVMLVGAYPFEDPDDPKNFRKTIGRIVSIQYKIPEYVHVSQDCKELLSRIFVANSAKRITIREIRNHPWFLKNLPRELTEAAQAMYYKKDNSAPTYSVQSVEDIMKIVEKARTPPPSSTPVAGFGWAQEDEEEDSKKPEENAEEEEDGEDEYEKQVKQVHASGEFHIS

SEQ ID NO: 98664 - protein, 364 aa, Setaria italica
  Transcript Sequence Number=SeqID_32690
  Gene Ontology: Mol. function=protein serine/threonine kinase activity; Biological process=protein amino acid phosphorylation
  Homolog annotation: Hit_ID=Q6ZI44; Match level="QueryCoverage=87%, HitCoverage=86%, E-value=1e-175, Identity=91%"; Hit description =Serine/threonine-protein kinase SAPK6
  Pfam annotation: Domain name=Pkinase; Domain location=4-260; Score =303.8; E_value=3.7e-88; Accession=PF00069.17; Description=Protein kinase domain
  Pfam annotation: Domain name=Pkinase_Tyr; Domain location=4-258; Score=-4.4; E_value=2e-13; Accession=PF07714.9; Description=Protein tyrosine kinase
  Pfam module annotation: Pfam domain module=Pkinase::Pkinase_Tyr; Domain location=4-260::4-258
MERYELLKDIGAGNFGVARLMRNKETKELVAMKYIPRGLKIDENVAREIINHRSLRHPNIIRFKEVVLTPTHLAIVMEYAAGGELFDRICSAGRFSEDEARYFFQQLICGVSYCHFMQICHRDLKLENTLLDGSPAPRLKICDFGYSKSSLLHSKPKSTVGTPAYIAPEVLSRREYDGKMADVWSCGVTLYVMLVGAYPFEDPDDPKNFRKTIGRIVSIQYQIPEYVHISQDCRQLLSRIFVANPAKRITIREIRNHPWFLKNLPRELTEAVQAKYYKKDNSAPTFSDQTVEDIMKIVEEARTPPQSSTPVAGFGWAEEDEQEDGKKPDDEDQDGEEEEYDGEDEYDKQVKQVHASGDFRHLIK

SEQ ID NO: 98665 - protein, 147 aa, Setaria italica
  misc_feature (41)..(41): Xaa can be any naturally occurring amino acid
  Transcript Sequence Number=SeqID_32691
  Gene Ontology: Mol. function=protein serine/threonine kinase activity; Biological process=protein amino acid phosphorylation
  Homolog annotation: Hit_ID=Q7X6D5; Match level="QueryCoverage=65%, HitCoverage=12%, E-value=1e-48, Identity=93%"; Hit description =OSJNBa0043L24.25 protein
  Subcellular localization annotation: CTP_CleavageSite=47; ConfidenceScore=5.18e-01
SRTHLQHFPALAPGPAPSPQPQGPIIAHPVHRHHRKRHHAXPTPSSPSSERQDCSGTTCSAPLTSTPIGSPCGCVYPMQIQLDLGVAPYQLFPRIDELEIEVAAGTFLKQSQVRIMGAGSSLQDPEKTTVTIDLVPLGQKFDRTSAS

SEQ ID NO: 98666 - protein, 203 aa, Setaria italica
  Transcript Sequence Number=SeqID_32692
  Gene Ontology: Mol. function=nucleic acid binding; Cellular component= nucleus
  Homolog annotation: Hit_ID=B6T7F3; Match level="QueryCoverage=90%, HitCoverage=71%, E-value=4e-77, Identity=82%"; Hit description =Ribonuclease P
  Pfam annotation: Domain name=Alba; Domain location=18-88; Score =111.8; E_value=2.2e-30; Accession=PF01918.13; Description=Alba
MDRYQRVEKPREESSAIGANEIRITAQGRPRNYITYALALLQDNATDEIVIKAMGRAINKTVVIVELLKRRVAGLHQNTSIESIDITDTWEPLEEGLVTLETTRHVSLITIKLSKKELDTSSPGYQPPIPADQVRSAAEFDQDAEAIPSGRGRGRGRRGRGRGRGFSNGGVDYDDEFGEPEEAPRGYRGRGGRGRGRRWSRFG

SEQ ID NO: 98667 - protein, 153 aa, Setaria italica
  misc_feature (138)..(138): Xaa can be any naturally occurring amino acid
  Transcript Sequence Number=SeqID_32693
  Gene Ontology: Mol. function=nucleotide binding; Biological process =defense response
  Homolog annotation: Hit_ID=Q8LJX9; Match level="QueryCoverage=98%, HitCoverage=15%, E-value=6e-44, Identity=57%"; Hit description =Putative stripe rust resistance protein Yr10
  Pfam annotation: Domain name=NB-ARC; Domain location=1-153; Score= -106.1; E_value=0.0084; Accession=PF00931.14; Description=NB-ARC domain
GGFDCSAFVSVSENPDSKKLLKGLLYDLGKSINEETLDEMRLINILKEFLQDKRYIIVLDDIWDISVWKLMRGALPDNDAGYRIITTTRNFNVGQQVGGTYKLKPLCLHDSKILLYRRIFANEDKDECPDEQLAEVSXKILKKCAGVPLAIIM

SEQ ID NO: 98668 - protein, 95 aa, Setaria italica
  Transcript Sequence Number=SeqID_32694
  Subcellular localization annotation: CTP_CleavageSite=27; ConfidenceScore=5.27e-01
TLVPQLLSVLLRISLLSSPLQSQPSPRETAQRKKVLRSLEHNLPDTSSFGMFRYNSILLPVEEHLSLSISVPPSHTLLPVTQQSSIDLASGGLLF

SEQ ID NO: 98669 - protein, 155 aa, Setaria italica
  Transcript Sequence Number=SeqID_32695
  Homolog annotation: Hit_ID=O04530; Match level="QueryCoverage=89%, HitCoverage=25%, E-value=3e-68, Identity=82%"; Hit description =F20P5.12 protein
EENRVELGRQFAGHTSVCLKDEKGDLWVAESGYENEKGEEVIAVVPWDEWWAMALKDESNPQIALLPLHPDVRARFNESAAWEYVRSMVGKPYGYHNMIFSWIDTIGDNYPPPLDANLVMTVMSMWTRVQPLYAANMWNEALNKRLGTEVCKVRF

SEQ ID NO: 98670 - protein, 102 aa, Setaria italica
  Transcript Sequence Number=SeqID_32696
  Homolog annotation: Hit_ID=O04530; Match level="QueryCoverage=99%, HitCoverage=18%, E-value=4e-43, Identity=80%"; Hit description =F20P5.12 protein
GLDLKGIIMETERRGMSFDQLLTIPEQDEWIYSDGKSTTCVAFILAMYKEAGIFGPFAESIQVTEFTIRDAYMLKIFEDSLARLPSWCNTESDKLPFCQILG

SEQ ID NO: 98671 - protein, 471 aa, Setaria italica
  misc_feature (41)..(41): Xaa can be any naturally occurring amino acid
  Transcript Sequence Number=SeqID_32697
  Homolog annotation: Hit_ID=O04530; Match level="QueryCoverage=89%, HitCoverage=74%, E-value=0.0, Identity=78%"; Hit description =F20P5.12 protein
RRRRGWWTPWGLARGAPASGVSGACFAVNEAAIELTPGDRXGTDVGGAVLRLKTASAQSWTCMDLYVFATPYRITWDYYFAAREHTLEIKSWEEEAELEYVKQHGISVFLMPSGMLGTLLSLIDVLPLFSNTAWGQHSNLAFLEKHMGASFEKRSQPWVANIRKEDIQSGDFLALSKIRGRWGGFETLEKWVTGAFAGHTSVCLKDEKGDLWVAESGYENEKGEEVIAVVPWDEWWAMALKDESNPQIALLPLHPDVRARFNESAAWEYVRSMVGKPYGYHNMIFSWIDTIGDNYPPPLDANLVMTVMSMWTRVQPLYAANMWNEALNKRLGTEGLDLKGIIMETERRGMSFDQLLTIPEQDEWIYSDGKSTTCVAFILAMYKEAGIFGPFAESIQVTEFTIRDAYMLKIFEDSLARLPSWCNTESDKLPFCQILGEYRMELPEYNTVEPYAKMNENCPSLPPTYKRPARC

SEQ ID NO: 98672 - protein, 136 aa, Setaria italica
  Transcript Sequence Number=SeqID_32698
LLLVKLSPVPVLIMSKLSVSTHVQIILFFLPLHEPILLCFSMDLHQKKKKQEASQEQEHHHPVPCNSADRLLKSTPSDSDHQSHSPSASLPQSERHDVGGLGVVPGEATLGVHPVDLEQLQRHLPRRRRAPALHQQ

SEQ ID NO: 98673 - protein, 91 aa, Setaria italica
  misc_feature (69)..(69): Xaa can be any naturally occurring amino acid
  misc_feature (80)..(80): Xaa can be any naturally occurring amino acid
  Transcript Sequence Number=SeqID_32699
  Gene Ontology: Mol. function=acetylglucosaminyltransferase activity; Cellular component=membrane
  Homolog annotation: Hit_ID=B6UEF2; Match level="QueryCoverage=90%, HitCoverage=19%, E-value=8e-26, Identity=75%"; Hit description =Xylosyltransferase 1
ARAAPAVRAFGNVDVVGRPTAGTPMGSSGLAATLRAAAAMLRLDAEWDWFVTLNAADYPLLTQDDLIHXVFSSVPRHLNXFIDHTSDIGWK

SEQ ID NO: 98674 - protein, 108 aa, Setaria italica
  Transcript Sequence Number=SeqID_32700
  Subcellular localization annotation: CTP_CleavageSite=102; ConfidenceScore=5.45e-01
WTNNEAETKTPPPAVAPLTAAPPMHSRLAASSTLPLPIPPPRRAPAPRRTTITRSPGATLDPRASALRAPGTRKFASNQPIQANRLSGGSSNPNGIDGLRPQAGSVGD

SEQ ID NO: 98675 - protein, 38 aa, Setaria italica
  Transcript Sequence Number=SeqID_32701
HHGCRRRRHRRPTAPAPAPSSRPLAWADYLWTDYIISS

SEQ ID NO: 98676 - protein, 168 aa, Setaria italica
  Transcript Sequence Number=SeqID_32702
  Gene Ontology: Mol. function=ribonuclease inhibitor activity; Biological process=regulation of RNA metabolic process
  Homolog annotation: Hit_ID=B6T0A4; Match level="QueryCoverage=100%, HitCoverage=100%, E-value=2e-87, Identity=92%"; Hit description =Regulator of ribonuclease activity A
  Pfam annotation: Domain name=Methyltransf_6; Domain location=11-161; Score=189.4; E_value=1e-53; Accession=PF03737.7; Description =Demethylmenaquinone methyltransferase
MASLPLATAEACDANAGLILNGDLYALQPIFRIYGRRQIFAGPVVTLKIFEDNVLLREFLEEKGHGRVLVVDAGGSMRCAVLGGNLAQLAQNNGWAGIVINGCIRDVDEINGCDVGVRALNSHPMKSNKKGVGEKHVPVTFAGTRICDGEWLYADSDGILLSTSELTV

SEQ ID NO: 98677 - protein, 101 aa, Setaria italica
  Transcript Sequence Number=SeqID_32703
  Gene Ontology: Mol. function=DNA binding; Cellular component=nucleus; Biological process=regulation of transcription
  Homolog annotation: Hit_ID=Q2LME0; Match level="QueryCoverage=40%, HitCoverage=11%, E-value=3e-15, Identity=87%"; Hit description=MYB24
ICSMYASIGSRWSIIASQLPGRTDNDIKNYWNTKLKKKLLGSTATPPPHRAPRHHHRPLNLMLQHTSPSLPQPTYNSFFSGAGALHNPISIPALNLPPPQD

SEQ ID NO: 98678 - protein, 85 aa, Setaria italica
  Transcript Sequence Number=SeqID_32704
  Gene Ontology: Mol. function=protein serine/threonine kinase activity; Cellular component=cell surface; Biological process =protein amino acid phosphorylation
  Homolog annotation: Hit_ID=Q5N835; Match level="QueryCoverage=94%, HitCoverage=10%, E-value=8e-28, Identity=73%"; Hit description =Putative S-receptor kinase
NLLRFGNFLVRVLTSMRGTVGYLAPEWISGEAITTKADVFSYGMMLFEIISGRRNLEHKETTMETFFPMLVARKLLEGEVQALLG

SEQ ID NO: 98679 - protein, 122 aa, Setaria italica
  Transcript Sequence Number=SeqID_32705
  Subcellular localization annotation: CTP_CleavageSite=79; ConfidenceScore=5.17e-01
MPPIAAASAPSSLLPLRIARQGIRGGQGWGERSLYGSQSRRATRGATISARASMNITCCANQTQTAQRKSYSGPTSPPSGSVKEKVKPRLDDGGVGFPPFRFGGGGGGGGGGGSSSSGGSSS

SEQ ID NO: 98680 - protein, 68 aa, Setaria italica
  Transcript Sequence Number=SeqID_32706
  Gene Ontology: Cellular component=membrane
MICVSFRQVNLMRWTRLILDILRSISGRMETLNMKKFHGIAKVCGILFSLAGVVVLAFYQGPEMKSFN

SEQ ID NO: 98681 - protein, 136 aa, Setaria italica
  Transcript Sequence Number=SeqID_32707
  Subcellular localization annotation: CTP_CleavageSite=36; ConfidenceScore=5.52e-01
MASNFAPDAWAWITSLPQFSQWRTNAMSLCICTTPSASSQPTMNLSVVKNLPIPQPSYVTFSIFANYSVPISLWTSKPVHLKTKTQQTLDEQDTIQVFVDVVNSVLRYGPDKKSSFRFPGAQPHGNFKDVFNIVFL

SEQ ID NO: 98682 - protein, 133 aa, Setaria italica
  Transcript Sequence Number=SeqID_32708
  Pfam annotation: Domain name=DUF868; Domain location=1-130; Score= -120.9; E_value=0.0001; Accession=PF05910.4; Description=Plant protein of unknown function (DUF868)
RVRPWLLWRRRGSRRFRAGDRLVDLAWDLSRARFPGSGSPEPTSGFFAAVVVDGEMVLAAGDLPDAAYRRTRARRPSGPRPVLLSRREHVSLRDAGAGRGRSHTTWVTVQGKEREISVDLVARGRGRDKGAAG

SEQ ID NO: 98683 - protein, 72 aa, Setaria italica
  Transcript Sequence Number=SeqID_32709
TAHPTESGSGGAAPRCSPDQENMPLAVDSLQFEHTGSTSSAVAASTPRILHVLLGLLLCLMMISSSRDAAFL

SEQ ID NO: 98684 - protein, 48 aa, Setaria italica
  Transcript Sequence Number=SeqID_32710
AAAEDRAIAEKGFYLHPSPRGNAGPGGDLQAPPRLLPLFPVQSPTSRP

SEQ ID NO: 98685 - protein, 76 aa, Setaria italica
  Transcript Sequence Number=SeqID_32711
NGLLCLGDSTGAVEVLNPTTGESLVLPMPMYTAGSSQFSSCNWHCLGFCPKTREHKVVHFYPGSHIDSFEVRCEIY

SEQ ID NO: 98686 - protein, 70 aa, Setaria italica
  Transcript Sequence Number=SeqID_32712
  Gene Ontology: Mol. function=catalytic activity
  Subcellular localization annotation: CTP_CleavageSite=63; ConfidenceScore=5.15e-01
MLGTRRRPFLGVSLLLLAMSCAVGAAVPESTARSIRRANRLGPFLGVVVPNAFEMEPLLRSPRFSPARSL

SEQ ID NO: 98687 - protein, 102 aa, Setaria italica
  misc_feature (45)..(45): Xaa can be any naturally occurring amino acid
  Transcript Sequence Number=SeqID_32713
  Gene Ontology: Mol. function=ferredoxin-NADP+ reductase activity; Cellular component=thylakoid membrane; Biological process=electron transport chain
  Homolog annotation: Hit_ID=B6TRH0; Match level="QueryCoverage=67%, HitCoverage=17%, E-value=5e-31, Identity=91%"; Hit description =Ferredoxin--NADP reductase
  Pfam annotation: Domain name=NAD_binding_1; Domain location=3-69; Score=-0.5; E_value=0.0045; Accession=PF00175.13; Description =Oxidoreductase NAD-binding domain
ECSIAEVLKFYNFRYDKALSREQTNRSGGKMYVQDKIEEYSDEIXFKLLDNGAHIYFCGLKGMMPGIQDTLKKVAEQRAQMRVRAVIVPRLECNLVHSFDAA

SEQ ID NO: 98688 - protein, 380 aa, Setaria italica
  Transcript Sequence Number=SeqID_32714
  Gene Ontology: Mol. function=ferredoxin-NADP+ reductase activity; Cellular component=thylakoid membrane; Biological process=electron transport chain
  Homolog annotation: Hit_ID=B6TRH0; Match level="QueryCoverage=96%, HitCoverage=96%, E-value=0.0, Identity=91%"; Hit description =Ferredoxin--NADP reductase
  Pfam annotation: Domain name=NAD_binding_1; Domain location=234-349; Score=131.9; E_value=2.1e-36; Accession=PF00175.13; Description =Oxidoreductase NAD-binding domain
  Subcellular localization annotation: CTP_CleavageSite=62; ConfidenceScore=5.58e-01
MATAAAASQVAVSAPVFGSDRGVGSSGIKGTNNLSFGNKSWVGGTLAWESKAIRPRHANKVLCMSVQQASKSKVSVAPLDLESAKEPPLNTYKPKEPFTATIVSVERLVGPKAPGETCHIVIDHGGNVPYWEGQSYGVIPPGENPKKPGAPHNVRLYSIASTRYGDNFDGRTGSLCVRRAVYYDPETGKEDPSKNGVCSNFLCNAKPGDKIQLTGPSGKIMLLPEEDPNATHIMIATGTGVAPFRGYLRRMFMEDVPNYRFGGLAWLFLGVANSDSLLYDEEFTSYLKQYPDNFRYDKALSREQTNRSGGKMYVQDKIEEYSDEIFKLLDNGAHIYFCGLKGMMPGIQDTLKKVAEQRGESWEQKLSQLKKNKQWHVEVY

SEQ ID NO: 98689 - protein, 141 aa, Setaria italica
  Transcript Sequence Number=SeqID_32715
  Gene Ontology: Mol. function=nuclease activity; Cellular component =intracellular; Biological process=DNA repair
  Homolog annotation: Hit_ID=B9RVE6; Match level="QueryCoverage=69%, HitCoverage=23%, E-value=4e-32, Identity=64%"; Hit description =Nuclease, putative
LILNGFPSNVAALQFEWAWQHPAESLAVRKAAAEFKSLGGIGNKVKLAYTMLNLPSWESLNLTVNFFSSKNTKFTAGCPSLPSQMKTVVCAMEDLQCSAEGPSSEDDDLSQDPQDQQEQSDSPLQDDEHSQHCWQQPSDSP

SEQ ID NO: 98690 - protein, 90 aa, Setaria italica
  Transcript Sequence Number=SeqID_32716
  Gene Ontology: Mol. function=protein serine/threonine kinase activity; Biological process=protein amino acid phosphorylation
TGPIPSWIGGFKKLYYVDLSGNQLSGEVPPSLTELPLLTSEQAMADFKPGHMPLTFTLTPNNGAASRQGRGYYQMSGVATTLNFSNNLLT

SEQ ID NO: 98691 - protein, 97 aa, Setaria italica
  Transcript Sequence Number=SeqID_32717
GRGNGGRRGTESSIRHHVPDPKIHTRSSLTSTHCFVLQVMARYLKDPAFLDASRCGISTTVSPLPSSLVSSIRTVPRLPSTVAASQGQHLLHGTDLH

SEQ ID NO: 98692 - protein, 171 aa, Setaria italica
  Transcript Sequence Number=SeqID_32718
APPFDPYGFAPPPPPGRASVEGDRLLGLIRDHGHNPLPGSAWRGEPCPPDAGFGYGGVRCYPSPYPQGGDFANFNHAGRLPPPVPLHDMNHGFGQGFAPGGGPHEKYLDSADHRYCQFHPEELPGVPPPPPLPPYAETDAIPQPPEPPFPSHRDYRAAPPRPAANSSLFPV

SEQ ID NO: 98693 - protein, 88 aa, Setaria italica
  Transcript Sequence Number=SeqID_32719
  Gene Ontology: Mol. function=transferase activity, transferring glycosyl groups; Biological process=metabolic process
  Homolog annotation: Hit_ID=Q6Z381; Match level="QueryCoverage=98%, HitCoverage=17%, E-value=1e-24, Identity=61%"; Hit description =Putative UDP-glucosyltransferase
IACAMFLIFPAAHLAYAGPKHENEAHPRRTTEDYMAQPPWIPFPSTISYRRHEAATRAPACRPNASGVADIDRLWQLHHPSCRLIIYP

SEQ ID NO: 98694 - protein, 136 aa, Setaria italica
  Transcript Sequence Number=SeqID_32720
  Subcellular localization annotation: CTP_CleavageSite=18; ConfidenceScore=5.32e-01
MQPPTGNERPPPPGRPVSAFVPGAAAPPPPFAAGGPFVPPPRQGVPPPQPGSAAPPFVAAPPAAMGGFRGPPPSQGPFAAAPPPQRPFTSAPPPQGSFTTAPPPQGPFTTAPPPQGPFASAPPSQGPFASAPPSHG

SEQ ID NO: 98695 - protein, 159 aa, Setaria italica
  misc_feature (29)..(29): Xaa can be any naturally occurring amino acid
  Transcript Sequence Number=SeqID_32721
  Gene Ontology: Mol. function=ATPase activity, coupled to transmembrane movement of substances; Cellular component=integral to membrane; Biological process=transport
  Homolog annotation: Hit_ID=Q8GU65; Match level="QueryCoverage=98%, HitCoverage=10%, E-value=4e-64, Identity=74%"; Hit description=MRP -like ABC transporter
  Subcellular localization annotation: CTP_CleavageSite=75; ConfidenceScore=5.53e-01
IIVTFLGLQSAQAFFNKMFDSILRAPMSXFFDTTPSGRILSRASSDQSKIDTSLVFYVGFATSMCISVVTNIAVTCQVAWPSVIAVLPLLLLNIWYRNRYIATSRELTRLQGVTRAPIIDHFTETFLGAPTVRCFRKEDEFYQTNLDRINSNLRIYCSF

SEQ ID NO: 98696 - protein, 94 aa, Setaria italica
  misc_feature (74)..(74): Xaa can be any naturally occurring amino acid
  Transcript Sequence Number=SeqID_32722
  Gene Ontology: Mol. function=protein tyrosine kinase activity; Biological process=protein amino acid phosphorylation
  Homolog annotation: Hit_ID=Q10EC2; Match level="QueryCoverage=93%, HitCoverage=14%, E-value=4e-29, Identity=69%"; Hit description =Lectin receptor kinase 7, putative, expressed
LRLHGSYNVGEASLALKIGLLCSHPLSGARPSMRQVIKYLNGDMPLPELNPTLQSFESLALMQNEGFDSYIMSXPLSMATMTTMSNLSGKVTTT

SEQ ID NO: 98697 - protein, 174 aa, Setaria italica
  Transcript Sequence Number=SeqID_32723
  Gene Ontology: Mol. function=metal ion binding; Cellular component =integral to membrane; Biological process=multicellular organismal development
  Homolog annotation: Hit_ID=B6TJT8; Match level="QueryCoverage=94%, HitCoverage=37%, E-value=2e-65, Identity=70%"; Hit description =Palmitoyltransferase ZDHHC9
  Pfam annotation: Domain name=zf-DHHC; Domain location=119-171; Score =59.1; E_value=1.7e-14; Accession=PF01529.12; Description=DHHC zinc finger domain
LTVSCLQRFFFGGRLIFGPDVKSLGLSVALIVVPVAFFCVFVARHLRHQFRAYDAGYAILVVAIVYTIYVLLLLFTAAAQDPGIVPRASHPPEEDTHYDSLSLTDTPGRLQFPRVKEVIVNGMPVKVKYCETCMVYRPPRCSHCSICNNCVERFDHHCPWVGQCIGKVSYVDSN

SEQ ID NO: 98698 - protein, 191 aa, Setaria italica
  misc_feature (148)..(148): Xaa can be any naturally occurring amino acid
  misc_feature (172)..(172): Xaa can be any naturally occurring amino acid
  Transcript Sequence Number=SeqID_32724
  Gene Ontology: Mol. function=metal ion binding; Cellular component =integral to membrane; Biological process=multicellular organismal development
  Homolog annotation: Hit_ID=B6TJT8; Match level="QueryCoverage=100%, HitCoverage=44%, E-value=6e-75, Identity=70%"; Hit description =Palmitoyltransferase ZDHHC9
  Pfam annotation: Domain name=zf-DHHC; Domain location=128-190; Score =85.4; E_value=2e-22; Accession=PF01529.12; Description=DHHC zinc finger domain
MAQPQQRVYQAWKGDNRFFFGGRLIFGPDVKSLGLSVALIVVPVAFFCVFVARHLRHQFRAYDAGYAILVVAIVYTIYVLLLLFTAAAQDPGIVPRASHPPEEDTHYDSLSLTDTPGRLQFPRVKEVIVNGMPVKVKYCETCMVYRPXRCSHCSICNNCVERFDHHCPWVGXCIGKRNYRIFPVVSSSSLL

SEQ ID NO: 98699 - protein, 524 aa, Setaria italica
  Transcript Sequence Number=SeqID_32725
  Gene Ontology: Mol. function=2 iron, 2 sulfur cluster binding; Cellular component=peroxisome; Biological process=oxidation reduction
  Homolog annotation: Hit_ID=Q852M1; Match level="QueryCoverage=100%, HitCoverage=39%, E-value=0.0, Identity=79%"; Hit description =Probable aldehyde oxidase 2
  Pfam annotation: Domain name=Ald_Xan_dh_C; Domain location=266-377; Score=165.0; E_value=2.1e-46; Accession=PF01315.14; Description =Aldehyde oxidase and xanthine dehydrogenase, ab hammerhead domain
  Pfam annotation: Domain name=CO_deh_flav_C; Domain location=91-199; Score=139.8; E_value=8.5e-39; Accession=PF03450.9; Description=CO dehydrogenase flavoprotein C-terminal domain
  Pfam annotation: Domain name=FAD_binding_5; Domain location=1-83; Score=-26.5; E_value=5.5e-05; Accession=PF00941.13; Description=FAD binding domain in molybdopterin dehydrogenase
  Pfam module annotation: Pfam domain module=Ald_Xan_dh_C::CO_deh_flav _C::FAD_binding_5; Domain location=266-377::91-199::1-83
  Subcellular localization annotation: CTP_CleavageSite=42; ConfidenceScore=5.11e-01
KIANHLNKVASPFVRNTATIGGNIIMAQRLQFPSDIATVLLAAGSTVSIQVSSKRLCLTLEEFLQQPPCDSRTLLLSIFIPDWGSDGLTFETFRAAPRPFGNAVSYANSAFLARTSSGHLIEDICLAFGAYGADHAIRARKVEDFLKGKSVTSSVIFEAVRLLKETVSPSEGTTHPEYRISLAISFLFTFLSSLANSFDEATKINVLNGSYTNGVANGSADHSPEEHLKVDSNDLPIRSRQEMIFTDEYKPVGKPIKKAGAELQASGEAVYVDDIPAPKDCLYGAFIYSTHSYAHVKGINFKTSLASKKVITVITAKDIPSSGQNIGSCFPMLGDEPLFADPIAEFAGQNIGVVIAETQKYAYMAAKQAVIEYSTENLQPPILTVEDAIQRNSYFQVPPFLAPKPVGDYNQGMSEADHKIISAEVKLESQYYFYMETQVALAIPDEDNCITIYSSTQIPEVTQNVVARCLGVPFHNVRLITRRVGGGFGGKAMKAIHVACACAVAAFKLQRPVRMYLDRKTDMI

SEQ ID NO: 98700 - protein, 181 aa, Setaria italica
  misc_feature (167)..(167): Xaa can be any naturally occurring amino acid
  Transcript Sequence Number=SeqID_32726
  Gene Ontology: Mol. function=ubiquitin protein ligase binding; Cellular component=cullin-RING ubiquitin ligase complex; Biological process=ubiquitin-dependent protein catabolic process
  Homolog annotation: Hit_ID=Q01IF9; Match level="QueryCoverage=100%, HitCoverage=21%, E-value=4e-75, Identity=79%"; Hit description =H0805A05.11 protein
SVLLTTLPLSFPEILNVYFKKKLEELNIIMAGSYESDQLGNHELFESSNTSDWHSGMDIDGQDVSESSCLVKNIGKVVRDLRCLGFTSMTEDAYSSAIIWLLKSKVYELAGDDYRVPVLGSVKKWIQAVPLQFLHALLTYLGDSVDYDSGSSGLKSPLASRPSSFPXGIGVPSEALVRWHM

SEQ ID NO: 98701 - protein, 74 aa, Setaria italica
  Transcript Sequence Number=SeqID_32727
  Homolog annotation: Hit_ID=Q4VDD8; Match level="QueryCoverage=98%, HitCoverage=92%, E-value=5e-11, Identity=46%"; Hit description=P-166- 4_1 (Fragment)
AEGVSYLVVAGLVGWSVTTKARTGSGLPAGPYGLLGAAEGVAYLTVAAIAVVFGLQFFQQGSIPGPLPSEQCFG

SEQ ID NO: 98702 - protein, 91 aa, Setaria italica
  Transcript Sequence Number=SeqID_32728
  Gene Ontology: Cellular component=integral to peroxisomal membrane; Biological process=peroxisome organization and biogenesis
  Homolog annotation: Hit_ID=B9HJ04; Match level="QueryCoverage=97%, HitCoverage=20%, E-value=3e-30, Identity=65%"; Hit description =Lysine/histidine transporter
LRDLGAHALGPRLGPWLVVPQQLIVQLGCDMVYMVTGGKCLQKFAESVCPTCAPLHQSYWICIFGSFQFLLSQLPNLDAITAVSFLAAAMS

SEQ ID NO: 98703 - protein, 126 aa, Setaria italica
  Transcript Sequence Number=SeqID_32729
  Subcellular localization annotation: CTP_CleavageSite=54; ConfidenceScore=5.22e-01
SGRASTRFRDPHCWPNWSKKPAPPQIRTGIPQHQLPSVQQLPNRRQGSGSGGTNCNWRKGKKKRGSFSPVLRRKQRLGWGRIGVGEPRGGIKIEPCRRKSRGVGPREISLFARLQSVMAFCYGPCS

SEQ ID NO: 98704 - protein, 116 aa, Setaria italica
  Transcript Sequence Number=SeqID_32730
GVGRRGRLGRRRRLGSGGRLAPGPALAALEGEAPHLVFNRQTVKRKDEQLWKKRGFWEGRDKCYGCPWERTKNVVIEADRERELCGLKLIAEAEDARRDRWKRRDRIRRWMSCLNT

SEQ ID NO: 98705 - protein, 96 aa, Setaria italica
  Transcript Sequence Number=SeqID_32731
ANIPPFFNYFSLVQRFLPLDEICKDPPILSSLLRLHLSPDGVLRLQERQGQVQEPAGRRSQDAAAGQVAPGVRLLRRRRREEEQRSFVPSFGRSYV

SEQ ID NO: 98706 - protein, 242 aa, Setaria italica
  misc_feature (204)..(204): Xaa can be any naturally occurring amino acid
  Transcript Sequence Number=SeqID_32732
  Gene Ontology: Mol. function=ATP-dependent helicase activity; Cellular component=intracellular; Biological process=DNA recombination
  Homolog annotation: Hit_ID=B9SXG0; Match level="QueryCoverage=100%, HitCoverage=19%, E-value=1e-93, Identity=69%"; Hit description=DNA helicase hus2, putative
  Pfam annotation: Domain name=DEAD; Domain location=1-142; Score=39.3; E_value=1.5e-08; Accession=PF00270.21; Description=DEADDEAH box helicase
TYQLPALISEGLTLVVCPLVSLIQDQIMHLSQANIPATYLSASMEWPEQQEILRGLMSCHYKLLYVTPEKIAKSNSLTGLLDNLYSQGHLSRIVIDEAHCVSQWGHDFRPDYKNLGVLKQNFPKTPVLALTATATARVKEDVVQALGLANCIVFRQSFNRPNLRYLLRPKTKKCLEDIDNFIRTNHFKECGIIYCLSRMDCEKXVAEKLRECGHSVSHYHGSMDPVDRTRVQKQLVVKVLSI

SEQ ID NO: 98707 - protein, 115 aa, Setaria italica
  misc_feature (104)..(104): Xaa can be any naturally occurring amino acid
  Transcript Sequence Number=SeqID_32733
  Gene Ontology: Mol. function=oxidoreductase activity; Cellular component=plasma membrane; Biological process=negative regulation of transcription
  Homolog annotation: Hit_ID=B9RXX3; Match level="QueryCoverage=100%, HitCoverage=56%, E-value=1e-43, Identity=77%"; Hit description =Flavoprotein wrbA, putative
  Pfam annotation: Domain name=Flavodoxin_1; Domain location=1-114; Score=9.5; E_value=0.00037; Accession=PF00258.17; Description =Flavodoxin
TYGHVATLAEEIKKGAASVDGVEVKLWQVPETLSGEALAKMSAPPMREDVPVITPAELVDADGLLFGFPTRFGMLPAQFKAFMDGTSDLWCEQRLAGKPAGIFXPTGCQGGGQET

SEQ ID NO: 98708 - protein, 67 aa, Setaria italica
  Transcript Sequence Number=SeqID_32734
TPRAPQPQPHYYREPRFQRQMSAGHEAAKTMAAEEGRKKKKKPLIPLVGALFMRRKKSSGSCHDDSF

SEQ ID NO: 98709 - protein, 96 aa, Setaria italica
  Transcript Sequence Number=SeqID_32735
  Gene Ontology: Cellular component=nucleus; Biological process=meiotic telophase I
  Homolog annotation: Hit_ID=Q75RY2; Match level="QueryCoverage=100%, HitCoverage=26%, E-value=6e-25, Identity=50%"; Hit description =Protein PAIR1
DVMQLNRAMKEASLDSGSIQQKVVVLDNSLQKVLKGQDDLKALFESSTKSIADQLSVLNSHSRKLDEISSTLSVWPKQIEIDLRQLQSDIFRIFAK

SEQ ID NO: 98710 - protein, 208 aa, Setaria italica
  misc_feature (28)..(28): Xaa can be any naturally occurring amino acid
  misc_feature (65)..(65): Xaa can be any naturally occurring amino acid
  Transcript Sequence Number=SeqID_32736
  Gene Ontology: Mol. function=pyridoxal phosphate binding
  Homolog annotation: Hit_ID=Q0KKQ1; Match level="QueryCoverage=89%, HitCoverage=11%, E-value=4e-15, Identity=31%"; Hit description=CGS1 mRNA stability 1
LLSKQSSQPDVAEAILKDIDSDLEPETXCLSSTSSCSTCSTDGLSAEGMYSWQEQAVHGRNHLSXVFALIEMLSIPGLFVEVAQVFERALLRGAFGLQLVAMVLERRHSYRSSSKSGSVVNDSQNKQVLLDGQFEPLSVQENDFTSVLALGEVLSLSTETKVQDFVRMLYAIIFKIYSEDHYRYRILKGLVERARNTKTSISMSTARQ

SEQ ID NO: 98711 - protein, 130 aa, Setaria italica
  Transcript Sequence Number=SeqID_32737
HRQLGKLREKKRKKKSKLVDVKLTLMGCSRNWKFARFSTLLFSNVCTVVCSILISTLTIVSNALLKNGDYFLRIFCCHKRCSQQHHTFGGLVHQLFDIHGMVLPVFSTLIFRYVRQIVCQLFLKMNLAFV

SEQ ID NO: 98712 - protein, 491 aa, Setaria italica
  Transcript Sequence Number=SeqID_32738
  Gene Ontology: Mol. function=pyridoxal phosphate binding
  Homolog annotation: Hit_ID=Q0KKQ1; Match level="QueryCoverage=85%, HitCoverage=28%, E-value=1e-76, Identity=37%"; Hit description=CGS1 mRNA stability 1
IDSDREPENNCLSSTSSCSTCSTDGLSAEGMYSWQEQAVHGRNHLSDVFALIEMLSIPGLFVEVAQVFERALLRGAFGLQLVAMVLERRHSYRSSSKSGSVVNASNRTKFLFCEPFVLFQENDFTSVLALGEVLSLSTETKVQDFVRMLYAIIFKIYSEDHYRYRILKGLVERATNTSDNCRAVDIDMDVLVFLVKEEYGIARPVLNMLREVAEVAQADRSNLWHQICTTEDENIRLREDMEMEQTNFTNEKIALNQRLTESEATIGHLRSELKAERDRFTREKKTLSDQMREIESQLEWVRSEKDEQIAKLSAEKKNLQVRLNDAESQLSMVKAQKREELKKVTKEKTTLAERLKNAEASRKRFDDELKLCQQYIRTLETSLQEEMARHAPLYGVGVESLSFDELEALTNIHEHSLRQIKAIQQRKGGSHLLGGPSLSHIPGLFSSPPPPSMAVGQPSPRIPASPIAPNGAGIHGNGHANGAGGRWFNPT

SEQ ID NO: 98713 - protein, 192 aa, Setaria italica
  Transcript Sequence Number=SeqID_32739
KLHTILPPDDEKKKKRNAYSSISSHPSYQTISTMTSSKKITIHGISQQCRASTAWQKQQLLRSYRQSSCHQIADMKSILRRLHDVNNWLPSVTMAVPSPMNVVMDISVSRIRSSSVATSLILGRRLDDGFRHWKARPTSSFMPSEVKLPPNLGSINSFELKCASIFRCDKKMSVSGQLVKKNSYSQKTAAHF

SEQ ID NO: 98714 - protein, 42 aa, Setaria italica
  Transcript Sequence Number=SeqID_32740
GDVNFDGEAQVRRESCVGSSQNQILRCSLHSCTVLFACCACR

SEQ ID NO: 98715 - protein, 139 aa, Setaria italica
  misc_feature (12)..(12): Xaa can be any naturally occurring amino acid
  misc_feature (44)..(44): Xaa can be any naturally occurring amino acid
  misc_feature (55)..(55): Xaa can be any naturally occurring amino acid
  Transcript Sequence Number=SeqID_32741
  Gene Ontology: Mol. function=metalloexopeptidase activity; Cellular component=chloroplast; Biological process=cellular process
  Homolog annotation: Hit_ID=B4FSK5; Match level="QueryCoverage=96%, HitCoverage=38%, E-value=8e-68, Identity=90%"; Hit description =Methionine aminopeptidase
  Pfam annotation: Domain name=Peptidase_M24; Domain location=30-139; Score=-52.7; E_value=2.7e-05; Accession=PF00557.16; Description =metallopeptidase family M24
TRAHSKPSYVGXKGLPELCKGELHDAQGIAGMRVACKLAARVLXAGTLVKPSVTXNEIDAAVHNMIIEAGAYPSPLGYRGFPKSICTSVNECVCHGIPDSTQLQNGDIINIDVNVFLNGYHGGTSKTFVCGQVDDSIKH

SEQ ID NO: 98716 - protein, 327 aa, Setaria italica
  Transcript Sequence Number=SeqID_32742
  Gene Ontology: Mol. function=thiosulfate sulfurtransferase activity; Cellular component=chloroplast; Biological process=sulfate transport
  Homolog annotation: Hit_ID=Q9ZPK0; Match level="QueryCoverage=96%, HitCoverage=84%, E-value=1e-152, Identity=78%"; Hit description =Thiosulfate sulfurtransferase
  Pfam annotation: Domain name=Rhodanese; Domain location=200-317; Score=84.7; E_value=3.4e-22; Accession=PF00581.12; Description =Rhodanese-like domain
  Pfam annotation: Domain name=Rhodanese; Domain location=32-152; Score= 88.1; E_value=3.1e-23; Accession=PF00581.12; Description=Rhodanese -like domain
  Pfam module annotation: Pfam domain module=Rhodanese::Rhodanese; Domain location=200-317::32-152
RESTARCNATSSSAVSEAAGVHELPRTEPVVSAEWLHANLKDPDVKVLDASWYMPAEQRNPLQEYQVAHIPGALFFDVDGISDKTSSLPHMLPSEKAFSAAVSALGIYNKDGIVVYDGKGLFSAARVWWMFRVFGHDKVWVLDGGLPQWRASGYDVESSASSDAILKASAAGEAIEKVYQGQPVGPFTFEAKLQPHLIWSLDQVKENIKTQTHQLIDARSKPRFDGAVPEPRKGIRSGHVPGSKCVPFPQVLDSSQKLLAPDELRKRFEQEGISLDQPLVTSCGTGVTACVLALGLHRLGKTDVSVYDGSWTEWGAHPDTPVATAAA

SEQ ID NO: 98717 - protein, 249 aa, Setaria italica
  Transcript Sequence Number=SeqID_32743
  Gene Ontology: Mol. function=transposase activity; Biological process= transposition, DNA-mediated
  Homolog annotation: Hit_ID=Q2QT97; Match level="QueryCoverage=90%, HitCoverage=30%, E-value=1e-79, Identity=60%"; Hit description =Transposon protein, putative, CACTA, En/Spm sub-class
MGSSEEDVRQFMLDEEELDDELFFVIVPVVMSCLYDEKIPEHTSSLPGATKVKEILEGHKNWCKSEFRMEVEIFRAIANLLRAENLLHDTRGVKIEEQLGIFLFMLSHNASIEMLKKTFQHSGETIHRKVNEVFDIIPTLTHRFVKLPNPNQTHAKILSNPRFMPFFQNCIGAIDGTHIPITLNEDKAPPFRNRKGTLSQNVSLLCRLDLKFTFISCGWEGSASDAGVLRSALTKGFHVPPGKFYLVEL

SEQ ID NO: 98718 - protein, 111 aa, Setaria italica
  misc_feature (61)..(61): Xaa can be any naturally occurring amino acid
  Transcript Sequence Number=SeqID_32744
  Subcellular localization annotation: CTP_CleavageSite=87; ConfidenceScore=5.09e-01
YGHPSLSPLQQQQAAHGQLGMASGGGGGGGTTSGFNILHGEASMGGGGAGAGAGNSMMNAXMFSGFGRPGSGIGAKEGSSSLSVDVRGGASSGAQSGDGEYLKAGTEEEGS

SEQ ID NO: 98719 - protein, 87 aa, Setaria italica
  Transcript Sequence Number=SeqID_32745
  Subcellular localization annotation: CTP_CleavageSite=51; ConfidenceScore=5.29e-01
RTHPSPPPPRAGPPGSRPPCPYPPRQISGEMLCTIARTRKRNSETRHGKRRCKPSWKRNAAASSWHHLLATLVPGTAGSEWSGDEET

SEQ ID NO: 98720 - protein, 114 aa, Setaria italica
  misc_feature (108)..(108): Xaa can be any naturally occurring amino acid
  Transcript Sequence Number=SeqID_32746
  Gene Ontology: Mol. function=transferase activity; Cellular component= cytoplasm; Biological process=glycolysis
  Homolog annotation: Hit_ID=B6U2X9; Match level="QueryCoverage=99%, HitCoverage=22%, E-value=6e-55, Identity=92%"; Hit description =Hexokinase-1
  Pfam annotation: Domain name=Hexokinase_1; Domain location=1-112; Score=-24.1; E_value=3.4e-09; Accession=PF00349.13; Description =Hexokinase
PPQLMSGSSSELFGFIASELAKFVADEEKCANVLSNGKKRELGFTFSFPVKQRSVASGTLVKWTKAFSIDDAVGEDVVAELQTAMEKQGLDMHVAALINDAVGTLAGXRYYDRV

SEQ ID NO: 98721 - protein, 294 aa, Setaria italica
  Transcript Sequence Number=SeqID_32747
  Gene Ontology: Mol. function=transferase activity; Cellular component= cytoplasm; Biological process=glycolysis
  Homolog annotation: Hit_ID=B6U2X9; Match level="QueryCoverage=99%, HitCoverage=58%, E-value=1e-126, Identity=76%"; Hit description =Hexokinase-1
  Pfam annotation: Domain name=Hexokinase_2; Domain location=44-289; Score=287.1; E_value=3.8e-83; Accession=PF03727.8; Description =Hexokinase
NQVGEDVVAELQTAMEKQGLDMHVAALINDAVGTLAGARYYDRDVVAGVIFGTGTNAAYVEKANSIPKWEGELPNSGDMVINMEWGNFCSSHLPVTEYDRELDKESLNPGEQIYEKLMSGMYLGEIVRRVLLKMSLQSSIFGNIDHTKLKTHFLLRTPHISAMHHDETPDLKIVAEKLEENLEITGTSLETRKLVVEICDIVARRAARLAAAGLAGILKKLGRDGNAQEQRSVIAIDGGLFEHYTKFRECLEITLGELLAEYASKSVAVKHADDGSGIGAALIAASQSQYRNVE

SEQ ID NO: 98722 - protein, 139 aa, Setaria italica
  Transcript Sequence Number=SeqID_32748
  Gene Ontology: Mol. function=zinc ion binding; Cellular component =COPII vesicle coat; Biological process=ER to Golgi vesicle-mediated transport
  Homolog annotation: Hit_ID=Q657N5; Match level="QueryCoverage=89%, HitCoverage=15%, E-value=3e-44, Identity=70%"; Hit description =Putative Sec23 protein
NKHSGSDASSFGKRGPLLGSIIGHEDERSVLRNLFLNASFDLSLRMMAPRCIMHREGGTFEELPAYDLVMQSNAAVVLDHGTDIFIWLGAELAAQEGQSAAALAACRTLAEELSEQRFPAPRILSFKVSLLVLILHCYF

SEQ ID NO: 98723 - protein, 737 aa, Setaria italica
  Transcript Sequence Number=SeqID_32749
  Gene Ontology: Mol. function=zinc ion binding; Cellular component =COPII vesicle coat; Biological process=ER to Golgi vesicle-mediated transport
  Homolog annotation: Hit_ID=Q657N5; Match level="QueryCoverage=88%, HitCoverage=80%, E-value=0.0, Identity=87%"; Hit description =Putative Sec23 protein
  Pfam annotation: Domain name=Gelsolin; Domain location=598-677; Score= 7.4; E_value=0.087; Accession=PF00626.14; Description=Gelsolin repeat
  Pfam annotation: Domain name=Sec23_BS; Domain location=382-476; Score= 56.9; E_value=8e-14; Accession=PF08033.4; Description=Sec23Sec24 beta- sandwich domain
  Pfam annotation: Domain name=Sec23_helical; Domain location=488-588; Score=73.4; E_value=8.6e-19; Accession=PF04815.7; Description =Sec23Sec24 helical domain
  Pfam annotation: Domain name=Sec23_trunk; Domain location=135-377; Score=-24.7; E_value=3.5e-08; Accession=PF04811.7; Description =Sec23Sec24 trunk domain
  Pfam annotation: Domain name=zf-Sec23_Sec24; Domain location=57-96; Score=45.7; E_value=1.8e-10; Accession=PF04810.7; Description =Sec23Sec24 zinc finger
  Pfam module annotation: Pfam domain module=Gelsolin::Sec23_BS::Sec23 _helical::Sec23_trunk::zf-Sec23_Sec24; Domain location=598-677::382 -476::488-588::135-377::57-96
  Subcellular localization annotation: CTP_CleavageSite=63; ConfidenceScore=5.30e-01
PAPSPLQGDGLNNPYVQFSANKVLKQKKLLNAPSLGFGALVSPGKEVSPGPEVVERDPRRCLNCGAYVNLYCDISIGSGQWQCVICQKINGSEGEFVVSSKQDLLQWPELASTTVDYVQVGNRRPGFVPVSDSRVSGPIFILIDECLDEAHLQHLQGSLHAFVDSLPPTAKIGIITYGRTVSVYDFSEGAAVSADVLPGNKSPTHESLKALIYGTGVYLSPIHASLPVAHTIFSSLRPYQLSVPEVSRDRCLGAAVEVALGIIQGPSVELSRGIIKRSGGNCRILLCAGGPCTFGPGSVPYSVKHPNYAYLEKTAMKWMESLGHEAQRHSTVVDIFCAGQCPVRVPVLQPLAKCSGGVLLLHDDFGEAFGVNLQRASTRAAGSHGLFEIRCSDNMLVTQVIGPGEEASPDSHETFKHDSSFCIQMHSVEETQSFSVSMETKGDIKSDFVFFQFAVHYSNVYQAEITRVITMRLQTVDGLSAYLASVQEDVASVIIGKRTVLRARTASDAIDMRQSIDERVKDIALKFGTQAPKSKLYRFPKELASLPECLFHLKRGPLLGSIIGHEDERSVLRNLFLNASFDLSLRMMAPRCIMHREGGTFEELPAYDLVMQSNAAVVLDHGTDIFIWLGAELAAQEGQSAAALAACRTLAEELSEQRFPAPRILSFKQGSSQARYFVSRLIPAHKDPTYEQESRFPQLRTLTPEQRARLKSSFIHFDDHSFCEWMRSLKLVPPEPS

SEQ ID NO: 98724 - protein, 140 aa, Setaria italica
  misc_feature (21)..(21): Xaa can be any naturally occurring amino acid
  misc_feature (30)..(30): Xaa can be any naturally occurring amino acid
  Transcript Sequence Number=SeqID_32750
  Gene Ontology: Mol. function=metal ion binding
  Homolog annotation: Hit_ID=UPI0000163576; Match level="QueryCoverage =83%, HitCoverage=11%, E-value=4e-26, Identity=54%"; Hit description =zinc finger (C3HC4-type RING finger) family protein
  Pfam annotation: Domain name=zf-C3HC4; Domain location=1-37; Score =2.0; E_value=0.06; Accession=PF00097.17; Description=Zinc finger, C3HC4 type (RING finger)
CLEICFEPSTTPCGHSFCMEXLKHAATKCXGKRCPKCRQLISNSRSCTINTVLWNTIQLLFPSEVEARRTSIESPSSCNEDMNHSPPRSNNFSQGGHGMRTRNSNGSFIAEGRTRSSYRTFITPASTPSSNTSGNFISTH

SEQ ID NO: 98725 - protein, 84 aa, Setaria italica
  misc_feature (66)..(66): Xaa can be any naturally occurring amino acid
  Transcript Sequence Number=SeqID_32751
  Gene Ontology: Mol. function=transferase activity, transferring glycosyl groups; Cellular component=integral to membrane; Biological process=cell wall organization and biogenesis
  Homolog annotation: Hit_ID=Q8S7W0; Match level="QueryCoverage=100%, HitCoverage=12%, E-value=5e-31, Identity=78%"; Hit description =Probable mannan synthase 4
RNNRKGFKAGALKKGMEHIYAQQCDFVAIFDADFQPESDFLLKTIPFLVHNPKIALVQARWEFGCXLTWPLPGNFAVNYDVCLM

SEQ ID NO: 98726 - protein, 308 aa, Setaria italica
  misc_feature (57)..(57): Xaa can be any naturally occurring amino acid
  misc_feature (102)..(102): Xaa can be any naturally occurring amino acid
  misc_feature (116)..(116): Xaa can be any naturally occurring amino acid
  misc_feature (178)..(178): Xaa can be any naturally occurring amino acid
  Transcript Sequence Number=SeqID_32752
  Gene Ontology: Mol. function=transferase activity, transferring glycosyl groups; Cellular component=integral to membrane; Biological process=cell wall organization and biogenesis
  Homolog annotation: Hit_ID=Q8S7W0; Match level="QueryCoverage=100%, HitCoverage=55%, E-value=1e-163, Identity=87%"; Hit description =Probable mannan synthase 4
MYNEREVYKLSIGAACALTWPPDRIIIQVLDDSTDPFIRELVELECKDWASKNINIXKYEIRESRKGYKAGALRKGMEHSYAQECDFVAIFDADFQPEPDFXLRTVPFLVHNPRLXLVQTRWEFVNYDVCLMTRIQKMSLDYHFKVEQESGSSVHAFFGFNGTAGVWRVSAISEAGGXKDRTTVEDMDLAVRASLKGWQFLYVGDIRVKSELPSTLKAYRHQQHRWTCGATSLFRKMAPGIVRSKGVSVWKKFHLLYSFFFVRRVIAPILTFLFYCIVIPLSVMVPEVSIPIWGMFYIPTSITIMNAI

SEQ ID NO: 98727 - protein, 88 aa, Setaria italica
  Transcript Sequence Number=SeqID_32753
  Gene Ontology: Mol. function=aspartic-type endopeptidase activity; Biological process=xylan catabolic process
  Homolog annotation: Hit_ID=Q6KE42; Match level="QueryCoverage=100%, HitCoverage=46%, E-value=2e-14, Identity=46%"; Hit description =Xylanase inhibitor (Fragment)
PLLSRKGSSSYYLPVKAIAFDKAQVQLPGNPLATGGVVLGTTAPYTELRPDVYRPLVDAFDKALMRRWNISKRVPAVAPFELCYDSKT

SEQ ID NO: 98728 - protein, 102 aa, Setaria italica
  Transcript Sequence Number=SeqID_32754
  Homolog annotation: Hit_ID=Q7XP93; Match level="QueryCoverage=95%, HitCoverage=23%, E-value=5e-19, Identity=51%"; Hit description =OSJNBa0021F22.7 protein
MESIWQLINEWEIQLLVLLSFIIQVFLFFTGSLRRCSTNGLLRGTMWIAYLGADVVAVYALGFLSRQEDAIMENGTLRRTHPLAFFWAPFLLIHLGGQDTIT

SEQ ID NO: 98729 - protein, 806 aa, Setaria italica
  Transcript Sequence Number=SeqID_32755
  Gene Ontology: Mol. function=cysteine-type peptidase activity; Cellular component=cytoplasm; Biological process=ubiquitin-dependent protein catabolic process
  Homolog annotation: Hit_ID=B8AE49; Match level="QueryCoverage=99%, HitCoverage=76%, E-value=5e-93, Identity=44%"; Hit description =Ubiquitin carboxyl-terminal hydrolase
  Pfam annotation: Domain name=UCH; Domain location=1-115; Score=-17.6; E_value=3.9e-06; Accession=PF00443.21; Description=Ubiquitin carboxyl- terminal hydrolase
AESCGKERFLIDKAPSVLTIHLKRFSPFNPLQKIDKKVDFQTTLNLKPFVSNSEGMDLKYSLYGVLVHAGWNTQSGHYYCFVRTSSGLWHNLDDNEVRQVREADVLRQKAYMLFYVRDKVRSAVIQKDNGDASLSEKKIISEKITCMNGAIRNGLVEKTLDFSTIAKEDIKLQKHDPDKGQPSDISATSQDQCSNEHSSIEVINASTSQNNVSVQKAPHTLPDGVDTLSTKAEQIALSVQRETMSPGQPDVFILDMKSQKLNPDDGQPSNISATSQDQCSNEHGSTEVTKASTSQNNEPVQKATCSHLDGTATSTKTEQTAPASQRETTFTAQPDACVLCDANSDQKAYEKPLQELQLESDGALTDSGKGIPASAFQLCNGADGLLGANEQAIEPQTEVFCKPTPDSDATTIAPFIPTEDTAVSNGTLTGNEDSTSGNEAKGTEPVKQHDGLIVVKELSVKSIDDKVKVEEQTAVRNNSLGDGQSMAKEVSVMETGHMADADDQTFKKNNSLDTGHVNCEKKIGSEDSAHVASSEDCAQMMCSENSVQVVDKDPCHGNLHKIIKIKSKKHVSHPAVNFYFGSKQLLLASLKPCKKRKHKRTRRRLTSDANAESTGDDRQTSTSETVLTSGMSRKSHRQKRSRNSASSEDAVQMYNKKQNLGNSCAAELTLDKKVSKDATLAAAELAASSCPGSVLNPDSGKCGVTDEKGSWHFNLLTRGLRVPQWDDDDMPNTKAAEMQHSSSTSIGYVLDERDEEYDRGRRKKVRKSKQGFSGPNPFQEMENIRSRQRRRIQTDQARSGHQPLRI

SEQ ID NO: 98730 - protein, 108 aa, Setaria italica
  Transcript Sequence Number=SeqID_32756
  Gene Ontology: Mol. function=DNA binding
  Homolog annotation: Hit_ID=B6SY06; Match level="QueryCoverage=87%, HitCoverage=19%, E-value=8e-26, Identity=63%"; Hit description=DNA binding protein
SYGNLRGLDASGNSEESSFGNGCKDSSSVPPEKFGFPWLPVENYQSATLDHDKRPLSDVKPCQVACKRPKQTDHNTWLYSLEECPFTSETEISASGFLLHLPSGFSAL

SEQ ID NO: 98731 - protein, 86 aa, Setaria italica
  Transcript Sequence Number=SeqID_32757
FATPCCVYPGERAKKPGSARAKKPGERAKKRASRWRGTGDARRPPIGAAAEEEEGVPRWWAWSAAARRGGPRGWERATRQRWPTAE

SEQ ID NO: 98732 - protein, 39 aa, Setaria italica
  Transcript Sequence Number=SeqID_32758
QLSYFEIEKTTMKYLVLFLFILFAYAVWGFHSTKVKKLK

SEQ ID NO: 98733 - protein, 101 aa, Setaria italica
  Transcript Sequence Number=SeqID_32759
LTASYGTFSAPNCRNWRRNQLVGPLIGSILIEKRNSVWFLAEQQGRKKQRKEGDESNSNQPTTRARHVAVAAADNYGGEATSGHAAEGNWRRSARGREGLD

SEQ ID NO: 98734 - protein, 221 aa, Setaria italica
  Transcript Sequence Number=SeqID_32760
  Gene Ontology: Mol. function=receptor activity; Cellular component =membrane; Biological process=intracellular protein transport
  Homolog annotation: Hit_ID=Q307Y3; Match level="QueryCoverage=100%, HitCoverage=100%, E-value=1e-78, Identity=66%"; Hit description =Vesicle transport v-SNARE 11-like
  Pfam annotation: Domain name=Sec20; Domain location=128-219; Score =0.4; E_value=0.0082; Accession=PF03908.5; Description=Sec20
  Pfam annotation: Domain name=V-SNARE; Domain location=41-196; Score =163.0; E_value=8.7e-46; Accession=PF05008.7; Description=Vesicle transport v-SNARE protein
  Pfam module annotation: Pfam domain module=Sec20::V-SNARE; Domain location=128-219::41-196
MSEVFEGYERQYCEASASLTRKCTAAAALQGEKLKQKAAEIKSGIDGAEALIRKMDLEARSLQPSVRAGLLAKIREYKSDLNNLKGALKRITSGNAQQGAREELLESGMADALGVSADQRSRLLRTTERQNQTTDRLRDSHRTMLETEDLGVSILHDLSQQRQSLLHAHRALDDVDVNVSKSRKTIGSMVRRMDRNKWIIGLIIALLVLAILVILYFKLVH

SEQ ID NO: 98735 - protein, 67 aa, Setaria italica
  Transcript Sequence Number=SeqID_32761
KISNRRASINHKCAQSSVIPPFQIMGSFNFSRYFAMYLDMIYKFYYVSRYDLYLSRSKIYIFKKKTK

SEQ ID NO: 98736 - protein, 190 aa, Setaria italica
  misc_feature (169)..(169): Xaa can be any naturally occurring amino acid
  Transcript Sequence Number=SeqID_32762
  Gene Ontology: Mol. function=nucleotide binding; Cellular component =intracellular; Biological process=small GTPase mediated signal transduction
  Homolog annotation: Hit_ID=B6TE37; Match level="QueryCoverage=96%, HitCoverage=33%, E-value=4e-88, Identity=88%"; Hit description=tRNA modification GTPase trmE
  Pfam annotation: Domain name=TrmE_N; Domain location=1-71; Score =70.1; E_value=8.1e-18; Accession=PF10396.1; Description=GTP-binding protein TrmE N-terminus
GSRSNADGSVIDEVLVVPMLAPRSYTREDVVELQCHGNDLCLRRVLRACLEAGARLADPGEFTLRAFLNGRLDLAQAENVSRLISAKSTAAADSALAGIQGGFSTLVKSLRSRCIELLTEIEARLDFEDEMPPLDPVMLISKINSMRQEVQDALDTSNYDKLLQSGLQXIIGRPNVGKSSLLNAWSKLAE

SEQ ID NO: 98737 - protein, 95 aa, Setaria italica
  Transcript Sequence Number=SeqID_32763
  Subcellular localization annotation: CTP_CleavageSite=38; ConfidenceScore=5.02e-01
MVAAGAALRLRLLYRMLRVGELLALVAFLSWSSSRVPSAAAAVLRLAGSLLLNARFVFVLGNAIVLLLFALSRHDLSSSSNQQQTSTASTTATPP

SEQ ID NO: 98738 - protein, 68 aa, Setaria italica
  Transcript Sequence Number=SeqID_32764
LSFCHALFVESSCVVSPTHEFHNRKRLKVSASISGSFDPVSAHLDNNLHGKGNIDEEGQNMIYFAWES

SEQ ID NO: 98739 - protein, 119 aa, Setaria italica
  Transcript Sequence Number=SeqID_32765
  Gene Ontology: Mol. function=ammonium transmembrane transporter activity; Cellular component=membrane; Biological process=transport
  Homolog annotation: Hit_ID=B6SV23; Match level="QueryCoverage=91%, HitCoverage=22%, E-value=7e-54, Identity=96%"; Hit description =Ammonium transporter 2
MAASSAYAASLPAVPDWLNKGDNAWQLTAATLVAIQSMPGLVVLYGSIVKKKWAVNSAFMALYAYASSLLVWVLVGFRMAFGERLLPFWGKAGVALSQGYLVRRASLSATAHGDTPRTE

SEQ ID NO: 98740 - protein, 248 aa, Setaria italica
  Transcript Sequence Number=SeqID_32766
  Homolog annotation: Hit_ID=A2QRG1; Match level="QueryCoverage=58%, HitCoverage=56%, E-value=2e-09, Identity=28%"; Hit description =Contig An08c0130, complete genome
  Pfam annotation: Domain name=DUF2343; Domain location=49-142; Score =114.7; E_value=3.2e-31; Accession=PF10173.1; Description =Uncharacterised conserved protein (DUF2343)
GGLGSAGDGALPPPTLRDLWRGITSRGRTAPEKAESVVDFVDAQMNRAWIGFGSAPEGSMKSRIHSFGLKLLSRVRPSEVLLKSVTKDVSAVEIVHPASINSRLVRRRLRHIAIRGASVHKKFLYGSVCLLPVTSFFMVLPLPNIPFFWVLFRAYSHWRALQGSERLQLLLSDCSDQWKVHEKEIGSAKDGNPSENARYPWKFRPSKRLDGFLERRNLDEGLDCDTISRICKEYDLDKIDVLKYRDLR

SEQ ID NO: 98741 - protein, 117 aa, Setaria italica
  misc_feature (1)..(13): Xaa can be any naturally occurring amino acid
  Transcript Sequence Number=SeqID_32767
XXXXXXXXXXXXXVLRNEKIQHWIQFKIQIHPKILNHKQNASHVRMVELNPTLSASFCSQFVGRCSSGRARQLAKCQLLFTRWVQHNKPPWVPTLWCVLFVPSSGLMRSITRKIEAV

SEQ ID NO: 98742 - protein, 71 aa, Setaria italica
  Transcript Sequence Number=SeqID_32768
RRRASCRRRRRAEPEGSATASRPSPLLLHSLRLRFLNLDPPRRPLLKLSFLIRVLTACLCRLLSSLELEEA

SEQ ID NO: 98743 - protein, 66 aa, Setaria italica
  Transcript Sequence Number=SeqID_32769
MATTVAVALAVVVLAAAAAVTLPGAATASPAEGFQPLSKIAVHRTTIEMQPSAYVRATPALLGEQV

SEQ ID NO: 98744 - protein, 44 aa, Setaria italica
  Transcript Sequence Number=SeqID_32770
PTYQVLSFIFRGYFIGKFLHFWRNKLLISSSYEQTKGALHLPVA

SEQ ID NO: 98745 - protein, 223 aa, Setaria italica
  misc_feature (208)..(208): Xaa can be any naturally occurring amino acid
  Transcript Sequence Number=SeqID_32771
  Gene Ontology: Mol. function=protein binding; Cellular component=cell wall; Biological process=carbohydrate metabolic process
  Homolog annotation: Hit_ID=Q67VC5; Match level="QueryCoverage=87%, HitCoverage=66%, E-value=2e-99, Identity=49%"; Hit description =DeliriumA-like
  Pfam annotation: Domain name=LRR_1; Domain location=116-139; Score =3.9; E_value=54; Accession=PF00560.25; Description=Leucine Rich Repeat
  Pfam annotation: Domain name=LRR_1; Domain location=145-171; Score =6.1; E_value=20; Accession=PF00560.25; Description=Leucine Rich Repeat
  Pfam annotation: Domain name=LRR_1; Domain location=175-197; Score =4.3; E_value=46; Accession=PF00560.25; Description=Leucine Rich Repeat
  Pfam annotation: Domain name=LRR_1; Domain location=32-58; Score=3.0; E_value=80; Accession=PF00560.25; Description=Leucine Rich Repeat
  Pfam annotation: Domain name=LRR_1; Domain location=60-83; Score=7.5; E_value=11; Accession=PF00560.25; Description=Leucine Rich Repeat
  Pfam annotation: Domain name=LRR_1; Domain location=88-110; Score =2.4; E_value=1.1e+02; Accession=PF00560.25; Description=Leucine Rich Repeat
  Pfam module annotation: Pfam domain module=LRR_1::LRR_1::LRR_1::LRR _1::LRR_1::LRR_1; Domain location=116-139::145-171::175-197::32 -58::60-83::88-110
RTKSLLWFSLYMNDIGDEGAEKIAEALKDNKTISTIDLGGNNIHSKGVSAIAETLKDNTVLTTLDLSYNPIGSDGVKALCDVLKFHGKIQTLKLGWCQIGVQGAEFISDCLKYNTTLSTLDLRANGLGDDGAICLARSFKIINESLTSLDLGFNEIRDDGAFALAQALKANEDLAVTSLNLGNNFFTKFGQIALSEARDHVYEMSEKXEIDIIFRCGFLTGQF

SEQ ID NO: 98746 - protein, 55 aa, Setaria italica
  Transcript Sequence Number=SeqID_32772
  Gene Ontology: Mol. function=protein serine/threonine kinase activity; Biological process=protein amino acid phosphorylation
  Homolog annotation: Hit_ID=B6UD76; Match level="QueryCoverage=92%, HitCoverage=9%, E-value=2e-17, Identity=82%"; Hit description=ATP binding protein
RLEAHFARLPTSYQLDVNVDKAEQVLIHQKVLAEAKDPDRRPAFAVRFLRVIGFL

SEQ ID NO: 98747 - protein, 816 aa, Setaria italica
  Transcript Sequence Number=SeqID_32773
  Gene Ontology: Mol. function=nucleoside-triphosphatase activity; Cellular component=integral to membrane; Biological process=protein catabolic process
  Homolog annotation: Hit_ID=Q0DHL4; Match level="QueryCoverage=93%, HitCoverage=92%, E-value=0.0, Identity=86%"; Hit description=Cell division protease ftsH homolog 8, mitochondrial
  Pfam annotation: Domain name=AAA; Domain location=364-554; Score =311.9; E_value=1.4e-90; Accession=PF00004.21; Description=ATPase family associated with various cellular activities (AAA)
  Pfam annotation: Domain name=AAA_2; Domain location=361-493; Score= -29.2; E_value=0.0021; Accession=PF07724.6; Description=ATPase family associated with various
  Pfam annotation: Domain name=AAA_3; Domain location=364-496; Score= -21.3; E_value=0.08; Accession=PF07726.3; Description=ATPase family associated with various
  Pfam annotation: Domain name=AAA_5; Domain location=364-500; Score= -4.5; E_value=0.0023; Accession=PF07728.6; Description=ATPase family associated with various
  Pfam annotation: Domain name=FtsH_ext; Domain location=162-338; Score= 95.5; E_value=1.8e-25; Accession=PF06480.7; Description=FtsH Extracellular
  Pfam annotation: Domain name=Peptidase_M41; Domain location=561-764; Score=412.9; E_value=5.3e-121; Accession=PF01434.10; Description =Peptidase family M41
  Pfam module annotation: Pfam domain module=AAA::AAA_2::AAA_3::AAA _5::FtsH_ext::Peptidase_M41; Domain location=364-554::361-493::364 -496::364-500::162-338::561-764
  Subcellular localization annotation: CTP_CleavageSite=15; ConfidenceScore=5.06e-01
MTLASLARALGRSARSSRPRQGFQLGGLGGVRSPPLPPPVHGGEGGGLGLVRGYLTAASAAGLGRPAGGKAVDWRYLLASPQFRRLFSDESKKNYENYYPKGKKEVPKGDGSNKSESKQESTDEGGWNFQETAMKQLQNFLAPLLILGLMLSSMSSGTADQKEISFQEFKNKLLEPGLVDRIVVSNKSVAKVYVRISPQPKSQGQNSDTHISTIDVPGKPAPSRCKYYFNIGSVDSFEEKLEEAQEAMGIDPHDFVPVTYVAEVNWFQEVMRFAPTAFLVGLIYLMGKRMQSGFNIGGGPGKGRGGIFNIGKATVTKMDKNSKNKVFFKDVAGCDEAKQEIMEFVHFLKSPKKYEELGAKIPKGALLVGPPGTGKTLLAKATAGESGVPFLSISGSDFMEMFVGVGPSRVRNLFQEARQCAPSIVFIDEIDAIGRARGRGGFSGSNDERESTLNQLLVEMDGFGTTSGVVVLAGTNRPDILDKALLRPGRFDRQITIDKPDIKGRDQIFRIYLKKLKLDNEPSFYSQRLAALTPGFAGADIANVCNEAALIAARNEQTQITMQHFESAIDRIIGGLEKKNKVISKLERRTVAYHESGHAVAGWFLEHAEPLLKVTIVPRGTAALGFAQYVPNENLLMTKEQLFDMTCMTLGGRAAEQVLIGKISTGAQNDLEKVTKMTYAQVAVYGFSEKVGLLSFPQRDDGFEMTKPYSNQTASIIDDEVREWVGKAYKKTVELITEHKEQVAQIAELLLEKEVLHQDDLTRVLGERPFKATEPTNYDLFKQGFQDDDDKSQAPAKNAELPDDDASPSLGEVVPT

SEQ ID NO: 98748 - protein, 180 aa, Setaria italica
  Transcript Sequence Number=SeqID_32774
RTLSTCGQQPSDSPLRYEHSELCWQQPSSDEDEQSGHCWQQPSSDEDEQSGHCWQQPSSDQAQPMVGQTGIAGPDVEEDPIDGFGPRKWSEILDIRTEVDEPRTSPRCSLSLSGDDCGTAMEDEPGHLSPLLMFGAAGSDDGGGHILDGSADVVDLVTPTPVGRLRRRGCVASVCPKIID

SEQ ID NO: 98749 - protein, 218 aa, Setaria italica
  Transcript Sequence Number=SeqID_32775
  Gene Ontology: Cellular component=integral to membrane
  Homolog annotation: Hit_ID=B9T5G8; Match level="QueryCoverage=48%, HitCoverage=16%, E-value=2e-21, Identity=51%"; Hit description=DNA double-strand break repair rad50 ATPase, putative
IEDLKEKYLKAETRAENAESKCSLLTDTNLELSEERSFLRGRVESLENSLHQANQLKVSTAKDIGSKTKIITDLVAKLALERERLHVQIVTLTKKNSMLAQKCKENVDKASLSKEATDVAKGEIRPSKATEEAALTSSPTQTKVIPTGNSPQEEVEIDEVTPLEGESRAESTLETVRCIEPKLLNWKYILAAVLALVAVILVYQLYQSDDGVEQLFKD

SEQ ID NO: 98750 - protein, 123 aa, Setaria italica
  misc_feature (80)..(80): Xaa can be any naturally occurring amino acid
  Transcript Sequence Number=SeqID_32776
  Gene Ontology: Mol. function=protein serine/threonine kinase activity; Biological process=protein amino acid phosphorylation
  Homolog annotation: Hit_ID=Q84SH0; Match level="QueryCoverage=100%, HitCoverage=17%, E-value=1e-43, Identity=69%"; Hit description =Serine/threonine kinase receptor-like protein
EQPVDFLSLVWEHWTTGTIVEIMDPSLRGKAPAEQMLKCVHIGLLCVQDNPVDRPMMSTVNVMLSSGTVSLQAPLKPVFXIPKSGYYSTAYSESHPTASQSTGNAKSGAMSPNEVSITELEPR

SEQ ID NO: 98751 - protein, 466 aa, Setaria italica
  misc_feature (410)..(410): Xaa can be any naturally occurring amino acid
  misc_feature (451)..(451): Xaa can be any naturally occurring amino acid
  Transcript Sequence Number=SeqID_32777
  Gene Ontology: Mol. function=phosphoprotein phosphatase activity; Biological process=actin cytoskeleton organization and biogenesis
  Homolog annotation: Hit_ID=Q6K8Z4; Match level="QueryCoverage=62%, HitCoverage=21%, E-value=2e-59, Identity=50%"; Hit description =Formin-like protein 7
MSFRIMFNTAFIRSNILMLNRDHVDMLWNAKDQFPKDFRFEVIFSDMDAVTSHVTTEPVIHQEKQGLGVEEFAKVLDIFNHLDWLDGKRDTVPHTTQLKISAVTDEPETFFDTREELESEILHGQINSSTVVLKLGSEFGMLVSTEPRHIRLDSSSANAQSKSQTTALSPSRTQPTTALLSPSKVKIPKTTASSRELSSNTVMPQRSSSPVQPQQLMSDSAVQMLTEISDSASAEKSGSQTPVEHSSPLMANKSAPTASLIHLCTPPPLPPPPPTVSLLPVPAKLPQNTSTSTIDISLRSTVHPSSPSSEPSVPPQGFSRTGQLVKSQEPSNEIHGKLQTDSAEGPNVFALSADSSLSLDKKLRSDTTPPPPPPPPPPPLQKSGMMLLPLSHGEEVTITIEKAVPPQPPXPPPPPPPPPPASTVSNSNPYAVSVIPASQKRARSPTPLAPXLAKSSFSSPPPPPPP

SEQ ID NO: 98752 - protein, 94 aa, Setaria italica
  misc_feature (82)..(82): Xaa can be any naturally occurring amino acid
  Transcript Sequence Number=SeqID_32778
PNERTNGGEEEEGRQHDDVGGGHGGEDDDDAADGCGARASHHHRRHELVASIQEALRGVMDRKTASSGDTSSSSGGGGSIKXQRMSGAHEQGSL

SEQ ID NO: 98753 - protein, 56 aa, Setaria italica
  misc_feature (26)..(26): Xaa can be any naturally occurring amino acid
  Transcript Sequence Number=SeqID_32779
QMSCPLISSTVGIRIGSTAAAWLADXPPAPAPAADGSGEAISRYLVPSPTSSRRRS

SEQ ID NO: 98754 - protein, 207 aa, Setaria italica
  Transcript Sequence Number=SeqID_32780
LKMTSRKENSTLSEFSVLKDIVKVADELVHGRPMRSLVRSSTHHCDESDVPSLGEDESMVTECEIHANLEEPACSVAVPDSSEERLVQPANSKHILSAQCYLDSSCMVPEWQDEAQASVAGNLVMHQEPTWVLDDHIASSSPSNSANETEEHVLDHCRGNAFTSKPMEESASHEDDQPSPLSVCESSLGAEDGCSGGFEKISETCKS

SEQ ID NO: 98755 - protein, 53 aa, Setaria italica
  Transcript Sequence Number=SeqID_32781
MLRRMVSDPAPDSSGGEARPRAGAALFAVPRLFVGFAAKRPSDGESSRSPTSP

SEQ ID NO: 98756 - protein, 112 aa, Setaria italica
  misc_feature (13)..(13): Xaa can be any naturally occurring amino acid
  Transcript Sequence Number=SeqID_32782
AYTEVPPPPYYEXVSPEDRYLSPPPPAHHESPPPPPPVHHDPPPPPYYEVSPEDRYLSPPPPPASVPKYDYSSPPPPSSPPYSEVSPEERYPSPPPPPRELPKLPVYDYSSP

SEQ ID NO: 98757 - protein, 103 aa, Setaria italica
  misc_feature (34)..(34): Xaa can be any naturally occurring amino acid
  Transcript Sequence Number=SeqID_32783
  Gene Ontology: Mol. function=protein serine/threonine kinase activity; Biological process=protein amino acid phosphorylation
  Homolog annotation: Hit_ID=Q69MP3; Match level="QueryCoverage=91%, HitCoverage=11%, E-value=3e-37, Identity=82%"; Hit description =Putative receptor kinase 5
  Pfam annotation: Domain name=Pkinase_Tyr; Domain location=7-102; Score=-173.2; E_value=0.033; Accession=PF07714.9; Description =Protein tyrosine kinase
VTATRNFSEACKIGQGGFGKVYKAMLGGKEVAIXKRLSKDSEQGTKEFSNEVILIAKLQHRNLVRLFGCSVEADEKILIYEYLANGSLDATLFDKSYAISFYK

SEQ ID NO: 98758 - protein, 85 aa, Setaria italica
  Transcript Sequence Number=SeqID_32784
  Gene Ontology: Mol. function=transferase activity, transferring groups other than amino-acyl groups
  Homolog annotation: Hit_ID=B9R7Y9; Match level="QueryCoverage=64%, HitCoverage=12%, E-value=6e-14, Identity=65%"; Hit description =Taxadien-5-alpha-ol O-acetyltransferase, putative
AFTHPEYNSYGGIGAVANGNGNGNGSEAPSLLARLLGQSLAPVTLTFTAAHLLRLKRQCAPPLKCTSFEALAAHVWRAWVRALDP

SEQ ID NO: 98759 - protein, 119 aa, Setaria italica
  misc_feature (112)..(112): Xaa can be any naturally occurring amino acid
  Transcript Sequence Number=SeqID_32785
SGTARQQDLPGVSSLKQGAGNKSEKDSSTVLDKAANAPVSKEPSIVAHANKNKAQNGKAMPGNGGSLANMWGRASAKPKPPATTNPAAVASVAATADAQICAKEEADADSSXDRERGSV

SEQ ID NO: 98760 - protein, 105 aa, Setaria italica
  Transcript Sequence Number=SeqID_32786
IRGRSPRLYKTKSEPSSASALDHVTPNSRPSDLIWTVETRAQVRAPQASSRVCTLPDLTDVISSKAILKMAPAYLPFPHERNNKIVILAHVARRVIKPAWNKHGK

SEQ ID NO: 98761 - protein, 143 aa, Setaria italica
  Transcript Sequence Number=SeqID_32787
  Subcellular localization annotation: CTP_CleavageSite=44; ConfidenceScore=5.60e-01
ARLQDRSCHNPSAGLHTTDSLSPPLSPIAMVSAAPSSPASRTARSSTAGSSARITRLCLLILLLNCCGAIYHSRHDPGSVAFVAASFTDLALLLYLLHRFEGAPLGSRARSRAKAGVWILSSILTVMFSCKVGALMPLAAAIA

SEQ ID NO: 98762 - protein, 179 aa, Setaria italica
  Transcript Sequence Number=SeqID_32788
  Gene Ontology: Mol. function=protein serine/threonine kinase activity; Cellular component=integral to membrane; Biological process=protein amino acid phosphorylation
  Homolog annotation: Hit_ID=Q84SG8; Match level="QueryCoverage=100%, HitCoverage=25%, E-value=2e-66, Identity=71%"; Hit description =Serine/threonine kinase receptor-like protein
  Pfam annotation: Domain name=Pkinase; Domain location=2-173; Score= -32.4; E_value=1.5e-06; Accession=PF00069.17; Description=Protein kinase domain
  Pfam annotation: Domain name=Pkinase_Tyr; Domain location=1-162; Score=-108.7; E_value=1.7e-06; Accession=PF07714.9; Description =Protein tyrosine kinase
  Pfam module annotation: Pfam domain module=Pkinase::Pkinase_Tyr; Domain location=2-173::1-162
YEYIKNGSLDSILFDKTTGNALHWEQQYNIILGIAKGILYLHEDSSTRIIHRDLKANNILLDDDMEPKIADFGLARLLGEGHTLTQTARVVGTFGYMAPEYAMHGLVSPKVDIFSFGVLVLEIVTRRSNCGSDDYSAVNLLSDVWAHWTKGSISQMLDQSLVGYGRIQALRCIHVGLSC

SEQ ID NO: 98763 - protein, 59 aa, Setaria italica
  Transcript Sequence Number=SeqID_32789
ALNWENIAFLYICFSACSSITVICKVSILLCIRWFSKIYFTSLQNYHLLGGLAHTLICI

SEQ ID NO: 98764 - protein, 265 aa, Setaria italica
  misc_feature (27)..(27): Xaa can be any naturally occurring amino acid
  Transcript Sequence Number=SeqID_32790
  Gene Ontology: Mol. function=transporter activity; Cellular component= mitochondrial inner membrane; Biological process=transport
  Homolog annotation: Hit_ID=Q10MX0; Match level="QueryCoverage=85%, HitCoverage=83%, E-value=1e-122, Identity=67%"; Hit description =Mitochondrial carrier protein, expressed
  Pfam annotation: Domain name=Mito_carr; Domain location=131-226; Score=104.8; E_value=2.8e-28; Accession=PF00153.19; Description =Mitochondrial carrier protein
  Pfam annotation: Domain name=Mito_carr; Domain location=37-126; Score= 77.1; E_value=6.2e-20; Accession=PF00153.19; Description =Mitochondrial carrier protein
  Pfam module annotation: Pfam domain module=Mito_carr::Mito_carr; Domain location=131-226::37-126
  Subcellular localization annotation: CTP_CleavageSite=41; ConfidenceScore=5.45e-01
MAAASPSSSPPPPPPAPGAGFPGRGAXGGGGGRPPVPPYVKAAAGSLGGVMEACCLQPIDVVKTRLQLDRSGAYRGIAHCGTTVARAEGVRALWKGLTPFATHLTLKYALRLGSNAVLQSAFKDPTTGKVSAHGRLASGFGAGVIEALLIVTPFEVVKIRLQQQKGLTTDLLRYKGPIHCAKTIVREEGLFGLWSGALPTVMRNGTNQAAMFTAKNAFDIVLWKKHEGDGKVLLPWQSMISGFLAGTAGPVCTGPFDVVKTRLMA

SEQ ID NO: 98765 - protein, 61 aa, Setaria italica
  Transcript Sequence Number=SeqID_32791
RLKLSLPFMVLQKPSFDRVKLSLLLLFLQKAVNYHQQFACCNFFGQHKRPTVLLADSIGFC

SEQ ID NO: 98766 - protein, 90 aa, Setaria italica
  Transcript Sequence Number=SeqID_32792
  Gene Ontology: Mol. function=RNA-directed DNA polymerase activity; Biological process=RNA-dependent DNA replication
  Homolog annotation: Hit_ID=Q8LJX1; Match level="QueryCoverage=86%, HitCoverage=3%, E-value=3e-20, Identity=51%"; Hit description =Putative reverse transcriptase
IPPPVLSINHNKTWSILSWNIRGINSQEKWDHIRNKISGSGAAIVCLQETKRESFDQSYVSKFCPRHLNKFAFVPSIGASGGMLIVWNSA

SEQ ID NO: 98767 - protein, 98 aa, Setaria italica
  Transcript Sequence Number=SeqID_32793
  Gene Ontology: Mol. function=protein serine/threonine kinase activity; Biological process=protein amino acid phosphorylation
  Homolog annotation: Hit_ID=Q8W3E7; Match level="QueryCoverage=96%, HitCoverage=18%, E-value=1e-20, Identity=57%"; Hit description =Putative kinase
TRRAEEVVDPDMELKPATRALKRALLVALRCVDPDAEKRPTMGQVVRMLEAEDVPSREDRRSRRGHSSNADNESKASSSEFEISSDRRESGPSARFQS

SEQ ID NO: 98768 - protein, 474 aa, Setaria italica
  Transcript Sequence Number=SeqID_32794
  Gene Ontology: Mol. function=protein serine/threonine kinase activity; Cellular component=plasma membrane; Biological process =protein amino acid phosphorylation
  Homolog annotation: Hit_ID=Q8W3E7; Match level="QueryCoverage=93%, HitCoverage=85%, E-value=0.0, Identity=88%"; Hit description =Putative kinase
  Pfam annotation: Domain name=Pkinase; Domain location=154-425; Score =156.6; E_value=7.2e-44; Accession=PF00069.17; Description=Protein kinase domain
  Pfam annotation: Domain name=Pkinase_Tyr; Domain location=154-425; Score=112.1; E_value=1.9e-30; Accession=PF07714.9; Description =Protein tyrosine kinase
  Pfam module annotation: Pfam domain module=Pkinase::Pkinase_Tyr; Domain location=154-425::154-425
FILGFMCFWSIYRRKPKKSFDNIPISQIPDVSKEIAVDEVREHAIVQNFHVQESHALAVQEKPYEKDSGKMLAHLVRSKSSDADNLSQCSSAYQCERAGSSYSGDEGSSGNARRQYSQYATVSASPLVGLPEFSHLGWGHWFTLRDLEHATNRFSKENVIGEGGYGIVYRGRLINGTDVAIKKLLNNMGQAEKEFRVEVEAIGHVRHKNLVRLLGYCVEGIHRMLVYEYVNNGNLEQWLHGAMRQHGVLTWEARMKIILGIAKALAYLHEAIEPKVVHRDIKSSNILIDEEFNGKLSDFGLAKLLGAGKSHITTRVMGTFGYVAPEYANTGLLNERSDVYSFGVLLLEAVTGRDPVDYARPANEVHLVEWLKMMVGTRRAEEAVDPDMELKPATRALKRALLVALRCVDPDAEKRPTMGQVVRMLEAEDVPSREDRRSRRGHSSNADSESKASSSEFEISSDRRESGLSARSQS

SEQ ID NO: 98769 - protein, 72 aa, Setaria italica
  Transcript Sequence Number=SeqID_32795
RIKYVIDNSFGLDVSGEVDGMWRPAKVWRTARSMGDGSSAVSVSAVEVTQPQTHRLQRISFPSHIGTTIGWY

SEQ ID NO: 98770 - protein, 191 aa, Setaria italica
  Transcript Sequence Number=SeqID_32796
  Gene Ontology: Mol. function=DNA binding; Cellular component=nucleus; Biological process=regulation of transcription
  Homolog annotation: Hit_ID=O81790; Match level="QueryCoverage=54%, HitCoverage=19%, E-value=1e-32, Identity=64%"; Hit description=NAM / CUC2-like protein
  Pfam annotation: Domain name=NAM; Domain location=1-84; Score=108.5; E_value=2.3e-29; Accession=PF02365.7; Description=No apical meristem (NAM) protein
AKALIRSDDPEWFFFAPLDRKYPGGHRSNRSTAAGYWKATGKDRLIRSRPAGTLIGIKKTLVFHRGRAPRGHRTSWIMHEYRTAEPQLQQGQNGSFVLYRLFDKHEEEEPEAADAADSPSTSSAADPPPIAPAVKAENLCQPASAKMAHLLTTLSNNEPTAAQQEGDPLLDVLAQLPDLQPEQTYDGFPTI

SEQ ID NO: 98771 - protein, 588 aa, Setaria italica
  Transcript Sequence Number=SeqID_32797
  Gene Ontology: Mol. function=hydrolase activity, hydrolyzing O -glycosyl compounds; Cellular component=extracellular region; Biological process=carbohydrate metabolic process
  Homolog annotation: Hit_ID=Q0J360; Match level="QueryCoverage=96%, HitCoverage=95%, E-value=0.0, Identity=79%"; Hit description=Beta -fructofuranosidase, insoluble isoenzyme 7
  Pfam annotation: Domain name=Glyco_hydro_32C; Domain location=406 -524; Score=195.9; E_value=1.1e-55; Accession=PF08244.4; Description =Glycosyl hydrolases family 32 C termi
  Pfam annotation: Domain name=Glyco_hydro_32N; Domain location=42-364; Score=571.8; E_value=7.6e-169; Accession=PF00251.12; Description =Glycosyl hydrolases family 32 N termi
  Pfam module annotation: Pfam domain module=Glyco_hydro_32C::Glyco _hydro_32N; Domain location=406-524::42-364
MAGLPLSAVAFYLCLLASSSSALRVAPATTSEGRHVRRTAYHFQPAKNWQNDPNGPMYYNGMYHFFYQYNPHGALWDIGNLSWGHSVSGDLVNWAALDTAIDPTAPFDINGCWSGSATILRGGTPAILYTGIDANKEQVQNLAFPKNPADPLLREWHKPSYNPVIPLPADVPGDKFRDPSTAWLGRDGLWRIAVSAEVSGVASTLVYRSADFVHWERNDAPLHSSRAAGMVECPDLFPVKAHGEEGGLDTSASGAGVSHVLKLSVMDTLQDYYMVGRYDDAADAFVPAEPERGDDVRNWRRFDYGHVYAAKSFFDARRNRRVLWAWANESDSQADDVARGWSGVQTVPRKLWLDKDGKQLRQWPIEEIETLRRKRVGLRRNTMLSAGAMNEIVGIAEAQADVEVAFRIPSLEEAEALDSNWLLDPQKLCGEKGASVPGGVGPFGLIVMASGDLQEHTAVFFRVFRHDDKYKVLMCTDLTRSSARAGVYKPPYGGFVDIDIEERKTIKLRTLVDHSVVESYGAEGRACITARVYPEHVETSNSHMFVFNNGTDKVKVTKLEAWELAAATVNVGDEGLIVSESKDESESY

SEQ ID NO: 98772 - protein, 193 aa, Setaria italica
  Transcript Sequence Number=SeqID_32798
  Homolog annotation: Hit_ID=Q9M878; Match level="QueryCoverage=96%, HitCoverage=98%, E-value=9e-38, Identity=41%"; Hit description =F16B3.27 protein
  Subcellular localization annotation: CTP_CleavageSite=24; ConfidenceScore=5.23e-01
MGGLSVIAPPARDSASPQHRRARRAFLVSNYLILGCASGCGFLTLSLRLVPSVDGFLLILLHALTVAAAVAGCAVIAAPDPPRGRCYTVHMSATVVVSILQGAAAVLAFSRTADFLSDGLKSYVREEDGAVILRMVGGLGVAIFCLEWVALALAFVLRYYAYVDRECGGNPLRRSAKVGGEDGTSTWPWPFQV

SEQ ID NO: 98773 - protein, 89 aa, Setaria italica
  misc_feature (36)..(36): Xaa can be any naturally occurring amino acid
  misc_feature (66)..(66): Xaa can be any naturally occurring amino acid
  Transcript Sequence Number=SeqID_32799
  Subcellular localization annotation: CTP_CleavageSite=41; ConfidenceScore=5.08e-01
PAPATGAHSPRRQLTVRNPLPAAAPCPLPIADPPAXPVYSPAFTKRAPPLHQPPLPLLPAACAPPXPAPPPPAPRPSTPPPPRRPPSAS

SEQ ID NO: 98774 - protein, 216 aa, Setaria italica
  Transcript Sequence Number=SeqID_32800
  Gene Ontology: Mol. function=oxidoreductase activity; Cellular component=endoplasmic reticulum membrane; Biological process =oxidation reduction
  Homolog annotation: Hit_ID=Q6K5K6; Match level="QueryCoverage=91%, HitCoverage=78%, E-value=9e-82, Identity=73%"; Hit description =Putative b-keto acyl reductase
  Pfam annotation: Domain name=adh_short; Domain location=1-123; Score=- 27.8; E_value=0.00092; Accession=PF00106.17; Description=short chain dehydrogenase
DVTFVLDFAADGLAAKVDALGELIRDLDVGVLVNNAGACYPYARYFHEVDEALVRNMVRVNVEATTRVTHAVLPGMVERGRGAIVNIGSGSASVLPSCPLHTVYAATKAFVDQFSRSLYVEYKSKGIDVQCQAPMYVATKMASIRNPSFLAPSPEAYARAAVRYIGYEPRCSPYWAHAVWKLVSILPGSVADRVILSMALDGRAKGRAKDARKKKQ

SEQ ID NO: 98775 - protein, 209 aa, Setaria italica
  Transcript Sequence Number=SeqID_32801
  Gene Ontology: Mol. function=secondary active sulfate transmembrane transporter activity; Cellular component=integral to membrane; Biological process=sulfate transport
  Homolog annotation: Hit_ID=Q8H7X0; Match level="QueryCoverage=100%, HitCoverage=35%, E-value=3e-70, Identity=56%"; Hit description =Putative sulfate transporter
  Pfam annotation: Domain name=STAS; Domain location=75-194; Score =101.0; E_value=4.1e-27; Accession=PF01740.13; Description=STAS domain
LIDIKEACNIWKVDKMDFVTCLGAFVGVLFGSVEIGLAVAIAISFAKIIIQSLRPQVEVLGRLQGTNIFCSIRQYPVACRTPTVLTIRIDTSFMCFINATFIKERIIEWVREEVEASDGKARERIQAVVLDMSSVVNIDTSGLTALEELHKELVSLGIQMAISSPGWNAVQKMKVSRVVDRIGEDWIFLTVGEAVEACLTEQKGTALEC

SEQ ID NO: 98776 - protein, 95 aa, Setaria italica
  Transcript Sequence Number=SeqID_32802
FKNNRNLDTYTSSCNYLDQKVYSQDSKAHYHGQGAKLGTMFWQNELFPNRRQFYRYPHELTSLNKFSIFWCQENLVDMPLSYTLLARSSKPMLKT

SEQ ID NO: 98777 - protein, 141 aa, Setaria italica
  misc_feature (61)..(61): Xaa can be any naturally occurring amino acid
  Transcript Sequence Number=SeqID_32803
  Gene Ontology: Mol. function=hydrolase activity, hydrolyzing O -glycosyl compounds; Biological process=carbohydrate metabolic process
  Homolog annotation: Hit_ID=B9SVM8; Match level="QueryCoverage=99%, HitCoverage=21%, E-value=3e-46, Identity=62%"; Hit description=Alpha- galactosidase/alpha-n-acetylgalactosaminidase, putative
DLAEKLLPHGYQYAVIDFLWYRKYVDGAYTDSYGFDNIDEWGRPFPDLQRFPSSRIDNPRXWKPRKVHGMGLKFGIHLMKGISVQAVNANTPILDIKTGKPYLENGRQWTARDIGLTHRTCAWMPHGFMSVNTDTGAGRAF

SEQ ID NO: 98778 - protein, 91 aa, Setaria italica
  misc_feature (77)..(77): Xaa can be any naturally occurring amino acid
  Transcript Sequence Number=SeqID_32804
  Gene Ontology: Mol. function=hydrolase activity, hydrolyzing O -glycosyl compounds; Biological process=carbohydrate metabolic process
  Homolog annotation: Hit_ID=Q5NKR8; Match level="QueryCoverage=64%, HitCoverage=13%, E-value=2e-23, Identity=98%"; Hit description =Putative beta-1,3-glucanase
MALRLMLAAAFAVLAPALAAAGAPALGINYGQVADNLPPPQAAAVLLRALNATKVKLYDADARVLSAFAGSGADFTXVGVPDRLVPSVCRP

SEQ ID NO: 98779 - protein, 42 aa, Setaria italica
  Transcript Sequence Number=SeqID_32805
VSKHNWLVLREKNKCWFFRTWRKIARLLDYCAFILLYFFLLN

SEQ ID NO: 98780 - protein, 157 aa, Setaria italica
  Transcript Sequence Number=SeqID_32806
  Homolog annotation: Hit_ID=B4FAJ5; Match level="QueryCoverage=100%, HitCoverage=32%, E-value=9e-66, Identity=80%"; Hit description =Avr9/Cf-9 rapidly elicited protein 137
MVVQKPWLPVDLRLPAGPQASLGILAFEAAAAMSKLLSLHRSLSDQEVSRLRSDAMRSPGVAYLNSTDQAFLLRLACAELVVSLDAAAAAVARLGLRCGLDFGGVYSCLKAGAHDARLDPLVAKGLRVKAKKMERLVAATARLCSEMEALDEMESAE

SEQ ID NO: 98781 - protein, 351 aa, Setaria italica
  Transcript Sequence Number=SeqID_32807
  Gene Ontology: Mol. function=protein serine/threonine kinase activity; Cellular component=plasma membrane; Biological process =protein amino acid phosphorylation
  Homolog annotation: Hit_ID=C4P7S3; Match level="QueryCoverage=96%, HitCoverage=71%, E-value=1e-137, Identity=75%"; Hit description=CBL -interacting protein kinase 16
  Pfam annotation: Domain name=NAF; Domain location=238-297; Score =99.1; E_value=1.5e-26; Accession=PF03822.6; Description=NAF domain
  Pfam annotation: Domain name=Pkinase; Domain location=2-192; Score =154.2; E_value=3.8e-43; Accession=PF00069.17; Description=Protein kinase domain
  Pfam annotation: Domain name=Pkinase_Tyr; Domain location=1-190; Score=-137.0; E_value=0.00013; Accession=PF07714.9; Description =Protein tyrosine kinase
  Pfam module annotation: Pfam domain module=NAF::Pkinase::Pkinase_Tyr; Domain location=238-297::2-192::1-190
YLRPKVRPDGPTYIMEYARGGELFAKVARGRLTEDHARRYFQQLVAAVGFCHRRGVAHRDLKPENLLLDEEGRLKVTDFGLAALPEQLRHDGLLHTQCGTPAYVAPEVLRKRGYDGARADLWSCGVVLYVLLCGFLPFQHDSYAKMYQKIFKADYQVPPWVSGDARRLIARLLVVDPTKRASIPEIMLTPWFRKGFVPPVLSPQVSPKKRLVDDEDAVGALLEGGGSDRDSSSTASLSPRSCNAFQLISSMSSGFDLSGLFESEQKAATVFTSRAPAAAVAEKLEAVGHALGFEVTRGKGCNLRMEAKVDGTNGRLALTAEVLEVAADVAVVEFAHDAGDALDFNKFCAED

SEQ ID NO: 98782 - protein, 77 aa, Setaria italica
  Transcript Sequence Number=SeqID_32808
  Subcellular localization annotation: CTP_CleavageSite=48; ConfidenceScore=5.21e-01
SVGITLLFLQKKTMTRQACTHPKYYSSVQTTKAFFSPFCIQWFGGPVEVWMKNRMNLDGPTIFQSKITLIELLTYEN

SEQ ID NO: 98783 - protein, 132 aa, Setaria italica
  misc_feature (97)..(97): Xaa can be any naturally occurring amino acid
  Transcript Sequence Number=SeqID_32809
  Gene Ontology: Cellular component=membrane
  Homolog annotation: Hit_ID=Q75I10; Match level="QueryCoverage=78%, HitCoverage=15%, E-value=3e-50, Identity=89%"; Hit description =Putative mechanosensitive ion channel protein
PLMRDIRNRFDHGGNWKKSPTYLISSSYLQPLLLWTGATLICRGLDPVVLPSAASQAVKTRLITFVRSLSTVLAFAYILTSLIQQVQKFLVDMRNPXDTRNVRFLSNCWYTPKSFELFLFSVCYCFSLFTKA

SEQ ID NO: 98784 - protein, 663 aa, Setaria italica
  Transcript Sequence Number=SeqID_32810
  Gene Ontology: Mol. function=zinc ion binding; Cellular component =membrane
  Homolog annotation: Hit_ID=Q75I10; Match level="QueryCoverage=100%, HitCoverage=100%, E-value=0.0, Identity=79%"; Hit description =Putative mechanosensitive ion channel protein
  Pfam annotation: Domain name=MS_channel; Domain location=236-448; Score=93.3; E_value=8.2e-25; Accession=PF00924.10; Description =Mechanosensitive ion channel
  Subcellular localization annotation: CTP_CleavageSite=43; ConfidenceScore=5.15e-01
MAVGLTSQLFQRVTVTETFCRRNILRSPEMRSSLPLPSTSFPSVSDRQDCWGHNVLRSNYRPMLYTPHRYRSSGFRSFALPVPFQKIPLVKSASLALTRSCDKLLSNPATSLVVPAIGIIVFALWGFLPLMRDIRNRFDHGGNWKKSPTYLISSSYLQPLLLWTGATLICRGLDPVVLPSAASQAVKTRLITFVRSLSTVLAFAYILTSLIQQVQKFLVDMRNPNDTRNMGFDFITKALYTGIWIAAVSLFMELLGFNTQKWITAGGFGTVLLTLAGREIFTNFLSSVMINATRPFVVNEWINAKIDGVEFSGIVEHVGWWSPTIIRGDDREAIYIPNHKFTVSILRNNSQRTHWRIKTYLAISHMDAGKIGIIVADMRKVLAKNPHIEQQKLHRRVFFEKIDPKNQALMIYISCFVKTSRFEEYLNVQEAVMLDLLRIVGHHKARLATQIRTVQKSYGNADFDNIPFGEDMYSRVRGRPLLIDTSARVSDDKAKPRPVSSHEEQKVKTNGSVEINSASPENTSLSNSEKQEQKKLVPDDARAKNSKSDNVAPATPSSDPVMSTSKIGKGKAHEPEATEGQDGSMSVANPKKESRPAFEDNIVLGVALAGSKRTLPIEEGNPYLSLSENEPDTVEAASSPKDKTAQSPKLSGQDKADQRNVDR

SEQ ID NO: 98785 - protein, 230 aa, Setaria italica
  misc_feature (195)..(195): Xaa can be any naturally occurring amino acid
  Transcript Sequence Number=SeqID_32811
  Gene Ontology: Mol. function=aspartic-type endopeptidase activity; Cellular component=anchored to membrane; Biological process =proteolysis
  Homolog annotation: Hit_ID=B6U239; Match level="QueryCoverage=100%, HitCoverage=46%, E-value=1e-120, Identity=93%"; Hit description =Aspartic-type endopeptidase/ pepsin A
RHRAMSAAGGSGEAPPLTFAEGNATLKVSNLGFLHYALVTVGTPGQTFMVALDTGSDLFWLPCQCDGCTPPTTAASGSASFYIPGTSSTSKAVPCNSNFCDLQKECSTTSQCPYKMVYVSAGTSSSGFLVEDVLYLSTENAHPHILKAQIMLGCGQTQTGSFLDAAAPNGLFGLGIDEVSVPSILAQKGLIPNSXSPMCFGRDGIGRISFGDQGSSDQEETPLDINQQHP

SEQ ID NO: 98786 - protein, 54 aa, Setaria italica
  misc_feature (32)..(32): Xaa can be any naturally occurring amino acid
  Transcript Sequence Number=SeqID_32812
  Homolog annotation: Hit_ID=Q8GT03; Match level="QueryCoverage=98%, HitCoverage=11%, E-value=3e-13, Identity=66%"; Hit description =SCARECROW-like
PVPMSYYALLQARRAAQGLGCDGFKVREEKGXFFLCWQDRAIFSVSAWRGRRFD

SEQ ID NO: 98787 - protein, 63 aa, Setaria italica
  Transcript Sequence Number=SeqID_32813
IYIMSKNTKTTYNLGRREYPSRACDALSILSLMDEHNYHLPKERERSKSYWKAWISQERLYYS

SEQ ID NO: 98788 - protein, 367 aa, Setaria italica
  Transcript Sequence Number=SeqID_32814
  Gene Ontology: Mol. function=isomerase activity; Biological process =cellular biosynthetic process
  Homolog annotation: Hit_ID=Q5XTZ5; Match level="QueryCoverage=100%, HitCoverage=100%, E-value=0.0, Identity=85%"; Hit description =Isopentenyl-diphosphate delta isomerase 2
  Pfam annotation: Domain name=IF-2B; Domain location=48-350; Score =361.1; E_value=2.1e-105; Accession=PF01008.9; Description=Initiation factor 2 subunit family
MVGSDALQSIVYARGSLRLLDQRKLPLEVDYIDVKDSADGWNAIRDMVVRGAPAIAIAAALALAVEVSGLDFTGTPAGAASFVSKKLEYLVSSRPTAVNLSDAATKLQTLVSKTAETAKDAKAIFQVYIEAAETMLIDDVADNKAIGSHGAEFLQKQLGNSKNISVLTHCNTGSLATAGYGTALGVIRALHSGGVLEKAFCTETRPFNQGSRLTAFELVHEKIPATLIADSAAAALMKQGRVQAVIVGADRIAANGDTANKIGTYNLAISAKHHGVQFYVAAPVTSIDLTLPSGEEIVIEERSPKELLNSEGGLGKQVAASGISVWNPAFDVTPANLITAIITEKGVITKTDGDGAFDIKGFIQSAK

SEQ ID NO: 98789 - protein, 65 aa, Setaria italica
  Transcript Sequence Number=SeqID_32815
IVLSWIALIAGFSLLLAGAMSNSKSKTSCGFTHGHTLALGGIMCFVHGGITVAYYVTATAAAHEG

SEQ ID NO: 98790 - protein, 124 aa, Setaria italica
  Transcript Sequence Number=SeqID_32816
  Homolog annotation: Hit_ID=B6SWY2; Match level="QueryCoverage=100%, HitCoverage=35%, E-value=1e-28, Identity=54%"; Hit description =Protein binding protein
MAEQAAAGSYWCHMCTVAVRPAQGEAEMKCPHCHSGFLEEMETARGAAAADGGGGGALTEVYPGADRPSSIWAHAILSSGDSSARRRRSRRQPEPGGGDVHDWDEHELTRRRRRVSAFLRLLHE

SEQ ID NO: 98791 - protein, 36 aa, Setaria italica
  Transcript Sequence Number=SeqID_32817
LVFCLFDVRDSWIASHSVNLDPVSMQTLRNSKAQFS

SEQ ID NO: 98792 - protein, 110 aa, Setaria italica
  Transcript Sequence Number=SeqID_32818
  Gene Ontology: Mol. function=sequence-specific DNA binding; Cellular component=nucleus; Biological process=regulation of transcription, DNA-dependent
  Homolog annotation: Hit_ID=Q9FP29; Match level="QueryCoverage=100%, HitCoverage=36%, E-value=7e-51, Identity=85%"; Hit description =Homeobox protein knotted-1-like 1
  Pfam annotation: Domain name=ELK; Domain location=1-18; Score=19.9; E_ value=0.011; Accession=PF03789.5; Description=ELK domain
  Pfam annotation: Domain name=Homeobox; Domain location=21-79; Score =6.0; E_value=0.0031; Accession=PF00046.21; Description=Homeobox domain
  Pfam module annotation: Pfam domain module=ELK::Homeobox; Domain location=1-18::21-79
MLLKKYSGCLSRLRSEFLKKRKKGKLPKDARTVLLEWWNTHYRWPYPTEEDKVRLAAMTGLDPKQINNWFINQRKRHWKPSEDMRFALMEGVAGGSSGTTLYFDTGTIGP

SEQ ID NO: 98793 - protein, 188 aa, Setaria italica
  misc_feature (109)..(109): Xaa can be any naturally occurring amino acid
  misc_feature (162)..(162): Xaa can be any naturally occurring amino acid
  misc_feature (174)..(174): Xaa can be any naturally occurring amino acid
  Transcript Sequence Number=SeqID_32819
  Gene Ontology: Mol. function=sequence-specific DNA binding; Cellular component=nucleus; Biological process=regulation of transcription, DNA-dependent
  Homolog annotation: Hit_ID=Q5U7K4; Match level="QueryCoverage=100%, HitCoverage=58%, E-value=1e-79, Identity=80%"; Hit description =Homeobox protein
  Pfam annotation: Domain name=ELK; Domain location=57-78; Score=35.1; E_value=2.7e-07; Accession=PF03789.5; Description=ELK domain
  Pfam annotation: Domain name=Homeobox; Domain location=81-140; Score=- 4.4; E_value=0.032; Accession=PF00046.21; Description=Homeobox domain
  Pfam module annotation: Pfam domain module=ELK::Homeobox; Domain location=57-78::81-140
SIQAQLSNLCSGGSSPAATTATHSDDMMGSSEDEQCSGDTDVPDIGQEHSSRLADHELKEMLLKKYSGCLSRLRSEFLKKRKKGKLPKDARTVLLEWWNTHYRWPYPTXEEDKVRLAAMTGLDPKQINNWFINQRKRHWKPSEDMRFALMEGVAGGSSGTTXSTSTLAQSDPEXHHFLAENWPTQSVA

SEQ ID NO: 98794 - protein, 105 aa, Setaria italica
  misc_feature (94)..(94): Xaa can be any naturally occurring amino acid
  Transcript Sequence Number=SeqID_32820
  Gene Ontology: Mol. function=protein transporter activity; Cellular component=nuclear pore
  Homolog annotation: Hit_ID=Q2QKB7; Match level="QueryCoverage=94%, HitCoverage=10%, E-value=3e-43, Identity=81%"; Hit description =Nuclear transportin
IDRLSSIFSNVKHPEVVAEAVDRYWPTLKSIFDQRAWDTRTMESICRSCKFAVRTCGRAMGTTIGAMLEEIQTLYQQHKQSCFLYLSSKITRTXGSDPNILITSL

SEQ ID NO: 98795 - protein, 208 aa, Setaria italica
  misc_feature (134)..(134): Xaa can be any naturally occurring amino acid
  Transcript Sequence Number=SeqID_32821
  Gene Ontology: Mol. function=protein transporter activity; Cellular component=nuclear pore; Biological process=protein import into nucleus, docking
  Homolog annotation: Hit_ID=Q2QKB7; Match level="QueryCoverage=98%, HitCoverage=21%, E-value=7e-97, Identity=85%"; Hit description =Nuclear transportin
GTCPLFCIQAIAKSVSVEEREILPQVMSLLPCLPQHEQLLQTVCSTIGSFSKWIDAAPAEISILPPLVDILNKGMSTSEDTAAAASMAFKYICEDCRRKFSGSLDGLFQIYHIAISGVGGYKVSSEDSLHLVEXLSVVITTLPQESARTALELICQPVINPLQELIQQGDQVLQQVPARQLTVHIDRLSSIFSNVKHPEVVAEAVDRY

SEQ ID NO: 98796 - protein, 484 aa, Setaria italica
  Transcript Sequence Number=SeqID_32822
  Gene Ontology: Mol. function=protein transporter activity; Cellular component=nuclear pore; Biological process=protein import into nucleus, docking
  Homolog annotation: Hit_ID=Q2QKB7; Match level="QueryCoverage=99%, HitCoverage=49%, E-value=0.0, Identity=82%"; Hit description=Nuclear transportin
VLWLRFCHGISASELASHPLVHMALSSLNSDQFLEAAVNVTSELIHATVSHGSGTTAEQMPLIQILVPHIMGLKEQLKDPSKDEEDVKAIARLYADMGESYVDLIAAGSDDSIHIVNALLEVTSHLEFDISSMTFNFWHRLKRNLIRRESYVSFGSEVAIEAERNRRLQIFRPKFETLVSLVSSRVEYPEDYHTFSEEDRRDFRHVRYAVSDVLLDATDVLGGDSTLKVLSTKLAQAYGSCNNEQNPKWQPVEAALFCIQAIAKSVSVEEREILPQVMSLLPCLPQHEQLLQTVCSTIGSFSKWIDAAPAEISILPPLVDILNKGMSTSEDTAAAASMAFKYICEDCRRKFSGSLDGLFQIYHIAISGVGGYKVSSEDSLHLVEALSVVITTLPQESARTALELICQPVINPLQELIQQGDQVLQQVPARQLTVHIDRLSSIFSNVKHPEVVAEAVDRYWPTLKSIFDQRAWDTRTMESICRSC

SEQ ID NO: 98797 - protein, 323 aa, Setaria italica
  Transcript Sequence Number=SeqID_32823
  Gene Ontology: Mol. function=protein transporter activity; Cellular component=nuclear pore; Biological process=protein transport
  Homolog annotation: Hit_ID=Q7XDD1; Match level="QueryCoverage=93%, HitCoverage=32%, E-value=1e-145, Identity=80%"; Hit description =Importin-beta N-terminal domain containing protein
SSIFSNVKHPEVVAEAVDRYWPTLKSIFDQRAWDTRTMESICRSCKFAVRTCGRAMGTTIGAMLEEIQTLYQQHKQSCFLYLSSEVIKIFGSDPSCAGYLTSLIQILFSHTVQLLRTIQDFTARPDIADDCYLLASRCIRYCPNLFVPTEMFQRLIDCAMAGITIQHREACKSILSFLSDVFDLPNSSDGGNYREFINTIVLQRGATLTRIMIAALTGALPSGRLEEVSYVLLSLSRAFGENMLNWARESINLIPPQALTDAERLRFLNIISDAASGSSLHTITDRFGEISDVCRRNKTVQDLVQSALRPHELTFMVVPQQLS

SEQ ID NO: 98798 - protein, 164 aa, Setaria italica
  Transcript Sequence Number=SeqID_32824
CFLVLLLFVLNLTKSFFFSPWRLSTPDTADPAPALYLTSEEERQCAIMRGLCLATPSVIRAASTSARVEQAYPTVHLRRTHAGEERSSASARSSPESKCCRPIRASPCRFVVLHTRSSSAQAWLPLREPTPPLKPISAASSPPASLLPTAPSVPSLVRLEVPQV

SEQ ID NO: 98799 - protein, 68 aa, Setaria italica
  Transcript Sequence Number=SeqID_32825
MDLPPLSHQALFAAVRSADAAAVRALLADAEASGTSLAALAAAQTDAGETALYVAAEAGSEEVVRLLL

SEQ ID NO: 98800 - protein, 148 aa, Setaria italica
  misc_feature (37)..(37): Xaa can be any naturally occurring amino acid
  misc_feature (69)..(69): Xaa can be any naturally occurring amino acid
  Transcript Sequence Number=SeqID_32826
  Gene Ontology: Mol. function=nucleic acid binding; Biological process= DNA integration
  Homolog annotation: Hit_ID=Q7XH21; Match level="QueryCoverage=88%, HitCoverage=15%, E-value=4e-15, Identity=33%"; Hit description =Retrotransposon protein, putative, Ty1-copia subclass
MVSSSSLSATTPTAAQLGAPVAEKLTGENYVLWKAQXACCAGAQLMGVLNGSVKEPAKTMELVKADGKXGSMTSSTYYTKMVAIKDELAAVEVIIDDGEMASYILNGLDFEYNPFVSSMLGCADSLSLSDLYSHLLFYEMRLEAYNEA

SEQ ID NO: 98801 - protein, 166 aa, Setaria italica
  misc_feature (82)..(82): Xaa can be any naturally occurring amino acid
  Transcript Sequence Number=SeqID_32827
TVGTWQVEVGGRSNIHPTDSSLCFDIHASDVSYVSASGSVIASAGSNSNGANVVIWDTLSPPGTCQTSIMCHEGGARSLSVXFDSDRGCGSISPLVVTGGKSGDVALHDFRFLSTGKSQHNRISMEHGVKAPSTHDTKSGTSGGTTNGMVWHIPKAHLGSVTKVTT

SEQ ID NO: 98802 - protein, 180 aa, Setaria italica
  Transcript Sequence Number=SeqID_32828
  Gene Ontology: Mol. function=transferase activity, transferring pentosyl groups
  Homolog annotation: Hit_ID=B9RKG8; Match level="QueryCoverage=87%, HitCoverage=29%, E-value=2e-42, Identity=56%"; Hit description =Transferase, transferring pentosyl groups, putative
KQERQQIIRQINGPLLFWIGTTNLAVSSTLQVADALVGVDCILNCDSTSKIPSSSSENSYLELSIVGSKDDRFSLMKNLSKAVDFAKRNFIAGRKILVCCQNGDDISICVALAIVTLLFDDNGCFDYGHSFMKRDITKLEMRKRLVFICKFAVNARPSRGNLKQVFGFLSNEKERLSNST

SEQ ID NO: 98803 - protein, 90 aa, Setaria italica
  Transcript Sequence Number=SeqID_32829
  Subcellular localization annotation: CTP_CleavageSite=14; ConfidenceScore=5.24e-01
SPTRQPSGGLASPTSTKTWALTRTPHGGMDLQWRPSCRPPPSTPICPRIYIYISPNSVDCLPHASSLYRSSLLFSSFLLLSLGIPVASTA

SEQ ID NO: 98804 - protein, 89 aa, Setaria italica
  Transcript Sequence Number=SeqID_32830
  Gene Ontology: Mol. function=protein serine/threonine kinase activity; Biological process=protein amino acid phosphorylation
  Homolog annotation: Hit_ID=B6UA37; Match level="QueryCoverage=97%, HitCoverage=21%, E-value=2e-38, Identity=90%"; Hit description =Calcium-dependent protein kinase
  Subcellular localization annotation: CTP_CleavageSite=38; ConfidenceScore=5.22e-01
AASASARGGVVMTAPPASGRAAPDSPGRGLKRKLGCIESATRMGRKKRLDSEYELGAEIGQGKFGSVRICRARAGGEEFACKALAKNGE

SEQ ID NO: 98805 - protein, 77 aa, Setaria italica
  Transcript Sequence Number=SeqID_32831
  Gene Ontology: Mol. function=protein serine/threonine kinase activity; Biological process=protein amino acid phosphorylation
  Homolog annotation: Hit_ID=Q5VRE1; Match level="QueryCoverage=100%, HitCoverage=10%, E-value=7e-23, Identity=67%"; Hit description =Putative wall-associated kinase 4
FIVRLKIAHEAAEALAYLHSMASPPIIHGDVKSPNILLDENYTTKVSDFGASALAPTDEAHLVTLVQGTCGYLDPEY

SEQ ID NO: 98806 - protein, 1185 aa, Setaria italica
  Transcript Sequence Number=SeqID_32832
  Gene Ontology: Mol. function=zinc ion binding; Cellular component =nucleus; Biological process=transcription initiation
  Homolog annotation: Hit_ID=Q7XCX5; Match level="QueryCoverage=97%, HitCoverage=70%, E-value=0.0, Identity=55%"; Hit description=Plus-3 domain containing protein, expressed
  Pfam annotation: Domain name=GYF; Domain location=565-618; Score =29.3; E_value=1.6e-05; Accession=PF02213.8; Description=GYF domain
  Pfam annotation: Domain name=Plus-3; Domain location=285-392; Score =165.1; E_value=2e-46; Accession=PF03126.10; Description=Plus-3 domain
  Pfam annotation: Domain name=SWIB; Domain location=147-222; Score =81.0; E_value=4.2e-21; Accession=PF02201.10; Description=SWIBMDM2 domain
  Pfam module annotation: Pfam domain module=GYF::Plus-3::SWIB; Domain location=565-618::285-392::147-222
CDTCYGTILLIESKDDGAKVGVDFDDKNSWEYLFKLYWLDVKGKHLLTLEELISAKSHWTVPTTACRREKEESSDDLYDANDDEDASFDISSRKRRRNNSSGKRGQKRKKDSGTTARKCGISINSAGSLPNGSKNEGMSLPGVTEWASAELLEFIGHMRNGDSSYISQSDVQALLLEYIKQNNLHDPRKKSQVICDSRLSNLFRKPRVGHFEMLKLLETHYLVKQAPALNADSQRAIDSDCAEAATEGYNELTAKLCSDKRMKAHKKIERELTTNLEDYAAIDMHNINLIYLRRSLMEDLIDAAAAFSDKIAGAFVRIRISGLGNKQDMYRLVKVLGTHKVAERYSVGKKATDYALEISNLDKKEVITMDTISNQDFTEEECKRLRQSMKFGLTTRLKVGDIYEKAKIFQSLRFKDWLENEKQRLSHLRDRASETGRRKELRECVEKLQLLDTPEEKARRINEVPEVHVDPRMAPNYESAEEQDYKKAVDWTINRNGSYLGRKGSKSDSVENHTQKCLDGSSDTSSVPTEDVGHKSGAGSNINLNNTAVEPAMLGVVSDDTEPEKVWHYKDPKGNVQGPFTLSQLSKWVTFFPRDLRIWLTFESEENSLLLAEVLQKQQTDFVPHSAVQSGDKSIWVSTGQDRINSNLVANNSSSPIGYNVVYSSTSSGQFAEGSDPTKEDPKPLAATLPLRSLKDAHTFHGQVQHHVSYSSTILSSAGSDVPTSSHDVRVPRELVGEWNSCRDNGDMWNPTIAPMTDSCKSDVEQHPDGSTMKDQLQTDSKNNSHKVSVRTPQQSERDPATSPSTSSLLDFKAKSQQERDWSSAINTGAHDPKLSVALVKPESCSPTNPVEDRDSSSASAVSIQSGAPVCLPQPVPSTSNPNSSETEATMNQHKACRPDALNAPFHQHPEPKTGPLVSSKPQDVECEYPSPTPKLERKETSMNQSGSTSIASEDLATKTCVHSSMSFVSELSGPPASEIDSLQSLKERSCLEKRNSRDRESITQMKHVFEETTVKRNSKLVNPVSDAEGIAVSDVLESLTEQSCEKYNTREAVPLENFVPASAEEEQPQCSSPIALSPWGEPSYYQGEAVDSALWGVQDDPSNDMWSMSSPTPALQPSSGLGADGKDTSCIIEEVIAVQGNSAFVETVPTQGEKKMEQGNSSATTGPGVPEEVKPNQVLPQVHL

SEQ ID NO: 98807 - protein, 95 aa, Setaria italica
  Transcript Sequence Number=SeqID_32833
  Gene Ontology: Mol. function=protein binding; Cellular component =plasma membrane
  Homolog annotation: Hit_ID=Q67VB5; Match level="QueryCoverage=98%, HitCoverage=25%, E-value=3e-20, Identity=63%"; Hit description =Transducin family protein-like
  Pfam annotation: Domain name=WD40; Domain location=2-27; Score=5.6; E_ value=8.6; Accession=PF00400.24; Description=WD domain, G-beta repeat
  Pfam annotation: Domain name=WD40; Domain location=35-89; Score=21.8; E_value=0.0028; Accession=PF00400.24; Description=WD domain, G-beta repeat
  Pfam module annotation: Pfam domain module=WD40::WD40; Domain location=2-27::35-89
MKAVLCVAAAGDVVCSGSADRTVRVWRRGAAGAGYTCLAVLDGHAGAVKSLTLVKKSGGDHDGSCDGCCSCSAAHVCSGSLDSDVKIWRVNVSCL

SEQ ID NO: 98808 - protein, 125 aa, Setaria italica
  misc_feature (106)..(106): Xaa can be any naturally occurring amino acid
  Transcript Sequence Number=SeqID_32834
  Gene Ontology: Mol. function=metal ion binding; Cellular component =vacuole
  Homolog annotation: Hit_ID=Q8W5R2; Match level="QueryCoverage=99%, HitCoverage=13%, E-value=1e-50, Identity=75%"; Hit description=Shoot gravitropism 2
VEERVGVPVKGGLFEVDLMRRHCFPVYWNGENRRVLRGHWFARKGGLDWLPMREDVSEQLELAYNCQVWHRRKFQPSGLFAARVDLQGSTPDLHALFTGEDDTWEXWLVFDTGPKLGSNTIKLRR

SEQ ID NO: 98809 - protein, 104 aa, Setaria italica
  misc_feature (38)..(38): Xaa can be any naturally occurring amino acid
  Transcript Sequence Number=SeqID_32835
  Gene Ontology: Mol. function=ATPase activity, coupled to transmembrane movement of substances; Cellular component=integral to membrane; Biological process=transport
  Homolog annotation: Hit_ID=B9RGL4; Match level="QueryCoverage=89%, HitCoverage=7%, E-value=3e-36, Identity=77%"; Hit description =Multidrug resistance-associated protein, putative
  Subcellular localization annotation: CTP_CleavageSite=29; ConfidenceScore=5.25e-01
IHSCHSLGLTSIIKSFLDSQYSFRLAKLKLMLRSSIMXCLFGSLAERSRFSEGEIQTFMSVDADRTINLCNSLHDAWSLPLQIGVALYLLYTQVNYGFSIVGWQ

SEQ ID NO: 98810 - protein, 73 aa, Setaria italica
  misc_feature (63)..(63): Xaa can be any naturally occurring amino acid
  misc_feature (65)..(65): Xaa can be any naturally occurring amino acid
  Transcript Sequence Number=SeqID_32836
  Homolog annotation: Hit_ID=B4FWB9; Match level="QueryCoverage=100%, HitCoverage=12%, E-value=3e-10, Identity=52%"; Hit description=GRAM domain containing protein
MAPQAAGSPPSVAALGFLLPTCWEIEVTCAAAMILVALYAAYELLNPRPSQAGAGGEAADRAXLXGFDGADKF

SEQ ID NO: 98811 - protein, 225 aa, Setaria italica
  Transcript Sequence Number=SeqID_32837
  Homolog annotation: Hit_ID=B6TX12; Match level="QueryCoverage=100%, HitCoverage=54%, E-value=4e-95, Identity=79%"; Hit description=F-box domain containing protein
  Subcellular localization annotation: CTP_CleavageSite=23; ConfidenceScore=5.04e-01
DEGVLLKWKADFGSTLGSCVILGASSVSSKTTSPSAQPETDAADSTDTSPDPNRETEDLGSVPESLYTNGGLKLRVVWTISSLIAASARHYLLQPIISNHATLESLNLTDADGQGELTMDKRQLQELRVRPVSASASSHRTLMPALSMRLHYAPLIELPGGMLLKGATLVAIRPSEDALRGEGQGVGTAGSVGTCWVSEAFEEPYRTAAKVLLKRRPYCLEMNSF

SEQ ID NO: 98812 - protein, 167 aa, Setaria italica
  misc_feature (21)..(21): Xaa can be any naturally occurring amino acid
  Transcript Sequence Number=SeqID_32838
  Gene Ontology: Mol. function=transferase activity, transferring glycosyl groups; Cellular component=membrane
  Homolog annotation: Hit_ID=B6UBD2; Match level="QueryCoverage=98%, HitCoverage=31%, E-value=7e-86, Identity=92%"; Hit description =Transferase, transferring glycosyl groups
  Pfam annotation: Domain name=DUF604; Domain location=1-133; Score =70.5; E_value=6e-18; Accession=PF04646.4; Description=Protein of unknown function, DUF604
GANRWTVSVAWGFAVLVARGXMSPREMEMPARTFLNWYRRADYTAYAFNTRPLARSPCQKPAVYYLSSSARRAAERGGGETTVTRYERWRHPNETRPACRWDIADPDAHLDHIVVLKRPDPGLWDRSPRRNCCRVVSSPKEGKNGEKTMTIDVGVCREGEFSQVAGV

SEQ ID NO: 98813 - protein, 71 aa, Setaria italica
  Transcript Sequence Number=SeqID_32839
  Gene Ontology: Mol. function=phosphotransferase activity, alcohol group as acceptor; Cellular component=cytoplasm; Biological process =metabolic process
  Homolog annotation: Hit_ID=B9SBD4; Match level="QueryCoverage=100%, HitCoverage=8%, E-value=9e-15, Identity=52%"; Hit description=ATP binding protein, putative
LLPVMSLPEMLNVGMWLMGSACDPDRKIASLWRKSQRVSLEELHRAIDYSQLCMDARKHQSDLAADIAKAC

SEQ ID NO: 98814 - protein, 51 aa, Setaria italica
  Transcript Sequence Number=SeqID_32840
  Gene Ontology: Mol. function=metal ion binding
  Homolog annotation: Hit_ID=B4F8X0; Match level="QueryCoverage=100%, HitCoverage=9%, E-value=1e-21, Identity=92%"; Hit description =Protein binding protein
FEEKGDSRYCGVREMGLSIGGERRSCSAERRDYHDPFMARRWAKHFNVYRA

SEQ ID NO: 98815 - protein, 81 aa, Setaria italica
  Transcript Sequence Number=SeqID_32841
  Gene Ontology: Mol. function=binding
EFVEQSANIFKYDSDSSSNINCAFWIRFFWLSGCLSLSSDCKEKAYKEFSIALSILRNGNKDKSCGDVILLPHTKLVKSLT

SEQ ID NO: 98816 - protein, 113 aa, Setaria italica
  Transcript Sequence Number=SeqID_32842
  Subcellular localization annotation: CTP_CleavageSite=52; ConfidenceScore=5.62e-01
LTAAVAFIGVGMHSLKILLSSQLSTSLVNNVPSLALSSAANSSSAVVFFVLMASYRKNKVNIYTQIHTFRKRQIYTHKYTHFAKDNINIKEYNLHEKAYQQLSSNQRILLLLQ

SEQ ID NO: 98817 - protein, 96 aa, Setaria italica
  misc_feature (35)..(35): Xaa can be any naturally occurring amino acid
  Transcript Sequence Number=SeqID_32843
VLKYNFYSADLKSYPLYFDEFQHDILKIPDPEFNXDDFVSFEKYIALHFAFMSPFSRSNLLMHLYKVYESAPCVPPADYEPLNALFSRGLEVYACS

SEQ ID NO: 98818 - protein, 98 aa, Setaria italica
  Transcript Sequence Number=SeqID_32844
YIFTCFFYRMPINTKKTTADELFAALDKASEGTLFTNDVLSCEDSKIFKECIPTPINATAAVSYFLEKNLIERWFKSNATNKIDLLGQTAGQQHKQRL

SEQ ID NO: 98819 - protein, 157 aa, Setaria italica
  misc_feature (111)..(111): Xaa can be any naturally occurring amino acid
  Transcript Sequence Number=SeqID_32845
  Gene Ontology: Mol. function=pseudouridine synthase activity; Biological process=tRNA pseudouridine synthesis
  Homolog annotation: Hit_ID=Q5ZBZ5; Match level="QueryCoverage=94%, HitCoverage=23%, E-value=1e-51, Identity=70%"; Hit description =Potential U2 snRNA pseudouridine synthase-like
HLSNFVTQDGISLVESVHGIKDFSITSMKGGYRRLLQRPIDFEWDLMTYTDDNVPLLETNLVVLSKTNPSEANELLSDGISSFASCDSGLDASLDTSGPTTEASSVKTKIXGISEPLPEKLAVKLEFTLPASSYATMAIRELTKTSTSVAYQKTLNS

SEQ ID NO: 98820 - protein, 50 aa, Setaria italica
  Transcript Sequence Number=SeqID_32846
LYTRTRMIQHPWESSVESVDYYCSLRPKLQFVLIFLDTLLLLCILILIYI

SEQ ID NO: 98821 - protein, 76 aa, Setaria italica
  Transcript Sequence Number=SeqID_32847
  Subcellular localization annotation: CTP_CleavageSite=39; ConfidenceScore=5.05e-01
MPMSLPGRKAPAGGAGVRRWVVTIVVSVAALLLTLLLISLSVGSSLPRTSLQDYLPVSVTGLGKLSSPDHADGNTN

SEQ ID NO: 98822 - protein, 82 aa, Setaria italica
  Transcript Sequence Number=SeqID_32848
  Subcellular localization annotation: CTP_CleavageSite=23; ConfidenceScore=5.23e-01
FSSPGPFLSSDFQPPKFSPHPSPAPEFAPLFPANLPCLGGDRIHHRTRRHQPRRRGHLLTRHSVSAFYWCRTGVERGLEIHP

SEQ ID NO: 98823 - protein, 139 aa, Setaria italica
  misc_feature (115)..(115): Xaa can be any naturally occurring amino acid
  Transcript Sequence Number=SeqID_32849
  Gene Ontology: Cellular component=nucleus
  Homolog annotation: Hit_ID=B6U4M9; Match level="QueryCoverage=100%, HitCoverage=25%, E-value=2e-68, Identity=87%"; Hit description=SET domain containing protein
LFISEELLCQSEVFLALKDFNNINSETMLLLWSMRERYNLSSKFKTYFETLPANFNTGLSFGIDALASLEGTLLFDEIMQAKQHLRQQYDDLFPLLCINFPEIFRKDVCTWDNFXCWACELWYSNSMMVVISSGKLSMC

SEQ ID NO: 98824 - protein, 76 aa, Setaria italica
  Transcript Sequence Number=SeqID_32850
  Gene Ontology: Mol. function=inorganic diphosphatase activity; Cellular component=cytoplasm; Biological process=phosphate metabolic process
  Homolog annotation: Hit_ID=Q0DYB1; Match level="QueryCoverage=100%, HitCoverage=35%, E-value=5e-29, Identity=81%"; Hit description =Soluble inorganic pyrophosphatase
  Pfam annotation: Domain name=Pyrophosphatase; Domain location=1-76; Score=-56.5; E_value=0.002; Accession=PF00719.11; Description =Inorganic pyrophosphatase
GSLIFTECAWYETMDVLILMQEQVVPGCFLRARAIGLMPMIDQGEKDDKIIAVCADDPEYRHFTDIKDLPPHRLQE

SEQ ID NO: 98825 - protein, 70 aa, Setaria italica
  Transcript Sequence Number=SeqID_32851
  Gene Ontology: Mol. function=inorganic diphosphatase activity; Cellular component=cytoplasm; Biological process=phosphate metabolic process
  Homolog annotation: Hit_ID=Q0DYB1; Match level="QueryCoverage=77%, HitCoverage=21%, E-value=3e-14, Identity=72%"; Hit description =Soluble inorganic pyrophosphatase
TRGRSLRHLALACLTPLSSALPPPIGSAMAGTPVLNERILSSMSQKHVAAHPWHDLEIGPGAPEVFNCVS

SEQ ID NO: 98826 - protein, 233 aa, Setaria italica
  Transcript Sequence Number=SeqID_32852
  Gene Ontology: Mol. function=inorganic diphosphatase activity; Cellular component=cytoplasm; Biological process=phosphate metabolic process
  Homolog annotation: Hit_ID=Q0DYB1; Match level="QueryCoverage=92%, HitCoverage=96%, E-value=1e-107, Identity=87%"; Hit description =Soluble inorganic pyrophosphatase
  Pfam annotation: Domain name=Pyrophosphatase; Domain location=71-225; Score=186.1; E_value=9.6e-53; Accession=PF00719.11; Description =Inorganic pyrophosphatase
QQQRTRGRSLRHLALACLTPLSSALPPPIGSAMAGTPVLNERILSSMSQKHVAAHPWHDLEIGPGAPEVFNCVVEIPRGTKVKYELDKASGLIKVDRVLYSSVVYPHNYGFIPRTLCEDSDPMDVLILMQEQVVPGCFLRARAIGLMPMIDQGEKDDKIIAVCADDPEYRHFTDIKDLPPHRLQEIRRFFEDYKKNENKEVAVNEFLPAKDAIEAIKYSMDLYGSYIIESLRK

SEQ ID NO: 98827 - protein, 89 aa, Setaria italica
  Transcript Sequence Number=SeqID_32853
  Gene Ontology: Mol. function=metal ion transmembrane transporter activity; Cellular component=integral to membrane; Biological process=metal ion transport
  Homolog annotation: Hit_ID=B4YHA7; Match level="QueryCoverage=79%, HitCoverage=19%, E-value=1e-28, Identity=84%"; Hit description=Metal ion transporter-like protein
ADAQPPAADPAADACADPSVDGACHNVPKALRLKLIAIPTILVASVIGVCLPLFSRSIPALRPDRNLFVIVKAFASGVILATGYMHVLP

SEQ ID NO: 98828 - protein, 141 aa, Setaria italica
  Transcript Sequence Number=SeqID_32854
  Gene Ontology: Mol. function=nucleotide binding; Biological process =defense response
  Homolog annotation: Hit_ID=Q2RB05; Match level="QueryCoverage=100%, HitCoverage=17%, E-value=9e-68, Identity=77%"; Hit description=NB -ARC domain containing protein, expressed
  Pfam annotation: Domain name=NB-ARC; Domain location=1-139; Score= -113.4; E_value=0.024; Accession=PF00931.14; Description=NB-ARC domain
KIVSIVGFGGLGKTTLSKAVYDKHKPAFDCGAFVPVGRDPDMKKVLRDILIDFDYVNPNVMILDERQLINELRKFIHNKRCLFVIDDIWDKKSWELIRCALQHSNCRSRVVVTTRIFEVATHIGDIYKMQPLSRDDSEILL

SEQ ID NO: 98829 - protein, 723 aa, Setaria italica
  Transcript Sequence Number=SeqID_32855
  Gene Ontology: Mol. function=nucleotide binding; Biological process =apoptosis
  Homolog annotation: Hit_ID=Q2RB05; Match level="QueryCoverage=94%, HitCoverage=67%, E-value=0.0, Identity=78%"; Hit description=NB-ARC domain containing protein, expressed
  Pfam annotation: Domain name=LRR_1; Domain location=326-352; Score =2.4; E_value=1.1e+02; Accession=PF00560.25; Description=Leucine Rich Repeat
  Pfam annotation: Domain name=LRR_1; Domain location=354-375; Score =5.0; E_value=33; Accession=PF00560.25; Description=Leucine Rich Repeat
  Pfam annotation: Domain name=LRR_1; Domain location=377-398; Score =8.4; E_value=7.6; Accession=PF00560.25; Description=Leucine Rich Repeat
  Pfam annotation: Domain name=LRR_1; Domain location=529-551; Score =1.2; E_value=1.8e+02; Accession=PF00560.25; Description=Leucine Rich Repeat
  Pfam annotation: Domain name=NB-ARC; Domain location=1-207; Score= -5.8; E_value=6.4e-09; Accession=PF00931.14; Description=NB-ARC domain
  Pfam module annotation: Pfam domain module=LRR_1::LRR_1::LRR_1::LRR _1::NB-ARC; Domain location=326-352::354-375::377-398::529-551::1-207
MLCILATFGAVTNLCLCPCTVMWTPRCLFVIDDIWDKKSWELIRCALQHSNCRSRVVVTTRIFEVATHIGDIYKMQPLSRDDSEILLYSRITGGEDRFLDSLSTEACDKILKKCGGVPLAIITIASLLASKSGEDWAKVYNSIGFGDRGNDIVENTRRILSFSYYDLPSHLKPCLLYVSLFREEYGIQKNLLIWKWIAEGFIQNEQATTEIELFELGEGYFNELINRSMIQPMEREDNGYVYGCRVHDMVLDLVRSLSSEEKFTTILDSNDQQKLIGGSNTRRFAVHGRSVEESTTALSWLTYMGLEKVRSFSATNINVVISCFRVLRVLTIEDCSVGEAWGKHRLQHLGSLRHLRYLGILDTQIDELPKEVGDLKFLQTLNLSGTGMQQLPEGVGLLKQLLCLRVNDSITVPSGLIGNLTLLQELKIWPADDASTRQLIKDLGELRELRMLQCTIHVSDESMERDLLESLANLHKIRTLFVFGSALARGITSEEVCFVAPPRCLGQMCLECFKFSALPVWMDSTLVLNLTHLDVTVNLVQEQDMETLGRLPELCYLKLSSDHTRLLSIRKTTGDLHRYFRKLRFFHTPFSFVQFDSHGCESDDDATIAHSIMMPSLESLVFSVYVRFIKDMDIIQPGFENLLGFENVAGTSLQRVTATIQCEDATAAEVEEAKAALAHAADLHPNCPALRIQMENKHKMLSTDREVSGKIQNGAHQHQRKPD

SEQ ID NO: 98830 - protein, 74 aa, Setaria italica
  Transcript Sequence Number=SeqID_32856
TLRQHAWSPATVLRAGRGPGLSPSSTAMDEEAKAGPKSDTNTNAAAAAEAAAASPLPPSSSEAAEREAKVEGGG

SEQ ID NO: 98831 - protein, 42 aa, Setaria italica
  Transcript Sequence Number=SeqID_32857
ISRSRKREAAAAAALYALPNALNIVTRKKNYPINLSETCCQW

SEQ ID NO: 98832 - protein, 39 aa, Setaria italica
  Transcript Sequence Number=SeqID_32858
YAIRSFADALDAVPLALAENSGLPPIDTLTVVKAQQVKE

SEQ ID NO: 98833 - protein, 80 aa, Setaria italica
  misc_feature (61)..(61): Xaa can be any naturally occurring amino acid
  misc_feature (75)..(75): Xaa can be any naturally occurring amino acid
  Transcript Sequence Number=SeqID_32859
  Gene Ontology: Mol. function=unfolded protein binding; Cellular component=cytoplasm; Biological process=cellular protein metabolic process
  Homolog annotation: Hit_ID=P40412; Match level="QueryCoverage=100%, HitCoverage=14%, E-value=2e-31, Identity=87%"; Hit description=T -complex protein 1 subunit epsilon
QMPKRIEDAKIAILTCPFEPPKPKTKHKVDIDTVEKFQTLREQEQKYFDEMVQKCKDAGAXTLVYLSGWGFDDEXANHLL

SEQ ID NO: 98834 - protein, 117 aa, Setaria italica
  misc_feature (35)..(35): Xaa can be any naturally occurring amino acid
  Transcript Sequence Number=SeqID_32860
  Gene Ontology: Mol. function=structural molecule activity; Cellular component=protein complex; Biological process=microtubule-based movement
  Homolog annotation: Hit_ID=P33632; Match level="QueryCoverage=91%, HitCoverage=44%, E-value=1e-46, Identity=86%"; Hit description =Tubulin beta-3 chain (Fragment)
  Pfam annotation: Domain name=Tubulin_C; Domain location=14-117; Score= 82.3; E_value=1.7e-21; Accession=PF03953.9; Description=TubulinFtsZ family, C-terminal domai
  Subcellular localization annotation: CTP_CleavageSite=19; ConfidenceScore=5.21e-01
AGRQPHPVPAPPLLHGRLRAAHLIPFPRLHFFMVXGFAPLTSRGSQQYRALTVPELTQQMWDAKNMMCAADPRHGRYLTASAMFRGKMSTKEVDEQYCLLTLQNKNSSYFVEWIPNN

SEQ ID NO: 98835 - protein, 51 aa, Setaria italica
  Transcript Sequence Number=SeqID_32861
SGCYCCTCKYFGALVGTSFNLVFYGAVGDLNHLISATMSGVTCCLRFPGQL

SEQ ID NO: 98836 - protein, 26 aa, Setaria italica
  Transcript Sequence Number=SeqID_32862
VFPSPKVSDTVVEPYNATLSVHQLVD

SEQ ID NO: 98837 - protein, 105 aa, Setaria italica
  Transcript Sequence Number=SeqID_32863
  Gene Ontology: Mol. function=unfolded protein binding; Cellular component=cytoplasm; Biological process=cellular protein metabolic process
  Homolog annotation: Hit_ID=P40412; Match level="QueryCoverage=95%, HitCoverage=18%, E-value=1e-45, Identity=91%"; Hit description=T -complex protein 1 subunit epsilon
KMLQSPDGDVTITNDGATILEQMDVDNQIAKLMVELSRSQDYEIGDGTTGVVVMAGALLEQAEKLLERGIHPIRVAEGYEMASRIAFDHLEHISRKFDDSVVMHV

SEQ ID NO: 98838 - protein, 173 aa, Setaria italica
  misc_feature (15)..(15): Xaa can be any naturally occurring amino acid
  misc_feature (121)..(121): Xaa can be any naturally occurring amino acid
  Transcript Sequence Number=SeqID_32864
  Gene Ontology: Mol. function=structural molecule activity; Cellular component=protein complex; Biological process=microtubule-based movement
  Homolog annotation: Hit_ID=B9SB77; Match level="QueryCoverage=89%, HitCoverage=36%, E-value=6e-81, Identity=96%"; Hit description =Tubulin beta chain, putative
  Pfam annotation: Domain name=Tubulin_C; Domain location=1-111; Score =132.5; E_value=1.4e-36; Accession=PF03953.9; Description=TubulinFtsZ family, C-terminal domai
TSRGSQQYRALTGPXELTQQMWDAKNMMCAADPRHGRYLTASAMFRGKMSTKEVDEQMINVQNKNSSYFVEWIPNNVKSSVCDIPPRGLSMASTFIGNSTSIQEMFRRVSEQFTAMFRRKXFCIGYTGEGMDEMEFTEAESNMNDLVSEYQQYQDATADEEGEYEDEEAIQDE

SEQ ID NO: 98839 - protein, 141 aa, Setaria italica
  misc_feature (84)..(84): Xaa can be any naturally occurring amino acid
  misc_feature (124)..(124): Xaa can be any naturally occurring amino acid
  Transcript Sequence Number=SeqID_32865
  Gene Ontology: Mol. function=structural molecule activity; Cellular component=protein complex; Biological process=microtubule-based movement
  Homolog annotation: Hit_ID=B9SB77; Match level="QueryCoverage=100%, HitCoverage=33%, E-value=9e-75, Identity=96%"; Hit description =Tubulin beta chain, putative
  Pfam annotation: Domain name=Tubulin_C; Domain location=10-141; Score= 221.8; E_value=1.8e-63; Accession=PF03953.9; Description=TubulinFtsZ family, C-terminal domai
  Subcellular localization annotation: CTP_CleavageSite=46; ConfidenceScore=5.03e-01
TCCLRFPGQLNSDLRKLAVNLIPFPRLHFFMVGFAPLTSRGSQQYRALTVPELTQQMWDAKNMMCAADPRHGRYLTASAMFRGXKMSTKEVDEQMINVQNKNSSYFVEWIPNNVKSSVCDIPPXVAFSMASTFIGNSTSIQ

SEQ ID NO: 98840 - protein, 306 aa, Setaria italica
  misc_feature (181)..(181): Xaa can be any naturally occurring amino acid
  Transcript Sequence Number=SeqID_32866
  Gene Ontology: Mol. function=structural molecule activity; Cellular component=protein complex; Biological process=microtubule-based movement
  Homolog annotation: Hit_ID=B9SB77; Match level="QueryCoverage=88%, HitCoverage=56%, E-value=1e-128, Identity=84%"; Hit description =Tubulin beta chain, putative
  Pfam annotation: Domain name=Tubulin_C; Domain location=94-233; Score= 257.3; E_value=3.6e-74; Accession=PF03953.9; Description=TubulinFtsZ family, C-terminal domai
HQLVENADECMVLDNEALYDICFRTLKLTTPSCKQPSILINFIFSALWIYACMYCLCMITYSACLLISAVGDLNHLISATMSGVTCCLRFPGQLNSDLRKLAVNLIPFPRLHFFMVGFAPLTSRGSQQYRALTVPELTQQMWDAKNMMCAADPRHGRYLTASAMFRGKMSTKEVDEQYCIXNVQNKNSSYFVEWIPNNVKSSVCDIPPRGLSMASTFIGNSTSIQEMFRRVSEQFTAMFRRKAFLHWYTGEGMDEMEFTEAESNMNDLVSEITKTSNQGTTNRPNEGRVEVTKERRKEGRIETPNE

SEQ ID NO: 98841 - protein, 146 aa, Setaria italica
  Transcript Sequence Number=SeqID_32867
  Homolog annotation: Hit_ID=B6SQI1; Match level="QueryCoverage=89%, HitCoverage=71%, E-value=1e-25, Identity=55%"; Hit description =Bundle sheath cell specific protein 1
  Pfam annotation: Domain name=ABA_WDS; Domain location=84-146; Score =93.5; E_value=7.2e-25; Accession=PF02496.8; Description=ABAWDS induced protein
MADYYHGGRSMYSSTDECYDAGRHGSRRMYSHTDECYDDVDRRRPGAYADDCYNGAGGYGGGRQAAVYSDEYSRGGYGYGGGQEHFKREEREHKHKERLGEMGALAGGAFALYEGHRAKKDPEHAQRHKIEAGVATAAALGAGGYA

SEQ ID NO: 98842 - protein, 252 aa, Setaria italica
  misc_feature (167)..(167): Xaa can be any naturally occurring amino acid
  Transcript Sequence Number=SeqID_32868
  Gene Ontology: Mol. function=structural molecule activity; Cellular component=protein complex; Biological process=microtubule-based movement
  Homolog annotation: Hit_ID=P25862; Match level="QueryCoverage=99%, HitCoverage=64%, E-value=1e-129, Identity=90%"; Hit description =Tubulin beta-1 chain (Fragment)
  Pfam annotation: Domain name=Tubulin; Domain location=1-139; Score =103.7; E_value=6.1e-28; Accession=PF00091.17; Description =TubulinFtsZ family, GTPase domain
  Pfam annotation: Domain name=Tubulin_C; Domain location=142-252; Score=137.2; E_value=5.1e-38; Accession=PF03953.9; Description =TubulinFtsZ family, C-terminal domai
  Pfam module annotation: Pfam domain module=Tubulin::Tubulin_C; Domain location=1-139::142-252
HYTEVAELIDSVLDVVRKEAENCDCLQGFQVCHSLGGGTGSGMGTLLISKIREEYPDRMMLTFSVFPSPKVSDTVVEPYNATLSVHQLVENADECMVLDNEALYDICFRTLKLTTPSFGDLNHLISATMSGVTCCLRFPGQLNSDLRKLAVNLIPFPRLHFFMVGFXAPLTSRGSQQYRALTVPELTQQMWDAKNMMCAADPRHGRYLTASAMFRGKMSTKEVDEQMINVQNKNSSYFVEVGIPQTNVESTK

SEQ ID NO: 98843 - protein, 468 aa, Setaria italica
  Transcript Sequence Number=SeqID_32869
  Gene Ontology: Mol. function=structural molecule activity; Cellular component=protein complex; Biological process=microtubule-based movement
  Homolog annotation: Hit_ID=P45960; Match level="QueryCoverage=89%, HitCoverage=94%, E-value=0.0, Identity=94%"; Hit description=Tubulin beta-4 chain
  Pfam annotation: Domain name=Tubulin; Domain location=25-265; Score =356.6; E_value=4.6e-104; Accession=PF00091.17; Description =TubulinFtsZ family, GTPase domain
  Pfam annotation: Domain name=Tubulin_C; Domain location=268-405; Score=270.0; E_value=5.6e-78; Accession=PF03953.9; Description =TubulinFtsZ family, C-terminal domai
  Pfam module annotation: Pfam domain module=Tubulin::Tubulin_C; Domain location=25-265::268-405
LPTTPRNTNPNTDCFLPRGERKMREILHIQGGQCGNQIGSKFWEVVCDEHGIDPTGRYVGTSDLQLERVNVYYNEASCGRFVPRAVLMDLEPGTMDAIRTGPYGQIFRPDNFVFGQSGAGNNWAKGHYTEGAELIDSVLDVVRKEAENCDCLQGFQVCHSLGGGTGSGMGTLLISKIREEYPDRMMLTFSVFPSPKVSDTVVEPYNATLSVHQLVENADECMVLDNEALYDICFRTLKLTTPSFGDLNHLISATMSGVTCCLRFPGQLNSDLRKLAVNLIPFPRLHFFMVGFAPLTSRGSQQYRSLTVPELTQQMWDSKNMMCAADPRHGRYLTASAMFRGKMSTKEVDEQMINVQNKNSSYFVEWIPNNVKSSVCDIPPRGLSMSSTFVGNSTSIQEMFRRVSEQFTAMFRRKAFLHWYTGEGMDEMEFTEAESNMNDLVSEYQQYQDATADEDADYEDQDEEAAAE

SEQ ID NO: 98844 - protein, 313 aa, Setaria italica
  misc_feature (80)..(80): Xaa can be any naturally occurring amino acid
  misc_feature (198)..(198): Xaa can be any naturally occurring amino acid
  misc_feature (212)..(212): Xaa can be any naturally occurring amino acid
  misc_feature (254)..(254): Xaa can be any naturally occurring amino acid
  Transcript Sequence Number=SeqID_32870
  Gene Ontology: Mol. function=structural molecule activity; Cellular component=protein complex; Biological process=microtubule-based movement
  Homolog annotation: Hit_ID=P25862; Match level="QueryCoverage=90%, HitCoverage=72%, E-value=1e-162, Identity=98%"; Hit description =Tubulin beta-1 chain (Fragment)
  Pfam annotation: Domain name=Tubulin; Domain location=1-96; Score= -51.6; E_value=0.0025; Accession=PF00091.17; Description=TubulinFtsZ family, GTPase domain
  Pfam annotation: Domain name=Tubulin_C; Domain location=99-236; Score= 265.3; E_value=1.4e-76; Accession=PF03953.9; Description=TubulinFtsZ family, C-terminal domai
  Pfam module annotation: Pfam domain module=Tubulin::Tubulin_C; Domain location=1-96::99-236
TLLISKIREEYPDRMMLTFSVFPSPKVSDTVVEPYNATLSVHQLVENADECMVLDNEALYDICFRTLKLTTPSFGDLNHXLISATMSGVTCCLRFPGQLNSDLRKLAVNLIPFPRLHFFMVGFAPLTSRGSQQYRALTVPELTQQMWDAKNMMCAADPRHGRYLTASAMFRGKMSTKEVDEQMINVQNKNSSYFVEWXPNNVKSSVCDIPPXGLSMASTFIGNSTSIQEMFRRVSEQFTAMFRRKAFLHWYTGXEGMDEMEFTEAESNMNDLVSEYQQYQDATADEEGEYEDEEEEIEPRRHVRSVTMRLWWL

SEQ ID NO: 98845 - protein, 535 aa, Setaria italica
  misc_feature (483)..(483): Xaa can be any naturally occurring amino acid
  Transcript Sequence Number=SeqID_32871
  Gene Ontology: Mol. function=unfolded protein binding; Cellular component=cytoplasm; Biological process=cellular protein metabolic process
  Homolog annotation: Hit_ID=P40412; Match level="QueryCoverage=100%, HitCoverage=100%, E-value=0.0, Identity=90%"; Hit description=T -complex protein 1 subunit epsilon
  Pfam annotation: Domain name=Cpn60_TCP1; Domain location=40-534; Score=629.8; E_value=2.7e-186; Accession=PF00118.16; Description=TCP- 1cpn60 chaperonin family
MALAFDEFGRPFIILREQEKKTRLRGLDAQKANIAAGKAVARILRTSLGPKGMDKMLQSPDGDVTITNDGATILEQMDVDNQIAKLMVELSRSQDYEIGDGTTGVVVMAGALLEQAEKLLERGIHPIRVAEGYEMASRIAFDHLEHISRKFEFSADNIEPLVQTCMTTLSSKIVNRCKRALAEIAVKAVLAVADLERKDVNLDLIKVEGKVGGKLEDTELIHGIVVDKDMSHPQMPKRIEDAKIAILTCPFEPPKPKTKHKVDIDTVEKFQTLREQEQKYFDEMVQKCKDAGATLVICQWGFDDEANHLLMHRNLPAVRWVGGVELELIAIATGGRIVPRFQELSPEKLGKAGLVREKSFGTTKDRMLYIEQCANSRAVTIFIRGGNKMMIEETKRSLHDALCVARNLIRNNSIVYGGGSAEISCSIAVETAADRHPGVEQYAIRSFADALDAVPLALAENSGLPPIDTLTVVKAQQVKESNXTCGIDCNDVGTNDMKEQDVFETLIGKQQQILLATQVVKMILKIDDVISPSEY

SEQ ID NO: 98846 - protein, 481 aa, Setaria italica
  Transcript Sequence Number=SeqID_32872
  Gene Ontology: Mol. function=structural molecule activity; Cellular component=protein complex; Biological process=microtubule-based movement
  Homolog annotation: Hit_ID=P45960; Match level="QueryCoverage=89%, HitCoverage=96%, E-value=0.0, Identity=91%"; Hit description=Tubulin beta-4 chain
  Pfam annotation: Domain name=Tubulin; Domain location=38-278; Score =353.2; E_value=5e-103; Accession=PF00091.17; Description=TubulinFtsZ family, GTPase domain
  Pfam annotation: Domain name=Tubulin_C; Domain location=281-418; Score=267.4; E_value=3.2e-77; Accession=PF03953.9; Description =TubulinFtsZ family, C-terminal domai
  Pfam module annotation: Pfam domain module=Tubulin::Tubulin_C; Domain location=38-278::281-418
DLPPPASLPRPPPPPIPSLPQRPDRHRGARTVVAKMREILHIQGGQCGNQIGAKFWEVICGEHGVDATGRYSGASAQQLERINVYYNEAGGGRYVPRAVLMDLEPGTMESIRAGPFGSIFRPDNFVYGQSGAGNNWAKGHYTEGAELIDSVLDVVRKEAENCDCLQGFQVCHSLGGGTGSGMGTLLISKIREEYPDRMMLTFSVFPSPKVSDTVVEPYNATLSVHQLVENADECMVLDNEALYDICFRTLKLTNPSFGDLNHLISATMSGVTCCLRFPGQLNSDLRKLAVNLIPFPRLHFFMVGFAPLTSRGSQQYRALTVPELTQQMWDAKNMMCAADPRHGRYLTASAMFRGKMSTKEVDEQMINVQNKNSSYFVEWIPNNVKSSVCDIPPVGLSMASTFVGNSTSIQEMFRRVSEQFTAMFRRKAFLHWYTSEGMDEMEFTEAESNMNDLVAEYQQYQDATAEEEYDEEEQDGDEEHV

SEQ ID NO: 98847 - protein, 448 aa, Setaria italica
  Transcript Sequence Number=SeqID_32873
  Gene Ontology: Mol. function=structural molecule activity; Cellular component=protein complex; Biological process=microtubule-based movement
  Homolog annotation: Hit_ID=P29512; Match level="QueryCoverage=95%, HitCoverage=95%, E-value=0.0, Identity=94%"; Hit description=Tubulin beta-2/beta-3 chain
  Pfam annotation: Domain name=Tubulin; Domain location=3-243; Score =350.1; E_value=4.1e-102; Accession=PF00091.17; Description =TubulinFtsZ family, GTPase domain
  Pfam annotation: Domain name=Tubulin_C; Domain location=246-383; Score=271.4; E_value=2.1e-78; Accession=PF03953.9; Description =TubulinFtsZ family, C-terminal domai
  Pfam module annotation: Pfam domain module=Tubulin::Tubulin_C; Domain location=3-243::246-383
MREILHIQGGQCGNQIGAKFWEVVCAEHGIDATGRYGGDSDLQLERVNVYYNEASCGRFVPRAVLMDLEPGTMDSVRSGPYGNIFRPDNFVFGQSGAGNNWAKGHYTEGAELIDSVLDVVRKEAENCDCLQGFQVCHSLGGGTGSGMGTLLISKIREEYPDRMMLTFSVFPSPKVSDTVVEPYNATLSVHQLVENADECMVLDNEALYDICFRTLKLTTPSFGDLNHLISATMSGVTCCLRFPGQLNSDLRKLAVNLIPFPRLHFFMVGFAPLTSRGSQQYRALTVPELTQQMWDAKNMMCAADPRHGRYLTASAMFRGKMSTKEVDEQMLNVQNKNSSYFVEWIPNNVKSTVCDIPPTGLKMASTFIGNSTSIQEMFRRVSEQFTAMFRRKAFLHWYTGEGMDEMEFTEAESNMNDLVSEYQQYQDATADEEGDYEEDEEEPEDLQD

SEQ ID NO: 98848 - protein, 535 aa, Setaria italica
  Transcript Sequence Number=SeqID_32874
  Gene Ontology: Mol. function=unfolded protein binding; Cellular component=cytoplasm; Biological process=cellular protein metabolic process
  Homolog annotation: Hit_ID=O04450; Match level="QueryCoverage=100%, HitCoverage=100%, E-value=0.0, Identity=86%"; Hit description=T -complex protein 1 subunit epsilon
  Pfam annotation: Domain name=Cpn60_TCP1; Domain location=40-534; Score=628.7; E_value=5.6e-186; Accession=PF00118.16; Description=TCP- 1cpn60 chaperonin family
MALAFDEFGRPFIILREQEQKTRLRGLDAQKANIAAGKAVARILRTSLGPKGMDKMLQSPDGDVTITNDGATILEQMDVDNQIAKLMVELSRSQDYEIGDGTTRVVVMAGALLEQAEKLLERGIHPIRVAEGYEMASRIASEHLERISHKYEFTADNIEPLVQTCMTTLSSKIVNRCKRALAEIAVKAVLAVADLERKDVNLDLIKVEGKVGGKLEDTELIYGIVVDKDMSHPQMPKRIEDAKIAILTCPFEPPKPKTKHKVDIDTVEKFQTLREQEQKYFDEMVQKCKDAGATLVICQWGFDDEANHLLMNRNLPAVRWVGGVELELIAIATGGRIVPRFEELSPEKLGKAGLVREKSFGTTKDRMLYIEQCANSRAVTIFIRGGNKMMIEETKRSLHDALCVARNLIRNNSIVYGGGSAEISCSIAVETAADRHPGVEQYAIRSFADALDAVPLALAENSGLPPIDTLTAVKAQQVKESNPHCGIDCNDVGTNDMKEQNVFETLIGKQQQILLATQVVKMILKIDDVISPSEY

SEQ ID NO: 98849 - protein, 446 aa, Setaria italica
  misc_feature (386)..(386): Xaa can be any naturally occurring amino acid
  Transcript Sequence Number=SeqID_32875
  Gene Ontology: Mol. function=structural molecule activity; Cellular component=protein complex; Biological process=microtubule-based movement
  Homolog annotation: Hit_ID=P45960; Match level="QueryCoverage=96%, HitCoverage=96%, E-value=0.0, Identity=92%"; Hit description=Tubulin beta-4 chain
  Pfam annotation: Domain name=Tubulin; Domain location=3-243; Score =355.3; E_value=1.1e-103; Accession=PF00091.17; Description =TubulinFtsZ family, GTPase domain
  Pfam annotation: Domain name=Tubulin_C; Domain location=246-383; Score=274.0; E_value=3.4e-79; Accession=PF03953.9; Description =TubulinFtsZ family, C-terminal domai
  Pfam module annotation: Pfam domain module=Tubulin::Tubulin_C; Domain location=3-243::246-383
MREILHIQGGQCGNQIGAKFWEVICDEHGIDHTGKYAGDSDLQLERINVYYNEAGGGRFVPRAVLMDLEPGTMDSVRSGPYGQIFRPDNFVFGQSGAGNNWAKGHYTEGAELIDSVLDVVRKEAENCDCLQGFQVCHSLGGGTGSGMGTLLISKIREEYPDRMMLTFSVFPSPKVSDTVVEPYNATLSVHQLVENADECMVLDNEALYDICFRTLKLATPTFGDLNHLISATMSGVTCCLRFPGQLNSDLRKLAVNLIPFPRLHFFMVGFAPLTSRGSQQYRALTVPELTQQMWDSKNMMCAADPRHGRYLTASAMFRGKMSTKEVDEQMLNVQNKNSSYFVEWIPNNVKSSVCDIPPKGLKMASTFIGNSTSIQEMFRRVSEQFXTAMFRRKAFLHWYTGEGMDEMEFTEAESNMNDLVAEYQQYQDATAEDEEEYEEEEEEIAE

SEQ ID NO: 98850 - protein, 447 aa, Setaria italica
  misc_feature (56)..(56): Xaa can be any naturally occurring amino acid
  misc_feature (307)..(307): Xaa can be any naturally occurring amino acid
  misc_feature (429)..(429): Xaa can be any naturally occurring amino acid
  Transcript Sequence Number=SeqID_32876
  Gene Ontology: Mol. function=structural molecule activity; Cellular component=protein complex; Biological process=microtubule-based movement
  Homolog annotation: Hit_ID=P45960; Match level="QueryCoverage=95%, HitCoverage=95%, E-value=0.0, Identity=92%"; Hit description=Tubulin beta-4 chain
  Pfam annotation: Domain name=Tubulin; Domain location=3-243; Score =357.2; E_value=3.2e-104; Accession=PF00091.17; Description =TubulinFtsZ family, GTPase domain
  Pfam annotation: Domain name=Tubulin_C; Domain location=246-384; Score=265.2; E_value=1.5e-76; Accession=PF03953.9; Description =TubulinFtsZ family, C-terminal domai
  Pfam module annotation: Pfam domain module=Tubulin::Tubulin_C; Domain location=3-243::246-384
MREILHIQGGQCGNQIGAKFWEVICDEHGIDATGRYAGDSDLQLERINVYYNEARXGRFVPRAVLMDLEPGTMDSVRSGPFGQIFRPDNFVFGQSGAGNNWAKGHYTEGAELIDSVLDVVRKEAENCDCLQGFQVCHSLGGGTGSGMGTLLISKIREEYPDRMMLTFSVFPSPKVSDTVVEPYNATLSVHQLVENADECMVLDNEALYDICFRTLKLATPTFGDLNHLISATMSGVTCCLRFPGQLNSDLRKLAVNLIPFPRLHFFMVGFAPLTSRGSQQYRALTVPELTQQMWDAKNMMCAADPRXHGRYLTASAMFRGKMSTKEVDEQMLNVQNKNSSYFVEWIPNNVKSSVCDIPPKGLKMAGTFVGNSTSIQEMFRRVSEQFTAMFRRKAFLHWYTGEGMDEMEFTEAESNMNDLVAEYQQYQDXATADEEYEDEEEEEAVAE

SEQ ID NO: 98851 - protein, 354 aa, Setaria italica
  misc_feature (219)..(219): Xaa can be any naturally occurring amino acid
  Transcript Sequence Number=SeqID_32877
  Gene Ontology: Mol. function=structural molecule activity; Cellular component=protein complex; Biological process=microtubule-based movement
  Homolog annotation: Hit_ID=B9SB77; Match level="QueryCoverage=64%, HitCoverage=55%, E-value=1e-133, Identity=99%"; Hit description =Tubulin beta chain, putative
  Pfam annotation: Domain name=Tubulin; Domain location=10-151; Score= -71.8; E_value=0.048; Accession=PF00091.17; Description=TubulinFtsZ family, GTPase domain
  Pfam annotation: Domain name=Tubulin_C; Domain location=154-292; Score=264.2; E_value=2.9e-76; Accession=PF03953.9; Description =TubulinFtsZ family, C-terminal domai
  Pfam module annotation: Pfam domain module=Tubulin::Tubulin_C; Domain location=10-151::154-292
MFRRVSGGHGEATWRDVTDAGLDVVGDPLHEVGRVLVLDIDHLLVHLLGAHLATEHGRGREVAAVARVSSAHHVLGIPHLLGQLRDGEGTVLLRATRGEWRKADHECMVLDNEALYDICFRTLKLTTPSFGDLNHLISATMSGVTCCLRFPGQLNSDLRKLAVNLIPFPRLHFFMVGFAPLTSRGSQQYRALTVPELTQQMWDAKNMMCAADPRHGRYXSTASAMFRGKMSTKEVDEQMINVQNKNSSYFVEWIPNNVKSSVCDIPPRGLSMASTFIGNSTSIQEMFRRVSEQFTAMFRRKAFLHWYTGEGMDEMEFTEAESNMNDLVSEYQQYQDATADEEGEYEDEEAIQDE

SEQ ID NO: 98852 - protein, 195 aa, Setaria italica
  misc_feature (96)..(96): Xaa can be any naturally occurring amino acid
  Transcript Sequence Number=SeqID_32878
  Homolog annotation: Hit_ID=B9SEV1; Match level="QueryCoverage=100%, HitCoverage=38%, E-value=6e-54, Identity=55%"; Hit description=Rab3 gtpase-activating protein non-catalytic subunit, putative
RKNSGSNELSVVFPGVIARFDGADLQSILQKSFQDVKSRLWKDKFEEEDASDEGSFGRIPFRIWNVSKFGSCADAAIVGLMPPPLLELQLLLYCWXSSQRHYCAITVGEDAVVSAYRLSEDRGRSIVGAILSRGVAATFSTISSLSKILWRSEPSPPKKSRPKPQSFAKTSPLTCLKDSPRKGERLTLSPSGTLA

SEQ ID NO: 98853 - protein, 48 aa, Setaria italica
  Transcript Sequence Number=SeqID_32879
GYRDASCLFVEMLLNKDKASSSSMHTEYTKSDYCLCLAIQTSMPFRGA

SEQ ID NO: 98854 - protein, 353 aa, Setaria italica
  Transcript Sequence Number=SeqID_32880
  Gene Ontology: Mol. function=protein heterodimerization activity; Cellular component=soluble fraction; Biological process =intracellular protein transport
  Homolog annotation: Hit_ID=B9SEV1; Match level="QueryCoverage=97%, HitCoverage=71%, E-value=1e-124, Identity=62%"; Hit description=Rab3 gtpase-activating protein non-catalytic subunit, putative
TGWLLFYSLAGDLLHKQSIYPAKILKLNFRERKENAWEDSGSNELSVVFPGVIARFDGADLQSILQKSFQDVKSRLWKDKFEEEDASDEGSFGRIPFRIWNVSKFGSCADAAIVGLMPPPLLELQSSQRHYCAITVGEDAVVSAYRLSEDRGRSIVGAILSRGVAATFSTISSLSKILWRSEPSPPKKSRPKPQSFAKTSPLTCLKDSPRKGERLTLSPSGTLAAITDSLGRILLLDTHALVAVRLWKGYRDASCLFVEMLLNKDKASSSSMHTEYTKSDYCLCLAIHAPRKGIIEVWKMRTGSRLLTIPCPKGSRILQPSARLSSTYSYTPLEVYLFNGDSGQLSVLNSHVG

SEQ ID NO: 98855 - protein, 43 aa, Setaria italica
  Transcript Sequence Number=SeqID_32881
PTIFLHSCSIGYVLQLQHNMLWTITSLLRPWWVGQNQIQILRI

SEQ ID NO: 98856 - protein, 110 aa, Setaria italica
  Transcript Sequence Number=SeqID_32882
LPFPSIAVKFSSLTRWTHARKSHFHSAAQYQPCPLSNDNMEQSRSWWWLLLLGWLRSPLPEQTDEVVTATVLAAAVAREKKVKFMTPSPALGGACLAAASDGAAREAGTA

SEQ ID NO: 98857 - protein, 99 aa, Setaria italica
  Transcript Sequence Number=SeqID_32883
DGLRKYEGGYNITDKHYWSSTIFTGRSGYVIAALWVIGGIIFLGTILVSKILCTKRKERYTEFDFFLERYEILTVILCIILAVFVIVASAVALRGTVQF

SEQ ID NO: 98858 - protein, 81 aa, Setaria italica
  Transcript Sequence Number=SeqID_32884
  Gene Ontology: Mol. function=binding; Cellular component=integral to membrane; Biological process=transport
  Homolog annotation: Hit_ID=Q2R5V9; Match level="QueryCoverage=100%, HitCoverage=26%, E-value=3e-32, Identity=75%"; Hit description =Mitochondrial carrier protein, expressed
  Pfam annotation: Domain name=Mito_carr; Domain location=6-77; Score =27.8; E_value=8.4e-06; Accession=PF00153.19; Description =Mitochondrial carrier protein
MMSCQDLFQCRMQVQGKDVMHGTRYSSPLDCAVKTLESEGLRGIFRGGLATLFREAIGNAVFFCTYEYSRYWMHNYLDSTF

SEQ ID NO: 98859 - protein, 230 aa, Setaria italica
  misc_feature (10)..(10): Xaa can be any naturally occurring amino acid
  misc_feature (136)..(136): Xaa can be any naturally occurring amino acid
  misc_feature (147)..(147): Xaa can be any naturally occurring amino acid
  misc_feature (158)..(158): Xaa can be any naturally occurring amino acid
  Transcript Sequence Number=SeqID_32885
  Gene Ontology: Mol. function=binding; Cellular component=integral to membrane; Biological process=transport
  Homolog annotation: Hit_ID=Q2R5V9; Match level="QueryCoverage=78%, HitCoverage=61%, E-value=5e-67, Identity=68%"; Hit description =Mitochondrial carrier protein, expressed
  Pfam annotation: Domain name=Mito_carr; Domain location=1-77; Score =38.9; E_value=2e-08; Accession=PF00153.19; Description=Mitochondrial carrier protein
SCILTPTELXRMQVQGKDVMHGTRYSSPLDCAVKTLESEGLRGIFRGGLATLFREAIGNAVFFCTYEYSRYWMHNYLDSPRFSSSSHFVMAKDIGIGVMSGGISGMAFWTATLPLDVAKTVIQTDPDPHLSRNPFXVLSMVYKRAGXVAAMLALDRHXQELSLPMQRQLLPGSTVLRFLVLSEASIKVLCTCPGIGLGNTLNGTFLFGSWHGCFFSSTAMKRRKAILRTL

SEQ ID NO: 98860 - protein, 81 aa, Setaria italica
  misc_feature (35)..(35): Xaa can be any naturally occurring amino acid
  Transcript Sequence Number=SeqID_32886
  Subcellular localization annotation: CTP_CleavageSite=53; ConfidenceScore=5.74e-01
VPLLPNRAFQLQNQPPRSPDRPSPLPNRSPLPPDXPSSPSSRAAPPPSARQRRAGKKSKRDFQCTITTHPFAQPNMKASHA

SEQ ID NO: 98861 - protein, 856 aa, Setaria italica
  Transcript Sequence Number=SeqID_32887
MLKTLFVQLNGVGFLNHWLQDAQNCGEKVSSSAEDLIVAILTALECLPINSEHSTSCGVMSTVNHLLAHGNAVINQKARALCQKWSTVPKYGANAEHFNTEEACQTDQKSPEVSLKTEIDKQSVANEVENTVDEPKPEVTTCSDAPLPDPSLTNDNTDATKQPLGPASPNLSNGKTTLGDSKNLVPSPTSTCHVGLEDGQSITKETSASNDVDLSANGILRSNSINAKSGSGQDAPSDATPAAMSVEPNKPQRLFVSSKMDLEDNIVSTSSCIKESEPFAAGRPHLEKDTADTLNHLAVVTRELQDLSEESTGKEEGPTPSSSTDDMGMGSDYILKRCMKSFGGSSKATDTKSTVLKGEKSTRLTEYDDTDALEVARLVAIEVEREVIDYRGPFCGSPDINSRNADSPDLEARRQPVPDELNDNKSSTTGADSGSSSSLKEDGSGITDGSGPLSRKHTRRVELGNLDLNENQCPEEADCNQKSILSNSVNLSMPKAVAASRGSSVFPARLHFEGELGWKGSAATSAFRPASPRRTPDAEKSLSASSHKTSNVLFDLNVADSDSATSGEPLSTAILPASSDLASKGASTAVGVSGGLKLDLNFSCGDEEDVTTASNLPPLWNRQQFNGNWSQPSSSSSSRQPAVRNFDLNDSMSIADGSGRGMDGSSVKALAKDTSDHSAVTIMGKRIIVGQQEHGQHYQHNFLGLSAESRVPARSIQSFAHTSDYNGVSYPSQPAMPFPPAFFAPGGVPYMVDAKGAPVIPPLSGLSLGISHPSFNTRATPPSSNELSYYHPSMDFNYRLPSEGARREAGSYWPVSYQGHTVFMDERMRNMSQGGSSGLVTKRKEPESGWDMYSRR

SEQ ID NO: 98862 - protein, 202 aa, Setaria italica
  Transcript Sequence Number=SeqID_32888
  Gene Ontology: Mol. function=nucleic acid binding
  Homolog annotation: Hit_ID=Q7XWS4; Match level="QueryCoverage=68%, HitCoverage=15%, E-value=2e-15, Identity=40%"; Hit description =OSJNBa0091C12.8 protein
LLKLILISAKPDSREVVERQIKKLKEFHRSPSKKGKDAQVKKDKGKQEEEKQDEDEHSSSDSDYMRGDDSSSEADNEGVDILRKFKDFKKDLKRGHIASLDDVVLEGSTAMPAGFEGSQDDGSETAYAQSSDDVDSINDLDSDGELSRKDNSFTRFKETRGTPIFALGMLFKSKKQFKKAIIRYGLAERKVIKFHQDEPKRV

SEQ ID NO: 98863 - protein, 276 aa, Setaria italica
  misc_feature (22)..(22): Xaa can be any naturally occurring amino acid
  misc_feature (26)..(26): Xaa can be any naturally occurring amino acid
  misc_feature (134)..(134): Xaa can be any naturally occurring amino acid
  misc_feature (156)..(156): Xaa can be any naturally occurring amino acid
  misc_feature (164)..(164): Xaa can be any naturally occurring amino acid
  Transcript Sequence Number=SeqID_32889
  Homolog annotation: Hit_ID=Q7F2I6; Match level="QueryCoverage=99%, HitCoverage=18%, E-value=1e-45, Identity=44%"; Hit description =P0432B10.2 protein
IASHDSQVESDSNVVADNSKAXDDGXEEDAGTEPALLWTADNEKNVMDLGYSEIERNRRLETLMVRRKSRKNIRFELDSMGDIADDLSHSRLQPISISSRQMNPFTDDAELPGSAPPILHPLPSKTKFLPNNQXETGDLAHHNLEAQEWAVSHQDXLFKRHVKXPNYLVGNRPQRHGSRFKPCFVLEEFSFEEAGASSFQRQFSDRSVSRLSIVSECDTVSSVGDQEHNELIRNYIRGVRESPSLLRQDSDLACAGNECSDGISFVDNETLNAVIC

SEQ ID NO: 98864 - protein, 132 aa, Setaria italica
  Transcript Sequence Number=SeqID_32890
  Gene Ontology: Mol. function=oligosaccharyl transferase activity; Cellular component=membrane; Biological process=protein amino acid glycosylation
  Homolog annotation: Hit_ID=Q6XL70; Match level="QueryCoverage=67%, HitCoverage=28%, E-value=1e-25, Identity=67%"; Hit description =Putative oligosaccharyl transferase STT3 protein (Fragment)
PAKKNRKKGKDSEGSSPVDPRTEEKLLVLPCGPSAVGIMLLIILSGFYVVHCVWAAAEAYSAPSIVLTSRSHDGLHVFDDFREAYGWLRHNTDVDDKVHLLASYYYTNCVYSDSKMELIVQVASWWDYGYQT

SEQ ID NO: 98865 - protein, 332 aa, Setaria italica
  misc_feature (25)..(25): Xaa can be any naturally occurring amino acid
  Transcript Sequence Number=SeqID_32891
  Gene Ontology: Mol. function=ATPase activity, coupled to transmembrane movement of substances; Cellular component=integral to membrane; Biological process=transport
  Homolog annotation: Hit_ID=Q5SMN1; Match level="QueryCoverage=99%, HitCoverage=67%, E-value=1e-163, Identity=59%"; Hit description =Putative multidrug resistance-associated protein 7
  Pfam annotation: Domain name=ABC_tran; Domain location=122-304; Score= 168.2; E_value=2.4e-47; Accession=PF00005.19; Description=ABC transporter
  Pfam annotation: Domain name=MMR_HSR1; Domain location=123-213; Score= -7.6; E_value=0.0051; Accession=PF01926.15; Description=GTPase of unknown function
  Pfam module annotation: Pfam domain module=ABC_tran::MMR_HSR1; Domain location=122-304::123-213
  Subcellular localization annotation: CTP_CleavageSite=64; ConfidenceScore=5.25e-01
RLQLLAGFIILFIAMMATVTFHSSXVNLGTPGLVGLALSYAAPVVSLLNGFLTTFTETEKEMISVERVAEYVGIPQEELQGSESPSRSWPTEGRIDFVHVTLRYKPELPPALDDVSFHIASGMQVGIIGRTGAGKSSVLNALFRLVPICNGCILVDGIDVAKVAVRELRAHFAVVPQSPFLFDGSLRENLDPFNTATDLRVWEVLEKCHMKGEIESIGGLDIHVKESGASFSVGQRQLLCLARAFLKSSKVLCLDECTANVDNQTAFLLQNTISAECKGMTVLTIAHRISTVMKMDNILVLDQGKLVEEGNPEVLLNHKSSRFARFAKASQM

SEQ ID NO: 98866 - protein, 279 aa, Setaria italica
  misc_feature (13)..(13): Xaa can be any naturally occurring amino acid
  misc_feature (48)..(48): Xaa can be any naturally occurring amino acid
  misc_feature (164)..(164): Xaa can be any naturally occurring amino acid
  Transcript Sequence Number=SeqID_32892
  Gene Ontology: Mol. function=ATPase activity, coupled to transmembrane movement of substances; Cellular component=integral to membrane; Biological process=transport
  Homolog annotation: Hit_ID=Q5SMN1; Match level="QueryCoverage=99%, HitCoverage=20%, E-value=1e-110, Identity=73%"; Hit description =Putative multidrug resistance-associated protein 7
  Pfam annotation: Domain name=ABC_membrane; Domain location=9-278; Score=107.1; E_value=5.7e-29; Accession=PF00664.15; Description=ABC transporter transmembrane region
LKKYATFAGWLIXFLIFLSAILMQASRNGNDLWLTYWVDTSTGTNNTXFYLIILAVFGIINSLFTLGRAFSFAFGGLRAAIHIHASLLENIISAPVCFFDQNPSGRILNRLSSDLYTVDDSLPFILNIFVANFFSLLGTLVVLSYSQVSFLLILLPLWLIYRKXRSTSREVRRLDSVARSPIYTSFTETLDGSSTIRAFQKEGFFLERFIQHVTLYQKTSYCELIASLWLSLRLQLLAGFIILFIAMMATVTFHSSSLVNLGTPGLVGLALSYAAWLGP

SEQ ID NO: 98867 - protein, 51 aa, Setaria italica
  Transcript Sequence Number=SeqID_32893
NFKLMQLPLTITVPSDKWQRDVIVSPHISQLHSLNVTIAAQKTTILYQGRG

SEQ ID NO: 98868 - protein, 116 aa, Setaria italica
  Transcript Sequence Number=SeqID_32894
  Gene Ontology: Mol. function=molecular_function; Cellular component =mitochondrial inner membrane; Biological process=intracellular protein transmembrane transport
  Homolog annotation: Hit_ID=B6TGT3; Match level="QueryCoverage=93%, HitCoverage=95%, E-value=6e-47, Identity=80%"; Hit description =Mitochondrial import inner membrane translocase subunit TIM16
  Pfam annotation: Domain name=Pam16; Domain location=1-116; Score =54.2; E_value=5.1e-13; Accession=PF03656.5; Description=Pam16
MAGKLIANLIVMGSTILGRAMLQAYRKALDNANKTGVAHEAINNIRRASKSMTEQEARQILGVSENSTWEEIVQRYDNLFERNAKSGSFYLQSKIHRAKECLETVYQKDKQNEPPT

SEQ ID NO: 98869 - protein, 250 aa, Setaria italica
  Transcript Sequence Number=SeqID_32895
  Gene Ontology: Mol. function=protein serine/threonine kinase activity; Cellular component=mitochondrion
  Homolog annotation: Hit_ID=B9REE0; Match level="QueryCoverage=99%, HitCoverage=39%, E-value=1e-116, Identity=75%"; Hit description =Pentatricopeptide repeat-containing protein, putative
  Pfam annotation: Domain name=PPR; Domain location=105-139; Score =35.5; E_value=2.1e-07; Accession=PF01535.12; Description=PPR repeat
  Pfam annotation: Domain name=PPR; Domain location=140-174; Score =17.7; E_value=0.049; Accession=PF01535.12; Description=PPR repeat
  Pfam annotation: Domain name=PPR; Domain location=175-209; Score=3.8; E_value=3.2; Accession=PF01535.12; Description=PPR repeat
  Pfam annotation: Domain name=PPR; Domain location=34-67; Score=10.8; E_value=0.46; Accession=PF01535.12; Description=PPR repeat
  Pfam module annotation: Pfam domain module=PPR::PPR::PPR::PPR; Domain location=105-139::140-174::175-209::34-67
YSSILKAYCKEQKTAEAAQLVAEISAAGLQLDASSYDALIDASMTAHDFQSAFALFKDMREARLPELRSSYLTIMTGLTENNRPGLMASFLDSVVDDPRIEIATHDWNSIIHAFCKVGRLEDAKRTYRRMVFLRFEPNNQTYLSLINGYVSAEKYFNVLILWTEVRRKGAEFNHELIDAFLYALVKGGFFDMAMQVIDKAQEFKIFIDKWRYKQAFMETHKKLKVAKLRKRNFRKMEALVAFKNWAGLNT

SEQ ID NO: 98870 - protein, 113 aa, Setaria italica
  Transcript Sequence Number=SeqID_32896
  Gene Ontology: Mol. function=protein dimerization activity; Cellular component=endoplasmic reticulum lumen; Biological process=proteolysis
  Homolog annotation: Hit_ID=Q8H3C9; Match level="QueryCoverage=85%, HitCoverage=21%, E-value=5e-27, Identity=63%"; Hit description=IAA -amino acid hydrolase ILR1-like 7
SRRAPRRRRRHRPSGGDLLGTARAPGFAAWLRGVRRRIHERPELAFQEHRTSELVRAELDAIGVPYVWPVAQTGVVATIAGGGGGGDGPVVALRADMDALPLQELVDWEYKSQ

SEQ ID NO: 98871 - protein, 181 aa, Setaria italica
  Transcript Sequence Number=SeqID_32897
  Gene Ontology: Cellular component=plasma membrane
  Homolog annotation: Hit_ID=B4FVZ7; Match level="QueryCoverage=90%, HitCoverage=89%, E-value=4e-83, Identity=89%"; Hit description=AIG2 -like protein
  Pfam annotation: Domain name=AIG2; Domain location=18-117; Score =119.6; E_value=1.1e-32; Accession=PF06094.4; Description=AIG2-like family
RRRLLLPAAAAKAGAHSVFVYGSLMADEVVRAILKRVPPAAPAILPNYHRFNIKGRIYPAILPVESKKVAGMVVMGVTDEELQVLDAFEDVEYTRTRVEISLTDSSEKMLADTYVWSDAQDPDLYGEWDFEEWKRLHMKDFLAMTNGFMHGLEQPEAKTRVETYQSFMQQQEQPASETRES

SEQ ID NO: 98872 - protein, 79 aa, Setaria italica
  misc_feature (9)..(9): Xaa can be any naturally occurring amino acid
  misc_feature (53)..(53): Xaa can be any naturally occurring amino acid
  Transcript Sequence Number=SeqID_32898
  Gene Ontology: Mol. function=ATP-dependent helicase activity; Biological process=DNA recombination
  Homolog annotation: Hit_ID=Q5WN04; Match level="QueryCoverage=100%, HitCoverage=9%, E-value=2e-21, Identity=65%"; Hit description =Putative DNA helicase
VVSHIREKXLPRYTATDKIWWQGLSRILEGMRYIQEAAETPRVSIQHPELTEXGLKFLNSGSEEPLHAHPDAAMLLAMN

SEQ ID NO: 98873 - protein, 202 aa, Setaria italica
  Transcript Sequence Number=SeqID_32899
  Gene Ontology: Mol. function=nucleoside-triphosphatase activity; Cellular component=intracellular; Biological process=response to DNA damage stimulus
  Homolog annotation: Hit_ID=Q9XED7; Match level="QueryCoverage=100%, HitCoverage=59%, E-value=1e-111, Identity=97%"; Hit description=DNA repair protein RAD51 homolog B
  Pfam annotation: Domain name=Rad51; Domain location=1-202; Score =439.3; E_value=6e-129; Accession=PF08423.3; Description=Rad51
TSASQLHALRLEIIQITTGSRELDQILDGGIETGSITEIYGEFRSGKTQLSHTLCVTCQLPLDQGGGEGKALYIDAEGKFRPQRLLQIADRFGLNGADVLENVAYARAYNTDHQSRLLLEAASMMVETRFALMVVDSATALYRTDFSGRGELSARQMHLAKFLRSLQKLADEFGVAVVITNQVVAQVDGAAMFAGPQIKPIG

SEQ ID NO: 98874 - protein, 120 aa, Setaria italica
  Transcript Sequence Number=SeqID_32900
  Gene Ontology: Mol. function=protein serine/threonine kinase activity; Biological process=protein amino acid phosphorylation
  Homolog annotation: Hit_ID=B9T411; Match level="QueryCoverage=100%, HitCoverage=40%, E-value=1e-39, Identity=63%"; Hit description =Catalytic, putative
ILTHEHADAVLGLDEVWVVQPRNYRNEIKQIPIFLTRFAMDSITRRFPYLVEQKPEDGDEDAQAAKIDWKIIEEDVEKPFVASGLEFVPLPVMHGEGYICLGFLFGRRARVAYLSDVSRF

SEQ ID NO: 98875 - protein, 145 aa, Setaria italica
  Transcript Sequence Number=SeqID_32901
  Gene Ontology: Mol. function=protein serine/threonine kinase activity; Biological process=protein amino acid phosphorylation
  Homolog annotation: Hit_ID=Q60DP7; Match level="QueryCoverage=98%, HitCoverage=85%, E-value=6e-54, Identity=70%"; Hit description =Phosphonate metabolism protein, putative
VKPEDGDEDAQAAKIDWKIIEEDVEKPFVASGLEFVPLPVMHGEGYICLGFLFGRRARVAYLSDVSRFLPKTEHAISKTGAGQLDLLILEANALHGVGDAFSTHLTLSETLDAIKRIRPKRALLIGMRHFFEHQRENQMLAEWSI

SEQ ID NO: 98876 - protein, 108 aa, Setaria italica
  misc_feature (7)..(7): Xaa can be any naturally occurring amino acid
  misc_feature (35)..(35): Xaa can be any naturally occurring amino acid
  Transcript Sequence Number=SeqID_32902
  Homolog annotation: Hit_ID=B6SWX2; Match level="QueryCoverage=50%, HitCoverage=9%, E-value=2e-15, Identity=72%"; Hit description =Nucleolar complex protein 4
LLRRHPXIIFWFHWEVDENDSNAREASQPKKIGAXPFNNDEADPAKSGAMRMYLIISNMCCLIFSFFSSSFAILNDKQSPEKSFYELQLRFYRSQSVSFFKITSLMAR

SEQ ID NO: 98877 - protein, 593 aa, Setaria italica
  misc_feature (273)..(273): Xaa can be any naturally occurring amino acid
  Transcript Sequence Number=SeqID_32903
  Gene Ontology: Mol. function=protein binding; Cellular component =integral to membrane
  Homolog annotation: Hit_ID=B6SWX2; Match level="QueryCoverage=96%, HitCoverage=96%, E-value=0.0, Identity=81%"; Hit description =Nucleolar complex protein 4
  Pfam annotation: Domain name=CBF; Domain location=332-494; Score =261.8; E_value=1.6e-75; Accession=PF03914.9; Description=CBFMak21 family
  Subcellular localization annotation: CTP_CleavageSite=6; ConfidenceScore=5.02e-01
MAKSSSAAATASATKKRRSRGGALTLDEVKTLGRELLSSRAHLNHAPALLALLSPSAPLDLALEALISLQSFFVPLIPSIPSASAAVTAGHAGSDPELVFGAWLRQRFDELVAALVELSVSPHSDDAIRDVALDALMDFVKLGKDGKFQSAIYHKFLHAVVHAADSVDPLLELLGSKYFKYTDVCYFTYSSADKIANSLGSKTTDSGKDALQNGSDGSENKCAIFIHNIYNLLVRVPVMDYQKESTFEMWSTFGLSSKGEKDSSKDSSSSYIXEKLKLKFTKAWLSFLKLPLPLDVYKEVLASIHQNVIPSMSNPAILCDFLTRSYDIGGVISVMALSGLFILMTQHGLEYPKFYEKLYALLTPAVFMAKHRSVFLQLLDTCLKSSYLPAYLAAAFAKRLSRLALSVPPAGALIIIALIHNLLRRHPSINFLVHWEVDENDSNAREASQPKKIGADPFNNDEADPAKSGAMRSSLWEIDTLRHHYSPAVSRFVASLEEDLTVRAKTTEMKITDFSSGSYATVFRDEVRRRIKQVPLAFYRTTPTSLFQGSDFPGWTFGDPSNSTVATMVEGNETIKTVGASDSTPSKRLRVEA

SEQ ID NO: 98878 - protein, 224 aa, Setaria italica
  misc_feature (117)..(117): Xaa can be any naturally occurring amino acid
  Transcript Sequence Number=SeqID_32904
  Gene Ontology: Mol. function=transcription factor activity; Cellular component=transcription factor complex; Biological process =regulation of transcription, DNA-dependent
  Homolog annotation: Hit_ID=B6UDG0; Match level="QueryCoverage=97%, HitCoverage=63%, E-value=1e-104, Identity=85%"; Hit description =Transcription factor Dp-1
  Pfam annotation: Domain name=DP; Domain location=99-224; Score=197.2; E_value=4.4e-56; Accession=PF08781.2; Description=Transcription factor DP
  Pfam annotation: Domain name=E2F_TDP; Domain location=4-92; Score =143.2; E_value=8.3e-40; Accession=PF02319.12; Description =Transcription factor E2Fdimerisation partner (TDP)
  Pfam module annotation: Pfam domain module=DP::E2F_TDP; Domain location=99-224::4-92
GPDKNGRGLRQFSMRVCEKVESKGRTTYNEVADELVAEFSDPNINIDSPDPDNPSAQQYDEKNIRRRVYDALNVLMAMEIISKDKKEIQWRGLPKTSMNDIEELKTEIVGLKGRIGXKSAYLQDLQDQYVSLQNLVQRNEQLYGSGDAPSGGVALPFILVQTRPHATVEVEISEDMQLVHFDFNSTPFELQDDSFVLKAMGLSGKEETDGTQAPVANGGSTFNC

SEQ ID NO: 98879 - protein, 171 aa, Setaria italica
  Transcript Sequence Number=SeqID_32905
  Gene Ontology: Mol. function=transcription factor activity; Cellular component=transcription factor complex; Biological process =regulation of transcription, DNA-dependent
  Homolog annotation: Hit_ID=B6UDG0; Match level="QueryCoverage=100%, HitCoverage=50%, E-value=2e-82, Identity=87%"; Hit description =Transcription factor Dp-1
  Pfam annotation: Domain name=DP; Domain location=9-170; Score=249.9; E_value=6.2e-72; Accession=PF08781.2; Description=Transcription factor DP
RSLPKTSMNDIEELKTEIVGLKGRIDKKSAYLQDLQDQYVSLQNLVQRNEQLYGSGDAPSGGVALPFILVQTRPHATVEVEISEDMQLVHFDFNSTPFELQDDSFVLKAMGLSGKEETDGTQAPVANGGECSSTPNNYWHQSPQPTRPRGVRLPNSPPIPGILKGRVKHEH

SEQ ID NO: 98880 - protein, 112 aa, Setaria italica
  Transcript Sequence Number=SeqID_32906
  Gene Ontology: Mol. function=drug transporter activity; Cellular component=membrane; Biological process=multidrug transport
  Homolog annotation: Hit_ID=Q10A00; Match level="QueryCoverage=98%, HitCoverage=23%, E-value=4e-30, Identity=60%"; Hit description=MATE efflux family protein, expressed
MGSMEAPLLTVKDTEQRVEAHAEGSFWSEVKTQLYLAGPLVAGYLLMNITQMISIMFVGHLGKLELASVSIATSFAAVTGLCVLAGMATGLDTLCGQAFGAGQHHLLGVHKQ

SEQ ID NO: 98881 - protein, 246 aa, Setaria italica
  Transcript Sequence Number=SeqID_32907
YTVREILQELKYNHAKLPLGNAKATPLQGTVEVAEHSGPKDEAMVAQLKGTPEFAEHSRPKDDSVKSPYNCDSLKSSKEIQDVDDMLISQKDDATSTGIVEKTETWKSVGSSHHNVETEAAKHDLNTSETLKTADDPTLSDQTESESMKVITNKSYVSVGVEAQSDPGNQQRNTEASKLALENTEKILNASESSVSDQSGSDKVVKANIHDREHNPKHEPEESTSTGLFGSLKSFAYGFRNFWKKL

SEQ ID NO: 98882 - protein, 434 aa, Setaria italica
  Transcript Sequence Number=SeqID_32908
  Gene Ontology: Mol. function=aspartic-type endopeptidase activity; Cellular component=cell wall; Biological process=proteolysis
  Homolog annotation: Hit_ID=B9RTU6; Match level="QueryCoverage=93%, HitCoverage=92%, E-value=1e-119, Identity=52%"; Hit description =Basic 7S globulin 2 small subunit, putative
MARLPPLAALLFLCLLSACRAAGPRDGNPSAVVLPVSKDAAATQQYVTSFRQRTPLAPVEAVLDLAGATLWVDCEAGYASSTYRRVPCASKPCRLSRSAACATSCLGAPSPSCLNDTCAGFPGNTVTHVSTGGNIITDVLALPTTFRPAPGPLATAPAFLFTCGATFLTEGLAAGATGMASLSRARFALPTQLAATFRFSRKFALCLPPAGSAGVVVFGDAPYAFQPGFVLSNSSLIYTPLLVNPVSTAGVSTKGDKSDEYFVGVTGIKVNGRAVPLNATLLAIDKKGVGGTKLSTVAPYTVLESSIYKAVTGAFAAETAAIPRAPAMAPFQLCYDGSKVGSTRVGPAVPTIELVLGTDATSWVVFGANSMVAVKGGALCLGVVDGGEAPRTSVVIGGHMMEDNLLEFDLEASRLGFSSSLLFRQTNCNNFRLG

SEQ ID NO: 98883 - protein, 40 aa, Setaria italica
  Transcript Sequence Number=SeqID_32909
MINLFDLSVGASAKVASRDGSPVRGTQSERKEYAGSKTVT

SEQ ID NO: 98884 - protein, 283 aa, Setaria italica
  misc_feature (238)..(238): Xaa can be any naturally occurring amino acid
  Transcript Sequence Number=SeqID_32910
  Gene Ontology: Mol. function=protein binding; Cellular component =nucleus; Biological process=cell division
  Homolog annotation: Hit_ID=B6TIH7; Match level="QueryCoverage=87%, HitCoverage=77%, E-value=1e-129, Identity=89%"; Hit description =Cyclin delta-2
  Pfam annotation: Domain name=Cyclin_C; Domain location=140-266; Score= 20.8; E_value=0.00087; Accession=PF02984.11; Description=Cyclin, C -terminal domain
  Pfam annotation: Domain name=Cyclin_N; Domain location=5-138; Score =120.6; E_value=5.2e-33; Accession=PF00134.15; Description=Cyclin, N -terminal domain
  Pfam module annotation: Pfam domain module=Cyclin_C::Cyclin_N; Domain location=140-266::5-138
AESAASIAELIGGEADYSPRPDYPDRLRSRSIDPAARAESVAWILKVQEYYGFLPLTAYLAVNYMDRFLSLHRLPQEDGWAMELLAVTCLSLAAKMEETLVPSLLDLQVEGISRYVFEPGTIGRMELLVLTALNWRLRSVTPFTFIDFFACKVDPGGRHTRCLIARATQVILAAMHDIEFLDHCPSAMAAAAVLCATGETPSLESVSPGAAVGWCIGLAEETIGSCYRLMQQLVIGGXRSDKAAGTTASALNLCCSDQALSSHSSSSSSPPPAKRRKRSPPGI

SEQ ID NO: 98885 - protein, 112 aa, Setaria italica
  misc_feature (17)..(17): Xaa can be any naturally occurring amino acid
  Transcript Sequence Number=SeqID_32911
  Gene Ontology: Mol. function=calcium ion binding; Cellular component =endoplasmic reticulum; Biological process=endosome transport
  Homolog annotation: Hit_ID=B9SYX5; Match level="QueryCoverage=100%, HitCoverage=20%, E-value=1e-56, Identity=94%"; Hit description=EH -domain-containing protein, putative
LLDSPGVLSGERQRTQXRSYDFTGVTSWFAAKCDLILLLFDPHKLDISDEFKRVISSLRGHDDKIRVVLNKADQVDTQQLMRVYGALMWSLGKVLNTPEVVRVYIGSFNDKP

SEQ ID NO: 98886 - protein, 43 aa, Setaria italica
  misc_feature (33)..(33): Xaa can be any naturally occurring amino acid
  Transcript Sequence Number=SeqID_32912
KSHITSESYSGSTMFVLHSGNKATVNLKAATAXPLNIEDNARR

SEQ ID NO: 98887 - protein, 198 aa, Setaria italica
  Transcript Sequence Number=SeqID_32913
  Gene Ontology: Mol. function=binding; Cellular component=mitochondrion
  Homolog annotation: Hit_ID=B9SKK8; Match level="QueryCoverage=71%, HitCoverage=26%, E-value=1e-38, Identity=53%"; Hit description =Pentatricopeptide repeat-containing protein, putative
  Subcellular localization annotation: CTP_CleavageSite=34; ConfidenceScore=5.70e-01
LLHLVTSSSPITPARPSTQRRPCVSAAAVAVTVRCAASSSSTPSSSASEAAAAGQQVAKVHSYGTVDYERRAPLRWGTLYRRIAVGHGGRPVGRTLGAWDEGERRLDKWELCRIASELRKFRRFNLALQVYDWMTERRDRFPLSSSDMAIQLDLIAKVRGVSHAEKYFEELPDPLKDKRTYGSLLNVYAQAMMKDKTE

SEQ ID NO: 98888 - protein, 56 aa, Setaria italica
  Transcript Sequence Number=SeqID_32914
  Gene Ontology: Mol. function=binding
ELPDILKDKRAYGSLLNVYTQAMMKEKTEDTFEQMRKKKGFASDTLPCNVLMNFFV

SEQ ID NO: 98889 - protein, 383 aa, Setaria italica
  misc_feature (8)..(8): Xaa can be any naturally occurring amino acid
  misc_feature (34)..(34): Xaa can be any naturally occurring amino acid
  misc_feature (40)..(40): Xaa can be any naturally occurring amino acid
  misc_feature (79)..(79): Xaa can be any naturally occurring amino acid
  Transcript Sequence Number=SeqID_32915
  Gene Ontology: Mol. function=binding; Cellular component=mitochondrion
  Homolog annotation: Hit_ID=B9SKK8; Match level="QueryCoverage=98%, HitCoverage=70%, E-value=1e-103, Identity=46%"; Hit description =Pentatricopeptide repeat-containing protein, putative
  Pfam annotation: Domain name=PPR; Domain location=120-154; Score =17.7; E_value=0.048; Accession=PF01535.12; Description=PPR repeat
  Pfam annotation: Domain name=PPR; Domain location=156-190; Score =16.1; E_value=0.11; Accession=PF01535.12; Description=PPR repeat
  Pfam annotation: Domain name=PPR; Domain location=226-260; Score=5.6; E_value=2; Accession=PF01535.12; Description=PPR repeat
  Pfam annotation: Domain name=PPR; Domain location=261-295; Score =17.7; E_value=0.047; Accession=PF01535.12; Description=PPR repeat
  Pfam annotation: Domain name=PPR; Domain location=50-84; Score=8.1; E_ value=0.99; Accession=PF01535.12; Description=PPR repeat
  Pfam annotation: Domain name=PPR; Domain location=85-119; Score=25.0; E_value=0.00031; Accession=PF01535.12; Description=PPR repeat
  Pfam annotation: Domain name=TPR_2; Domain location=155-188; Score =9.8; E_value=2; Accession=PF07719.9; Description=Tetratricopeptide repeat
  Pfam annotation: Domain name=TPR_2; Domain location=295-328; Score =14.5; E_value=0.44; Accession=PF07719.9; Description=Tetratricopeptid e repeat
  Pfam module annotation: Pfam domain module=PPR::PPR::PPR::PPR::PPR::PP R::TPR_2::TPR_2; Domain location=120-154::156-190::226-260::261 -295::50-84::85-119::155-188::295-328
KVYDWMTXRRDRFPLSSSDMAMQLDLIAKVHGVXHAEEYXELPDALKDKKTYGSLRNVYAQSMMKEKTEDTFEQMRKKXFASDTLPCNVLMNFYVDVGEPDEVSAIIDEMKERNVSFDVCTYNIWIKSCAAKQDADEMERVFSQMIADESVIANWTTYTTLASMYIKLGNSEKAEECLKGAEKRTTGRDKKCFHYLITLYSHLGKKEEVYRIWNWYKATFPTIHNLGYQEVLSALVRIGDIEGAELLYEEWASKSSSFDPKTMNILLAWYAREGLITKAEQIVNQFVEKGGNPKPNTWEILATAYLKDNKISEALSCMEKATAVKSASKWKPRPTNVESLLASFKEKNDTEGADRLVSVLTSRGCAEDEEYKSLINTYAFAGT

SEQ ID NO: 98890 - protein, 394 aa, Setaria italica
  Transcript Sequence Number=SeqID_32916
  Gene Ontology: Mol. function=sequence-specific DNA binding; Cellular component=nucleus; Biological process=regulation of transcription, DNA-dependent
  Homolog annotation: Hit_ID=B4FZE9; Match level="QueryCoverage=68%, HitCoverage=65%, E-value=1e-126, Identity=80%"; Hit description=GATA transcription factor 29
  Pfam annotation: Domain name=GATA; Domain location=7-42; Score=61.4; E_value=3.4e-15; Accession=PF00320.19; Description=GATA zinc finger
MGKQGPCRHCGVTSTPLWRNGPPDKPVLCNACGSRWRTKGSLANYTPMHRKDDIDDDEPRVSKLKPPTSKMKSQKKKTNHITTENGPFSGQSFQKMGDADPSSRSSSGSAISYSESCVPYGAVDASEMSGSAQSHAWESLVPSRKRSCVTRPKPSPVEMLAKDLSSIMHEEQLYYLSGSSEEDLLYHSETPVGSFEIGSGSVLLRHPNSKSPEEESEASSIPADNKSYITSESYSGSASFVVHSGNRAINLNPATARLKRSPLHIEDNARRDKLPYENKHILESIDSPLVSVDLEDVVNYSNFVKYLTKEDQQQLFKLLSPAESSTPDSSVRSMFDSIQFSDAIDSYQMLLGEGILDPSFSGDEGWNTVKMLALTNLTRCKWLECYKQQKGKGD

SEQ ID NO: 98891 - protein, 47 aa, Setaria italica
  Transcript Sequence Number=SeqID_32917
YALLTVPVPSFSAHLLKALINPAFYARISHAQGVSLVRAFSYIRRGY

SEQ ID NO: 98892 - protein, 54 aa, Setaria italica
  Transcript Sequence Number=SeqID_32918
  Subcellular localization annotation: CTP_CleavageSite=44; ConfidenceScore=5.24e-01
LRSSSSSVLPCLPRPPPSSLPHLTSYPPSILSHQSPPPSRPSLSENLLQDRSLP

SEQ ID NO: 98893 - protein, 117 aa, Setaria italica
  misc_feature (52)..(52): Xaa can be any naturally occurring amino acid
  misc_feature (60)..(60): Xaa can be any naturally occurring amino acid
  misc_feature (73)..(73): Xaa can be any naturally occurring amino acid
  Transcript Sequence Number=SeqID_32919
  Gene Ontology: Mol. function=transferase activity, transferring hexosyl groups; Biological process=carbohydrate metabolic process
MKEASGAGAGAEDVGSSSVSNICLPQDEGTSSSEMENTECSETSSELSNSEXLHPNVAKXSSTLDKKIPIKKXLKLFSRMATLKDDGTVVVDIPTNLEAASLDLPSENHHNVAWWGT

SEQ ID NO: 98894 - protein, 57 aa, Setaria italica
  Transcript Sequence Number=SeqID_32920
NISNLAFINDRSYPIEFRPTCFLFVFPLSLYIPNPCLFVSISAKWGTPPQFCVKNYR

SEQ ID NO: 98895 - protein, 52 aa, Setaria italica
  Transcript Sequence Number=SeqID_32921
PAPLQLMRRRAAAFSGEGAAATAATAALLDAVAHGELIQQLAYSVTLPKQLG

SEQ ID NO: 98896 - protein, 58 aa, Setaria italica
  Transcript Sequence Number=SeqID_32922
QNNNKNFKFNIRGNTIVPRHTLGILGINSQWQHSRVQSYVMYIFRSYHPKKQIKIIQN

SEQ ID NO: 98897 - protein, 141 aa, Setaria italica
  Transcript Sequence Number=SeqID_32923
  Gene Ontology: Mol. function=protein serine/threonine kinase activity; Biological process=protein amino acid phosphorylation
  Homolog annotation: Hit_ID=Q5VRE1; Match level="QueryCoverage=75%, HitCoverage=14%, E-value=5e-24, Identity=50%"; Hit description =Putative wall-associated kinase 4
ELDVRRRRLAERRQPWPVQRATRGSASLTAMLRFQGKAAMLPDPSCLKKCGDVDIVFPFGIGADCAMEGFNLDCNKTVDGSSHITYYHNAPLMNISLLHGQVRMKNYIQYRCSNHSNGNIIDGSWYLQLSDTPLQQIKLNK

SEQ ID NO: 98898 - protein, 130 aa, Setaria italica
  Transcript Sequence Number=SeqID_32924
CNMRPNKMSCDVDTPVPSVLANGEKKRQKDTLLARCDAYQSLIVVFSGTPHLHVHPSSDPCLSPNQETEKKGKRAIMEEKKGGKNCVQLSVVSGKRRRGSRNRFGFRTSSDDLSAVEDDRSMHGRWSFLL

SEQ ID NO: 98899 - protein, 62 aa, Setaria italica
  Transcript Sequence Number=SeqID_32925
  Gene Ontology: Mol. function=catalytic activity; Biological process =metabolic process
  Homolog annotation: Hit_ID=Q33AP4; Match level="QueryCoverage=96%, HitCoverage=8%, E-value=9e-14, Identity=60%"; Hit description =Phosphatidylinositolglycan class O, putative, expressed
AQANWSASLRTTCSSDTGSQEKSEGEGSVLPQQIDAYTDFLQTFAKLARSAWTEFDLWSMIS

SEQ ID NO: 98900 - protein, 43 aa, Setaria italica
  Transcript Sequence Number=SeqID_32926
LSEKESVNYVALTGPLPDLDEWSASVPSELSTKVKQWVPCELA

SEQ ID NO: 98901 - protein, 140 aa, Setaria italica
  misc_feature (64)..(64): Xaa can be any naturally occurring amino acid
  Transcript Sequence Number=SeqID_32927
  Gene Ontology: Mol. function=phosphatidylcholine-sterol O -acyltransferase activity; Biological process=lipid metabolic process
  Homolog annotation: Hit_ID=B6T3X6; Match level="QueryCoverage=87%, HitCoverage=36%, E-value=6e-61, Identity=89%"; Hit description =Phospholipase A1
RGGVGQGRGDCRAGGRPWAFVELVHLTMVYHFHDMIDMLINCGYKKGTTLFGYGYDFRQSNRQXMAGLRTKLETAYKTSGGKKVNIISHSMGGLLVCCFMSINHDVFTKYVNKWICIACPFQGAPGCINDSLLTGLQFVY

SEQ ID NO: 98902 - protein, 73 aa, Setaria italica
  Transcript Sequence Number=SeqID_32928
DKYMTQLSACSTDAGPHIVPTRYVDSSEMAKTAVPLMNDTIGENSFSFSSYMNPCRINLDPFVHSTHNQNNQD

SEQ ID NO: 98903 - protein, 87 aa, Setaria italica
  Transcript Sequence Number=SeqID_32929
  Gene Ontology: Biological process=protein modification process
  Homolog annotation: Hit_ID=B6U2W1; Match level="QueryCoverage=59%, HitCoverage=32%, E-value=1e-19, Identity=86%"; Hit description=BCL-2 binding anthanogene-1
MIKLRCSKKLFRRSSSKGSSSGSDGGDAGGGRGEIEWEVRPGGMLVQKRDGRGDVEIITVRIATGFSWHDVSIGATCTFGELKVVQI

SEQ ID NO: 98904 - protein, 77 aa, Setaria italica
  Transcript Sequence Number=SeqID_32930
  Subcellular localization annotation: CTP_CleavageSite=8; ConfidenceScore=5.07e-01
MQKRVVLVSAAVAALGLAAAVLGFVAEATKSKAFVAFDGRRCVYRRTPALFCGVVAALLALAALALATAASGCFGRN

SEQ ID NO: 98905 - protein, 76 aa, Setaria italica
  misc_feature (48)..(48): Xaa can be any naturally occurring amino acid
  Transcript Sequence Number=SeqID_32931
  Gene Ontology: Mol. function=transcription regulator activity; Cellular component=nucleus; Biological process=regulation of transcription
AFAGNPSFAYGYEADGCMANGPLDGQCNYRAPVSPALGVPSGMTSPHXRSQLELGVFEFQPSKVCPRNFIIFDHTD

SEQ ID NO: 98906 - protein, 386 aa, Setaria italica
  Transcript Sequence Number=SeqID_32932
  Gene Ontology: Cellular component=plasma membrane
  Homolog annotation: Hit_ID=B6ST21; Match level="QueryCoverage=93%, HitCoverage=92%, E-value=1e-125, Identity=63%"; Hit description =Membrane protein
  Pfam annotation: Domain name=Cytochrom_B561; Domain location=163-369; Score=-61.0; E_value=0.021; Accession=PF03188.8; Description =Eukaryotic cytochrome b561
  Pfam annotation: Domain name=DUF568; Domain location=85-211; Score =196.2; E_value=9.1e-56; Accession=PF04526.5; Description=Protein of unknown function (DUF568)
  Pfam module annotation: Pfam domain module=Cytochrom_B561::DUF568; Domain location=163-369::85-211
MSFPRLLVLFVLAVAVAARRAAAACGAEKFSANRVFAACADLPRLGASVHWTYDAAASSLSVAFLAAPPSGGWVAWGLNPTGEGMIGTQALVAVPKGGGYEVQTYSISGLSLGSPGPLSYKTSDLTAESGGDGRVRIFGTLQLQNGTGEVNQVWQVGPFSGGAIGMHSTTNSDNLNSKGKLNLLTGASTAASGGGNILRKRNTHGVLNAVSWGLLLPMGAIFARYLKTFKSADPAWFYLHVACQLIGYGVGVSGWATGIHLGNLSKGITYSVHRNIGITVFSLGTLQIFALFLRPKKDHKYRFYWNVYHHSIGYTIIILGIINIFKGMSILSVDQKWKTAYIIAICILGAIALILEVVTWGIVLKRRKEDNKTYNGNGNGHLPLSM

SEQ ID NO: 98907 - protein, 89 aa, Setaria italica
  Transcript Sequence Number=SeqID_32933
PGRLINDSTTTRRETSHEKKEKRGRATLLNTTDRQPPSTDGPRRRRFPVIARGGRSGRADSERERARARTEHPLRRAEKAHSLFPATAR

SEQ ID NO: 98908 - protein, 72 aa, Setaria italica
  Transcript Sequence Number=SeqID_32934
  Gene Ontology: Mol. function=nucleoside-triphosphatase activity; Biological process=protein metabolic process
  Homolog annotation: Hit_ID=Q334H8; Match level="QueryCoverage=100%, HitCoverage=7%, E-value=4e-29, Identity=81%"; Hit description=Heat shock protein 101
YGARPIRRWIEKRVVTELSKMLIKEEIDENSTVFIDASPNKEELTYKVDANGGLVNAQTGQKSDSLIQVPSG

SEQ ID NO: 98909 - protein, 120 aa, Setaria italica
  Transcript Sequence Number=SeqID_32935
  Subcellular localization annotation: CTP_CleavageSite=52; ConfidenceScore=5.21e-01
MAFKSIAFPTLLLLATALMLAASAHAQAPASTPTPAPAPSQSLCPNVLSDIQAFETAARALVDKIEMIFIPNIMVKLDTTLARIGLLHPGVKFCVCTNNPSSLIPGSGPKLRCVGAGITV

SEQ ID NO: 98910 - protein, 171 aa, Setaria italica
  Transcript Sequence Number=SeqID_32936
  Gene Ontology: Mol. function=nucleic acid binding; Cellular component= intracellular; Biological process=defense response
  Homolog annotation: Hit_ID=B9SAH9; Match level="QueryCoverage=83%, HitCoverage=29%, E-value=3e-38, Identity=56%"; Hit description =Protein MOS2, putative
DSRDRMDERDSSSRKKRSGEQRSEREAHGKERSARESREGTSNGTDSRSKVRWLQSHIRVRVVSEKLSKRLYLMKGKVVDVVGPTTCDVMMDDGSELVQGVEQDMLETVLPRTNGRVLVLYGKHKGMYGHLVEKNSEEEIGLVEDADTKDIVRVRYDQMAEYTGDPELLGY

SEQ ID NO: 98911 - protein, 77 aa, Setaria italica
  Transcript Sequence Number=SeqID_32937
  Gene Ontology: Mol. function=aspartic-type endopeptidase activity; Biological process=DNA integration
  Homolog annotation: Hit_ID=Q2R3G9; Match level="QueryCoverage=98%, HitCoverage=6%, E-value=1e-33, Identity=89%"; Hit description =Retrotransposon protein, putative, Ty1-copia subclass
  Pfam annotation: Domain name=RVT_2; Domain location=1-76; Score= -146.0; E_value=5.5e-06; Accession=PF07727.6; Description=Reverse transcriptase (RNA-dependent DNA pol
TTLISAGFSVNEADRCVYYRHGRGEGVILCLYVDDILIFGTNLDVIKEVKSFLCQNFDMKDLGEADVILNIKLIKGE

SEQ ID NO: 98912 - protein, 290 aa, Setaria italica
  misc_feature (238)..(238): Xaa can be any naturally occurring amino acid
  Transcript Sequence Number=SeqID_32938
  Gene Ontology: Mol. function=DNA-directed DNA polymerase activity; Biological process=DNA replication
  Homolog annotation: Hit_ID=B6T490; Match level="QueryCoverage=98%, HitCoverage=68%, E-value=1e-148, Identity=88%"; Hit description =Protein trpH
REVAGAGEPVHILAYYGTCGPSRYDELYSMLLNIRDGRYLRAKNMLAKLNRLKVPIKWEHITKIAGEGVAPGRLHVARAMVEAGYVENVRQAFNKYLGDDGPAYARGSEPFAETVVQLISRTGGISALAHPWSLKNPDAVIRSLKGAGLNGMEVYRSDGKVDGFSELAEKYGLLKLGGSDFHGRGGKDESDIGTVKLAITTLCCFLKMARPIWSTAMKDILLKFAEEPSSANLGNIIXIGQLTNADAFSPINTGIDVVDFCLSSWSSNDDMEDVELEEVRLKLAHYAAER

SEQ ID NO: 98913 - protein, 226 aa, Setaria italica
  Transcript Sequence Number=SeqID_32939
  Gene Ontology: Mol. function=zinc ion binding
LHPLRTSDMDRHRIYSQSIAENVHSQESGKKSSSCSNRNYDLGSDPNQAKSHVSGFLNRGTGHHIKNDKDLLRDKQDLTNACLINKGSGLSIKNVQLNPEHKVNTDALPLHDNRGHKQPTGRQNEKTLPHFDSNLSDEANLTYGNVKPDKGNIPHNDLKINSSTVKGSKQQPSLNNASNGDASYKAKQIEKSVVENLETRKQVTLGGDASDVPNASVLLKEARVFE

SEQ ID NO: 98914 - protein, 50 aa, Setaria italica
  Transcript Sequence Number=SeqID_32940
VLCDDSLKISAPTGTSIPTKPNCMLVSFIEQMYTHSVKSYKLYFMRVFKT

SEQ ID NO: 98915 - protein, 151 aa, Setaria italica
  misc_feature (17)..(17): Xaa can be any naturally occurring amino acid
  Transcript Sequence Number=SeqID_32941
  Gene Ontology: Mol. function=serine-type peptidase activity; Cellular component=membrane; Biological process=proteolysis
  Homolog annotation: Hit_ID=B9RSG5; Match level="QueryCoverage=96%, HitCoverage=19%, E-value=1e-40, Identity=54%"; Hit description =Dipeptidyl peptidase IV, putative
IIPRLFIWASEKTGLNXFYLCGNDGTCLGPLTQGDWMVEQVVAVNEGTELVYFTGTLDGPLESHLYVTNLYPDQSLPLQTPQRLTHGTGWHSVILDHQLLRFIDVHESSKSPPVISLCSLFDGSVMIPIYQPVTDPKLMKLQQLSPEMVQI

SEQ ID NO: 98916 - protein, 51 aa, Setaria italica
  misc_feature (20)..(20): Xaa can be any naturally occurring amino acid
  Transcript Sequence Number=SeqID_32942
  Gene Ontology: Mol. function=serine-type peptidase activity; Biological process=proteolysis
  Homolog annotation: Hit_ID=B6UHC0; Match level="QueryCoverage=92%, HitCoverage=6%, E-value=7e-12, Identity=68%"; Hit description=Acyl -peptide hydrolase-like
SLSVGSPPVPLTPDYSAPNXSYADGVFDPHFSRYITVMEGTRLSRWNSLLF

SEQ ID NO: 98917 - protein, 167 aa, Setaria italica
  Transcript Sequence Number=SeqID_32943
  Gene Ontology: Mol. function=protein serine/threonine kinase activity; Biological process=protein amino acid phosphorylation
  Homolog annotation: Hit_ID=Q69MP3; Match level="QueryCoverage=100%, HitCoverage=19%, E-value=2e-45, Identity=53%"; Hit description =Putative receptor kinase 5
  Pfam annotation: Domain name=B_lectin; Domain location=1-80; Score =39.0; E_value=1.9e-08; Accession=PF01453.16; Description=D-mannose binding lectin
SDGRVLWTTDVTGAAPAAGNAAAVLLNTGNLVIRSPDGTALWQSFDHPADTFLPGMRIRIRYETRAGKRLVSWKGPDDPSPGSFSFGGDPETFLQIFVWNATRPIWRSGPWTGDSFSVQVQFQMVISVIVNLNVVNTKKEIYITFSLSPGAAHTRYVLTDSGEYQLQ

SEQ ID NO: 98918 - protein, 542 aa, Setaria italica
  Transcript Sequence Number=SeqID_32944
  Gene Ontology: Mol. function=oxidoreductase activity; Cellular component=anchored to membrane
  Homolog annotation: Hit_ID=B6U762; Match level="QueryCoverage=93%, HitCoverage=88%, E-value=0.0, Identity=70%"; Hit description =Monocopper oxidase
  Pfam annotation: Domain name=Cu-oxidase; Domain location=107-262; Score=213.9; E_value=4.2e-61; Accession=PF00394.14; Description =Multicopper oxidase
  Pfam annotation: Domain name=Cu-oxidase_2; Domain location=345-484; Score=138.0; E_value=3e-38; Accession=PF07731.6; Description =Multicopper oxidase
  Pfam annotation: Domain name=Cu-oxidase_3; Domain location=1-97; Score=141.9; E_value=1.9e-39; Accession=PF07732.7; Description =Multicopper oxidase
  Pfam module annotation: Pfam domain module=Cu-oxidase::Cu-oxidase _2::Cu-oxidase_3; Domain location=107-262::345-484::1-97
KQFPGPVMNVTTNYNVVVNVLNSLDEPLLITWDGIQHRKNCWQDGVLGTTCPIPPGWNWTYNFQVKDQIGSFFYFPSLGMQRAAGGFGGITVNNRAVISVPFDTPDGDITLFIGDWYKKNHTHLRKMLDDGKELGMPDGVLMNGKGPYRYNDSLVPDGIEYETIKVEPGKTYRFRVHNVGVSTSLNFRIQNHNLALVETEGSYTMKQNFTNLDIHVGQSYSFLVTMDQNASSDYYIVASARFVNESLWTKVTGVAILQYSNSKGKASGPLPDPPNDEYDKTFSMNQARSIRMNVSTGAARPNPQGSFHYGSINVSQVYKLRNEPPVIINGKKRTTLSGISYSPPDTPLRLSDLYDKKGVYTLDFPTMPIDGPPVIRTSVINSTYKNFLEIVFQNNDTIVQTYHIDGYAFWVVGMDYGEWTENSRGTYNKWDGVSRCTTQVFPGAWTAVMLSLDSPGFWNVRTENLDTWYLGQETYIRVVDPNGGYNVTEMVAPDNMLYCGLLKDKQKAQKPHGSSSSSASAAKLNNYLLVVLVSLLALALGH

SEQ ID NO: 98919 - protein, 91 aa, Setaria italica
  Transcript Sequence Number=SeqID_32945
ICSRAYTVNAFRHFRIMGFQLRSTIPHQVFIEPTRQHSVKEKHRELNDRYFGKRNKQSSSHAPMQNWSRRKDTTRAETANLIKPLTIKFVP

SEQ ID NO: 98920 - protein, 161 aa, Setaria italica
  Transcript Sequence Number=SeqID_32946
  Gene Ontology: Mol. function=hydrolase activity; Cellular component =mitochondrion
  Homolog annotation: Hit_ID=A6QQ83; Match level="QueryCoverage=64%, HitCoverage=67%, E-value=2e-11, Identity=35%"; Hit description=THEM2 protein
  Pfam annotation: Domain name=4HBT; Domain location=69-146; Score =63.2; E_value=9.5e-16; Accession=PF03061.14; Description =Thioesterase superfamily
MASGSQDKSLETARLLLEETSPAGAEAEADLPSGFYDAFVLRGIRVAQALQPGTLLCHFTVPSRLLNSGGFLHGGATASLVDLVASAAFTTAGLRTRGSPLEMNISYLDAAFADEEIDIEAKVLRAGKAVGVAVVELKKKSGKIIAQARYSKYLGAASSKL

SEQ ID NO: 98921 - protein, 77 aa, Setaria italica
  misc_feature (32)..(32): Xaa can be any naturally occurring amino acid
  Transcript Sequence Number=SeqID_32947
  Gene Ontology: Mol. function=isomerase activity
  Homolog annotation: Hit_ID=Q53LS7; Match level="QueryCoverage=90%, HitCoverage=17%, E-value=1e-29, Identity=82%"; Hit description =ProFAR isomerase associated family protein, expressed
IICLQIRNKNKLTSEAIGSLLRDCCWMNVHLXTQPYGPVFEIRVHEGYGARWSQDGSKFIGFLEPYTPEGFSKGWKH

SEQ ID NO: 98922 - protein, 83 aa, Setaria italica
  Transcript Sequence Number=SeqID_32948
  Gene Ontology: Mol. function=transferase activity
  Homolog annotation: Hit_ID=Q6ZJH9; Match level="QueryCoverage=100%, HitCoverage=26%, E-value=7e-36, Identity=83%"; Hit description =Putative glutathione S-transferase GST 16
  Pfam annotation: Domain name=GST_N; Domain location=11-82; Score =11.3; E_value=0.066; Accession=PF02798.12; Description=Glutathione S- transferase, N-terminal domain
MASLSTGAGPPVVNVYHEKSMILPDVSRVLTCLYEKNVKFETIKASYKDILSLQASRSVPVPFYDGPLFLQDSRAICRYLAET

SEQ ID NO: 98923 - protein, 84 aa, Setaria italica
  Transcript Sequence Number=SeqID_32949
  Gene Ontology: Mol. function=transferase activity
  Homolog annotation: Hit_ID=Q6ZJH9; Match level="QueryCoverage=84%, HitCoverage=22%, E-value=7e-29, Identity=83%"; Hit description =Putative glutathione S-transferase GST 16
MASLSTGAGPPVVNVYHEKSMILPDVSRVLTCLYEKNVKFETIKASYKDILSLQASRSVPVPFYDGPLFLQGNAPSLLCNDWVA

SEQ ID NO: 98924 - protein, 562 aa, Setaria italica
  misc_feature (263)..(263): Xaa can be any naturally occurring amino acid
  misc_feature (339)..(339): Xaa can be any naturally occurring amino acid
  Transcript Sequence Number=SeqID_32950
  Gene Ontology: Mol. function=zinc ion binding; Cellular component =intracellular
  Homolog annotation: Hit_ID=Q9LPC8; Match level="QueryCoverage=86%, HitCoverage=83%, E-value=1e-123, Identity=48%"; Hit description =F22M8.6 protein
  Pfam annotation: Domain name=Ank; Domain location=415-447; Score =31.2; E_value=4.3e-06; Accession=PF00023.22; Description=Ankyrin repeat
MAAASPEKRPPRSLFDLPAEFFDSSILLRVHPSRPPSAVEPSEPSRPPPTTQQQQPSEAAGFRWTCNTCAAEFESLQEQREHFKSDLHRLNVKLSIAGKTIIKEEDLDKADSDSLFDDLEISSVSGSEDELENGPASERGLSVKGKEEFRKKLYFRCQSGDTISIWRCILLKEHEEPVIDRKSGQMESASFVQEDEMINRVKRLTCEPRDASHLRIVLLTSGGHFAGCVFDGNSIVAHKTFHRYVVRAKAGKRQSGKDATGKXVAHSAGSSLRRYNEAALKKEVQELIVSWKPYFDTCVCAFIYAPSKNRQMLFDGDKTQSVIQACDIRAVPLTVHRPXEEAKRVYSNLTQLHYEMECPTADETIPRDESVTSAEQSQGKNKEVAVDSEESISDLSVSLELLNKNEGVTAPSSKNETTPLHEAAKSGNAQLTLELLEQGLDPCIRDARGKTPYLLASDKEIRNTFRRFMALNLDKWDWHAADVPSALTKEMEESQAAKQAEKDAKKKARAKELKKLKKAREKEEKEKEKAKAQASQAQTSMGQMANRTTSMPGLKPKHHDPA

SEQ ID NO: 98925 - protein, 162 aa, Setaria italica
  misc_feature (73)..(73): Xaa can be any naturally occurring amino acid
  Transcript Sequence Number=SeqID_32951
  Gene Ontology: Mol. function=protein dimerization activity; Cellular component=nucleus; Biological process=regulation of transcription, DNA-dependent
  Homolog annotation: Hit_ID=Q7XKK6; Match level="QueryCoverage=87%, HitCoverage=20%, E-value=1e-57, Identity=76%"; Hit description=Auxin response factor 10
  Pfam annotation: Domain name=Auxin_resp; Domain location=1-84; Score =165.6; E_value=1.5e-46; Accession=PF06507.5; Description=Auxin response factor
AARLAAAGQPFEVVHYPRASTPEFCVRAAAVRASMQVPWCPGMRFKMAFETEDSSRISWFMGTIAGVKAADPXRWPQSPWRLLQVAWDEPELLQNVKRVCPWLVEQVSSMPNLHLPSFTPRKKPRIPEFPLEGQPLFDPGFPPAAHPLPPLAPHPRPHHDQN

SEQ ID NO: 98926 - protein, 85 aa, Setaria italica
  Transcript Sequence Number=SeqID_32952
IWVPLVGLLEAAFASQKPTKGVETHRCFGAKAAFSLVQNSQPVWTCFQWLWGRNFVKFTHLPLVMENTGSIPHPTTPRRKKKSPR

SEQ ID NO: 98927 - protein, 60 aa, Setaria italica
  Transcript Sequence Number=SeqID_32953
ARIPPNALLISTNSRLCGKPLQRFELREAKSEKRENLRLDYNLSVARKNVYKQGHSLVGW

SEQ ID NO: 98928 - protein, 146 aa, Setaria italica
  Transcript Sequence Number=SeqID_32954
  Homolog annotation: Hit_ID=Q8W0Y1; Match level="QueryCoverage=92%, HitCoverage=18%, E-value=2e-46, Identity=62%"; Hit description =Putative transposase
SPGGLETHLSCRQRRLQMPTASHHQGSLSLDEYREKWSASHDGRPCSQLKAWVLSKKGKATADIDFNPDDPSEAYSHPSIYSRVSEYTKMAREVHGPDFDPSSEDIDGEIVMRVGGGKKHGRYWIDDGVIDMASTPSLSQIRARST

SEQ ID NO: 98929 - protein, 103 aa, Setaria italica
  Transcript Sequence Number=SeqID_32955
EAGRGVVGFRCYAVAVCTTWALAAFQLVLAAYSWYADAGAGWSRDAIAERGDAAARAVAWLLLAAYLQFGVGRRRHQERFPAPLRLWWALFMLLSVVAAGVHA

SEQ ID NO: 98930 - protein, 122 aa, Setaria italica
  Transcript Sequence Number=SeqID_32956
  Subcellular localization annotation: CTP_CleavageSite=40; ConfidenceScore=5.51e-01
MASLALRPIISATAASTALATAASRCCHAARPRRRRTIITCKAEPSGGNSTLELAAGAAGLASSATVAWSLYTLNTTGCGLPPGPGGALGAAEGVSYLVVAGLVGWSVTTKARTGSGLPAGP

SEQ ID NO: 98931 - protein, 97 aa, Setaria italica
  Transcript Sequence Number=SeqID_32957
  Gene Ontology: Mol. function=nucleic acid binding; Cellular component= ribonucleoprotein complex; Biological process=RNA processing
  Homolog annotation: Hit_ID=B9RS49; Match level="QueryCoverage=85%, HitCoverage=16%, E-value=7e-28, Identity=66%"; Hit description=Lupus la ribonucleoprotein, putative
SEDGKKIGRASELLKPDEVIEQVDSRTVAASPLPYNVKLEDVQSFFAQYAKVNSVRLPRHIANKKHFCGTALVEFFASSSSENSTRAVPQKCSSRVF

SEQ ID NO: 98932 - protein, 456 aa, Setaria italica
  Transcript Sequence Number=SeqID_32958
  Gene Ontology: Mol. function=nucleic acid binding; Cellular component= ribonucleoprotein complex; Biological process=RNA processing
  Homolog annotation: Hit_ID=B9RS49; Match level="QueryCoverage=96%, HitCoverage=98%, E-value=1e-96, Identity=44%"; Hit description=Lupus la ribonucleoprotein, putative
  Pfam annotation: Domain name=La; Domain location=19-91; Score=89.8; E_ value=9.4e-24; Accession=PF05383.9; Description=La domain
  Pfam annotation: Domain name=RRM_1; Domain location=124-193; Score =24.3; E_value=0.00052; Accession=PF00076.14; Description=RNA recognition motif. (a.k.a. RRM, RBD, o
  Pfam annotation: Domain name=RRM_1; Domain location=323-384; Score =12.0; E_value=0.015; Accession=PF00076.14; Description=RNA recognition motif. (a.k.a. RRM, RBD, o
  Pfam annotation: Domain name=RRM_3; Domain location=318-421; Score =150.1; E_value=6.7e-42; Accession=PF08777.3; Description=RNA binding motif
  Pfam module annotation: Pfam domain module=La::RRM_1::RRM_1::RRM_3; Domain location=19-91::124-193::323-384::318-421
MAAAAPAPAPLDEAKAKSVLRQVEFYFSDSNLPRDKFLRETVEQSDDGLVSLALICSFSRMKSHLGLDAAVKPETVPEETVLAVAEVLRRSPVLRVSEDGKKIGRASELLKPDEVIEQVDSRTVAASPLPYNVKLEDVQSFFAQYAKVNSVRLPRHIANKKHFCGTALVEFSEEEEAKKVSENSLFFAGVNLEIRPKKEFDAEQESKREEYEKAHPVKDSQDEGFPKGLIVAFKLKKDMAESAVQQTNETSNSVENPSGEASERIPDNTDSKDDKSSDNMTKEKEVNIKEATESEKCTGDALEDCEKRGDSESLSRDGNSVSGNVKNPISREDLKEALKKFGNVRYVDFSIGDDSGYLRFEDSKAAEKARVAAVLADEGGLIIKDHIITLEAVTGEAEKDYWSKIRGIQENYKDNRSYKGRAGKNYRGGKQFNGKRGRNPDAEKNSNKAQKVEAAA

SEQ ID NO: 98933 - protein, 149 aa, Setaria italica
  Transcript Sequence Number=SeqID_32959
  Gene Ontology: Mol. function=transferase activity; Cellular component= membrane
  Homolog annotation: Hit_ID=B6U626; Match level="QueryCoverage=99%, HitCoverage=33%, E-value=3e-37, Identity=59%"; Hit description =Secondary cell wall-related glycosyltransferase family 47
PPQPVPVTATASSNTTPGARKELSFLDENGHPDDPGSSSGSDAGAAGCDPRGAAVRVFMYDMPPEFHFGLLGWSPPSPDSVWPDLSTPPPRYPGGLNQQHSVEYWLTLDLLSSSSAPCGPAVRVADSRDADLVFVPFFASLSYNRHSRP

SEQ ID NO: 98934 - protein, 228 aa, Setaria italica
  misc_feature (170)..(170): Xaa can be any naturally occurring amino acid
  Transcript Sequence Number=SeqID_32960
  Gene Ontology: Mol. function=serine-type carboxypeptidase activity; Cellular component=extracellular region; Biological process =proteolysis
  Homolog annotation: Hit_ID=Q9XE80; Match level="QueryCoverage=83%, HitCoverage=39%, E-value=8e-77, Identity=75%"; Hit description =Serine-type carboxypeptidase
  Pfam annotation: Domain name=Peptidase_S10; Domain location=47-228; Score=70.6; E_value=8.6e-19; Accession=PF00450.14; Description =Serine carboxypeptidase
MAASSSCHCSPLLLALAAGLLLLLVPPLASGSSHENSQEEDRILAMPGQPNDGVAFDMYGGYVTVDEGAGRALYYWFQEADRATADPATAPLVLWLNGGPGCSSVGSGAFEELGAFRVNTDGQTLLLNEFAWNKAANVLFLESPAGVGFSYSNTSSDLVVGDDRTARDSXKWFERFPQRFPQYKYRDFYIAGESYAGHYVPQLSQLVYRNNIGVEKPFINFKGFMVGN

SEQ ID NO: 98935 - protein, 471 aa, Setaria italica
  Transcript Sequence Number=SeqID_32961
  Gene Ontology: Mol. function=phosphoribosylamine-glycine ligase activity; Cellular component=chloroplast; Biological process=purine base biosynthetic process
  Homolog annotation: Hit_ID=B6SW54; Match level="QueryCoverage=99%, HitCoverage=89%, E-value=0.0, Identity=85%"; Hit description =Phosphoribosylamine--glycine ligase
  Pfam annotation: Domain name=ATP-grasp_3; Domain location=142-330; Score=-37.5; E_value=0.0048; Accession=PF02655.6; Description=ATP -grasp domain
  Pfam annotation: Domain name=Dala_Dala_lig_C; Domain location=139 -326; Score=-117.2; E_value=0.063; Accession=PF07478.5; Description=D- ala D-ala ligase C-terminus
  Pfam annotation: Domain name=GARS_A; Domain location=138-332; Score =428.9; E_value=8.1e-126; Accession=PF01071.11; Description =Phosphoribosylglycinamide synthetase,
  Pfam annotation: Domain name=GARS_C; Domain location=366-462; Score =159.8; E_value=8.3e-45; Accession=PF02843.8; Description =Phosphoribosylglycinamide synthetase, C domain
  Pfam annotation: Domain name=GARS_N; Domain location=35-137; Score =182.8; E_value=9.4e-52; Accession=PF02844.7; Description =Phosphoribosylglycinamide synthetase, N domain
  Pfam module annotation: Pfam domain module=ATP-grasp_3::Dala_Dala_lig_ C::GARS_A::GARS_C::GARS_N; Domain location=142-330::139-326::138 -332::366-462::35-137
NVTSHCQLSVRASARWRSTLKASATDAGIVTDEKITVLVIGGGGREHALCYALNRSPSCNAVLCAPGNVGIAQSGDATCISDLDISSSDDVISFCRKRGVGMVVVGPEAPLVAGLANDLVKVGIPTFGPSSEAAALEGSKDFMKKLCDKYNIPTAKYRTFTDAVEAKNYVKHEGAPIVVKADGLAAGKGVVVAMTLDEAFEAIDSMLVEGSFGSAGSRVIIEEFLEGEEASFFALVDGENALPLESAQDHKRVGDGDVGPNTGGMGAYSPAPIVTDELKHIIMESIIIPTVKGMAAEGCKFVGVLYAGLMIEKKSGLPKLIEYNVRFGDPECQVLMMRLESDLAQVLLSACRGDLGNVSVTWSPEMAMVVVMASQGYPGSYKKGTVIKNLDKAEQVSPAVKIFHAGTALDGDGNLVAVGGRVLGVTAKGNDIEEARARAYDAVDAVDWPEGFVRRDIGWRALMHKEAVNYS

SEQ ID NO: 98936 - protein, 241 aa, Setaria italica
  Transcript Sequence Number=SeqID_32962
  Gene Ontology: Mol. function=signal transducer activity; Cellular component=plasma membrane; Biological process=response to light stimulus
  Homolog annotation: Hit_ID=B6SW12; Match level="QueryCoverage=97%, HitCoverage=37%, E-value=1e-109, Identity=84%"; Hit description =Transposon protein Mutator sub-class
  Pfam annotation: Domain name=NPH3; Domain location=1-235; Score =179.4; E_value=1e-50; Accession=PF03000.6; Description=NPH3 family
DAAGNTAVKQITTRHRLLLEKIVSLLPAERDAVSCGFLLKLLKAANILSASAASKSELVRRVAWQLEEAGVADLLVPSLSCVSETLYDVDAVAAILDEFALRYAAVAPAPALALSGSPDDSPVHSGGHRRSRSAESVSFDGTRRSLSAAPVSQGALARVGKLVDGFLVEVAKDPNMPLDKLLAIAEAVPDSARPEHDGLYKVVDTYLKAHPEMNKSARKRLCRVLNCRKLSEKACAHAAQN

SEQ ID NO: 98937 - protein, 275 aa, Setaria italica
  misc_feature (250)..(250): Xaa can be any naturally occurring amino acid
  misc_feature (266)..(266): Xaa can be any naturally occurring amino acid
  Transcript Sequence Number=SeqID_32963
  Gene Ontology: Mol. function=nucleic acid binding; Cellular component= nucleolus
  Homolog annotation: Hit_ID=Q53QK3; Match level="QueryCoverage=76%, HitCoverage=19%, E-value=3e-78, Identity=67%"; Hit description=PWWP domain containing protein, expressed
  Pfam annotation: Domain name=PWWP; Domain location=79-155; Score =45.1; E_value=2.7e-10; Accession=PF00855.9; Description=PWWP domain
RVVRPDVQEVLKSPRRSRPKKQQPPPPPQPPPPRKQKQVKEKKDRGKEKEKEKEKGEEEQFDPVRYNCAFQHEDEGSRDFAPPELVWGKVRSHPWWPGQVFDAADASEVALQHRKAGAPLVAYFWDRTFAWSDGSALLPFHANFTRLSAQSSMSGFVSAVDAALQEVGRRVEAGLSCSCFASSVATRQEVQNSGIRQGAYGAAVDASYMRDAFQGKAFLNYISALGRRPLAGADLLDLATARAQLRAFNXRRGSRDLPEFVTFEGXEEFAGGDPT

SEQ ID NO: 98938 - protein, 27 aa, Setaria italica
  Transcript Sequence Number=SeqID_32964
VTLFIIACTEALVHFYTNVYLNLSNHS

SEQ ID NO: 98939 - protein, 87 aa, Setaria italica
  Transcript Sequence Number=SeqID_32965
GKERWLLQIQQKKQSWGGHLSDDPNDGNHTPDDVDDQTPLFVHRSRELEDNWFDEVTMSHPVMTEGMLFTDVGQFREYPLGVFMPGF

SEQ ID NO: 98940 - protein, 90 aa, Setaria italica
  Transcript Sequence Number=SeqID_32966
  Gene Ontology: Mol. function=transferase activity, transferring nitrogenous groups; Biological process=cellular amino acid and derivative metabolic process
  Homolog annotation: Hit_ID=Q2R2Q2; Match level="QueryCoverage=100%, HitCoverage=22%, E-value=9e-16, Identity=65%"; Hit description =Tyrosine/nicotianamine aminotransferases family protein
MENGAGNGMAVAAAAAAAAPAATWNFAPNEALLGLTALSVRGVLGRVKAGMVAGGGARPVIPMGHGDPSVFPCFRTAPEAVDAVAGALRS

SEQ ID NO: 98941 - protein, 114 aa, Setaria italica
  Transcript Sequence Number=SeqID_32967
  Gene Ontology: Mol. function=structural constituent of ribosome; Cellular component=intracellular; Biological process=translation
  Homolog annotation: Hit_ID=B9RFC9; Match level="QueryCoverage=100%, HitCoverage=100%, E-value=2e-46, Identity=78%"; Hit description=50S ribosomal protein L18, putative
  Pfam annotation: Domain name=Ribosomal_L18p; Domain location=4-113; Score=28.8; E_value=2e-08; Accession=PF00861.14; Description =Ribosomal L18pL5e family
  Subcellular localization annotation: CTP_CleavageSite=43; ConfidenceScore=5.57e-01
MVTPPPAMAPAITKFLKPYILKMHFTNNFVSAQVIHTPSATVTCSASSQEKLLRPSMESTRDVAAAAKIGKLLGERLLFKGIPAVSVSMSREQKYHGKVKAVIDSLRDAGVKLL

SEQ ID NO: 98942 - protein, 338 aa, Setaria italica
  misc_feature (327)..(327): Xaa can be any naturally occurring amino acid
  Transcript Sequence Number=SeqID_32968
  Gene Ontology: Mol. function=metalloendopeptidase activity; Cellular component=membrane; Biological process=proteolysis
  Homolog annotation: Hit_ID=B6TA12; Match level="QueryCoverage=99%, HitCoverage=100%, E-value=1e-163, Identity=84%"; Hit description =Peptidase M48, Ste24p
  Pfam annotation: Domain name=Peptidase_M48; Domain location=132-323; Score=62.4; E_value=1.7e-15; Accession=PF01435.10; Description =Peptidase family M48
  Pfam annotation: Domain name=Peptidase_M56; Domain location=161-252; Score=-33.4; E_value=0.036; Accession=PF05569.3; Description=BlaR1 peptidase M56
  Pfam module annotation: Pfam domain module=Peptidase_M48::Peptidase _M56; Domain location=132-323::161-252
  Subcellular localization annotation: CTP_CleavageSite=58; ConfidenceScore=5.65e-01
MGMAASPACAPGLISGPTLPPQRVAFRCYWAPKPSSSSSHTRRPRRRRVLVVATASARASPAAARGLDADDFRHPLDKQNTLLLRAIPGLNDMGKALLGPVSEQVMVLQNIGSSVLVSPNQLPELHELLVEAAKLLNTEAPDLYIRQNPVPNAYTLAINGKKPFIVVHTSLVELLTRKELQAVLAHELGHLKCDHGVWLTFANILTMGAYSVPGFGMVAGFMEEQLYRWLRAAELTCDRAALLVVQDPKVVISVLMKLAGGSPSLADQLNVDAFLEQARSYDKAASNPVGWYIRNAQTRELSHPLPVMRAREIDEWSRSQEYKTVMXQKLIQLGLNKV

SEQ ID NO: 98943 - protein, 113 aa, Setaria italica
  Transcript Sequence Number=SeqID_32969
  Gene Ontology: Mol. function=metalloendopeptidase activity; Cellular component=membrane; Biological process=proteolysis
  Homolog annotation: Hit_ID=B6TA12; Match level="QueryCoverage=100%, HitCoverage=33%, E-value=7e-58, Identity=93%"; Hit description =Peptidase M48, Ste24p
QLYRWLRAAELTCDRAALLVVQDPKVVISVLMKLAGGSPSLADQLNVDAFLEQARSYDKAASNPVGWYIRNAQTRELSHPLPVMRAREIDEWSRSQEYKTVMQKLIQLGLNKV

SEQ ID NO: 98944 - protein, 47 aa, Setaria italica
  misc_feature (42)..(42): Xaa can be any naturally occurring amino acid
  Transcript Sequence Number=SeqID_32970
  Gene Ontology: Mol. function=sequence-specific DNA binding; Cellular component=nucleus; Biological process=regulation of transcription, DNA-dependent
  Homolog annotation: Hit_ID=B6SUL9; Match level="QueryCoverage=93%, HitCoverage=13%, E-value=2e-14, Identity=79%"; Hit description =WRKY74-superfamily of TFs having WRKY and zinc finger domains
  Pfam annotation: Domain name=WRKY; Domain location=2-47; Score=28.8; E_value=2.5e-07; Accession=PF03106.7; Description=WRKY DNA -binding domain
SESCQNFRGYYRCTHRHSQGCLATKQVQRTDEDPTLFDVIYXGEHTC

SEQ ID NO: 98945 - protein, 271 aa, Setaria italica
  Transcript Sequence Number=SeqID_32971
  Gene Ontology: Mol. function=sequence-specific DNA binding; Cellular component=nucleus; Biological process=regulation of transcription, DNA-dependent
  Homolog annotation: Hit_ID=B6SUL9; Match level="QueryCoverage=87%, HitCoverage=70%, E-value=1e-73, Identity=64%"; Hit description =WRKY74-superfamily of TFs having WRKY and zinc finger domains
  Pfam annotation: Domain name=WRKY; Domain location=67-129; Score =117.8; E_value=3.6e-32; Accession=PF03106.7; Description=WRKY DNA -binding domain
  Subcellular localization annotation: CTP_CleavageSite=55; ConfidenceScore=5.15e-01
RSISIITSSSLDAGAGGRKRPASPLSATPTSDVTDGPFKNAKKRKVMEKRKHQVRVSSGSAGGGAAENDGHSWRKYGQKEILGAKNPRGYYRCTHRHSQGCLATKQVQRTDEDPTLFDVIYHGEHTCVQRPTAAAAGQPEHNPEANGLLQSLAAGLTVKTEGLPALAADPQGRGAAAPFYLSSSTPASGCLAAAERSPFSTSENWGVSPATSDSNNHVAASYLPFEDAEWRGHNELQEVVSALVAASALPPLPAVDGFDEFLDLDIASFLA

SEQ ID NO: 98946 - protein, 137 aa, Setaria italica
  Transcript Sequence Number=SeqID_32972
  Gene Ontology: Mol. function=nucleotide binding; Cellular component =nucleus; Biological process=regulation of transcription, DNA -dependent
  Homolog annotation: Hit_ID=B9SGR4; Match level="QueryCoverage=98%, HitCoverage=18%, E-value=4e-42, Identity=55%"; Hit description=DNA replication licensing factor MCM8, putative
MSCTIQGCRSRTFTPDRSSAKLMDFQKIRIQELVSADNHEEGRVPRTIECELTEDLVDCCIPGEIVTVTGIVKVLNNMDVGGGKSRSKNQGLYYLYLEAVSVRNLKTCAVSDEEIRARGICDFQSNTERDRDFAVNY

SEQ ID NO: 98947 - protein, 127 aa, Setaria italica
  misc_feature (7)..(7): Xaa can be any naturally occurring amino acid
  misc_feature (10)..(10): Xaa can be any naturally occurring amino acid
  misc_feature (73)..(73): Xaa can be any naturally occurring amino acid
  Transcript Sequence Number=SeqID_32973
  Gene Ontology: Mol. function=hydrolase activity, hydrolyzing O -glycosyl compounds; Cellular component=chloroplast; Biological process=carbohydrate metabolic process
  Homolog annotation: Hit_ID=Q8W011; Match level="QueryCoverage=100%, HitCoverage=12%, E-value=2e-38, Identity=63%"; Hit description=Beta -D-xylosidase
TGKYAAXFVXGVQGYAIAGPVNSTDLEASACCKHFTAYDLENWKGVTRYVFDAQVGAADDPNGSAGLFGQAVXDTETKCKTFLSFQVTVQDLEDTYNPPFKSCVEDGHASGIMCSYNRVNGVPTCAD

SEQ ID NO: 98948 - protein, 741 aa, Setaria italica
  misc_feature (132)..(132): Xaa can be any naturally occurring amino acid
  Transcript Sequence Number=SeqID_32974
  Gene Ontology: Mol. function=hydrolase activity, hydrolyzing O -glycosyl compounds; Cellular component=chloroplast; Biological process=carbohydrate metabolic process
  Homolog annotation: Hit_ID=Q8W011; Match level="QueryCoverage=99%, HitCoverage=94%, E-value=0.0, Identity=80%"; Hit description=Beta-D -xylosidase
  Pfam annotation: Domain name=Glyco_hydro_3; Domain location=35-292; Score=202.7; E_value=1e-57; Accession=PF00933.13; Description =Glycosyl hydrolase family 3 N terminal domain
  Pfam annotation: Domain name=Glyco_hydro_3_C; Domain location=364 -595; Score=271.9; E_value=1.5e-78; Accession=PF01915.14; Description= Glycosyl hydrolase family 3 C terminal domain
  Pfam module annotation: Pfam domain module=Glyco_hydro_3::Glyco_hydro_ 3_C; Domain location=35-292::364-595
NIPFCDRSLPIERRVADLVARMTVEEKISQLGDESPAVPRLGVPAYKWWSEALHGVSDHGRGVHLSGPLRAATSFPQVILTAASFNPHLWYRIGQVIGVEARAVYNNGQAEGLTFWAPNINVFRDPRWGRGXQETPGEDPTMTGKYAAVFVRGVQGYAIAGPVNSTDLEASACCKHFTAYDLENWKGVTRYVFDAQVTVQDLEDTYNPPFKSCVEDGHASGIMCSYNRVNGVPTCADYNLLSKTARQNWGFYGYITSDCDAVSIIHDAQGYAKTAEDAVADVLKAGMDVNCGSYVQQHGASALQQGKITEQDIDRALHNLFAVRMRLGLFNGDPRRNRYGDIGPDQVCTQEHQNLALEAAQDGIVLLKNDAGALPLSKSKVTSLGVIGFNANNAERLLGNYFGPPCVTVTPLQVLQGYVKDTRFAAGCNAAACNVTAIPEAVQVASSVDSVVLFMGLDQDQEREEIDRLDLTLPGQQQSLIESVANAANKPVILVLLCGGPVDVSFAKTNPKIGAILWAGYPGEAGGMAIAQVLFGEHNPGGRLPVTWYPQDFTKVPMTDMRMRADPATGYPGRTYRFYRGPTVFDFGYGLSYSKYSHRFVASGTKPPSMSDIAGLKALETTSAAGAAMYDVEAMGSEACERLKFPAVVRVQNHGPMDGKHPVLVFLRWPNATDDGSGRPARQLIGFRTLHLRAMQTAHVEFEVSPCKHFSRASEDGRKVIDQGSHIVMVGEDEFEMSFMA

SEQ ID NO: 98949 - protein, 71 aa, Setaria italica
  misc_feature (67)..(67): Xaa can be any naturally occurring amino acid
  Transcript Sequence Number=SeqID_32975
  Gene Ontology: Mol. function=transporter activity; Cellular component= membrane; Biological process=oligopeptide transport
  Homolog annotation: Hit_ID=B9T1Z3; Match level="QueryCoverage=95%, HitCoverage=12%, E-value=1e-17, Identity=60%"; Hit description =Peptide transporter, putative
AADGSVAARPWRVCTVQQVEDFKAVLRILPIWSATIFLSIAIGVQINFTILQALAMDRAAGRFTIPXGSMI

SEQ ID NO: 98950 - protein, 111 aa, Setaria italica
  Transcript Sequence Number=SeqID_32976
SIQIDIAGIIYTSRAIDFGGIQRIIAYPANHHERSALLALYNALSLRGDLTVPQEAEHQVPLQSLVSRLQRKYRRSHLGLGGGDVITRIEMNNCITALSRAINVSVDFTKI

SEQ ID NO: 98951 - protein, 67 aa, Setaria italica
  Transcript Sequence Number=SeqID_32977
  Subcellular localization annotation: CTP_CleavageSite=42; ConfidenceScore=5.33e-01
NKLNSSSTYPLLELFFKNQEKFYNSATSSLSSPAVAVEMSKMAAHAVGNSVSEFLSGCRVCPPIAEA

SEQ ID NO: 98952 - protein, 133 aa, Setaria italica
  Transcript Sequence Number=SeqID_32978
  Gene Ontology: Mol. function=nucleic acid binding; Cellular component= outer membrane-bounded periplasmic space
  Homolog annotation: Hit_ID=Q9LNU5; Match level="QueryCoverage=93%, HitCoverage=23%, E-value=4e-27, Identity=50%"; Hit description =T20H2.2 protein
MLNHRYHTYAFHACRALYIANKLNSSSTYPLLELFFKNQEKFYNSATSSLSSPAVAVEMSKMAAHAVGNSVSEFLSGFSDRRTDSAARVSFKYGCTRGVFGAPFFFVNGFLQPGGGSPIDYSTWIGILDPSYS

SEQ ID NO: 98953 - protein, 49 aa, Setaria italica
  Transcript Sequence Number=SeqID_32979
  Gene Ontology: Mol. function=lactoylglutathione lyase activity; Cellular component=chloroplast; Biological process=response to stress
  Homolog annotation: Hit_ID=B6SGV9; Match level="QueryCoverage=100%, HitCoverage=22%, E-value=8e-20, Identity=91%"; Hit description =Lactoylglutathione lyase
DVTSAPADHIKRTEWTFRQKATRELTHNWGTENDPEFKCYHNGNSDPRG

SEQ ID NO: 98954 - protein, 86 aa, Setaria italica
  Transcript Sequence Number=SeqID_32980
  Gene Ontology: Mol. function=nucleic acid binding; Cellular component= outer membrane-bounded periplasmic space
  Homolog annotation: Hit_ID=B6U346; Match level="QueryCoverage=53%, HitCoverage=20%, E-value=1e-11, Identity=67%"; Hit description=DSBA -like thioredoxin domain containing protein
YSWRGPRAPRCSYYLLVLQAQASAPPRYDGFAYGGGAAAAWKDAVLVEAFLDPLCPDSRDAWHPLKLAVERYAPRVSLIVHPFPLP

SEQ ID NO: 98955 - protein, 238 aa, Setaria italica
  Transcript Sequence Number=SeqID_32981
  Gene Ontology: Mol. function=nucleic acid binding; Cellular component= outer membrane-bounded periplasmic space
  Homolog annotation: Hit_ID=B6U346; Match level="QueryCoverage=86%, HitCoverage=90%, E-value=3e-48, Identity=48%"; Hit description=DSBA -like thioredoxin domain containing protein
  Pfam annotation: Domain name=DSBA; Domain location=58-219; Score= -1.6; E_value=5.3e-05; Accession=PF01323.12; Description=DSBA-like thioredoxin domain
MARPARAPLLRRLLLLAALAACCSYYLLVLQAQASAPPRYDGFAYGGGAAAAWKDAVLVEAFLDPLCPDSRDAWHPLKLAVERYAPRVSLIVHPFPLPYHTYAFHACRALYIANKLNSSSTYPLLELFFKNQEKFYNSATSSLSSPAVAVEMSKMAAHAVGNSVSEFLSGFSDRRTDSAARVSFKYGCTRGVFGAPFFFVNGFLQPGGGSPIDYSTWIGILDPLVSQQGERIEMFTSM

SEQ ID NO: 98956 - protein, 228 aa, Setaria italica
  misc_feature (10)..(10): Xaa can be any naturally occurring amino acid
  Transcript Sequence Number=SeqID_32982
  Gene Ontology: Mol. function=lactoylglutathione lyase activity; Cellular component=chloroplast; Biological process=response to stress
  Homolog annotation: Hit_ID=B6SGV9; Match level="QueryCoverage=89%, HitCoverage=91%, E-value=1e-107, Identity=91%"; Hit description =Lactoylglutathione lyase
  Pfam annotation: Domain name=Glyoxalase; Domain location=71-215; Score=136.2; E_value=1.1e-37; Accession=PF00903.17; Description =GlyoxalaseBleomycin resistance proteinDioxygenase superfamily
  Subcellular localization annotation: CTP_CleavageSite=41; ConfidenceScore=5.43e-01
MAAASLLSPXCALLRRLPAAPHLSRSARIKGFDRVRRFSPAAMSTSSGPKEAPGNNPGLHTEIDPATKGYFLQQTMLRVKDPKVSLDFYSRVMGMSLLKRLDFEELKFSLYFLGYEDVTSAPADHIKRTEWTFRQKATLELTHNWGTENDPEFKCYHNGNSDPRGFGHIGVTVDDVYKACERFERLGVDFVKKPDDGKIKGIAFIKDPDGYWIEIFDHTIGTVTASAS

SEQ ID NO: 98957 - protein, 71 aa, Setaria italica
  Transcript Sequence Number=SeqID_32983
ELSYNIEDRIDRFMLSHSHGGSNAIFVHKIVRKVMMFPQLQRTAQEIRNLKNLVSEQRRKSHSLRYLSESR

SEQ ID NO: 98958 - protein, 69 aa, Setaria italica
  Transcript Sequence Number=SeqID_32984
MCTFRQANMPGSPYPQPSCIRKKNSWKMFKAIPHPWKKHVCIAEAQLILNRVSCQREAYFTCTTIVLCP

SEQ ID NO: 98959 - protein, 127 aa, Setaria italica
  Transcript Sequence Number=SeqID_32985
  Subcellular localization annotation: CTP_CleavageSite=46; ConfidenceScore=5.32e-01
MASLAMLTINATPHVSRGSRPRRPDIAVSRRRSCLLCQSRLPSEPPASGGGGGEGGGGKKGPWWAATAERLRGDVVKAGMAARESLSPKQKGDWKDVTLMSFSFAVYVYISQKLVCTYCAWLSMINH

SEQ ID NO: 98960 - protein, 74 aa, Setaria italica
  Transcript Sequence Number=SeqID_32986
QQEYPDSAVRVGHIQGYPNNRLVHVERSQIRCRNTEALSEYPDAHTGRDDIDTEVSNEINARHYHRSGFSVASS

SEQ ID NO: 98961 - protein, 222 aa, Setaria italica
  Transcript Sequence Number=SeqID_32987
MAEEKKKHKHKHKHKEKDNDKEKQSEQAAHFKPCADVKGIRFGGQFIVKSFTVRRASPLELLRLLDIPPSYLSECQSLPFPSTTTYMPTSFTILAHQAWHTLTLGLGTKKSKVVLFVFESESMKAAVDQLWPAMIPLGDVNKKLIRGLSGSEMARFKFRKGCLTIYVYAVRRLGAAGFMRADDLRRILQSVVDLKDFLDHTAMLAIPSQKSITLQSRTAVAH

SEQ ID NO: 98962 - protein, 145 aa, Setaria italica
  Transcript Sequence Number=SeqID_32988
STALLSREHRNVLDAFRLLQKDPTVQKMVMSLSCDKAVWNAVMNNEAVQDFRRSLHHGKENDRKGNTGGPAEVLKWILDSAQAKIVEFLENVMKIFNMLIHPQEDEEKPDAYIDAVKVSFMLTVFVFIVVAIARINSEHWDFKVW

SEQ ID NO: 98963 - protein, 56 aa, Setaria italica
  Transcript Sequence Number=SeqID_32989
  Subcellular localization annotation: CTP_CleavageSite=41; ConfidenceScore=5.25e-01
AHSHPIPITSVFTLPSSTQLCSLRAKDKNRSFRPPIAPAIVVSEGRGEASGGAEGK

SEQ ID NO: 98964 - protein, 94 aa, Setaria italica
  misc_feature (14)..(14): Xaa can be any naturally occurring amino acid
  Transcript Sequence Number=SeqID_32990
  Gene Ontology: Mol. function=protein serine/threonine kinase activity; Biological process=protein amino acid phosphorylation
  Homolog annotation: Hit_ID=Q6I5Q6; Match level="QueryCoverage=100%, HitCoverage=19%, E-value=8e-28, Identity=67%"; Hit description =Putative serine/threonine protein kinase
MGCLPCFGSAGEGXQEGGARKDGLSDRRVTRVGSDKSKPQGGSDSKKDAVILREGNNQHIAAHTFTFRELAAATKNFRQDCLLGEGGFGRVYKG

SEQ ID NO: 98965 - protein, 185 aa, Setaria italica
  Transcript Sequence Number=SeqID_32991
  Subcellular localization annotation: CTP_CleavageSite=30; ConfidenceScore=5.09e-01
AFTPVASHHTNLYLVSLSRPSVRRPSWAARCRGGGAEEHPGLPSVSQWLPCSRPAACLVSSAAGHSPVPSDAFSSPVHPCPALLPSPLSFLSCPVHPALSLSLAASRRRLGERRRRPTPGAQVFVGLFTGDEHTPGLYTPSLPFLLCETEHPDRNVSYLYSDLDSLQPSVGEAPHTRILETHAQH

SEQ ID NO: 98966 - protein, 95 aa, Setaria italica
  Transcript Sequence Number=SeqID_32992
  Subcellular localization annotation: CTP_CleavageSite=20; ConfidenceScore=5.48e-01
TAPGRARAPPPRHPPRRRGTASRGGGARRLCHRRLRRTTSRGHGAVMGPLLFGSRGGGCSRWGPCGACPGVFELEVRWTRRGGGRGGRGAAWRSG

SEQ ID NO: 98967 - protein, 181 aa, Setaria italica
  misc_feature (80)..(80): Xaa can be any naturally occurring amino acid
  Transcript Sequence Number=SeqID_32993
  Gene Ontology: Mol. function=thiamin-phosphate diphosphorylase activity; Biological process=thiamin biosynthetic process
  Homolog annotation: Hit_ID=Q2UVH9; Match level="QueryCoverage=98%, HitCoverage=32%, E-value=8e-91, Identity=90%"; Hit description =Phosphomethylpyrimidine kinase/thiamin-phosphate pyrophosphorylase
  Pfam annotation: Domain name=Phos_pyr_kin; Domain location=1-164; Score=113.2; E_value=8.6e-31; Accession=PF08543.4; Description =Phosphomethylpyrimidine kinase
KTALVVDPVMVSTSGDTLSGPSTLATYMDELFPIADIVTPNVKEASKLLGNVSLQTISDMRSAAESIYKLGPKHVLVKGXDMPDSTDAIDVFFDGKEFIEFRGLRIKTRNTHGTGCTLASCIAAELAKGATMLHAVEVAKKFVESALYHSKDLVIGNGPQGPFDHLFSLKSPLYKMGSLHK

SEQ ID NO: 98968 - protein, 111 aa, Setaria italica
  misc_feature (40)..(40): Xaa can be any naturally occurring amino acid
  Transcript Sequence Number=SeqID_32994
HLGGHRSGLVRSHGGDEAALGDAIVVLSCESFDARSRTSXPPTAKKAKTESEEEPREEAVAATSASPSSSCFDLNMSVENDDMKESRFTDASLLKAVDRAFFFRRPDESSD

SEQ ID NO: 98969 - protein, 55 aa, Setaria italica
  Transcript Sequence Number=SeqID_32995
LPPIRFIHVNKDDTIHSFHTNLTMTESTNINAVPHAIDLNIIALNGSQYISILLH

SEQ ID NO: 98970 - protein, 93 aa, Setaria italica
  Transcript Sequence Number=SeqID_32996
  Gene Ontology: Cellular component=integral to membrane
PWRRNQWQMKALALTLSYMVYDAACCHLNGDVRLDNTVHHLVSIVGIGAGLAYRRCGTEMVASLLITEISSPLLHIRAAENVTAKSTSTRRVA

SEQ ID NO: 98971 - protein, 238 aa, Setaria italica
  Transcript Sequence Number=SeqID_32997
  Gene Ontology: Cellular component=integral to membrane
  Homolog annotation: Hit_ID=Q015N6; Match level="QueryCoverage=83%, HitCoverage=79%, E-value=3e-27, Identity=34%"; Hit description=[S] KOG4474 Uncharacterized conserved protein
  Pfam annotation: Domain name=TRAM_LAG1_CLN8; Domain location=36-214; Score=133.4; E_value=7.2e-37; Accession=PF03798.8; Description=TLC domain
  Subcellular localization annotation: CTP_CleavageSite=43; ConfidenceScore=5.49e-01
GSVSGGTVVSWVASGAVLWSTAFVLVRALFPKRSYDFCNRAVSTMHAVAAVCLACLSVDDWSCPVCPLAAASSPRQMKALALTLSYMVYDAACCHLNGDVRLDNTVHHLVSIVGIGAGLAYRRCGTEMVASLLITEISSPLLHLREMLKEFGVRDTDLNLLVDVLFAVTFSAARMGVGPYLTYVTVTADNPILIKAMATGLQLVSAYWFLRILRMVRYKLSKKKPSPPQPPAGKLAVN

SEQ ID NO: 98972 - protein, 507 aa, Setaria italica
  Transcript Sequence Number=SeqID_32998
  Gene Ontology: Mol. function=serine-type endopeptidase activity; Cellular component=cytoplasm; Biological process=proteolysis
  Homolog annotation: Hit_ID=B6SVB6; Match level="QueryCoverage=99%, HitCoverage=66%, E-value=0.0, Identity=75%"; Hit description =Acylamino-acid-releasing enzyme
  Pfam annotation: Domain name=Abhydrolase_3; Domain location=276-487; Score=-53.8; E_value=0.00044; Accession=PF07859.5; Description =alphabeta hydrolase fold
  Pfam annotation: Domain name=Peptidase_S9; Domain location=290-507; Score=106.1; E_value=1.2e-28; Accession=PF00326.13; Description =Prolyl oligopeptidase family
  Pfam module annotation: Pfam domain module=Abhydrolase_3::Peptidase _S9; Domain location=276-487::290-507
QNTARKLGIKYCSNRPCALYAIASPFEGPEPDTKRVSDSKSDSAAAAQNLTASINSAFFPRFSRDGKILVFLSAKQAVNSGAHNATNSLHKINWPSDWKMDKQLNVTEVVPIVMCPEDGCFPGLYCSSILSNPWLSDGCTMILTSAWRSTEVILSIDVLSGKVTRITPEDSHYSWSVLAIDGDNVLAVSSSPIDPPHIRYGRQVTPEGQEHRWTWDEVDSPLVTASNKVKSLLSHHSVTILKIPVANSSDDLSDGGKLPFEAIFVSCKDSSHSPTVVILHGGPHSVSVSSYVKSSAFLASLGFNLLIVNYRGTPGFGEEALQSLPGKVGSQDVQDCLTAVDHIINEKLIDASKVAVVGISHGGFLTTHLIGQAPDRFVVAAARNPVCNLSLMIGTTDIPDWCYMVACGPESKQYASESPSPDHLHLFYQKSPIAHISKVKAPLLMLLGGADLRVPASNGLQYARALRERGGGVKIMMFPEDIHEIIIPRSDFENFLNIGVWFKKHME

SEQ ID NO: 98973 - protein, 100 aa, Setaria italica
  Transcript Sequence Number=SeqID_32999
  Gene Ontology: Mol. function=chorismate mutase activity; Cellular component=chloroplast; Biological process=aromatic amino acid family biosynthetic process
  Homolog annotation: Hit_ID=B9IL55; Match level="QueryCoverage=99%, HitCoverage=38%, E-value=1e-26, Identity=57%"; Hit description =Chorismate mutase
AGRYQSLQEIPFFAYRVPFTLAPPYNFTRELYPAAAFINVNDAIWSMYFNELLPLLAKNGDDGNYASTVDSDLACLQVLSRRINYGRYVAEVKFRGDQQT

SEQ ID NO: 98974 - protein, 79 aa, Setaria italica
  Transcript Sequence Number=SeqID_33000
  Gene Ontology: Mol. function=microtubule motor activity; Cellular component=microtubule associated complex; Biological process =microtubule-based movement
  Homolog annotation: Hit_ID=Q6K765; Match level="QueryCoverage=98%, HitCoverage=7%, E-value=1e-36, Identity=94%"; Hit description =Putative phragmoplast-associated kinesin-related protein 1
  Pfam annotation: Domain name=Kinesin; Domain location=1-79; Score= -180.3; E_value=0.0021; Accession=PF00225.15; Description=Kinesin motor domain
STRSSRINLVDLAGSERQKLTHAAGDRLKEAGNINRSLSQLGNLINILAEISQSGKQRHHVPYRDSKLTFLLQESLGGN

SEQ ID NO: 98975 - protein, 126 aa, Setaria italica
  Transcript Sequence Number=SeqID_33001
KEPKNHHILKNFSTLTTRDCKPATPSCNLHAWRAHQNSHAILQTPTDTLQPPFTWQGGRGMGNQHAIYRWHTNRYYTDIHNRALPISQRSNKCTTHRSPKNCTQNSFQLPRTNDHLDDVCICTFFS

SEQ ID NO: 98976 - protein, 84 aa, Setaria italica
  Transcript Sequence Number=SeqID_33002
  Subcellular localization annotation: CTP_CleavageSite=47; ConfidenceScore=5.08e-01
RRAPLLGATGTVSQDLPHGRRSSRTWTALAIAAALLALAGVLMLFLSSSGRDAGAGAAAALRPKAVAAGARLRSRHEVESGVGA

SEQ ID NO: 98977 - protein, 73 aa, Setaria italica
  Transcript Sequence Number=SeqID_33003
  Gene Ontology: Mol. function=nucleotide binding; Cellular component =myosin complex; Biological process=signal transduction
  Homolog annotation: Hit_ID=Q6UAL2; Match level="QueryCoverage=79%, HitCoverage=3%, E-value=1e-20, Identity=89%"; Hit description=Myosin heavy chain class XI E2 protein
RKELRKLRMEARETGALKEAKDKLEKRVEELTWRLDVEKRLRTDLEEAKGQEIGKLQSRIRIFSFFLDCVHIL

SEQ ID NO: 98978 - protein, 172 aa, Setaria italica
  Transcript Sequence Number=SeqID_33004
  Gene Ontology: Mol. function=nucleotide binding; Cellular component =myosin complex; Biological process=signal transduction
  Homolog annotation: Hit_ID=Q6UAL2; Match level="QueryCoverage=84%, HitCoverage=9%, E-value=3e-51, Identity=73%"; Hit description=Myosin heavy chain class XI E2 protein
  Pfam annotation: Domain name=IQ; Domain location=18-38; Score=21.3; E_ value=0.004; Accession=PF00612.19; Description=IQ calmodulin-binding motif
LRIGRQTTKAYVAYKQQKRASLILQCLWRARIARKELRKLRMEARETGALKEAKDKLEKRVEELTWRLDVEKRLRTDLEEAKGQEIGKLQSALQEMQEKIEEAHAAILKEKEAAKLAIEQAPPKIVEVPVVDTAEVEQLTSKNKELEDEVSTFKQKAEDLEEKLLELQKRSD

SEQ ID NO: 98979 - protein, 166 aa, Setaria italica
  misc_feature (149)..(149): Xaa can be any naturally occurring amino acid
  Transcript Sequence Number=SeqID_33005
  Gene Ontology: Mol. function=nucleotide binding; Cellular component =myosin complex
  Homolog annotation: Hit_ID=Q6UAL2; Match level="QueryCoverage=90%, HitCoverage=9%, E-value=3e-54, Identity=76%"; Hit description=Myosin heavy chain class XI E2 protein
DYKPYPYTTSTICCRLETSLSSMESENQVLRQQSLVVASADEDKSKQIERLESKIAILESEIQLLRSNSVLAVQAIVTPEMNQTSVMENLVHKEIDNRHQLEEVKIANEQVAVPPVKNLSKQKSLTDRQQENHDALIKSLVGDRRFDDXKPAAACIVYKSLLHLAF

SEQ ID NO: 98980 - protein, 514 aa, Setaria italica
  misc_feature (89)..(89): Xaa can be any naturally occurring amino acid
  misc_feature (446)..(446): Xaa can be any naturally occurring amino acid
  Transcript Sequence Number=SeqID_33006
  Gene Ontology: Mol. function=nucleotide binding; Cellular component =myosin complex; Biological process=signal transduction
  Homolog annotation: Hit_ID=Q6UAL2; Match level="QueryCoverage=97%, HitCoverage=30%, E-value=0.0, Identity=88%"; Hit description=Myosin heavy chain class XI E2 protein
  Pfam annotation: Domain name=IQ; Domain location=353-373; Score=17.2; E_value=0.07; Accession=PF00612.19; Description=IQ calmodulin-binding motif
  Pfam annotation: Domain name=IQ; Domain location=376-396; Score=19.2; E_value=0.017; Accession=PF00612.19; Description=IQ calmodulin -binding motif
  Pfam annotation: Domain name=IQ; Domain location=401-421; Score=21.1; E_value=0.0045; Accession=PF00612.19; Description=IQ calmodulin -binding motif
  Pfam annotation: Domain name=IQ; Domain location=424-444; Score=16.4; E_value=0.12; Accession=PF00612.19; Description=IQ calmodulin-binding motif
  Pfam annotation: Domain name=IQ; Domain location=449-469; Score=17.1; E_value=0.073; Accession=PF00612.19; Description=IQ calmodulin -binding motif
  Pfam annotation: Domain name=Myosin_head; Domain location=1-337; Score=14.5; E_value=8.7e-15; Accession=PF00063.13; Description =Myosin head (motor domain)
  Pfam module annotation: Pfam domain module=IQ::IQ::IQ::IQ::IQ::Myosin_ head; Domain location=353-373::376-396::401-421::424-444::449-469::1 -337
YWTLAKTVYSRLFDWIVDKINNSIGQDPDATDIIGVLDIYGFESFKINTETRFKFCTCDSFEQLCINLTNEKLQQHFNQHVFKMEQEEXFVAAREEIDWSYVEFVDNQDVLDLLEKKPGGIIALLDEACMFPKSTHETFAQKMYQTYKAHKRFSKPKLARTAFTINHYAGDVTYQADQFLDKNKDYVVAEHQALLNSSRCHFVANLFPPLPEETSKQSKFSSIGTRFKQQLQSLMETLSTTEPHYIRCVKPNTVLKPGIFENFNVLNQLRCGGVLEAIRISCAGYPTKRTFDEFIDRFGMLAPELVDSSDEKAACAAICDRMGLKGYQIGKTKVFLRAGQMAELDARRAEVLANAARLIQRRIKTHLMRKEFVNLRKASIKSQKFWRARLARKLFEYMRRDAASIRIQKHARTHSARKAYLQVYESAIVIQTGLRAMAARNEHRFXRETRASIIIQTRWRQHKAYVAYKQQKRASLILQCLSQMQSSIFLNSCNRKEIKKGDLENTYMRLQCWL

SEQ ID NO: 98981 - protein, 231 aa, Setaria italica
  misc_feature (105)..(105): Xaa can be any naturally occurring amino acid
  misc_feature (186)..(186): Xaa can be any naturally occurring amino acid
  misc_feature (196)..(196): Xaa can be any naturally occurring amino acid
  Transcript Sequence Number=SeqID_33007
  Gene Ontology: Mol. function=nucleotide binding; Cellular component =myosin complex; Biological process=signal transduction
  Homolog annotation: Hit_ID=Q6UAL3; Match level="QueryCoverage=79%, HitCoverage=12%, E-value=8e-52, Identity=61%"; Hit description =Myosin heavy chain class XI E1 protein
  Pfam annotation: Domain name=IQ; Domain location=131-151; Score=16.3; E_value=0.13; Accession=PF00612.19; Description=IQ calmodulin-binding motif
  Pfam annotation: Domain name=IQ; Domain location=154-174; Score=0.9; E_value=27; Accession=PF00612.19; Description=IQ calmodulin-binding motif
  Pfam annotation: Domain name=IQ; Domain location=194-214; Score=16.3; E_value=0.13; Accession=PF00612.19; Description=IQ calmodulin-binding motif
  Pfam module annotation: Pfam domain module=IQ::IQ::IQ; Domain location=131-151::154-174::194-214
  Subcellular localization annotation: CTP_CleavageSite=40; ConfidenceScore=5.23e-01
TTIRRLPTNRQPIRWGRPPCCHPSPTRTSRPRSRPAASLRALLDEGVLEAIRISCASYPTKRTFDELIIDRFGMLAPELVDSSDEKAACAAIRDRMGLKGYQVAXCQWVNTGDKTILYSIYFFRKTSSRRANAVRLIQRRIKTHLMRKEFIKLRKASIKSQKFWRGISSLLRALCVFKVSKTGRTXKLTYNVIKSXAIVIQTGLRAMAARNEHRFRRETKASIIIQVRDGG

SEQ ID NO: 98982 - protein, 1120 aa, Setaria italica
  misc_feature (332)..(332): Xaa can be any naturally occurring amino acid
  misc_feature (456)..(456): Xaa can be any naturally occurring amino acid
  Transcript Sequence Number=SeqID_33008
  Gene Ontology: Mol. function=nucleic acid binding; Cellular component= nuclear chromosome; Biological process=response to DNA damage stimulus
  Homolog annotation: Hit_ID=Q337N7; Match level="QueryCoverage=100%, HitCoverage=76%, E-value=0.0, Identity=72%"; Hit description=SNF2 domain-containing protein, putative, expressed
  Pfam annotation: Domain name=Helicase_C; Domain location=818-896; Score=70.4; E_value=6.8e-18; Accession=PF00271.23; Description =Helicase conserved C-terminal domain
  Pfam annotation: Domain name=SNF2_N; Domain location=372-692; Score =268.0; E_value=2.2e-77; Accession=PF00176.15; Description=SNF2 family N-terminal domain
  Pfam annotation: Domain name=zf-4CXXC_R1; Domain location=182-267; Score=-37.3; E_value=0.048; Accession=PF10497.1; Description=Zinc -finger domain of monoamine-oxida
  Pfam module annotation: Pfam domain module=Helicase_C::SNF2_N::zf -4CXXC_R1; Domain location=818-896::372-692::182-267
DEVELSEEQRRKYRKVKEEDDAKIMNCLQRRLKGKRMRGTKENFGLVSSCHEKPLSENGVLGAKSDLPSSKKLKIDENKLSIEELFQKRSETVIIESDDEMQIDRKPGEGSSARVEKVADIIDLDDPSQSPKLSDKSLPKAFKCTICTEILNASEVHRHPVLDVTVCGPCRFLVIEKNRLEDPVSGGYCTWCAQSELLQSCSSCKLLFCRNCLLKNLGEECLSEAIATGWQCCCCVPSQLEVLISECDKALSGVESSDSESSDTHLSGPETNGPVSKRRMKKRIRRIMDDTELGEETKRKIAMEKARQDHLKSMQEQSAGKLRSENVGTSFXSPSEVSLKDAGDGHIVNLAREEDEEPVRIPSSMSFKLKPHQVEGIRFMWENVIQSVKKVKSGDKGLGCILAHNMGLGKTFQVITFLYTVMKCAQLGLRTALIVTPVNVLHNWRKEFIRWHPAEXKPLRVFMLEDVARVKRPDLLTKWRVKGGVLLIGYSSFRSLSLGKHVKDKNVANEITYALQCGPDILVCDEAHMIKNRRADITQALKQVRTQRRIALTGSPLQNNLMEYYCMVDFVREGFLGSSHEFRNRFQNPIENGQHTNSTSDDVKIMNQRSHILFEQLKGFVQRMSMNVVKNDLPPKKVFVITVKLSQLQRKLYRRFLDVHGFSSSGYSEKSHSSFFAKYQTLAQVWNHPGLLQMSKEQRGTLRHEDAVENFMMDESSSDDNTENYFPNGEKQKDRADQQSKKSNFVNEESNWWEELLDENTYMEADYSGKMILLLDILSKSSELGDKVLVFSQSLTTLDLVEFYLSKLQIKGKEGKHWKRGKDWYRLDGSTPSSDRQNLVEMFNDPENARVKCTLISTRAGSLGINLHAANRVVLLDGSWNPTHDLQAIYRVWRYGQTKPVYAYRLMAHRTMEEKIYKRQVTKEGLAARVVDRQQVSRTISKEEMLHLFEFGEEELMEQNENGSTMTEKPFTSNTSGTSEPVPVDRLMLNLLSEQTGWIAGYHEHEALLQENEEERLTKEEQDMALSEWEALRKGVRDPERKSNMTAVPADPNVVRSVKAASRSRQPQQPKVNSNNQKKCNNLTHMLTLRSEGTKAGCTITCNECGQEICWETLNRDRTR

SEQ ID NO: 98983 - protein, 78 aa, Setaria italica
  misc_feature (77)..(77): Xaa can be any naturally occurring amino acid
  Transcript Sequence Number=SeqID_33009
IICFNLFNYFLCVDMIERFNLQFSSCTFAWVMNKLLLFSESLLIRRTLQFCSEVLCHYSCVVIYFYFIDTASLFFTXF

SEQ ID NO: 98984 - protein, 72 aa, Setaria italica
  Transcript Sequence Number=SeqID_33010
  Gene Ontology: Mol. function=transcription regulator activity; Cellular component=nucleus; Biological process=regulation of transcription
  Homolog annotation: Hit_ID=A2Q2N8; Match level="QueryCoverage=68%, HitCoverage=8%, E-value=8e-12, Identity=69%"; Hit description=Helix -loop-helix DNA-binding (Fragment)
ILRGVMEMRKSKIWARFTVEANRDVTRMEIFLSLVRLLEPNCDGGAAENANNMNKPLGLVHQPIIPATGRIP

SEQ ID NO: 98985 - protein, 132 aa, Setaria italica
  misc_feature (37)..(37): Xaa can be any naturally occurring amino acid
  Transcript Sequence Number=SeqID_33011
  Gene Ontology: Mol. function=RNA-directed DNA polymerase activity; Cellular component=integral to membrane; Biological process=RNA -dependent DNA replication
  Homolog annotation: Hit_ID=Q8LJX1; Match level="QueryCoverage=94%, HitCoverage=6%, E-value=2e-18, Identity=40%"; Hit description =Putative reverse transcriptase
SGKHMVLPSYECVLCQQGAEESLFHLLLGCPFAQKCXIHLGLFPNLLEEPYTILHSFKHQLNVPFFMEVIILMSWAIWMARNDLIFKGLDPSVQGTLSFFKVIFSQVIHRVKEDWKPIMTSWLEQLCNLYDF

SEQ ID NO: 98986 - protein, 143 aa, Setaria italica
  Transcript Sequence Number=SeqID_33012
  Gene Ontology: Mol. function=sequence-specific DNA binding; Cellular component=nucleus; Biological process=regulation of transcription, DNA-dependent
  Homolog annotation: Hit_ID=Q9XJ66; Match level="QueryCoverage=69%, HitCoverage=43%, E-value=3e-44, Identity=89%"; Hit description=MADS -box transcription factor 22
  Pfam annotation: Domain name=K-box; Domain location=40-142; Score =24.2; E_value=4.7e-06; Accession=PF01486.9; Description=K-box region
RGRGRRGRRRRRRGTEARAPLAFREDHQGEESMNEIIDKYNTHSKNLGKAEQPSLDLNLEHSKYANLNEQLTEASLRLRQMRGEELEGLSVDELQQLEKNLEAGLHRVLQTKDQQFLEQISELQRKKHPCLLFEDSYLKVDTH

SEQ ID NO: 98987 - protein, 90 aa, Setaria italica
  Transcript Sequence Number=SeqID_33013
  Gene Ontology: Mol. function=sequence-specific DNA binding; Cellular component=nucleus; Biological process=regulation of transcription, DNA-dependent
  Homolog annotation: Hit_ID=Q45V73; Match level="QueryCoverage=100%, HitCoverage=39%, E-value=2e-35, Identity=87%"; Hit description=MADS10
DELTSKLEKNLEAGLHRVLQTKDQKFLEQISELQRKSSQLAEENMQLRNQVSQISPAGKQAVAETENVIAEDGQSSESVMTALHSGSSQD

SEQ ID NO: 98988 - protein, 63 aa, Setaria italica
  Transcript Sequence Number=SeqID_33014
  Homolog annotation: Hit_ID=Q45V73; Match level="QueryCoverage=100%, HitCoverage=28%, E-value=1e-11, Identity=61%"; Hit description=MADS10
MILKSLVNIPAGKQAVAETENVIAEDGQSSESVMTALHSGSSQDNDDGSDVSLKLGLPCVAWK

SEQ ID NO: 98989 - protein, 66 aa, Setaria italica
  Transcript Sequence Number=SeqID_33015
GCLVLHGNKKTSVRADLDGGAAASADRHLCYGQTQTAIIFALEARSVNLICHPCGFMMRCAACTVC

SEQ ID NO: 98990 - protein, 228 aa, Setaria italica
  Transcript Sequence Number=SeqID_33016
  Gene Ontology: Mol. function=sequence-specific DNA binding; Cellular component=nucleus; Biological process=regulation of transcription, DNA-dependent
  Homolog annotation: Hit_ID=Q45V73; Match level="QueryCoverage=100%, HitCoverage=100%, E-value=1e-111, Identity=88%"; Hit description =MADS10
  Pfam annotation: Domain name=K-box; Domain location=69-172; Score =46.0; E_value=1.5e-10; Accession=PF01486.9; Description=K-box region
  Pfam annotation: Domain name=SRF-TF; Domain location=9-59; Score =103.6; E_value=6.6e-28; Accession=PF00319.10; Description=SRF-type transcription factor (DNA-binding and dimerisation domain)
  Pfam module annotation: Pfam domain module=K-box::SRF-TF; Domain location=69-172::9-59
MARERREIKRIESAAARQVTFSKRRRGLFKKAEELSVLCDADVALIVFSSTGKLSQFASSSMNEIIDKYNTHSKNLGKAEQPSLDLNLEHSKYANLNEQLTEASLRLRQMRGEELEGLSVDELQQLEKNLEAGLHRVLQTKDQQFLEQISELQRKSSQLAEENMQLRNQVSQIPPAGKQAVAETENVIAEDGQSSESVMTALHSGSSQDNDDGSDVSLKLGLPCVAWK

SEQ ID NO: 98991 - protein, 248 aa, Setaria italica
  misc_feature (9)..(9): Xaa can be any naturally occurring amino acid
  Transcript Sequence Number=SeqID_33017
EFIGDIVCXGELKVDMIPRDLTDYSSESDHDMDSRESSPDYTRGANYPVSPRDLSIRLHKVIQHRLEDRIKELESALAHRQKQAQLQMMVTDGIFSDRICSNSETGSSNQESPMFIQETSSMAEPYCLNLSGDALEAYDEAYEEFMRIADSPCTTSTNGKPQVTEDYLVDRGLIWGMEEDSSRDLKEVSTWEQVLKSVDPSRAQESDVDDEDETDDDSKVLIQQIVERTKQGSPVLINAQKLLFSVDQ

SEQ ID NO: 98992 - protein, 115 aa, Setaria italica
  Transcript Sequence Number=SeqID_33018
  Gene Ontology: Biological process=protein modification process
  Homolog annotation: Hit_ID=UPI000034EE3E; Match level="QueryCoverage =98%, HitCoverage=36%, E-value=6e-14, Identity=33%"; Hit description =tumor susceptibility protein-related
  Pfam annotation: Domain name=UEV; Domain location=30-114; Score= -17.0; E_value=0.00029; Accession=PF05743.5; Description=UEV domain
MATAAAPAGTVVLVDAALAPYEHPDLRWLVRKHVLAVLQEFPTLSPSVDTYTSDDGASAVLLNARGPLAVSPALPPILLTVWLPREYPYRPPLVFAFPAAPSAALVPDHPFVDHR

SEQ ID NO: 98993 - protein, 66 aa, Setaria italica
  Transcript Sequence Number=SeqID_33019
SWFVVLVLLLAVVYHSSQGEQDVTDAEKSGGGSYSFTPSTGAPVPSPQFGVASLRPPSPKSEPFQG

SEQ ID NO: 98994 - protein, 146 aa, Setaria italica
  misc_feature (134)..(134): Xaa can be any naturally occurring amino acid
  Transcript Sequence Number=SeqID_33020
  Gene Ontology: Mol. function=inositol-1,3,4-trisphosphate 5/6-kinase activity; Cellular component=intracellular; Biological process =inositol trisphosphate metabolic process
  Homolog annotation: Hit_ID=A0AQQ6; Match level="QueryCoverage=80%, HitCoverage=36%, E-value=2e-28, Identity=57%"; Hit description =Inositol phosphate kinase
  Pfam annotation: Domain name=Ins134_P3_kin; Domain location=1-146; Score=-43.7; E_value=1.1e-08; Accession=PF05770.3; Description =Inositol 1, 3, 4-trisphosphate 56-kinase
MATPRQVFVGDAAALAGGDDADAVPGGLRFPLIAKPVEVDGSAASHDLCLVYRREGLRGLRAPLVLQEFVNHGGVLFKVYVVGDHATCVMRSSLPDVPDERLHDLAADAAAPFANISLLPPPAAGDAEMPTPGXFVNRVARELRRA

SEQ ID NO: 98995 - protein, 36 aa, Setaria italica
  Transcript Sequence Number=SeqID_33021
GLCYDFSEIWITNLYLVKEIDFRPLFHFPNSCFLPW

SEQ ID NO: 98996 - protein, 95 aa, Setaria italica
  Transcript Sequence Number=SeqID_33022
  Subcellular localization annotation: CTP_CleavageSite=50; ConfidenceScore=5.16e-01
LQQVPRSASRPPPVLERRHGSAFRVISSRVCSHEPLPCRGGGLGRRARVRALSLGTRVLVPPPLSLPCLPVCLAAVFLAGACGALGNRGRLGSAP

SEQ ID NO: 98997 - protein, 106 aa, Setaria italica
  Transcript Sequence Number=SeqID_33023
  Pfam annotation: Domain name=Hin1; Domain location=17-106; Score= -17.1; E_value=0.05; Accession=PF07320.5; Description=Harpin-induced protein 1 (Hin1)
VIGLAVVAGVVLIIIIFGGPLRHVKITVEDASLTRFALVTSSPATTALAYNLTVALTVRNPNWAIGIKHDKPLEAAYTFDGQPFERVQLADKGAKLGARKTVVYRL

SEQ ID NO: 98998 - protein, 119 aa, Setaria italica
  Transcript Sequence Number=SeqID_33024
MKEFSYEEVEAATGGFAAKNLVGKGSHGSVYKARLWGWGGGRAAVVAVKRPSHAQGAAKLANEIAVLSAAPRHPGVVAFVGVAAHQPAPAAASEGAKGVSAPQQQLLIVMEYVPNGSLH

SEQ ID NO: 98999 - protein, 100 aa, Setaria italica
  Transcript Sequence Number=SeqID_33025
SRSRSGLPSALRRAFSMRRFHPAGPGGCGAGDGYWRIHDMDGDSDRGDDTVEEHGENEAAAGEEAENKKAEQQRDEDAANSAVAEKEDAEGRTTTTKKSG

SEQ ID NO: 99000 - protein, 86 aa, Setaria italica
  Transcript Sequence Number=SeqID_33026
  Gene Ontology: Mol. function=superoxide dismutase activity; Biological process=superoxide metabolic process
  Homolog annotation: Hit_ID=B6TXN2; Match level="QueryCoverage=82%, HitCoverage=18%, E-value=1e-22, Identity=77%"; Hit description =Superoxide dismutase
FSTNNSTHFWEQHAYYLDYEDRRADYVAARREKLVSWEVVESRLTKAVQRAVERDGYLRKRVLKKRHLAQANGQDRARSRTPQEAR

SEQ ID NO: 99001 - protein, 88 aa, Setaria italica
  Transcript Sequence Number=SeqID_33027
PAEQRRRWRPSAASAPVDLEDPEQRRRWLQQELRSPVHAASAEGPLLHRRNLSLEELAGEVGLSHDRRLRVPLPKARSVRAFACIGAA

SEQ ID NO: 99002 - protein, 200 aa, Setaria italica
  misc_feature (29)..(29): Xaa can be any naturally occurring amino acid
  Transcript Sequence Number=SeqID_33028
  Gene Ontology: Mol. function=ligase activity, forming carbon-nitrogen bonds; Cellular component=cytoplasm
  Homolog annotation: Hit_ID=B9RKQ1; Match level="QueryCoverage=79%, HitCoverage=25%, E-value=3e-28, Identity=43%"; Hit description =Raspberry3, putative
LQKLCYLQTDEHDKFIVNEHKHEEHDQEXTKIPDYNVLSLCPGEICHFMSRFLITWKAPEDVNEICLHENKECLSKICTVNLDGSLEVRHMADADWLFLAEVCNIRSVEQNLSGPKASISKIEMDNAPQHYRYLQRSAHKALQILRSIPAAARRTLPVLTNAQGDIVCIPSIGFRCCPSLSIQAVFYPRVPLGGGYSSYL

SEQ ID NO: 99003 - protein, 74 aa, Setaria italica
  Transcript Sequence Number=SeqID_33029
FSWFFCKFTPFCTILEANGKRLCGLVLMALSLINLAGLDHLHLVIKNPQPIVLVSQHKFFRMKGNWQMKCFSVL

SEQ ID NO: 99004 - protein, 173 aa, Setaria italica
  misc_feature (10)..(10): Xaa can be any naturally occurring amino acid
  misc_feature (109)..(109): Xaa can be any naturally occurring amino acid
  misc_feature (168)..(168): Xaa can be any naturally occurring amino acid
  Transcript Sequence Number=SeqID_33030
  Gene Ontology: Mol. function=serine-type endopeptidase activity; Biological process=proteolysis
  Homolog annotation: Hit_ID=B9RNE4; Match level="QueryCoverage=100%, HitCoverage=18%, E-value=2e-78, Identity=81%"; Hit description =Dipeptidyl-peptidase, putative
  Pfam annotation: Domain name=Abhydrolase_3; Domain location=3-159; Score=-84.3; E_value=0.037; Accession=PF07859.5; Description =alphabeta hydrolase fold
  Pfam annotation: Domain name=Peptidase_S9; Domain location=11-173; Score=-11.1; E_value=3.3e-06; Accession=PF00326.13; Description =Prolyl oligopeptidase family
  Pfam module annotation: Pfam domain module=Abhydrolase_3::Peptidase _S9; Domain location=3-159::11-173
IPIIGEGNQXGNDRYIEQLVASAEAAVNEIVRRGVAHPDKIAVGGHSYGAFMTANLLAHAPHLFCCGIARSGAYNRTLTPFGFQKEMRTLWEATDTYIKMSPFMSANKXIKKPILLIHGEDDSKVTTAMQSSQFYDALKGHGVPCRLVILPFERHQYAARESIMHIIXWETDR

SEQ ID NO: 99005 - protein, 35 aa, Setaria italica
  Transcript Sequence Number=SeqID_33031
LIVVLNSPYGQLNMYCCEFVLQYLKLFTPVLYIDS

SEQ ID NO: 99006 - protein, 108 aa, Setaria italica
  Transcript Sequence Number=SeqID_33032
TRNKTTEDMLSGVVQLHTADHCSRETRESSQLNSPRLSLLDKIALNVSRHADQNCKYHMMSNSDFVQNQKFRTAVSRKGLCISFFFTHLVRICTKSKTAYHVPSYFES

SEQ ID NO: 99007 - protein, 68 aa, Setaria italica
  Transcript Sequence Number=SeqID_33033
GASDMGEDMKAARQWLVDFLKGQGVLTGMDIAQRFGLWRVRYRDDGHIAWICRKHIAAREDEIFELPL

SEQ ID NO: 99008 - protein, 163 aa, Setaria italica
  Transcript Sequence Number=SeqID_33034
  Gene Ontology: Mol. function=aspartic-type endopeptidase activity; Cellular component=chromatin; Biological process=RNA-dependent DNA replication
  Homolog annotation: Hit_ID=Q8SA91; Match level="QueryCoverage=95%, HitCoverage=6%, E-value=5e-55, Identity=62%"; Hit description =Putative gag-pol polyprotein
  Pfam annotation: Domain name=RVT_1; Domain location=1-153; Score= -13.3; E_value=0.001; Accession=PF00078.19; Description=Reverse transcriptase (RNA-dependent DNA pol
MAHSDYRYLNALTIKGKFPIPIFDQFMDELAGASWFSTLDLMSGYHQVRLKPGEEYKTAFQTHHGQFEFLVMAFGVSGAPGTFQGAMSTTLAPLLRRCVIVFFNDMLIYSKSFEDHLLHLKEVLELLQKDHWHVKLSKCKFAQRTISYLGHVISQSGVSTDMN

SEQ ID NO: 99009 - protein, 345 aa, Setaria italica
  misc_feature (16)..(17): Xaa can be any naturally occurring amino acid
  Transcript Sequence Number=SeqID_33035
  Gene Ontology: Mol. function=ATP-dependent peptidase activity; Cellular component=integral to membrane; Biological process=ATP -dependent proteolysis
  Homolog annotation: Hit_ID=B9RS08; Match level="QueryCoverage=54%, HitCoverage=34%, E-value=1e-62, Identity=57%"; Hit description=ATP -dependent peptidase, putative
  Subcellular localization annotation: CTP_CleavageSite=32; ConfidenceScore=5.11e-01
PQRTPRDAFGQLAASXXFNRQCASSMSSVYVSCSKQLDHVDSEIDGGSLSPTSTSSDHSVTDKRVYLSGFQSSGLVSCGSLDESSNEDEDPIHEQSCCCHDSVKEIDGCGQPDKHTITRDEDDLCFRSFLGVRKKDTEQQRYLCGAYNTKMASQAPLSFWPRWAYEMYDSYSLARRAADLWRQVIVNPSMDDHVRKPNHLSFYIGSNLPISGSLRQELLEIDGVSYRLQREIQLLKAFNIIRCRSCLTSIARRSDMVMLSSANAIGSLSFKEMITVHNATGLGLRGEPSKIYSWFPGYAWTIALCAACESNIGWLFRADKKNLHPKSFWAIRTTQVSDDTQAGQV

SEQ ID NO: 99010 - protein, 127 aa, Setaria italica
  Transcript Sequence Number=SeqID_33036
  Gene Ontology: Mol. function=substrate-specific transmembrane transporter activity; Cellular component=integral to membrane; Biological process=transmembrane transport
  Homolog annotation: Hit_ID=Q7XMZ1; Match level="QueryCoverage=100%, HitCoverage=35%, E-value=1e-49, Identity=76%"; Hit description =OSJNBa0027G07.4 protein
NLVNYATARASWGWRVSLGLAGAPAIVIFVGALFLTDTPSSLVMRGRPDRARAALLRVRGPDADVDAELRDIAKAVEAARQSEDGAFRRMATRREYRPHLVLAVAVPMFFQLTGVIVLAFFAPLVFR

SEQ ID NO: 99011 - protein, 69 aa, Setaria italica
  Transcript Sequence Number=SeqID_33037
KVNTTAHSTLQGSLNIISSACYHYITHHYPNCFQLLSQIAIGVIRFLVGLLDALFLVDTGGGVTSTATG

SEQ ID NO: 99012 - protein, 26 aa, Setaria italica
  Transcript Sequence Number=SeqID_33038
YYRVIINCPCLTFEAKKNRASRMLSF

SEQ ID NO: 99013 - protein, 119 aa, Setaria italica
  Transcript Sequence Number=SeqID_33039
  Pfam annotation: Domain name=DUF789; Domain location=1-117; Score= -100.6; E_value=9.3e-06; Accession=PF05623.4; Description=Protein of unknown function (DUF789)
YGTAVPLVLNGCSDGVVQYYVPYLSAVQLYGGYRRQTGPSRTGAEESDSDLEQETSSSTNASSAQETSESSSGSEASSDDGESGSCHEQLLFEFFESESPYQREPLADKICSLAKRFPE

SEQ ID NO: 99014 - protein, 172 aa, Setaria italica
  misc_feature (19)..(19): Xaa can be any naturally occurring amino acid
  misc_feature (81)..(81): Xaa can be any naturally occurring amino acid
  Transcript Sequence Number=SeqID_33040
  Gene Ontology: Mol. function=phosphoinositide binding; Biological process=cell communication
  Homolog annotation: Hit_ID=B9SWH8; Match level="QueryCoverage=87%, HitCoverage=37%, E-value=2e-56, Identity=71%"; Hit description =Sorting nexin 3, putative
  Pfam annotation: Domain name=Vps5; Domain location=3-172; Score= -63.5; E_value=0.00028; Accession=PF09325.2; Description=Vps5 C terminal like
YCFKDVQSKVSDVVLGKEXPVEESTPEYEKLKNYIFELENHLAEAQNQAYNPVKHHRELGQSLAEFGKAIKLLGACEGDVXGKGVSEVGSKSEMLSIKLQREADNLLFNFEEPLKDYVRAVQSIKATMMDRANAFRQHFDLDQERKYKELNLYVFAYSNYLFLSSLEEMLTN

SEQ ID NO: 99015 - protein, 400 aa, Setaria italica
  Transcript Sequence Number=SeqID_33041
  Gene Ontology: Mol. function=phosphoinositide binding; Cellular component=endosome membrane; Biological process=cell communication
  Homolog annotation: Hit_ID=B9SWH8; Match level="QueryCoverage=94%, HitCoverage=94%, E-value=1e-168, Identity=74%"; Hit description =Sorting nexin 3, putative
  Pfam annotation: Domain name=PX; Domain location=21-137; Score=117.0; E_value=6.4e-32; Accession=PF00787.16; Description=PX domain
  Pfam annotation: Domain name=Vps5; Domain location=162-393; Score =61.7; E_value=2.7e-15; Accession=PF09325.2; Description=Vps5 C terminal like
  Pfam module annotation: Pfam domain module=PX::Vps5; Domain location =21-137::162-393
  Subcellular localization annotation: CTP_CleavageSite=16; ConfidenceScore=5.18e-01
MISPERSPSQSPRSPAAAAGAPFLSISVTDPVKMGTGVQAYISYRVFTKTNLPEFEGPEKIVIRRYSDFEWLHDRLAERYKGIFIPPLPEKNAVEKFRFSKEFIELRRQALDLFINRIASHPELKQSEVLRVFLQADEEKMDRARSYETGIFKKPSDFLQMFKDVQSKVSDVVLGKEKPVEESTPEYEKLKNYIFELENHLAEAQKQAYRLVKRHRELGQSLAEFGKAIKLLGACEGDVMEKVFSEVGSKSEMLSIKLQREADNLLFNFEEPLKDYVRAVQSIKATMMDRANAFRQHFDLDQERKYKELNLEKLKFMNPEKYAEAEFEFRELKADSEEATKKFEHIVRIMNEELARFQEQKTADIGLAFHEFAKGQAKLAKDIADAWRSILPKLEACSSS

SEQ ID NO: 99016 - protein, 124 aa, Setaria italica
  Transcript Sequence Number=SeqID_33042
  Subcellular localization annotation: CTP_CleavageSite=25; ConfidenceScore=5.16e-01
MARLFRESRRDSSHSSSSNGFLPPAAAAASSSSALPSPFPDLGVPLSAADFREAAYEVLVAASRTTGGKPLTYIPQSASGAAAPASPASSASSASSASLQRSLTSAAASKMKKALGLRSSASSK

SEQ ID NO: 99017 - protein, 53 aa, Setaria italica
  Transcript Sequence Number=SeqID_33043
ILPRTNIYFADRFSSYHCLFSTLLAIFQYLLAKISTQEPQTSSTLSAWGWIEL

SEQ ID NO: 99018 - protein, 47 aa, Setaria italica
  Transcript Sequence Number=SeqID_33044
  Gene Ontology: Mol. function=phosphoinositide phospholipase C activity; Cellular component=plasma membrane; Biological process =intracellular signaling cascade
  Homolog annotation: Hit_ID=B6SKE7; Match level="QueryCoverage=100%, HitCoverage=8%, E-value=2e-19, Identity=95%"; Hit description =Phospholipase C
MSEKHDFGGQAVLPVWELKQGIRAVPLHDRKGVRFKSVRLLMRFDFV

SEQ ID NO: 99019 - protein, 79 aa, Setaria italica
  Transcript Sequence Number=SeqID_33045
  Homolog annotation: Hit_ID=B6SKE7; Match level="QueryCoverage=83%, HitCoverage=10%, E-value=2e-17, Identity=68%"; Hit description =Phospholipase C
MGSYAYKYCMCFTRKFRSPDAQPPPDVRAAHLSYCCGGGSSDGGHDGLRRFLSLVQGESAPDADRILATLARTSAARRR

SEQ ID NO: 99020 - protein, 257 aa, Setaria italica
  Transcript Sequence Number=SeqID_33046
  Gene Ontology: Mol. function=phosphoinositide phospholipase C activity; Cellular component=plasma membrane; Biological process =intracellular signaling cascade
  Homolog annotation: Hit_ID=B6SKE7; Match level="QueryCoverage=100%, HitCoverage=43%, E-value=1e-125, Identity=83%"; Hit description =Phospholipase C
  Pfam annotation: Domain name=PI-PLC-X; Domain location=113-256; Score= 142.1; E_value=1.7e-39; Accession=PF00388.11; Description =Phosphatidylinositol-specific phospholipase C, X domain
  Pfam annotation: Domain name=efhand_like; Domain location=26-110; Score=-3.6; E_value=0.037; Accession=PF09279.3; Description =Phosphoinositide-specific phospholipase C
  Pfam module annotation: Pfam domain module=PI-PLC-X::efhand_like; Domain location=113-256::26-110
MGSYAYKYCMCFTRKFRSPDAQPPPDVRAAHLSYCCSSDGHGLRRFLSQVQGESPPDVDRILATLAPTSAAHGIARLVTRSPAPAPPTLDDFFGFLFSPDLNPPINNQVHQDMSAPLPHYFIFTGHNSYLTGNQLNSDSSDIPIIKSLERGVRVIELDMWPNASKNNVDILHGGTLTAPVEMIRCLKSIKEYAFCASNYPLVITLEDHLTADLQAKVAEMLTETFGDLLFIPSSDPMKEFPSPEALMKRIIISTKPP

SEQ ID NO: 99021 - protein, 425 aa, Setaria italica
  Transcript Sequence Number=SeqID_33047
  Gene Ontology: Mol. function=phosphoinositide phospholipase C activity; Cellular component=plasma membrane; Biological process =intracellular signaling cascade
  Homolog annotation: Hit_ID=B6SKE7; Match level="QueryCoverage=98%, HitCoverage=71%, E-value=0.0, Identity=89%"; Hit description =Phospholipase C
  Pfam annotation: Domain name=C2; Domain location=298-390; Score=83.4; E_value=8.1e-22; Accession=PF00168.22; Description=C2 domain
  Pfam annotation: Domain name=PI-PLC-X; Domain location=1-92; Score= -0.2; E_value=1.3e-05; Accession=PF00388.11; Description =Phosphatidylinositol-specific phospholipase C, X domain
  Pfam annotation: Domain name=PI-PLC-Y; Domain location=159-277; Score= 86.0; E_value=1.4e-22; Accession=PF00387.11; Description =Phosphatidylinositol-specific phospholipase C, Y domain
  Pfam module annotation: Pfam domain module=C2::PI-PLC-X::PI-PLC-Y; Domain location=298-390::1-92::159-277
IYSSLILHGGTLTAPVEMIRCLKSIKEYAFCASNYPLVITLEDHLTADLQAKVAEMLTETFGDLLFIPSSDPMKEFPSPEALMKRIIISTKPPQEYKEFLKVKDNQNGSGNIADLPDQGSLRRIDSNADESDGKDELDDQDEEDSDEDDPKFQHDTACEYRKLITIQAGKPKGHLRDALRVDPDKVRRLSLSETQLAKATTSHGAEVIRFTQKNILRVYPKGTRVNSSNYDPMNAWAHGAQMVAFNMQGHDKALRLMQGFFRANGGCGYVKKPDFLLVTGPNGEVFDPKASLPVKKTLKVKVYMGDGWRMDFSKTHFDAFSPPDFYTRVGIAGVKADSVMKKTRVLEDQWVPVWDEEFTFPLTVPELALLRIEVQEYDMSEKHDFGGQTVLPVWELKQGIRAVPLHDRKGVRFKSVRLLMRFDFV

SEQ ID NO: 99022 - protein, 155 aa, Setaria italica
  Transcript Sequence Number=SeqID_33048
  Gene Ontology: Mol. function=sequence-specific DNA binding; Cellular component=nucleus; Biological process=regulation of transcription, DNA-dependent
  Homolog annotation: Hit_ID=Q53N87; Match level="QueryCoverage=87%, HitCoverage=39%, E-value=1e-23, Identity=45%"; Hit description=ZF-HD protein dimerisation region containing protein, expressed
  Pfam annotation: Domain name=ZF-HD_dimer; Domain location=75-134; Score=136.1; E_value=1.1e-37; Accession=PF04770.4; Description=ZF-HD protein dimerisation region
MDLSGAQGELPVPLAMHGGGGGSPYLGLHHGHHEHPQHHSHGANGRHMSPPEVVVPEEAKNRQLAVVPVGAGGGGAGVRYRECLKNHAAAIGGSATDGCGEFMPAGEEGSLDALRCSACGCHRNFHRKEPPGGDARQLHGHHHHHHHHPLSPLAA

SEQ ID NO: 99023 - protein, 155 aa, Setaria italica
  Transcript Sequence Number=SeqID_33049
RETGHVAVHPPPPPPTALARGLPVSQQQLGGEHDLDPNALLVGATLITMLAYLLGTFIPGGYWQQDWSDDGKRVLYRAGDPIMRDLHRPRYCVFRIASWVGVASSMVMTLSLLVRMAPDSRHVRWSFAVSYSSLLLTFAVSQTKTHLSVDIIVWL

SEQ ID NO: 99024 - protein, 79 aa, Setaria italica
  Transcript Sequence Number=SeqID_33050
  Gene Ontology: Mol. function=protein serine/threonine kinase activity; Cellular component=plasma membrane; Biological process =protein amino acid phosphorylation
  Homolog annotation: Hit_ID=Q7XUH4; Match level="QueryCoverage=100%, HitCoverage=7%, E-value=2e-30, Identity=86%"; Hit description =OSJNBa0020J04.8 protein
YLWLDGNLLEGTIPAPLANCSALLHLSLQGNSLRGILPSAVAAIPTLQILSVSRNQLTGAIPAAAFGSQRNSSLRIVQL

SEQ ID NO: 99025 - protein, 517 aa, Setaria italica
  Transcript Sequence Number=SeqID_33051
  Gene Ontology: Mol. function=protein binding; Cellular component =intracellular; Biological process=small GTPase mediated signal transduction
  Homolog annotation: Hit_ID=B6TRI3; Match level="QueryCoverage=99%, HitCoverage=87%, E-value=0.0, Identity=78%"; Hit description=Leucine- rich repeat-containing protein 40
  Pfam annotation: Domain name=LRR_1; Domain location=1-22; Score=1.4; E_value=1.6e+02; Accession=PF00560.25; Description=Leucine Rich Repeat
  Pfam annotation: Domain name=LRR_1; Domain location=116-137; Score =8.6; E_value=6.8; Accession=PF00560.25; Description=Leucine Rich Repeat
  Pfam annotation: Domain name=LRR_1; Domain location=139-160; Score =13.8; E_value=0.68; Accession=PF00560.25; Description=Leucine Rich Repeat
  Pfam annotation: Domain name=LRR_1; Domain location=162-183; Score =13.9; E_value=0.68; Accession=PF00560.25; Description=Leucine Rich Repeat
  Pfam annotation: Domain name=LRR_1; Domain location=185-206; Score =5.5; E_value=27; Accession=PF00560.25; Description=Leucine Rich Repeat
  Pfam annotation: Domain name=LRR_1; Domain location=207-228; Score =17.1; E_value=0.073; Accession=PF00560.25; Description=Leucine Rich Repeat
  Pfam annotation: Domain name=LRR_1; Domain location=230-252; Score =4.5; E_value=42; Accession=PF00560.25; Description=Leucine Rich Repeat
  Pfam annotation: Domain name=LRR_1; Domain location=24-45; Score=7.6; E_value=11; Accession=PF00560.25; Description=Leucine Rich Repeat
  Pfam annotation: Domain name=LRR_1; Domain location=292-314; Score =0.6; E_value=2.3e+02; Accession=PF00560.25; Description=Leucine Rich Repeat
  Pfam annotation: Domain name=LRR_1; Domain location=315-336; Score =11.6; E_value=1.8; Accession=PF00560.25; Description=Leucine Rich Repeat
  Pfam annotation: Domain name=LRR_1; Domain location=338-360; Score =11.2; E_value=2.2; Accession=PF00560.25; Description=Leucine Rich Repeat
  Pfam annotation: Domain name=LRR_1; Domain location=362-384; Score =9.7; E_value=4.3; Accession=PF00560.25; Description=Leucine Rich Repeat
  Pfam annotation: Domain name=LRR_1; Domain location=386-408; Score =1.3; E_value=1.7e+02; Accession=PF00560.25; Description=Leucine Rich Repeat
  Pfam annotation: Domain name=LRR_1; Domain location=410-431; Score =8.5; E_value=7; Accession=PF00560.25; Description=Leucine Rich Repeat
  Pfam annotation: Domain name=LRR_1; Domain location=433-454; Score =17.5; E_value=0.057; Accession=PF00560.25; Description=Leucine Rich Repeat
  Pfam annotation: Domain name=LRR_1; Domain location=456-477; Score =16.0; E_value=0.16; Accession=PF00560.25; Description=Leucine Rich Repeat
  Pfam annotation: Domain name=LRR_1; Domain location=47-68; Score =10.3; E_value=3.3; Accession=PF00560.25; Description=Leucine Rich Repeat
  Pfam annotation: Domain name=LRR_1; Domain location=480-498; Score =10.3; E_value=3.2; Accession=PF00560.25; Description=Leucine Rich Repeat
  Pfam annotation: Domain name=LRR_1; Domain location=70-90; Score=9.0; E_value=5.9; Accession=PF00560.25; Description=Leucine Rich Repeat
  Pfam annotation: Domain name=LRR_1; Domain location=92-114; Score =9.4; E_value=4.8; Accession=PF00560.25; Description=Leucine Rich Repeat
  Pfam module annotation: Pfam domain module=LRR_1::LRR_1::LRR_1::LRR _1::LRR_1::LRR_1::LRR_1::LRR_1::LRR_1::LRR_1::LRR_1::LRR_1::LRR _1::LRR_1::LRR_1::LRR_1::LRR_1::LRR_1::LRR_1::LRR_1; Domain location =1-22::116-137::...
  Pfam module annotation: Domain location=139-160::162-183::185 -206::207-228::230-252::24-45::292-314::315-336::338-360::362 -384::386-408::410-431::433-454::456-477::47-68::480-498::70-90::92 -114
FTCCANISHNKISSLPAAIGDLPLLKSLDVSFNQINTLPEEIGLATALVKVDFSNNCLTELPSSLAKCPDLLELKASNNNISRIPDILGCSKLSKLDLEGNKLVTVSENMFASWTMLTELNLAKNLLTTTPDSIGALSKLIRLDMHQNKITSIPPSIKGCSSLAELYMGNNLLSSIPADIGTLSKLGILDLHSNQLKEYPVGACNLKLSFLDLSNNSLSGLPAELGKMTTLRRLLLTGNPMRTLRSSLVSGPTTTLLKFLRSRLSSDEEGSGSTSTPTKDDQIAAARRLSLSSKELNLSSLGVTSVPAVAWETSDVVKLDLSKNSIEDLPNELSLCSSLQSLVLSNNKIKRWPHTVISSLTSLSSLKLDNNSLAEISSTDLLSLSKLEVLDLSGNASALPEPSAVSASPQLQELYLRRMKLHEFPNGLLGLKQLRILDLSQNNLTTVPEGIKNFTALIELDLSDNNITALPAELGLLEPNLQVLKLDGNPLRSIRRTLLERGTKAILKYLKEKLPAE

SEQ ID NO: 99026 - protein, 38 aa, Setaria italica
  Transcript Sequence Number=SeqID_33052
  Gene Ontology: Mol. function=protein serine/threonine kinase activity; Biological process=protein amino acid phosphorylation
SDISKGMNYLHQINIVHRDLKTANLLMDDQVLDCFSYY

SEQ ID NO: 99027 - protein, 118 aa, Setaria italica
  Transcript Sequence Number=SeqID_33053
  Gene Ontology: Mol. function=protein serine/threonine kinase activity; Biological process=protein amino acid phosphorylation
  Homolog annotation: Hit_ID=B9S5G6; Match level="QueryCoverage=97%, HitCoverage=20%, E-value=2e-43, Identity=66%"; Hit description =Protein kinase, putative
  Pfam annotation: Domain name=Pkinase_Tyr; Domain location=33-118; Score=-150.7; E_value=0.001; Accession=PF07714.9; Description =Protein tyrosine kinase
VLYHRPMEVSPSSDFVQIPADAADVWEVDPRLLKFERKLASGSFGDLYHGTYCSQDVAIKVLKPERVSVDMLREFAQEVYIMKKVRHKNVVQFIGACTRPPISCIVTEFMHGGSIFDF

SEQ ID NO: 99028 - protein, 247 aa, Setaria italica
  Transcript Sequence Number=SeqID_33054
  Gene Ontology: Mol. function=protein serine/threonine kinase activity; Biological process=protein amino acid phosphorylation
  Homolog annotation: Hit_ID=B9S5G6; Match level="QueryCoverage=96%, HitCoverage=43%, E-value=1e-102, Identity=70%"; Hit description =Protein kinase, putative
  Pfam annotation: Domain name=Pkinase; Domain location=45-247; Score =173.8; E_value=5e-49; Accession=PF00069.17; Description=Protein kinase domain
  Pfam annotation: Domain name=Pkinase_Tyr; Domain location=45-247; Score=166.8; E_value=6.5e-47; Accession=PF07714.9; Description =Protein tyrosine kinase
  Pfam module annotation: Pfam domain module=Pkinase::Pkinase_Tyr; Domain location=45-247::45-247
SIGPIWFQSMAARMDHRPMEVSPSSDFVQIPADAADVWEVDPRLLKFERKLASGSFGDLYHGTYCSQDVAIKVLKPERVSVDMLREFAQEVYIMKKVRHKNVVQFIGACTRPPISCIVTEFMHGGSIFDFLYNRRGKFQLPDVIRIASDISKGMNYLHQINIVHRDLKTANLLMDDQVVKVADFGVARVKDQSGVMTAETGTYRWMAPEVIEHLPYDHSADVFSFGIVLWELLTGKLPYEDMTPLQA

SEQ ID NO: 99029 - protein, 135 aa, Setaria italica
  Transcript Sequence Number=SeqID_33055
  Gene Ontology: Mol. function=protein serine/threonine kinase activity; Biological process=protein amino acid phosphorylation
  Homolog annotation: Hit_ID=B9S5G6; Match level="QueryCoverage=97%, HitCoverage=23%, E-value=6e-45, Identity=67%"; Hit description =Protein kinase, putative
  Pfam annotation: Domain name=Pkinase; Domain location=2-107; Score= -112.2; E_value=0.082; Accession=PF00069.17; Description=Protein kinase domain
  Pfam annotation: Domain name=Pkinase_Tyr; Domain location=2-107; Score=-102.8; E_value=6.8e-07; Accession=PF07714.9; Description =Protein tyrosine kinase
  Pfam module annotation: Pfam domain module=Pkinase::Pkinase_Tyr; Domain location=2-107::2-107
VTRKDQSGVMTAETGTYRWMAPEVIEHLPYDHSADVFSFGIVLWELLTGKLPYEDMTPLQAAVAVVQKDLRPTIAADTHPVLADLIQRCWQKDPALRPTFAEIVDILNSIKEVVRSSGHHKRHPGRSDSGRRRGC

SEQ ID NO: 99030 - protein, 124 aa, Setaria italica
  Transcript Sequence Number=SeqID_33056
  Subcellular localization annotation: CTP_CleavageSite=61; ConfidenceScore=5.23e-01
PQGQWLRQSTNQFNHSANLFNGGTNSSLSTGLNDSDPWLQKAPFQQLPPDTPSLFLPHEVQEKAINNDFVFGSPNKSAREHPFGPPGHPWPKEELVLKGAQEANHMLLTKISLQHQHVHKAPTT

SEQ ID NO: 99031 - protein, 635 aa, Setaria italica
  Transcript Sequence Number=SeqID_33057
FLAFSWRLLSSFCSTAASWFLRKIFRFTSSGDDEGLGPDGKRLSKRGENGGKAEESRVEKARRKAEEKRLARLEREMLEEEERKQREEVAKLVEERRRLRDEKAEAEERSKSATPVGEKDARREAERRRQERRKREDKGSSKSNSDCEDIDRRLGREGDRKRDFDRKSDLDKREGYKPHYFEANNHSNKTVESRTKYFGRMTGGFLSSSRGFGGGSFFGRSAQAPAPQVNKVSRPVVPATDQGNALKRETQHAATQATAKSATAGETRSSWTNFNRPVSPNVQPHPTGLKKSWHQLFSRSASVSPCPDVTTSARDMNWKPEPNGAQISSAHSFLSHYPPLESKPSSSQSMHFPGFPPLNGPPPIKPLPHFPAGHMTFYDDAESTVFEEPEQFEDPCYDPDAIALLGPVSESLDNFPLDMNCGFISSNVTKESHGKPSPIESPLSRSRMVDEKPIKQPHSSTTKGPGGFISPEASSEQGTWQMWSTPLVQETLGLQGPQSQWLRQSTNQFNHSANLFNGGTNSSLSTGLNDSDPWLQKAPFQQLPPDTPSLFLPHEVQGKAINNDLVFGSPNKSAHEHPFGPPGHPWPKEELVLKGAQEANHMPSPPCAHVGAGGLFSSTSPDVQSVWSFNEKETA

SEQ ID NO: 99032 - protein, 62 aa, Setaria italica
  Transcript Sequence Number=SeqID_33058
  Homolog annotation: Hit_ID=B6UCF2; Match level="QueryCoverage=96%, HitCoverage=29%, E-value=8e-19, Identity=75%"; Hit description=Seed specific protein Bn15D17A
  Pfam annotation: Domain name=DUF260; Domain location=1-60; Score =11.0; E_value=1.7e-07; Accession=PF03195.6; Description=Protein of unknown function DUF260
SCNGCRVLRKGCSDACVLRPSIEWIDGAQPQANATVFVAKFFGRAGLVASLAAVPLHHRPGN

SEQ ID NO: 99033 - protein, 236 aa, Setaria italica
  Transcript Sequence Number=SeqID_33059
  Homolog annotation: Hit_ID=B9SGY6; Match level="QueryCoverage=99%, HitCoverage=99%, E-value=2e-41, Identity=42%"; Hit description=LOB domain-containing protein, putative
  Pfam annotation: Domain name=DUF260; Domain location=2-107; Score =145.3; E_value=1.9e-40; Accession=PF03195.6; Description=Protein of unknown function DUF260
MSCNGCRVLRKGCSDACVLRPSIEWIDGAQPQANATVFVAKFFGRAGLVASLAAVPLHHRPALFRSLLYEACGRTINPVSGAIGLMWTGNWDLCQAAADAVLRGESSLRALSTIPAAFKDRDMDGLYGNVGAAAASSASPENSSSTPSKKRRNNGGGGIACFDAVRATGACQQPPPAGLLQSCELDLCLTPASPMAGGRRGCGASDEYSATTTCEDLQATGGDVEPRAPALLNLFN

SEQ ID NO: 99034 - protein, 87 aa, Setaria italica
  Transcript Sequence Number=SeqID_33060
LEKHPLGYVFKDDSWTTSHNNGLVTIDRVWRMDNVLPTSTLKPQKDLCLSFALFKLLRCRFARYKVRTAASKGTFSFFWSLLLKDGN

SEQ ID NO: 99035 - protein, 73 aa, Setaria italica
  Transcript Sequence Number=SeqID_33061
  Homolog annotation: Hit_ID=Q94DX0; Match level="QueryCoverage=64%, HitCoverage=9%, E-value=3e-13, Identity=80%"; Hit description =Pentatricopeptide (PPR) repeat protein-like
  Subcellular localization annotation: CTP_CleavageSite=34; ConfidenceScore=5.27e-01
MTDPTGLPPPLRPPTAPPRPAVARVLHAINTCTSAAALGPMRGGILRDPALLRNTTVVSAFFLACGRLRSLDP

SEQ ID NO: 99036 - protein, 42 aa, Setaria italica
  Transcript Sequence Number=SeqID_33062
SLLKSSALDIWLLGYEFPETIIVFMHKTCICLCMKTIIVSGN

SEQ ID NO: 99037 - protein, 541 aa, Setaria italica
  Transcript Sequence Number=SeqID_33063
  Gene Ontology: Mol. function=protein binding; Cellular component =chromosome; Biological process=regulation of transcription, DNA -dependent
  Homolog annotation: Hit_ID=Q8H6B1; Match level="QueryCoverage=100%, HitCoverage=51%, E-value=0.0, Identity=82%"; Hit description=FACT complex subunit SPT16
  Pfam annotation: Domain name=Peptidase_M24; Domain location=193-434; Score=-15.7; E_value=4.9e-08; Accession=PF00557.16; Description =metallopeptidase family M24
MADNGNAKGGSGTYTINLDNFSKRLKVFYDHWKEHKSDLWGSSDAIAIATPPPSEDLRYLKSSALDIWLLGYEFPETIIVFMHKQIHVLCSQKKANLIGTLKKAANEAVGADIVLHVKSKNGDGADLMDDIVQAVRNQSKSGNPIVGHIAKEAPEGKLLETWADKLSGSSIQLTDVTNGFSELFSVKDSTEITCVKKAAYLTTSVLRNFVVPRLEKVIDEEKKVSHSSLMDDTEKVILDPLKVKVKLKSDNVDICYPPVFQSGGKYDLKPGASSNDDYLYYDSASVIICALGSKYSSYCSNVARTYLIDAIPTQSKAYETLLKAHEAAIEAVKPGNQMSAVYQAAVKVIERDAPELLPNLTKSAGTGIGLEFRESGLNLNAKNDRRIKQGMIFNISLGLHNVQAETTSEKTKQFSLLLADTVLVTEKGNEILTAPCSKAVKDVAYSFNEDEEDVPVAKVVSKPVDVVPTKATLRSDNQEMSKEEQRRQHQAELARQKNEETARRLAGGGSGSGEGRGPARASNELVAYKNVNDVPFVRELV

SEQ ID NO: 99038 - protein, 115 aa, Setaria italica
  Transcript Sequence Number=SeqID_33064
  Homolog annotation: Hit_ID=B9RNU1; Match level="QueryCoverage=100%, HitCoverage=22%, E-value=1e-21, Identity=44%"; Hit description =Transporter, putative
MESQEDRALRLQEPAGGGCGVTIGKSCVAFPCRWLRRLSRELHWSFVLAVVAVYGACQGVGNAVGGVAAGYYWKDVQRVQPSAAQFYQGVTDAPWVVKPLWGLLTDVIPVAGYRR

SEQ ID NO: 99039 - protein, 87 aa, Setaria italica
  Transcript Sequence Number=SeqID_33065
  Gene Ontology: Mol. function=transporter activity; Cellular component= membrane; Biological process=oligopeptide transport
  Homolog annotation: Hit_ID=Q7X619; Match level="QueryCoverage=78%, HitCoverage=12%, E-value=1e-17, Identity=61%"; Hit description =P0076O17.8 protein
VFLLSLLGGFLSDSYLGSFWTMLIFGFVELSGFILLAVQAHLPQLRPPPCDMIAAAAACEEAGGVKAGIFFAALYLVAVGSGCLKPN

SEQ ID NO: 99040 - protein, 214 aa, Setaria italica
  misc_feature (34)..(34): Xaa can be any naturally occurring amino acid
  Transcript Sequence Number=SeqID_33066
  Gene Ontology: Mol. function=protein disulfide oxidoreductase activity; Biological process=intracellular signaling cascade
  Homolog annotation: Hit_ID=B9RJD7; Match level="QueryCoverage=98%, HitCoverage=29%, E-value=5e-91, Identity=74%"; Hit description =Electron transporter, putative
  Pfam annotation: Domain name=DUF547; Domain location=12-142; Score =210.6; E_value=4e-60; Accession=PF04784.6; Description=Protein of unknown function, DUF547
KVIIRTIEELQRVEIDDLSREEKLAFFINLYNMXIHALVTCGHPAGPLDRKKFFGDFKCVIGGCAYSLSAIQNGILRGNQRPPYNIAKPFGQKDRRSKVALPYHEPLVHFALVCGTKSGPALRCYSPGDIDKELMEAARDFLRNGGLIVDPDAKVASASKILKWYSSDFGKNETEVLKHAANYLEPAQSEQLLELLASTQLKVAYQPYDWSINI

SEQ ID NO: 99041 - protein, 68 aa, Setaria italica
  Transcript Sequence Number=SeqID_33067
  Subcellular localization annotation: CTP_CleavageSite=33; ConfidenceScore=5.19e-01
RTAASHGFFRPRSRASSAYGRIGSGACAPSSKRAEAEGCSTVGCNCLSAPPTGQIKESPRPRVASCRR

SEQ ID NO: 99042 - protein, 120 aa, Setaria italica
  Transcript Sequence Number=SeqID_33068
HLYKNSLLPFINLPAAKQRTKTLNEIQIQNGIRESKTHTCQPNLWNNSSLQSQTNDSCINYISHGTLRCAKNNSTKMSLHSKTVSCLLFFLIKPSCQQVRIPVPFGQTKSAETRILRNNP

SEQ ID NO: 99043 - protein, 240 aa, Setaria italica
  Transcript Sequence Number=SeqID_33069
  Gene Ontology: Mol. function=protein binding; Cellular component =integral to membrane; Biological process=dolichol-linked oligosaccharide biosynthetic process
  Homolog annotation: Hit_ID=B9R773; Match level="QueryCoverage=97%, HitCoverage=99%, E-value=5e-90, Identity=68%"; Hit description =Mannose-P-dolichol utilization defect 1 protein, putative
  Pfam annotation: Domain name=PQ-loop; Domain location=155-210; Score =42.6; E_value=1.5e-09; Accession=PF04193.6; Description=PQ loop repeat
  Pfam annotation: Domain name=PQ-loop; Domain location=32-98; Score =72.4; E_value=1.6e-18; Accession=PF04193.6; Description=PQ loop repeat
  Pfam module annotation: Pfam domain module=PQ-loop::PQ-loop; Domain location=155-210::32-98
MVAMELEILGMNFGCVLAALSDAKIPDKGCLLPLISKLLGYAIVAASTTVKLPQILKILKHGSVRGLSVASFELEVVGYTIALAYCIHKGLPFSAYGELAFLLIQAIILVAIIYYYSPPMGAKTWMKALLYCGLAPTVLAGKIDPALFEVLYASQHAIFFFARVPQIWKNFSNKGTGELSFLTCFMNFAGSIVRVFTSIQEKTPLSVIMGSAIGIVMNGTILGQILLYQKPAPKKQKKED

SEQ ID NO: 99044 - protein, 157 aa, Setaria italica
  Transcript Sequence Number=SeqID_33070
DTRPSSLRNRAGSRGVWASSLFVVFSITVGVDAAANTCATTGDGHGGDGAGDSGHELRVRPSGAERRQDPRQGMPPPAHLQAARLRHRRRIHHRQAPPGSPAFFLPLDKGSCVRIDMHASMCLDLRRARLVDVRGDLKSHVLCVSIACGILHKGSFG

SEQ ID NO: 99045 - protein, 60 aa, Setaria italica
  Transcript Sequence Number=SeqID_33071
  Subcellular localization annotation: CTP_CleavageSite=52; ConfidenceScore=5.27e-01
MSGSNFGDSMGWSSSGRSSGSRRGKRGGGSGGADKPKQPQRGLGVAQLEKIRLQSEMAEL

SEQ ID NO: 99046 - protein, 117 aa, Setaria italica
  Transcript Sequence Number=SeqID_33072
  Gene Ontology: Mol. function=transferase activity, transferring glycosyl groups; Biological process=metabolic process
  Homolog annotation: Hit_ID=Q6ESW8; Match level="QueryCoverage=92%, HitCoverage=22%, E-value=2e-30, Identity=60%"; Hit description =Putative Hydroquinone glucosyltransferase
SHCGWNSTLESVAAGVPMVAWPLYAEQRVNAVVLSQNVGVALRPRATRADGLITRKEITAAVRELMDGEEKGRAVRRRAEDLQEAAARAGAPGGSSWQMLEEVAGKWKAAALGRQKQ

SEQ ID NO: 99047 - protein, 737 aa, Setaria italica
  Transcript Sequence Number=SeqID_33073
  Gene Ontology: Mol. function=pyridoxal phosphate binding; Cellular component=plasma membrane; Biological process=metabolic process
  Homolog annotation: Hit_ID=B9S8P3; Match level="QueryCoverage=99%, HitCoverage=79%, E-value=0.0, Identity=59%"; Hit description =Molybdopterin cofactor sulfurase, putative
GTAEHDIKNRIMDYLNIPESEYCLVFTVSRGSAFRLLAECYPFGTNKRLLTMFDHESQSVNWMMQAARDKGAKAYSAWFKWPTLKICTTELRKLISTKKRRRKDSATGLFVFPVQSRVTGAKYSYQWMALAQQNHWHVLLDAGALGPKDMDSLGLSLFRPDFIITSFYRVFGADPTGFGCLLIKKSVMACLQSPSGGTGAGMVRIVPVFPQYLSDSVDGLDGVLDGLEDDTIIPIEEGSVSNNHHASQLPAFSGAYSSAQVREVIESEMDQDSSDRDGASTIYEESESVSVGEVMKSPVFSEDESSENSFWVDLGQSPLGSDHSEQSGKGKLGSPLPASWFSGRRNAKKASPKVPSKLAKSPIHDNHVMSFDAAVRSVSQDSGPVKVVPDEDHSHNDIKNAIPVSEIEEDKDAKGNKRFVKFSCANGPAEGSATSVFGSYTTHENGSTSEICSESQAETKESAIRRENEGDFRLLGRREAHNGRFNGGRFFGVEESERVSSMGRKVSFTMDDSRLCRNSDAGETSGYAMADDDDEAYSDYDEPQDGRKEPEIICKHLDHVNMLGLSKTTLRLRYLINWLVTSLLQLRLPDSGDGEGVSLVYIYGPKIKYDRGAAVAFNIKDCNTGTSLINPEIVQKLAEKEGLSLGVGFLSHIRLTDNQKHGAADVGLSSSTPAANGRREKKTSKNAIIGTEVVTASLGFLTNFEDVYRLWAFVAKFLDSSFLEQERLSSIPEDAER

SEQ ID NO: 99048 - protein, 73 aa, Setaria italica
  Transcript Sequence Number=SeqID_33074
  Subcellular localization annotation: CTP_CleavageSite=37; ConfidenceScore=5.38e-01
ICSQKSQDFRTLAHCQSCNLDLNFGSAIASNSSKAVRGSQKDQSSKSSFSVRKVKISLRPPTGQMLQHEHRVP

SEQ ID NO: 99049 - protein, 105 aa, Setaria italica
  Transcript Sequence Number=SeqID_33075
VEKLAWNKGNLHSFLLLIGQGWICLHIGYMTLHFVIKMFAMSRMEILYLQFYNFLLEIYTCVRMDKLPRTDIPDPFGDKSKAAKAFPSLVSLLYTILVVHCILIR

SEQ ID NO: 99050 - protein, 56 aa, Setaria italica
  Transcript Sequence Number=SeqID_33076
  Gene Ontology: Mol. function=copper ion binding
  Homolog annotation: Hit_ID=B9RYQ8; Match level="QueryCoverage=100%, HitCoverage=11%, E-value=8e-21, Identity=76%"; Hit description =Cytochrome C oxidase assembly protein cox11, putative
IYSPIRRGKQVQMDVCRSTKRDASEGAFERVVVTRSKNPTLHFQARRSLWGDLWPF

SEQ ID NO: 99051 - protein, 59 aa, Setaria italica
  Transcript Sequence Number=SeqID_33077
QTFIILRDMSCRLGQQVVYGLGHRSLRKNCLPIHHWRHGLRRLHGRPSWKNCLPIHHWR

SEQ ID NO: 99052 - protein, 78 aa, Setaria italica
  Transcript Sequence Number=SeqID_33078
  Homolog annotation: Hit_ID=Q5Z5C9; Match level="QueryCoverage=97%, HitCoverage=30%, E-value=7e-12, Identity=48%"; Hit description=BURP domain-containing protein 11
  Pfam annotation: Domain name=BURP; Domain location=2-78; Score= -104.6; E_value=0.017; Accession=PF03181.7; Description=BURP domain
YPLCALPIPFCVSQTTARRGRYNVTAVRKLSDSPMVAACHDLTYPYAVYYCHTTNPAAAYLVTLAAEDGGAPAMEALA

SEQ ID NO: 99053 - protein, 127 aa, Setaria italica
  Transcript Sequence Number=SeqID_33079
KEILRKVTTSYGSKGEEDSRKLTTSYGSQGDELSRKTTTSYGSQGDELSRKATTSYRSQGDRHDHIHSHNNGNKLADVFFFHDVLRPGSIITPTIPPTTSLPPLLPRHEAETIPFSTKRFGDIPLPL

SEQ ID NO: 99054 - protein, 145 aa, Setaria italica
  Transcript Sequence Number=SeqID_33080
MMSYGSQCKDNSRKATTSYGSQGDEESRKVTTSYGSKGEEDSRKLTTSYGSQGDELSRKTTTSYGSQGDELSRKTTTSYGSQGEKDSRKATTSYRSQGDRHDHIHSHNNGNKLADVFFFHDVLRPGSIITPTTPTDHTSFAPPLP

SEQ ID NO: 99055 - protein, 299 aa, Setaria italica
  Transcript Sequence Number=SeqID_33081
MVNMDAIVSLAILLLVTGAGASKHADLPAGPAVKSPKTMAPMVYWQAVLPETPMPQAIHDLLTQSTGHVSQDNKGLAQGENSRKVTASYGSQGEEDTRKVTTSHKSQGEDSRKVTASYGSQDDGDSMKIMMSYGSQCKDNSRKATTSYGSQGDEESRKVTTSYGSKGEEDSRKLTTSYGSQGDELSRKTTTSYGSQGDELSRKATTSYGSQGDELSRKTTTSYGSQGEKDSRKATTSYRSQGDRHDHIHSHNNGNKLADVFFFHDVLRPGSIITPTIPPTTSLPPLLPRHEAETIPFST

SEQ ID NO: 99056 - protein, 299 aa, Setaria italica
  misc_feature (113)..(113): Xaa can be any naturally occurring amino acid
  misc_feature (148)..(148): Xaa can be any naturally occurring amino acid
  misc_feature (172)..(172): Xaa can be any naturally occurring amino acid
  misc_feature (231)..(231): Xaa can be any naturally occurring amino acid
  Transcript Sequence Number=SeqID_33082
  Gene Ontology: Biological process=response to stress
  Homolog annotation: Hit_ID=Q5Z5C9; Match level="QueryCoverage=82%, HitCoverage=83%, E-value=2e-70, Identity=55%"; Hit description=BURP domain-containing protein 11
  Pfam annotation: Domain name=BURP; Domain location=58-279; Score =282.5; E_value=9.4e-82; Accession=PF03181.7; Description=BURP domain
MSLRIIKVWHKGRTQEKSPHHMGPKVRRTQGRPLLHIGPKGDRHDHIHSHNNGNKLADVFFFHDVLRPGSIITPTIPPTTSLPPLLPRHEAETIPFSTKRFGDILTMFAPAVXAMADEIRWTLDTCEHPQTLAGEKASCATSFESLAXLPAALLGIRNVHAFSGDMPIRPCXTTARRGRYNVTAVRKLSDSPMVAACHDLTYPYAVYYCHTTNPAAAYLVTLAAEDGRGAXAMEALAVCHLDTSQWTPRHPFLVAHNLKPGDAVVCHFLSKLSIVWVPAGEQGGAREARKNAKYLRAFA

SEQ ID NO: 99057 - protein, 150 aa, Setaria italica
  Transcript Sequence Number=SeqID_33083
  Gene Ontology: Mol. function=protein binding; Biological process =protein metabolic process
  Homolog annotation: Hit_ID=Q6ER93; Match level="QueryCoverage=78%, HitCoverage=12%, E-value=2e-11, Identity=42%"; Hit description=Heat shock protein-related-like
ARALLGRVLQRLPREEVDARAGDLRAIIREARAAGKGVVLVLEDLACAAEAWAAASWKRSGHARYYYCPVEHAVMELSNLVRGGGGRGHDKFWLLGFSAYASYTSCRSGQPSLEAVLELHPILVPDGSLAGDSEITHCGAADMAMATART

SEQ ID NO: 99058 - protein, 73 aa, Setaria italica
  Transcript Sequence Number=SeqID_33084
  Subcellular localization annotation: CTP_CleavageSite=53; ConfidenceScore=5.38e-01
LAFSPSLELVLSCRRLNAYKSTDFLFTFTTFSSCIATSSVVFFSMLFLHTDASAAMDAAGSTVRMLLDRDSVA

SEQ ID NO: 99059 - protein, 42 aa, Setaria italica
  Transcript Sequence Number=SeqID_33085
INSHKLGSVQKFQQQRHTKLNIVLSVKFICLEDSKRSEEAQI

SEQ ID NO: 99060 - protein, 357 aa, Setaria italica
  misc_feature (21)..(21): Xaa can be any naturally occurring amino acid
  Transcript Sequence Number=SeqID_33086
  Gene Ontology: Mol. function=cation transmembrane transporter activity; Cellular component=integral to membrane; Biological process=calcium ion transport
  Homolog annotation: Hit_ID=B6UEI1; Match level="QueryCoverage=95%, HitCoverage=77%, E-value=1e-174, Identity=92%"; Hit description =Vacuolar cation/proton exchanger 2
  Pfam annotation: Domain name=Na_Ca_ex; Domain location=277-357; Score= 22.7; E_value=0.00041; Accession=PF01699.16; Description =Sodiumcalcium exchanger protein
  Pfam annotation: Domain name=Na_Ca_ex; Domain location=89-236; Score =107.7; E_value=4e-29; Accession=PF01699.16; Description =Sodiumcalcium exchanger protein
  Pfam module annotation: Pfam domain module=Na_Ca_ex::Na_Ca_ex; Domain location=277-357::89-236
ELELASPAGSPAPPPRKMHSXLDFEHIGSLAAVAESLSRESKWGRALTSVRVVIFQAKINVLLPFGPLAIMLHYLSGKHQGWVFLFSLIGITPLAERLGYATEQLACYTGPTVGGLLNATFGNATEMIISIYALKNGMIRVVQQSLLGSILSNMLLVLGCAFFAGGLVHSDRDQVFNKASAVVNSGLLLMAVLGLMFPAVLHFTHSEAQYGKSEVALSRFSSCIMLVAYASYLFFQLKSHRSMYSPIGDEEEAIEDEEDEKEITQWEAICWLFILTIWISVLSGYLVDAIQGASDSLNLPVAFISVILLPIVGNAAEHASAIMFAMKNKLDITLGVAIGSSTQISMFVIPFCVVLAG

SEQ ID NO: 99061 - protein, 69 aa, Setaria italica
  Transcript Sequence Number=SeqID_33087
  Gene Ontology: Mol. function=heat shock protein binding; Biological process=protein folding
  Homolog annotation: Hit_ID=B6UEF0; Match level="QueryCoverage=98%, HitCoverage=45%, E-value=2e-30, Identity=89%"; Hit description=Tsi1 -interacting protein TSIP1
GSSCQSAGHVECKWCAGTGFFILGNNMLCEVPSRNTTCVICSGKGIASCADCQGTGFRAKWLEEPPVDK

SEQ ID NO: 99062 - protein, 74 aa, Setaria italica
  Transcript Sequence Number=SeqID_33088
NEDDEARQIHDGPRRCKTDFVVFHLRKEREGHPDVHQRDSPAVESREVFFNHVLCFIFPCILSFSIFVRRSCCE

SEQ ID NO: 99063 - protein, 37 aa, Setaria italica
  Transcript Sequence Number=SeqID_33089
  Gene Ontology: Mol. function=metal ion binding
NYLVVQLTLEGESYHKSCFKCSHGGCILTTSSYAALN

SEQ ID NO: 99064 - protein, 87 aa, Setaria italica
  Transcript Sequence Number=SeqID_33090
  Gene Ontology: Mol. function=metal ion binding
  Homolog annotation: Hit_ID=Q9M2E1; Match level="QueryCoverage=98%, HitCoverage=79%, E-value=2e-33, Identity=68%"; Hit description=LIM domain protein
  Pfam annotation: Domain name=LIM; Domain location=23-79; Score=64.6; E_value=3.7e-16; Accession=PF00412.14; Description=LIM domain
NKSDQAKAPSKLSSAFSGTQDKCAACQKTVYPLEKMTLEGESYHKSCFKCSHGGCILTTSSYAALNGILYCKIHFSQLFKEKGSYNH

SEQ ID NO: 99065 - protein, 155 aa, Setaria italica
  misc_feature (76)..(76): Xaa can be any naturally occurring amino acid
  Transcript Sequence Number=SeqID_33091
  Subcellular localization annotation: CTP_CleavageSite=92; ConfidenceScore=5.55e-01
AAATSKIWRWPPPPPPRGLTATELPPPPRACFSCPSFSPPSGRPPAPTKTPPPPPASSSCAPCPPPPPSRLGFRQXLGPETRSWNPESPEVEETPRKKPRPPPPPCASSSSSSAASPPTPLPWPPAPPPTSRTAAAGAGREGFGRGIHLETGGGP

SEQ ID NO: 99066 - protein, 93 aa, Setaria italica
  misc_feature (2)..(2): Xaa can be any naturally occurring amino acid
  misc_feature (5)..(5): Xaa can be any naturally occurring amino acid
  Transcript Sequence Number=SeqID_33092
  Gene Ontology: Mol. function=drug transporter activity; Cellular component=membrane; Biological process=multidrug transport
  Homolog annotation: Hit_ID=Q4ABZ7; Match level="QueryCoverage=98%, HitCoverage=17%, E-value=4e-30, Identity=71%"; Hit description =117M18_23
KXWRXWGRAIFQRIALYGINVVSQSFIGHLGDLELAAFSIAATVVAGFNFGFLLGMASALETLCGQAFGAKKYHMLGVYLQRSWIALLLFAVA

SEQ ID NO: 99067 - protein, 107 aa, Setaria italica
  Transcript Sequence Number=SeqID_33093
STNQPPLSCQFQEELNEQSSKYAYNALYLRTNFERLDALYYRTEGVNPVDVHEDCKTFKCYDALVDSKPAFSNSSCSQIYTVRPRLECTWLNKHTSLSLSESIPCYS

SEQ ID NO: 99068 - protein, 122 aa, Setaria italica
  Transcript Sequence Number=SeqID_33094
  Gene Ontology: Mol. function=solute:hydrogen antiporter activity; Cellular component=integral to membrane; Biological process =regulation of pH
  Homolog annotation: Hit_ID=Q10B66; Match level="QueryCoverage=86%, HitCoverage=13%, E-value=2e-36, Identity=64%"; Hit description =Cation/hydrogen exchanger, putative
VIDSAADKRAAIVIMPYHKALHHDGSFQSLGSAYHAINKRVLREAPCSVAILVDRGLGGHAQVSAKNVSFSVVALFFGGPDDREALAYATRMAEHPGVAVTLARFQPSRRLQSGSGEEEAAD

SEQ ID NO: 99069 - protein, 66 aa, Setaria italica
  misc_feature (61)..(61): Xaa can be any naturally occurring amino acid
  Transcript Sequence Number=SeqID_33095
MAGRHRRRRRGGHLRQERSPLAPPPGDPSPMEPTTRREVAIPDRPSKKTCHASSSTSSSMXGPDVW

SEQ ID NO: 99070 - protein, 34 aa, Setaria italica
  Transcript Sequence Number=SeqID_33096
THTHTHTHTHTHTHTHRERERASFIDGNVLISCS

SEQ ID NO: 99071 - protein, 345 aa, Setaria italica
  Transcript Sequence Number=SeqID_33097
  Gene Ontology: Mol. function=protein dimerization activity; Cellular component=nucleus; Biological process=regulation of transcription, DNA-dependent
  Homolog annotation: Hit_ID=B6T4N4; Match level="QueryCoverage=86%, HitCoverage=80%, E-value=2e-89, Identity=60%"; Hit description =Transcription factor RF2a
  Pfam annotation: Domain name=bZIP_1; Domain location=166-227; Score =30.6; E_value=6.3e-06; Accession=PF00170.13; Description=bZIP transcription factor
  Pfam annotation: Domain name=bZIP_2; Domain location=164-218; Score =30.3; E_value=8e-06; Accession=PF07716.7; Description=Basic region leucine zipper
  Pfam module annotation: Pfam domain module=bZIP_1::bZIP_2; Domain location=166-227::164-218
DGLPPQAVRRGRRPPSSSTPPPEYDISRMSDFPTRNAGHRRAHSEILSLPDDLDLSAPRGGDGPSLSDENDEELLSMFLDVDKLNSSCGASSEAEAESSSAAGGGGEGAELSPAPRPRHQHSQSMDESMSIKAEQLVGAPGMEGMSSAEAKKAVSAAKLAELALVDPKRAKRIWANRQSAARSKERKMRYIAELERKVQTLQTEATTLSAQLALLQRDTTGLTTENSELKIRLQTMEQQVHLQDALNDTLKAEVQRLKVATGQVGNGGGGMMMNFGTMPRQFGGNQQMFHNNQAMQSMMATHQLQQLQLHSQPQQQTLHPQHQQPLHSLQTQQLQQAARDLKNLQ

SEQ ID NO: 99072 - protein, 104 aa, Setaria italica
  Transcript Sequence Number=SeqID_33098
  Gene Ontology: Mol. function=catalytic activity; Cellular component =integral to membrane; Biological process=sphingolipid metabolic process
  Homolog annotation: Hit_ID=Q7NHS5; Match level="QueryCoverage=57%, HitCoverage=6%, E-value=2e-12, Identity=51%"; Hit description =Gll2460 protein
YGVDGDAAAEQLAHDALLEHMNWESQIEEWQRPILQDETLPEWYPIGLFNELYYLNAGGTIWTDGHPPKKAGFGSSGPFSLDTPRVAAAPPPTSPAAAAARWTA

SEQ ID NO: 99073 - protein, 57 aa, Setaria italica
  Transcript Sequence Number=SeqID_33099
  Gene Ontology: Mol. function=protein serine/threonine kinase activity; Cellular component=chromatin; Biological process=protein amino acid phosphorylation
  Homolog annotation: Hit_ID=Q2QQD0; Match level="QueryCoverage=98%, HitCoverage=2%, E-value=4e-14, Identity=69%"; Hit description =Retrotransposon protein, putative, unclassified
  Pfam annotation: Domain name=LRR_1; Domain location=17-39; Score =14.1; E_value=0.58; Accession=PF00560.25; Description=Leucine Rich Repeat
  Pfam annotation: Domain name=LRR_1; Domain location=41-55; Score=3.2; E_value=75; Accession=PF00560.25; Description=Leucine Rich Repeat
  Pfam module annotation: Pfam domain module=LRR_1::LRR_1; Domain location=17-39::41-55
DNRISGEIPSSIGGCQILEYLNISGNGLQGEIPSSLEKLNGLLVLDLSHNNLSGAIP

SEQ ID NO: 99074 - protein, 85 aa, Setaria italica
  misc_feature (63)..(63): Xaa can be any naturally occurring amino acid
  Transcript Sequence Number=SeqID_33100
EKHNKLHSPHIKLRREYQLDFPTNFELNKPIFLQLYNLIYSCTVISINFDKPVMMEHPQIRFXRSFKDWVHVLKADSPTMKLSKE

SEQ ID NO: 99075 - protein, 136 aa, Setaria italica
  Transcript Sequence Number=SeqID_33101
  Gene Ontology: Mol. function=ubiquitin-protein ligase activity; Cellular component=ubiquitin ligase complex; Biological process =ubiquitin-dependent protein catabolic process
  Homolog annotation: Hit_ID=B9RDS7; Match level="QueryCoverage=95%, HitCoverage=24%, E-value=4e-24, Identity=42%"; Hit description =Receptor protein kinase, putative
  Subcellular localization annotation: CTP_CleavageSite=70; ConfidenceScore=5.04e-01
MAAATEKVFVALPAEFKAGQSTLSWVLSHFGSSGATVVITHVHVPPQMIPVMGVKFHSSKLSPEQVKLFRRMEREKANKQLDGYVHQCSKMKVRCEKLVFEKEDVVAGLVELIGLHRVTRLVISAAADRQYSRKMD

SEQ ID NO: 99076 - protein, 116 aa, Setaria italica
  Transcript Sequence Number=SeqID_33102
  Gene Ontology: Mol. function=transcription regulator activity; Cellular component=nucleus; Biological process=regulation of transcription
  Homolog annotation: Hit_ID=B6T6H6; Match level="QueryCoverage=80%, HitCoverage=21%, E-value=1e-22, Identity=71%"; Hit description=DNA binding protein
  Subcellular localization annotation: CTP_CleavageSite=11; ConfidenceScore=5.32e-01
RTVSSGMEPASAAAAGVGASNLARQSSSPAGFLDNLNMDNGYGAMLRAGMSMGFRDGSSAAAATADSLAGGGSRLKGQLSFSSRQGSLMSQISEMDSEEVGGSSPEAAGGGRGYIP

SEQ ID NO: 99077 - protein, 64 aa, Setaria italica
  Transcript Sequence Number=SeqID_33103
  Gene Ontology: Mol. function=transcription regulator activity; Cellular component=nucleus; Biological process=regulation of transcription
  Homolog annotation: Hit_ID=Q8S490; Match level="QueryCoverage=100%, HitCoverage=42%, E-value=4e-30, Identity=96%"; Hit description =Transcription factor RAU1 (Fragment)
  Pfam annotation: Domain name=HLH; Domain location=19-64; Score=18.3; E_value=0.0019; Accession=PF00010.18; Description=Helix-loop-helix DNA-binding domain
QFQDAVPCKIRAKRGCATHPRSIAERVRRTKISERIRKLQELVPNMDKQTNTSDMLDLAVDYIK

SEQ ID NO: 99078 - protein, 123 aa, Setaria italica
  Transcript Sequence Number=SeqID_33104
  Gene Ontology: Mol. function=transcription regulator activity; Cellular component=nucleus; Biological process=regulation of transcription
  Homolog annotation: Hit_ID=B6T6H6; Match level="QueryCoverage=99%, HitCoverage=32%, E-value=2e-61, Identity=93%"; Hit description=DNA binding protein
  Pfam annotation: Domain name=HLH; Domain location=50-98; Score=39.8; E_value=1.1e-08; Accession=PF00010.18; Description=Helix-loop-helix DNA-binding domain
RDSSEPGQSGLTQQFSLPKTSSEMAAIEKFLQFQDAVPCKIRAKRGCATHPRSIAERVRRTKISERIRKLQELVPNMDKQTNTSDMLDLAVDYIKDLQKQVKVLNESRANCTCSASKNPQYSG

SEQ ID NO: 99079 - protein, 151 aa, Setaria italica
  Transcript Sequence Number=SeqID_33105
CNRAQVDRMEEEETPKADENHVLDDRQPQPAVTKASPPECNAAEGQNVMQQEALTTSQDPLTSSEGDLTSDGDVVQASGHHHIVVSEDSPEECQRDEVKRSVQDEAVKSDWSHVLDSREFQPAVSEVFPSKNSVAEVQKATQEESLPSDGD

SEQ ID NO: 99080 - protein, 69 aa, Setaria italica
  Transcript Sequence Number=SeqID_33106
  Gene Ontology: Mol. function=ATPase activity, coupled to transmembrane movement of ions, phosphorylative mechanism; Cellular component=membrane; Biological process=transport
  Homolog annotation: Hit_ID=P98204; Match level="QueryCoverage=94%, HitCoverage=5%, E-value=3e-19, Identity=62%"; Hit description =Phospholipid-transporting ATPase 1
MAEDHGSSRHMSASQKELGDEDARVVRVGDAERTNERLDFAGNAVRTAKYSPLTFLPRNLFEQFHRLAY

SEQ ID NO: 99081 - protein, 147 aa, Setaria italica
  misc_feature (43)..(43): Xaa can be any naturally occurring amino acid
  misc_feature (69)..(69): Xaa can be any naturally occurring amino acid
  misc_feature (91)..(91): Xaa can be any naturally occurring amino acid
  Transcript Sequence Number=SeqID_33107
  Gene Ontology: Mol. function=metal ion binding
  Homolog annotation: Hit_ID=Q9XI13; Match level="QueryCoverage=95%, HitCoverage=16%, E-value=2e-22, Identity=39%"; Hit description =F8K7.7 protein
LVILYSGSWDGTIRSWWLTDHTPLSVLEDDTAGSMAPVLSISXEANFVASSYENGYFKIWKNDVLVKSXKLQNGTVYDVIPSTSIEPTATXFNCINIQELLENESEVELRDVASITCDSIITSILSWNERLIVGLSNRDIKVYYKAS

SEQ ID NO: 99082 - protein, 561 aa, Setaria italica
  misc_feature (469)..(469): Xaa can be any naturally occurring amino acid
  Transcript Sequence Number=SeqID_33108
  Gene Ontology: Mol. function=protein kinase activity; Biological process=protein amino acid phosphorylation
  Homolog annotation: Hit_ID=B9S2U6; Match level="QueryCoverage=82%, HitCoverage=27%, E-value=1e-57, Identity=32%"; Hit description =Protein translocase subunit secA
  Pfam annotation: Domain name=Pkinase; Domain location=1-253; Score= -88.8; E_value=0.0033; Accession=PF00069.17; Description=Protein kinase domain
  Pfam annotation: Domain name=Pkinase_Tyr; Domain location=2-253; Score=-174.7; E_value=0.041; Accession=PF07714.9; Description =Protein tyrosine kinase
  Pfam annotation: Domain name=WD40; Domain location=330-366; Score =25.1; E_value=0.00029; Accession=PF00400.24; Description=WD domain, G-beta repeat
  Pfam annotation: Domain name=WD40; Domain location=370-410; Score =15.4; E_value=0.23; Accession=PF00400.24; Description=WD domain, G -beta repeat
  Pfam annotation: Domain name=WD40; Domain location=417-458; Score =18.3; E_value=0.032; Accession=PF00400.24; Description=WD domain, G -beta repeat
  Pfam module annotation: Pfam domain module=Pkinase::Pkinase _Tyr::WD40::WD40::WD40; Domain location=1-253::2-253::330-366::370 -410::417-458
QEAVFYRPSHAARVLAAIGALSDAAREELAGLIASSARLARQVCRIYGVWMDSDAPPLWMVSERHTRSVSRLLEEETIIGEEMVAQIGFVVMEACEVIMRLHCEGLVLGCLGLDCFCLDRFGHCLLDFNQVLALCRGVRAGTHNIGAFVAPEVVAVLGDTLRRMDHDFDGLVGCSSDIWSLGCVLVSFLTRDEQLVAGWNSEGSYDDWEKEVVTRLNASLLGTQLEPLAAIIVSCLSYDPKGRPEIADVWKRIRGLLMKSSDVALAPDDDSAAQKSFRCLLFGELSLMFKSDCKAQLYQGAEENISNQDDGSNGGCIDNRVIDGPQSAGMFKSATLVAHCDCVTGLAIGGGFLFSSSYDKTINVWSLQDFSHVQCLKGHEHKVTAIVVVDNDNHSLCISGDSGSGIFVWRVDSTLNEEPLNKWYEHNDWLYRGVNCLAVSGTGYLYTGGRDKSVKAWSLEDYSLRCTMXVINQPYLALQWPVVFFTVEVGMVPLGHGGSLIIHHCLYWKMIQQEAWLLCCQFQQKPILSLHRTRTATLRFGRMMSLSNQKSFKMVLFMQLN

SEQ ID NO: 99083 - protein, 114 aa, Setaria italica
  misc_feature (14)..(14): Xaa can be any naturally occurring amino acid
  Transcript Sequence Number=SeqID_33109
MQDNFFPLTREDAXGFAFLKFASHYYARAAFRRLMKPDAIFGTDRSAKVSFYQTTIKPSENVIEVSTRYWFKIFRHILCGISIILIICVNYESIVFCTVCKVLVPTVFFIRLWE

SEQ ID NO: 99084 - protein, 252 aa, Setaria italica
  Transcript Sequence Number=SeqID_33110
  Gene Ontology: Mol. function=nucleic acid binding
  Pfam annotation: Domain name=RRM_1; Domain location=190-250; Score =22.1; E_value=0.0018; Accession=PF00076.14; Description=RNA recognition motif. (a.k.a. RRM, RBD, o
MTASATDDGTSPAPNVTEGETPAAADVGAAVEEGEKMNVGVTAAVEEKGEVEPEEDPDEQAEDEEEEEVDAGEVEAAYGMEAALMEPLVVLKPSEEDAPEELEGEKEKLDEEPEEVEEGKEECNGVEEKGLVDGSVEAVSDMNEVSKQEHGKCGNTNKDKVVDQSSNVSDSGRSKSDDAQNYELAGGLEIFVDGLPKDCVEEDIAMVFSQCGEVKSVRIIKNSSTEKSLLIAFVCYITDKCNIFASFRLMNS

SEQ ID NO: 99085 - protein, 217 aa, Setaria italica
  Transcript Sequence Number=SeqID_33111
  Gene Ontology: Mol. function=nucleic acid binding; Cellular component= ribonucleoprotein complex
  Homolog annotation: Hit_ID=B9SKE9; Match level="QueryCoverage=99%, HitCoverage=27%, E-value=2e-36, Identity=37%"; Hit description=RNA binding protein, putative
  Pfam annotation: Domain name=RRM_1; Domain location=154-217; Score =2.1; E_value=0.13; Accession=PF00076.14; Description=RNA recognition motif. (a.k.a. RRM, RBD, o
  Pfam annotation: Domain name=RRM_1; Domain location=3-52; Score=6.5; E_value=0.049; Accession=PF00076.14; Description=RNA recognition motif. (a.k.a. RRM, RBD, o
  Pfam annotation: Domain name=RRM_1; Domain location=62-132; Score =9.2; E_value=0.028; Accession=PF00076.14; Description=RNA recognition motif. (a.k.a. RRM, RBD, o
  Pfam module annotation: Pfam domain module=RRM_1::RRM_1::RRM_1; Domain location=154-217::3-52::62-132
MSGEVKSVRIIKNSSTEKSKDIAFVCYASIEAAKKALVEFKEGIEVKGEKVRVSACQDNSTLYLGNICKGWTKDQVLTTLKSIGIQECKITFPTYKGGCRGFAFLKFASHYYARAAFRRLMKPDAIFGTDRSAKVSFYQTTIKPSENVIEAKKVYLEYVPLSWDEDKVKECCQQYGKILKVDLFQISKNMESETFSFVEFSSSKSALACVEGINNTK

SEQ ID NO: 99086 - protein, 110 aa, Setaria italica
  Transcript Sequence Number=SeqID_33112
LLLLTVTGMISINFILTRSTWAALTHAPRYISFTPGKLSLILVQDMCPDLSQGACIRTTPRTYPLISLWVNSILQWKPPVPLTGKCHSTSTASFLKITVPVLVLLASLCT

SEQ ID NO: 99087 - protein, 80 aa, Setaria italica
  Transcript Sequence Number=SeqID_33113
MSKKNSLAKRKKQYEFDLKREKEAKEQQAKKLQAKKSKMKIDGGDKKRKGGQFKVGKKKVKTKLSALAKAKAAQAMEVDK

SEQ ID NO: 99088 - protein, 55 aa, Setaria italica
  Transcript Sequence Number=SeqID_33114
  Subcellular localization annotation: CTP_CleavageSite=21; ConfidenceScore=5.17e-01
TRTDSPVLAAAATVTARSLLVAAAGAAEATTASSGVYRRLKQSRVRRLGMARRML

SEQ ID NO: 99089 - protein, 157 aa, Setaria italica
  Transcript Sequence Number=SeqID_33115
  Gene Ontology: Cellular component=integral to membrane
  Homolog annotation: Hit_ID=B9SEZ5; Match level="QueryCoverage=78%, HitCoverage=18%, E-value=1e-52, Identity=78%"; Hit description =Endosomal P24A protein, putative
MNIHQVIGKVCLELPIMVKGWVFSTLLVVFLVFAPPCGAFYLPGSYMHTYRQGEEIGAKVNSLTSIETELPFSYYSLPYCRPKDGIKKSAENLGELLMGDQIDNSPYRFRVNVNESLYLCTTNPLGEADVKLLKQRSRDLYQVNMILDNLPVRRFTE

SEQ ID NO: 99090 - protein, 83 aa, Setaria italica
  misc_feature (83)..(83): Xaa can be any naturally occurring amino acid
  Transcript Sequence Number=SeqID_33116
RACEFLLSQVILTDLYILDINFNILISSSCLKIIVYQLSTLEMVSHRIWTCVQNVKLDCFVRMWFSWSIAIYQTLAPEQFGLX

SEQ ID NO: 99091 - protein, 89 aa, Setaria italica
  Transcript Sequence Number=SeqID_33117
  Gene Ontology: Mol. function=transcription factor activity; Cellular component=chromatin; Biological process=regulation of transcription, DNA-dependent
  Homolog annotation: Hit_ID=B6UC13; Match level="QueryCoverage=100%, HitCoverage=16%, E-value=2e-33, Identity=83%"; Hit description=PWWP domain containing protein
ADGPAALILHFSSPEAIPSVDDINSIFRIHGPIVEGETEITKKSKIAKVVFSKRADAERAFSSPGKYSAFGPSLVTYEIQCMPSAPQVS

SEQ ID NO: 99092 - protein, 376 aa, Setaria italica
  misc_feature (62)..(62): Xaa can be any naturally occurring amino acid
  Transcript Sequence Number=SeqID_33118
  Gene Ontology: Mol. function=transcription factor activity; Cellular component=chromatin; Biological process=regulation of transcription, DNA-dependent
  Homolog annotation: Hit_ID=B6UC13; Match level="QueryCoverage=100%, HitCoverage=65%, E-value=1e-92, Identity=58%"; Hit description=PWWP domain containing protein
  Pfam annotation: Domain name=AT_hook; Domain location=89-101; Score =14.5; E_value=0.084; Accession=PF02178.11; Description=AT hook motif
LPDPPHYTLELGLLPLTPIHPPPKSTTTTTRDEAPSSRRGRKRKEEAVKEDDSDEDWDPRKXGATDSESDLDIDRKRGSRGRGSGAPRGRPRGRPRKTDACRDTRLKDEEMEDKLEYPSAADMLLQLLSVAADPVNASYDSVPLIVSFFSKHKDNEAPSVYQDKELLDTFGCKKGRKKSAGSLGPATKAEADNDNEQLMAADGQRGRRKSAGSLYSARKAEDSYWCDIIISDFDDGDSDYEGRKRKRPSQNTNRSANKKMKQEETPQDRASADPPADAKSLASADPSADGPAALILHFSSPEAIPSVDDINSIFRIHGPIVEGETEITKKSKIAKVVFSKRADAERAFSSPGKYSAFGPSLVTYEIQCMPSAPQVS

SEQ ID NO: 99093 - protein, 52 aa, Setaria italica
  Transcript Sequence Number=SeqID_33119
RGLSNNPNQNHDRLRTIQATGSCVSEDSESALAMADHMNTLRIGPSFVILFP

SEQ ID NO: 99094 - protein, 55 aa, Setaria italica
  Transcript Sequence Number=SeqID_33120
RSCYYVTKATKSQHKHFIPVRRIERGEFNSYGQMQASMKRLTQTFLNSGAGMHLG

SEQ ID NO: 99095 - protein, 61 aa, Setaria italica
  Transcript Sequence Number=SeqID_33121
KAEHSSLCSLQCSNLLDLSPFCHSFLFHSTSTILIDYSFTVYFLTSWNFYVVRWKRNHQIP

SEQ ID NO: 99096 - protein, 210 aa, Setaria italica
  Transcript Sequence Number=SeqID_33122
  Gene Ontology: Mol. function=protein serine/threonine kinase activity; Cellular component=ubiquitin ligase complex
  Homolog annotation: Hit_ID=B9RDS7; Match level="QueryCoverage=39%, HitCoverage=16%, E-value=1e-10, Identity=37%"; Hit description =Receptor protein kinase, putative
LLSYLAFCRRAQVQATLLRTENDQIHDGILNLVNHYRITKLIMGSTPDNCFKLKYGKESLMASNAPAFCQIWFVWRGRQIWTREASAAIDNNAPVHYQDDAMTTKRIRFSSYSNNTETRLDEGHVTGEALMTVDLNQGTVSDYDALGAREANHFYSMNMAKWQDAEPALNSTFFSDSSVHMDTLPFYSKEVLDRNLKHVMMEADESRKEA

SEQ ID NO: 99097 - protein, 53 aa, Setaria italica
  Transcript Sequence Number=SeqID_33123
LECKEAPTVNDVKEGKEAVGSVGMIKQQAEKKGRITPKKIWGPVQVEEDKEKG

SEQ ID NO: 99098 - protein, 95 aa, Setaria italica
  Transcript Sequence Number=SeqID_33124
REEKRGQQRTAAGSQTACLLVAAGRSAGDSYVLSRFRSHHPAEAAAAVDDGFPMLAARSPSPSFHAHDRLPPPAHDIAERLRHLRDLRRAPPPHG

SEQ ID NO: 99099 - protein, 95 aa, Setaria italica
  misc_feature (12)..(12): Xaa can be any naturally occurring amino acid
  Transcript Sequence Number=SeqID_33125
  Subcellular localization annotation: CTP_CleavageSite=34; ConfidenceScore=5.37e-01
PAAEKLMPPPPXPAGSYTRGSNLRAASSFPSRASASTAAAGDTRHGSHHPPHHHRSVEERSGGGQKRSLPDKAHKVRRWTPSCTWSPRTAITTTT

SEQ ID NO: 99100 - protein, 193 aa, Setaria italica
  Transcript Sequence Number=SeqID_33126
  Pfam annotation: Domain name=DUF1639; Domain location=118-167; Score =118.9; E_value=1.6e-32; Accession=PF07797.6; Description=Protein of unknown function (DUF1639)
HQSTTTRPTTLVPLLPQLANHRIIAATTTTAISSSSLTPVPIHPPHHHRSVEERSGGGQKRSLPDKAHKSAMDAILHMESKNSHHHHHDSPLTANGAVAAGEKLGAERFELPRIYISLSRKEKEDDFLAMKGTKLPQRPKKRAKNVDKTLQFVFPGMWLSDLTKGRYEVREKKCVKKKRRGLKGMESMDSDSE

SEQ ID NO: 99101 - protein, 417 aa, Setaria italica
  Transcript Sequence Number=SeqID_33127
  Gene Ontology: Mol. function=cation transmembrane transporter activity; Cellular component=integral to membrane; Biological process=calcium ion transport
  Homolog annotation: Hit_ID=Q6K1C4; Match level="QueryCoverage=99%, HitCoverage=99%, E-value=0.0, Identity=88%"; Hit description =Vacuolar cation/proton exchanger 3
  Pfam annotation: Domain name=Na_Ca_ex; Domain location=273-406; Score= 136.5; E_value=8.5e-38; Accession=PF01699.16; Description =Sodiumcalcium exchanger protein
  Pfam annotation: Domain name=Na_Ca_ex; Domain location=82-229; Score =103.9; E_value=5.6e-28; Accession=PF01699.16; Description =Sodiumcalcium exchanger protein
  Pfam module annotation: Pfam domain module=Na_Ca_ex::Na_Ca_ex; Domain location=273-406::82-229
  Subcellular localization annotation: CTP_CleavageSite=87; ConfidenceScore=5.02e-01
MEIPQIEMGGFKVNSPQVPNGGLRPTMAGSWDSRRTVERTLRSIRIVIFTSKLNLLMPFGPASIILHFTSRRHGLVFLFSMLGITPLAERLGYATEQLALYTGPTVGGLLNATFGNATEMIIAVYALKNGMIRVVQQSLLGSILSNMLLVLGCAFFAGGIIHRNKDQVFSKATAVVNSGLLLMAVMGLMFPAVLHFTHSEARQGASEVSLSRFSSCIMLVAYASYLYFQLSGRSNIYSPIGSEEVPTEDAAEEDEEAEIGMWEAVTWLAVLTLWVSVLSEYLVNAIEGASDSLNLPVAFISVILLPIVGNAAEHASAIMFAMKDKLDITLGVAIGSSTQISMFVIPFCVVIGWMMGQKMDLNFQLFETASLFITVLVVAFMLQDGTANYLKGLMLILCYLIVAASFFVHVDPQSSDG

SEQ ID NO: 99102 - protein, 62 aa, Setaria italica
  Transcript Sequence Number=SeqID_33128
  Gene Ontology: Mol. function=ubiquitin-protein ligase activity; Cellular component=ubiquitin ligase complex; Biological process =ubiquitin-dependent protein catabolic process
  Homolog annotation: Hit_ID=B6SV52; Match level="QueryCoverage=100%, HitCoverage=8%, E-value=3e-19, Identity=69%"; Hit description =Ubiquitin-protein ligase
METNSDEAMGTSRHNSHPKVHSTMCNELSLMLDKVSSILPSIEAAQPGCKAGVEELCNLYNI

SEQ ID NO: 99103 - protein, 99 aa, Setaria italica
  Transcript Sequence Number=SeqID_33129
  Gene Ontology: Mol. function=heat shock protein binding; Biological process=protein folding
  Homolog annotation: Hit_ID=Q10MW6; Match level="QueryCoverage=100%, HitCoverage=14%, E-value=7e-38, Identity=75%"; Hit description=DnaJ domain containing protein, expressed
DGALRAGKVNCDNEKSLCKKAGVSLGKSARLFVYSYATTEKGSLHEYSGEHDAKSLKTFCQEHLPRFSKRVDIGQFSFPPNVLPNLPQVLLLSSKKDTP

SEQ ID NO: 99104 - protein, 63 aa, Setaria italica
  Transcript Sequence Number=SeqID_33130
MPVLRSAARRAREAQGSPPEAAAEAPEAAAPAPAPPPAETRRRATRAAARAEEREREEIRTPN

SEQ ID NO: 99105 - protein, 210 aa, Setaria italica
  Transcript Sequence Number=SeqID_33131
  Gene Ontology: Mol. function=translation initiation factor activity; Cellular component=ribonucleoprotein complex; Biological process =translational initiation
  Homolog annotation: Hit_ID=B9RK73; Match level="QueryCoverage=91%, HitCoverage=95%, E-value=7e-60, Identity=63%"; Hit description =Density-regulated protein, putative
  Pfam annotation: Domain name=SUI1; Domain location=113-195; Score =92.8; E_value=1.2e-24; Accession=PF01253.14; Description=Translation initiation factor SUI1
GEPPAAAAMAAEKPAPVRVLYCGVCGLPAEYCEFGPDFERCKPWLRAHAPGVYPDDLIAPSSSGGGGDKDVDKLGERLQGVGISDGSTSSAAGDASASKPEEVKRLPGGKVKKKEKQEVVIEKIVRNKRKCVTVVKGLELFGVKLSDASKKLGKKFATGASVVKGPTEKEQIDVQGDISYDIVEFITDTWPDVPESAIFFIEDGRKVPAA

SEQ ID NO: 99106 - protein, 105 aa, Setaria italica
  Transcript Sequence Number=SeqID_33132
  Subcellular localization annotation: CTP_CleavageSite=64; ConfidenceScore=5.13e-01
PLLLACLTVPRPPPRRPEPHGGTRNPKPAPLARGLPPAYARRRLIGLGRRRSPGFVGPARRLLRAAETAPLGNGGRWRQAGEGVGGAGAARGEDCMVHGGHGGVA

SEQ ID NO: 99107 - protein, 64 aa, Setaria italica
  Transcript Sequence Number=SeqID_33133
NNCYNQFKFMSCLLQDTYVVSSSSYGTLEIEPARNSAWYFYFGNRQKHIGFETDFTRIFFITFV

SEQ ID NO: 99108 - protein, 113 aa, Setaria italica
  Transcript Sequence Number=SeqID_33134
  Gene Ontology: Mol. function=translation elongation factor activity; Cellular component=cytoplasm; Biological process=translational elongation
  Homolog annotation: Hit_ID=B9FBM7; Match level="QueryCoverage=90%, HitCoverage=23%, E-value=2e-45, Identity=87%"; Hit description =Elongation factor 1-alpha
  Pfam annotation: Domain name=GTP_EFTU_D3; Domain location=1-96; Score= 166.7; E_value=7e-47; Accession=PF03143.9; Description=Elongation factor Tu C-terminal domain
MNHPGQIGNGYAPVLDCHTSHIAVKFAELVTKIDRRSGKELEKEPKFLKNGDAGMVKMVPTKPMVVETFSEYPPLGRFAVRDMRQTVAVGVIKSVEKKDPTGAKVTKAAAKKK

SEQ ID NO: 99109 - protein, 89 aa, Setaria italica
  Transcript Sequence Number=SeqID_33135
RRRRQGLGLTEAEAPPPRRLPSPRHRQPPRPPQAKFAFKIHLASTPLPVRRHCHGGKPFKWQEIHETESNLVINRGDQPTGRLLPVAAF

SEQ ID NO: 99110 - protein, 95 aa, Setaria italica
  Transcript Sequence Number=SeqID_33136
RERRIQLSFFRLVRPVPTLHLNWFSAIKYGAINARCHVGKKMRWQRVNEERCKNMEKPDLTQDMVLTRSLMKNKRGKRGEKIYYGPMSRNHGFKV

SEQ ID NO: 99111 - protein, 195 aa, Setaria italica
  Transcript Sequence Number=SeqID_33137
  Gene Ontology: Mol. function=transferase activity; Cellular component= chloroplast
  Homolog annotation: Hit_ID=B9RFB6; Match level="QueryCoverage=97%, HitCoverage=75%, E-value=3e-37, Identity=32%"; Hit description =Pentatricopeptide repeat-containing protein, putative
  Pfam annotation: Domain name=PPR; Domain location=117-151; Score =38.4; E_value=2.8e-08; Accession=PF01535.12; Description=PPR repeat
  Pfam annotation: Domain name=PPR; Domain location=12-46; Score=42.8; E_value=1.4e-09; Accession=PF01535.12; Description=PPR repeat
  Pfam annotation: Domain name=PPR; Domain location=152-186; Score =26.8; E_value=8.9e-05; Accession=PF01535.12; Description=PPR repeat
  Pfam annotation: Domain name=PPR; Domain location=47-81; Score=45.8; E_value=1.7e-10; Accession=PF01535.12; Description=PPR repeat
  Pfam annotation: Domain name=PPR; Domain location=82-116; Score=18.2; E_value=0.034; Accession=PF01535.12; Description=PPR repeat
  Pfam module annotation: Pfam domain module=PPR::PPR::PPR::PPR::PPR; Domain location=117-151::12-46::152-186::47-81::82-116
YWRTLGLACTVSTLNSVLNGFCKNGMMVEAEDWIDGMAQNGIKPNVVTYNTLVNGYRRLGKMEEAVAVKEAMAGKGISPNVNTYNCLLAGITSSSDRRSVSGLLNEMKDKGVRADVVTYNVLIGALCCKGEVWNAVKLLDEMFVVGLEPKHLTYNTIINGFCEKGDIKAVHEIKNRMNKCKKRANVATLLIVVFF

SEQ ID NO: 99112 - protein, 106 aa, Setaria italica
  Transcript Sequence Number=SeqID_33138
  Subcellular localization annotation: CTP_CleavageSite=66; ConfidenceScore=5.61e-01
LFHPSCVPPPPSRPVPKTHFFPSLLSYLLPRLRVPVHSSPLPLFPNNAAVEAACAQPPAVLDPRPSTAARAEPRYRAGTEKKTQEAWPPRQAGASNARAHPRQGVG

SEQ ID NO: 99113 - protein, 88 aa, Setaria italica
  Transcript Sequence Number=SeqID_33139
  Gene Ontology: Mol. function=transferase activity, transferring glycosyl groups; Cellular component=membrane; Biological process =cell wall biogenesis
  Homolog annotation: Hit_ID=B9RLW2; Match level="QueryCoverage=73%, HitCoverage=11%, E-value=3e-16, Identity=56%"; Hit description =Galactoside 2-alpha-L-fucosyltransferase, putative
LLLRYLLHPSNPVWGLVTRYYHSYLAPATRRIGVQIRMFGFGSIPVDDMYNQILACSRQERILPETDDGDGDAAAAVADTDTGGKTTA

SEQ ID NO: 99114 - protein, 105 aa, Setaria italica
  Transcript Sequence Number=SeqID_33140
  Gene Ontology: Mol. function=oxidoreductase activity; Biological process=oxidation reduction
  Homolog annotation: Hit_ID=B6SZL1; Match level="QueryCoverage=99%, HitCoverage=38%, E-value=2e-37, Identity=69%"; Hit description =Tropinone reductase 2
LISKPAMEFTAEDYSRLMATNLESCFHLSQLAHPLLLNTSIAGGGSIVHISSIASVMALPELTLYSIAKGGMNQLTRSLAAEWARDNVRVNCVAPGLIETDMSKG

SEQ ID NO: 99115 - protein, 174 aa, Setaria italica
  Transcript Sequence Number=SeqID_33141
  Gene Ontology: Mol. function=oxidoreductase activity; Biological process=oxidation reduction
  Homolog annotation: Hit_ID=B6SZL1; Match level="QueryCoverage=100%, HitCoverage=65%, E-value=3e-69, Identity=72%"; Hit description =Tropinone reductase 2
  Pfam annotation: Domain name=adh_short; Domain location=1-99; Score= -42.1; E_value=0.0081; Accession=PF00106.17; Description=short chain dehydrogenase
TFAGKLDILVNNAAQLISKPAMEFTAEEYSRLMATNLESCFHLSQLAHPLLRNAAVAGCGSIVHISSIASVIGYPWEALYSTAKGGLNQLTRSLAAEWACDKIRVNCIAPGTIMTDMVKDAPAGALEQEVSRIPMRRTGEPAEVASAVSFLCMPAASYITGQVICIDGGRTMSA

SEQ ID NO: 99116 - protein, 98 aa, Setaria italica
  misc_feature (14)..(14): Xaa can be any naturally occurring amino acid
  Transcript Sequence Number=SeqID_33142
  Gene Ontology: Mol. function=ribonuclease P activity; Biological process=tRNA 5'-leader removal
  Homolog annotation: Hit_ID=Q2QZQ0; Match level="QueryCoverage=100%, HitCoverage=11%, E-value=3e-36, Identity=75%"; Hit description =Ribonucleases P/MRP protein subunit POP1 containing protein, expressed
MERRWGFVLPVGAXGRGRGSRSVLKRLKNGTIVHDASYFIPVELDGPEDSLLSILRMVLRPSPVDKTPELKHLQDQVMRGVCYENAMLCGVGSPRSQI

SEQ ID NO: 99117 - protein, 186 aa, Setaria italica
  misc_feature (10)..(10): Xaa can be any naturally occurring amino acid
  misc_feature (35)..(35): Xaa can be any naturally occurring amino acid
  misc_feature (64)..(64): Xaa can be any naturally occurring amino acid
  misc_feature (84)..(84): Xaa can be any naturally occurring amino acid
  Transcript Sequence Number=SeqID_33143
  Homolog annotation: Hit_ID=Q7XVP6; Match level="QueryCoverage=100%, HitCoverage=34%, E-value=7e-48, Identity=52%"; Hit description =OSJNBa0050F15.1 protein
  Pfam annotation: Domain name=DUF295; Domain location=123-174; Score =35.5; E_value=2.1e-07; Accession=PF03478.10; Description=Protein of unknown function (DUF295)
LWQPGMTSWXVCSGPPLDGPKDIAFYQGKLYVLQXSFRTDLFAFVLKEDDRGIVISRVEHCMTXATPPHPMEQNGFLRCNMVVXRENLLLIMRYYDSNYMEQDSKIIKVEVFALDVSKNPYRLTRVRSFNGDSIFIGSGSSKSFPASLHDGAEGDLIYFVPEYWSPTDRFVYNMRDGKMRPFSAKL

SEQ ID NO: 99118 - protein, 83 aa, Setaria italica
  Transcript Sequence Number=SeqID_33144
  Subcellular localization annotation: CTP_CleavageSite=67; ConfidenceScore=5.45e-01
GAPEPEVVHAGKRTAGGSAPRPSSCPSTPWPTMMDTDRSLLCSAMQSLSNSSLGHYSIPLPLSTGMRAAGRRRCRTVWPASAA

SEQ ID NO: 99119 - protein, 58 aa, Setaria italica
  Transcript Sequence Number=SeqID_33145
MEHFNYKALAALSATLLLLLAPHLMAADPDPLQDFCVADLNGKPTVNGYPCQPSSSAG

SEQ ID NO: 99120 - protein, 116 aa, Setaria italica
  misc_feature (11)..(11): Xaa can be any naturally occurring amino acid
  Transcript Sequence Number=SeqID_33146
RLCHGMQHLNXFGHSSMLAHQQAPHLKYPWSSSEPSHGGSGGLAGSKRPFWSTAGDEKAATLPDNVGAVMSDPNKFSVAIAAAINSFMGKDSGKDGESSSSKSSNKWGVVESLPPP

SEQ ID NO: 99121 - protein, 421 aa, Setaria italica
  Transcript Sequence Number=SeqID_33147
  Gene Ontology: Mol. function=nucleic acid binding; Cellular component= ribonucleoprotein complex; Biological process=nuclear mRNA splicing, via spliceosome
  Homolog annotation: Hit_ID=B6TV58; Match level="QueryCoverage=53%, HitCoverage=50%, E-value=7e-83, Identity=72%"; Hit description =Heterogeneous nuclear ribonucleoprotein A3-like protein 2
  Pfam annotation: Domain name=RRM_1; Domain location=149-218; Score =45.7; E_value=1.8e-10; Accession=PF00076.14; Description=RNA recognition motif. (a.k.a. RRM, RBD, o
  Pfam annotation: Domain name=RRM_1; Domain location=48-117; Score =80.5; E_value=6.2e-21; Accession=PF00076.14; Description=RNA recognition motif. (a.k.a. RRM, RBD, o
  Pfam module annotation: Pfam domain module=RRM_1::RRM_1; Domain location=149-218::48-117
TRDDVLRLLEPLSRDQLADIAAAAALVSAHALDAVRAAADRDPALRKLFVRGLGWETTSDSLRSIFSAYGDLEEAVVITDKNTGRSKGYGFVTFRHADSAVLALKEPSKKIDGRMTVTQLAAAGAAGGPSGGAAGSGGAPVADVSLRKIFVGNVPADMSSERLLAHFASYGEIEEGPLGFDKQTGKFRGFALFVYKTPEGAQASLVDSVKVIDGHQLVCKLAIEGKKGKQGQSQQSGPGNQQQQQQMLQGGPQDMQGGLGLGPGPQMGAQYGGPGSGLSSFGAFGGVGGGFGGPNPYGNMPSSMGGGGAGGLGSMGGQVPTGLGGAGPGAFGPGGLGGGSFGGSSQFGAGGMGAYGGLGMGGGSMYRMQQGGGGLPAGAFGEGGNYPLPGSGFRGQDPQGGMSPGPGGRAPPMYPNVPPYF

SEQ ID NO: 99122 - protein, 60 aa, Setaria italica
  Transcript Sequence Number=SeqID_33148
  Gene Ontology: Mol. function=chlorophyllase activity; Biological process=chlorophyll catabolic process
  Homolog annotation: Hit_ID=Q2R1W1; Match level="QueryCoverage=100%, HitCoverage=6%, E-value=1e-12, Identity=58%"; Hit description=NB-ARC domain containing protein
MELATAALGSLLPKLDTLLRDEYKLQKGVRGEIRFLQAEMESMQAALERVSSLPAHQIDD

SEQ ID NO: 99123 - protein, 217 aa, Setaria italica
  misc_feature (13)..(13): Xaa can be any naturally occurring amino acid
  Transcript Sequence Number=SeqID_33149
  Gene Ontology: Mol. function=hydrolase activity, acting on ester bonds; Cellular component=plasma membrane; Biological process =metabolic process
  Homolog annotation: Hit_ID=O81020; Match level="QueryCoverage=98%, HitCoverage=41%, E-value=4e-76, Identity=64%"; Hit description =Phosphatidylglycerol specific phospholipase C
  Pfam annotation: Domain name=Phosphoesterase; Domain location=1-90; Score=-130.3; E_value=0.033; Accession=PF04185.6; Description =Phosphoesterase family
TLMVLTYDEHGGXFDHVPPPSTGVPSPDGIVGPPPYNFTFDRLGVRVPAILISPWIEKGTVVHGPNGPTQTSQYEHSSIPATVKKLFDLPQDFLTKRDAWAGTFESVVQTRTEPRTDCPEQLPMPTRIRQTEANEEAKLSEFQQEIIQLASVLNGDHELTSLQDRIRDKMNVREGIAYMRGAVKRYFEAGMSAKRMGVDDEQIVKMRPSLTTRIERP

SEQ ID NO: 99124 - protein, 90 aa, Setaria italica
  Transcript Sequence Number=SeqID_33150
  Subcellular localization annotation: CTP_CleavageSite=73; ConfidenceScore=5.70e-01
PSHPRLPQPKAARKPAAMPPPPPRPAPPRPPPASSASPHATAATPPSPPRLPPPPPPHPGPPRPPQVSRASPRATAGTPPSPPHPPPPPP

SEQ ID NO: 99125 - protein, 70 aa, Setaria italica
  Transcript Sequence Number=SeqID_33151
MAVPVEITRRAIMSPKPDCDDAVGRMVPLTVFDRAATDGYVPAVFAWTAQAAPANTAVVDGLLATVARFP

SEQ ID NO: 99126 - protein, 219 aa, Setaria italica
  Transcript Sequence Number=SeqID_33152
  Gene Ontology: Mol. function=nucleic acid binding; Cellular component= ribonucleoprotein complex; Biological process=mRNA processing
  Homolog annotation: Hit_ID=B6T531; Match level="QueryCoverage=84%, HitCoverage=71%, E-value=3e-80, Identity=85%"; Hit description =Ribonucleoprotein A
  Pfam annotation: Domain name=RRM_1; Domain location=136-206; Score =100.2; E_value=7.3e-27; Accession=PF00076.14; Description=RNA recognition motif. (a.k.a. RRM, RBD, o
  Pfam annotation: Domain name=RRM_1; Domain location=42-112; Score =94.3; E_value=4.3e-25; Accession=PF00076.14; Description=RNA recognition motif. (a.k.a. RRM, RBD, o
  Pfam module annotation: Pfam domain module=RRM_1::RRM_1; Domain location=136-206::42-112
AAAAGWRPLAPVRAAAAVAEELEAEVQAGGEEDEEFSADLRIFVGNLPFSVDSAQLAGLFEQAGSVEMVEVIYDKLTGRSRGFGFVTMSSVEEVEVAVEQFNGYVLDGRSLKVNSGPAPPREQSSPRGPRGEANRVYVGNLSWGVDNSALANLFNKQGEVLEARVIYDRESGRSRGFGFVTYGSSEEVENAISNLDGADLDGRQIRVTVAESRPPRGQY

SEQ ID NO: 99127 - protein, 122 aa, Setaria italica
  Transcript Sequence Number=SeqID_33153
  Gene Ontology: Mol. function=transferase activity, transferring glycosyl groups; Biological process=metabolic process
  Homolog annotation: Hit_ID=B9G5Y2; Match level="QueryCoverage=100%, HitCoverage=11%, E-value=1e-51, Identity=76%"; Hit description =Phosphoglycerate kinase
FMEGVLHVLPAHVEELLRRVVVDPPSTCLVVDTFFVWPATLARKLGVPYVSFWTEPALIFSLYYHMDLLTKHGHFNCKEPRKDTITYIPGVPSIEPTELMSYLQETDTTSVVHRIIFKAFDE

SEQ ID NO: 99128 - protein, 499 aa, Setaria italica
  Transcript Sequence Number=SeqID_33154
  Gene Ontology: Mol. function=protein serine/threonine kinase activity; Biological process=protein amino acid phosphorylation
  Homolog annotation: Hit_ID=Q60DG4; Match level="QueryCoverage=95%, HitCoverage=49%, E-value=1e-86, Identity=46%"; Hit description =Serine/threonine-protein kinase Nek4
RKYQLFLYIAYVCLLVPVLQSPIAEHNPKIKTAGPSTPEPAKLITENGAVASGKIKSKTPPATRRPSPQRQAGVGAPSLPVTVTRRAYTKVTIEREKTPERPSCCSDNALSNPSCNVMISMNPSEGQHMKLDGLQAKSTNLWEFFSVSTKEHSSACSNSTVGCTENMDHSELSDPNSPVSLISPCTGSAPNTVNEEDDLITTEISTDKIIVTNNGGSILRSALEPSFLSSEQEFVSKDDAQSSQHEKSTTFQSGEDKFTVQELLSSAPEAPPILSALEVAPSISLAPEVAPIPATKSTLLESPISLQSWKKHVVSHLNPPADDVAQTTRQSTFRVNDEQQPTQESVQREAQSTDIIKLLNVVPEDADARSSSSNTLPPARTSSVTATSHVSEANAAPTVQVTSALVKLSAATSEISNGMKEEAPPTKEVLDVTSFRQRAEALEGLLELSADLLENQRLEELAIVLKPFGKNKVSPRETAIWLARSFKGMMSDDAGRPSL

SEQ ID NO: 99129 - protein, 52 aa, Setaria italica
  Transcript Sequence Number=SeqID_33155
FCLLQLACKHWMGVLMRVLWIFRGQCNKIAIFVLLYLVPPLNFVQVFHSGYR

SEQ ID NO: 99130 - protein, 96 aa, Setaria italica
  Transcript Sequence Number=SeqID_33156
  Gene Ontology: Mol. function=transcription regulator activity; Cellular component=nucleus; Biological process=regulation of transcription
  Homolog annotation: Hit_ID=Q7XVB7; Match level="QueryCoverage=78%, HitCoverage=27%, E-value=3e-25, Identity=64%"; Hit description =OSJNBa0072D21.7 protein
  Pfam annotation: Domain name=HLH; Domain location=22-71; Score=36.8; E_value=8.5e-08; Accession=PF00010.18; Description=Helix-loop-helix DNA-binding domain
AARDDDGADGDGASPVTRKRRDRSKTIVSERKRRVRMKEKLYELRSLVPNITKMDKASIIADAVVYVKNLQAHARKLKEEVSTLEARPRSPRQGQQ

SEQ ID NO: 99131 - protein, 102 aa, Setaria italica
  misc_feature (18)..(18): Xaa can be any naturally occurring amino acid
  Transcript Sequence Number=SeqID_33157
  Gene Ontology: Mol. function=structural constituent of ribosome; Cellular component=ribonucleoprotein complex; Biological process =translation
  Homolog annotation: Hit_ID=Q9SWI6; Match level="QueryCoverage=100%, HitCoverage=63%, E-value=8e-27, Identity=66%"; Hit description=50S ribosomal protein L29, chloroplastic
  Pfam annotation: Domain name=Ribosomal_L29; Domain location=68-102; Score=9.2; E_value=0.0022; Accession=PF00831.15; Description =Ribosomal L29 protein
  Subcellular localization annotation: CTP_CleavageSite=59; ConfidenceScore=5.78e-01
MATMSLAAASPLTSTPRXIGAPAPLTAFLGLRSGVAQATRFPGLAMSSKPAEPRAAAVVAMAKREQELEEIRGMTTEQLEEEVVDLKGELFLLRLKRSARQE

SEQ ID NO: 99132 - protein, 70 aa, Setaria italica
  Transcript Sequence Number=SeqID_33158
HIQILAADFYILPAPFQLPVVFFSPLALFWLSAECMSRERHHHPFVSFTENKQVAPQNRSIQLAPPPFPS

SEQ ID NO: 99133 - protein, 210 aa, Setaria italica
  Transcript Sequence Number=SeqID_33159
  Gene Ontology: Mol. function=structural molecule activity; Cellular component=plasma membrane; Biological process=lipid transport
  Homolog annotation: Hit_ID=B6SUF8; Match level="QueryCoverage=100%, HitCoverage=100%, E-value=8e-93, Identity=81%"; Hit description=VAP27
  Pfam annotation: Domain name=Motile_Sperm; Domain location=8-115; Score=148.8; E_value=1.6e-41; Accession=PF00635.18; Description=MSP (Major sperm protein) domain
MSAEAGELLGIDPIELRFPFELNKQISCTLQLTNKTDKQVAFKVKTTSPKKYCVRPNNGIVAPRSTADVVVTMQAQREAPPDMQCKDKFLVQSAIVAKEIMPKEVTGDMFTKESGNVVDEVKLKVVYITPSTQSEGFEDGSLGSLSYQEPFALISKLMEEKNSAVELNNKLRQELDLLRRDISRQHGGYSLVLVLVVAIMGILLGLLMKR

SEQ ID NO: 99134 - protein, 35 aa, Setaria italica
  Transcript Sequence Number=SeqID_33160
TFILEATRTEYTKHSFVFSGGFSITVVISFILSFL

SEQ ID NO: 99135 - protein, 637 aa, Setaria italica
  Transcript Sequence Number=SeqID_33161
  Gene Ontology: Cellular component=cell wall
  Homolog annotation: Hit_ID=B3G3W8; Match level="QueryCoverage=51%, HitCoverage=49%, E-value=4e-46, Identity=33%"; Hit description =DUF288 containing protein
  Pfam annotation: Domain name=DUF288; Domain location=224-553; Score= -127.6; E_value=0.00053; Accession=PF03385.9; Description=Protein of unknown function, DUF288
ARVKGWQLLAVGDSHTPTGWELKGAIFLSLELQAQLGYRSVDFLPYGSHVRKTAGYLFAIQHGAKVIFDADDRAEVPGNDLGKHFDVDLGSGVTNHPVLLQYSHADPNRTVVNPYVHFGQRSVWPRGLPLDKVGEVAHEVFYTEVFSGRQFIQQGLSDGLPDVDAVFYFTRKPPTSAFDLRFDSEAPKVALPQGMMAPVNSFNTLFQSPAFWGLMMPVSVSSMAADVIRGYWAQRILWEIGGYVAFYPPTIYRKDHIQAYPFAEEKDLHVNVGRLIKFLNEWRSNKRTLFEKILDLSYAMAEEGFWTEQDVRLTAAWLQDLLAVGYRQPRLMSLEIDRQRATIGEGDMKEFVPKKLPSVHLGVDEIGTVNYEIGNLIKWRKNFGNVVMIMHVSGPVDRTALEWRLLYGRIFKTVIILAEQSNAELAVERSTLSHAYKYLPKVFERYSGADGFLFLQDHMILNYWNLLQADKDKLWITNKIAHSWVTVPLESNKEEWFVKQGALVKQVIGNSPVHFQTNYKENMGEEKIAFCGSELFYVPRRFVEDFGDLVGLVGSLDLHHKIAVPMFFLAMDSPQNFDSDALAGTVFKTQLPANATFSTIYTAQAPAVFPVKVMNEIDFIKVIRLMSKGDPLLMELV

SEQ ID NO: 99136 - protein, 194 aa, Setaria italica
  Transcript Sequence Number=SeqID_33162
  Gene Ontology: Mol. function=nucleoside-triphosphatase activity; Cellular component=membrane; Biological process=transport
  Homolog annotation: Hit_ID=Q7XML5; Match level="QueryCoverage=100%, HitCoverage=20%, E-value=1e-100, Identity=90%"; Hit description =OSJNBa0040D17.13 protein
AGICLGTIAKLSDKTFGMPGYIYTIIAVSLLCKIAALRSFSLERLQYFRERESGMSSLAYFLARDTIDHFSTVVKPIIYLSMFYYFNNPRSTIGDNYIVLLALVYCVTGIGYTFAICFSPGSAQLCSALIPVVLTLLSTQKSTPIFLKRLCYSKWALEGFIIVNAKKYPGVWLITRCGLLFNSSFDIHNYKLCI

SEQ ID NO: 99137 - protein, 101 aa, Setaria italica
  Transcript Sequence Number=SeqID_33163
  Gene Ontology: Mol. function=transferase activity, transferring groups other than amino-acyl groups
  Homolog annotation: Hit_ID=Q01MP2; Match level="QueryCoverage=92%, HitCoverage=20%, E-value=1e-29, Identity=66%"; Hit description =H1005F08.2 protein
DGDGAEELMLVQVTRFKCGSLAVGHTIHHAVADGRAACNFLLAWGQATRGAAFDPVPAHDRASLFLPRQPPRVAFEHRGVEFKPREEKKPCRRSDVAVVDN

SEQ ID NO: 99138 - protein, 85 aa, Setaria italica
  Transcript Sequence Number=SeqID_33164
  Subcellular localization annotation: CTP_CleavageSite=38; ConfidenceScore=5.05e-01
LKKSDHVHTRQSGAVCLEPARQRSRTRPTKLCAWGRCLCQEAFPGSQANKLVQTTVLQKRKNTEVSYALMAFPESRTSDEGISSP

SEQ ID NO: 99139 - protein, 44 aa, Setaria italica
  Transcript Sequence Number=SeqID_33165
CRGSVLYWQQNFQMVAHILLTNYNLNWELLGVQRCLICALDQIY

SEQ ID NO: 99140 - protein, 161 aa, Setaria italica
  Transcript Sequence Number=SeqID_33166
  Gene Ontology: Mol. function=protein tyrosine/serine/threonine phosphatase activity; Cellular component=extracellular space; Biological process=protein amino acid dephosphorylation
  Homolog annotation: Hit_ID=B9S842; Match level="QueryCoverage=64%, HitCoverage=29%, E-value=3e-28, Identity=54%"; Hit description=Dual specificity protein phosphatase, putative
VLGLVKLVLFIPDKKADREAGLEVNQKPTETCQETSAESDVNPEKRTSDPGVIYRCKKCRRMLATQEFVVTHEVGAGGKCFNRGKRSVDDDDKKPECPCIYVEPMKWMQTVEEGYVANKLFCMGCKARLGQFNWAGMQCCCGAWVIPAFQLTKSKIDECSM

SEQ ID NO: 99141 - protein, 95 aa, Setaria italica
  Transcript Sequence Number=SeqID_33167
ESRGAPGEMAVEIIGTASQVQTAQQLVQNFMAEAATPGPPPASNPPAPPVDPSYGSYPPPYGAAPSYGSSAAAGPPPQYNGGSYGGPTYPPSYGY

SEQ ID NO: 99142 - protein, 109 aa, Setaria italica
  Transcript Sequence Number=SeqID_33168
  Gene Ontology: Mol. function=RNA binding
  Homolog annotation: Hit_ID=B6U2B4; Match level="QueryCoverage=100%, HitCoverage=20%, E-value=5e-44, Identity=80%"; Hit description =Nucleic acid binding protein
  Pfam annotation: Domain name=KH_1; Domain location=59-108; Score =39.2; E_value=1.7e-08; Accession=PF00013.21; Description=KH domain
EEQANLFSEETGNQYNEEPANSYQEELENAYSIEDTSRQDNSQVNVEDNRWPGWPGESVFRILVPAQKVGAIIGRKGEFIKKMCEESKARIKILDGPPGVPERAVVTAV

SEQ ID NO: 99143 - protein, 189 aa, Setaria italica
  Transcript Sequence Number=SeqID_33169
  Gene Ontology: Mol. function=electron carrier activity; Biological process=oxidation reduction
  Homolog annotation: Hit_ID=B6ST66; Match level="QueryCoverage=100%, HitCoverage=37%, E-value=5e-51, Identity=60%"; Hit description =Cytochrome P450 CYP92C5
  Subcellular localization annotation: CTP_CleavageSite=22; ConfidenceScore=5.00e-01
MELTLPLSMALALIITFVVLVLSSVVWRRRSHRKALNLPPGPRGWPVFGSLGLLADTLPPHRVLAKLAARHGPLMHLRFGSFHVVVASSEETARLVLKTHDLAFADRPPTAFGEILGYGYQGIVQTPYGPYWRMARKLCATELFSARRIDAFEHARAQEMRALTRGVFERAGAVLQVKEHLLNFLRIVV

SEQ ID NO: 99144 - protein, 84 aa, Setaria italica
  Transcript Sequence Number=SeqID_33170
  Gene Ontology: Mol. function=oxidoreductase activity; Cellular component=cell wall
  Homolog annotation: Hit_ID=Q53RM2; Match level="QueryCoverage=100%, HitCoverage=33%, E-value=7e-34, Identity=85%"; Hit description=FAD binding domain, putative
TVSSAYGVFPDRSTCRAAAVAYPSTEGELVRAVARAVASGTKMKVTTRYSHSIPQLACPGSGGGEGLAISTRRLDRVVSVDAAR

SEQ ID NO: 99145 - protein, 73 aa, Setaria italica
  Transcript Sequence Number=SeqID_33171
RHRIWWVADLVRWMSRAKRRSAEKQNGGDDEDESSTVQLRSEARMKPEERARRAALELHENLERCIASVDGSG

SEQ ID NO: 99146 - protein, 159 aa, Setaria italica
  misc_feature (88)..(88): Xaa can be any naturally occurring amino acid
  Transcript Sequence Number=SeqID_33172
IPEREAHRCRIDQYDDDERSRGRRRHRGTVPVHGLAVAGAGAPGAHLQVPGVWQAHPLVPHATAPPHPRLRPRHLPLPRLPAATLAGXGMLRDGVQQEARRGPGARAVPADGRQEVALLQVGLPGLQILREAHAPRQEPFKKACGNVARHAGAVLQRLL

SEQ ID NO: 99147 - protein, 73 aa, Setaria italica
  Transcript Sequence Number=SeqID_33173
  Gene Ontology: Mol. function=transferase activity, transferring glycosyl groups; Cellular component=nucleus; Biological process =protein amino acid ADP-ribosylation
  Homolog annotation: Hit_ID=O50017; Match level="QueryCoverage=94%, HitCoverage=9%, E-value=2e-21, Identity=75%"; Hit description=Poly [ADP-ribose] polymerase 2
YAKKYTWLEMDYGETDKETNKTEKKDSITDQIKETKLETRIAQFISLICNISMMKQQMVEIGYNADNSPPLES

SEQ ID NO: 99148 - protein, 101 aa, Setaria italica
  Transcript Sequence Number=SeqID_33174
  Gene Ontology: Mol. function=transferase activity, transferring glycosyl groups; Cellular component=integral to membrane; Biological process=protein amino acid glycosylation
  Homolog annotation: Hit_ID=B6TVN8; Match level="QueryCoverage=100%, HitCoverage=17%, E-value=5e-33, Identity=70%"; Hit description=Beta 1, 3 galactosyltransferase
STAQLSWGLLRPLLCRSDALPGTATGVLEAADAWRNLTLAVAAAAADEEGRAQGPSCPASVEGDLGAGRAGIPCGLAEGAAVTVVGVPREGAARFMVEMVG

SEQ ID NO: 99149 - protein, 156 aa, Setaria italica
  Transcript Sequence Number=SeqID_33175
  Gene Ontology: Mol. function=fructose-bisphosphate aldolase activity; Cellular component=chloroplast; Biological process=metabolic process
  Homolog annotation: Hit_ID=Q53P96; Match level="QueryCoverage=100%, HitCoverage=42%, E-value=5e-78, Identity=91%"; Hit description =Fructose-bisphosphate aldolase
  Pfam annotation: Domain name=Glycolytic; Domain location=44-156; Score=-56.7; E_value=3.3e-10; Accession=PF00274.11; Description =Fructose-bisphosphate aldolase class-I
  Subcellular localization annotation: CTP_CleavageSite=37; ConfidenceScore=5.33e-01
MASATLLKSSFLPKKSEWGAARQLTAPRPVTVSVVVRASAYADELVKTAKTIASPGRGILAMDESNATCGKRLASIGLENTEANRQAYRTLLVTAPGLGNYISGAILFEETLYQSAVDGRRIVDILTEQGIVPGIKVDKGLVPLAGSNDESWCQGL

SEQ ID NO: 99150 - protein, 241 aa, Setaria italica
  Transcript Sequence Number=SeqID_33176
  Gene Ontology: Mol. function=fructose-bisphosphate aldolase activity; Cellular component=chloroplast; Biological process=metabolic process
  Homolog annotation: Hit_ID=Q40677; Match level="QueryCoverage=100%, HitCoverage=62%, E-value=1e-129, Identity=93%"; Hit description =Fructose-bisphosphate aldolase, chloroplastic
  Pfam annotation: Domain name=Glycolytic; Domain location=44-241; Score=282.5; E_value=9.7e-82; Accession=PF00274.11; Description =Fructose-bisphosphate aldolase class-I
  Subcellular localization annotation: CTP_CleavageSite=37; ConfidenceScore=5.33e-01
MASATLLKSSFLPKKSEWGAARQLTAPRPVTVSVVVRASAYADELVKTAKTIASPGRGILAMDESNATCGKRLASIGLENTEANRQAYRTLLVTAPGLGNYISGAILFEETLYQSAVDGRRIVDILTEQGIVPGIKVDKGLVPLAGSNDESWCQGLDGLAAREAAYYQQGARFAKWRTVVSIPNGPSELAVKEAAWGLARYAAISQDNGLVPIVEPEILLDGEHGIERTFEVAQKVWAETF

SEQ ID NO: 99151 - protein, 330 aa, Setaria italica
  Transcript Sequence Number=SeqID_33177
  Gene Ontology: Mol. function=transferase activity, transferring glycosyl groups; Cellular component=integral to membrane; Biological process=metabolic process
  Homolog annotation: Hit_ID=C4MF44; Match level="QueryCoverage=95%, HitCoverage=63%, E-value=1e-139, Identity=73%"; Hit description=UDP -glycosyltransferase UGT98B4
LNFNLVTTFVSIVVIELINFPGFPTPLQLTKERCPGSLYVCGLEQIRKNIYEEEIKSTGVVMNSFQELEALYIESFEQITGKKVWTVGPMCLCNQDINTMAERGNKASMDEAQCLQWLDSMKPGSVTFISFGSLACTAPQQLTELGLGLEASKKPFVWVIKAGDKFPQVEEWLAEGFEERVKDRGLIIRGWAPQVLILWHKAIGCFMTHCGWNSTIESICAGVPMITWPHFADQFVNERLVVDVLKTGVEVGVKAVTQWGHEQKEVTVTRDAVEIAVSKLMDEGEAAEEMRMRAKEFGVKARKALEEGGSSYNNINLLIQEMGNKANASG

SEQ ID NO: 99152 - protein, 46 aa, Setaria italica
  Transcript Sequence Number=SeqID_33178
NYPSLNNNAHSYSDDDNKYTTSSHISDDKFQTYTCTCINNLVYTHI

SEQ ID NO: 99153 - protein, 82 aa, Setaria italica
  misc_feature (39)..(39): Xaa can be any naturally occurring amino acid
  Transcript Sequence Number=SeqID_33179
MKQFEDLPAKITHPADPAHELNLTDGVPFVCDGCKEPGXSPRYTHDYGSHSFDLHTCCALAKGTMRHPLFGDLAFEFRTNAP

SEQ ID NO: 99154 - protein, 226 aa, Setaria italica
  misc_feature (92)..(92): Xaa can be any naturally occurring amino acid
  Transcript Sequence Number=SeqID_33180
  Homolog annotation: Hit_ID=B6TVE6; Match level="QueryCoverage=88%, HitCoverage=53%, E-value=4e-47, Identity=49%"; Hit description =Dirigent-like protein
  Pfam annotation: Domain name=Dirigent; Domain location=69-226; Score =83.6; E_value=7.2e-22; Accession=PF03018.6; Description=Dirigent -like protein
ATGNAAGAASGGAAAANVGAAGAGAGDHPLTFFMHDILGGSQPSGRIVTGVVASAAANGQLPFARPNTNIFPIQGAVPLPQGATSLINGNNXPYVAGLGGTSGGGVLVQNNGNPVNGGNKNIPFVNAGDLPSGVTLQNLLFGTTTVIDDELTEGHELGAGVIGRAQGFYVASSQDGTSKTIVLTAMFEGPDAPHGDTLSFFGVHRMAAPESHIAIIGGTGKYENAK

SEQ ID NO: 99155 - protein, 102 aa, Setaria italica
  misc_feature (15)..(15): Xaa can be any naturally occurring amino acid
  misc_feature (46)..(46): Xaa can be any naturally occurring amino acid
  misc_feature (74)..(74): Xaa can be any naturally occurring amino acid
  Transcript Sequence Number=SeqID_33181
MVWFLTWVAGQSSVXNLKVSAEVSMLLINTILTEIENGTYPKGSFXKNPKGSFLNVDVPTDAAHHKGYKITKEXYQTANMDGEKDSELAAPSENDLFKRVLS

SEQ ID NO: 99156 - protein, 106 aa, Setaria italica
  Transcript Sequence Number=SeqID_33182
  Gene Ontology: Mol. function=acid-amino acid ligase activity; Cellular component=intracellular; Biological process=ubiquitin -dependent protein catabolic process
  Homolog annotation: Hit_ID=Q9AUK0; Match level="QueryCoverage=94%, HitCoverage=13%, E-value=1e-49, Identity=94%"; Hit description =Putative ubiquitin protein ligase
  Pfam annotation: Domain name=HECT; Domain location=1-106; Score= -119.9; E_value=0.00094; Accession=PF00632.17; Description=HECT -domain (ubiquitin-transferase)
MVLISVLILQVIKGLKPTERCLLLKFVTSCSRAPLLGFKYLQPSFTIHKVPCDVTLWASIGGQDVDRLPSASTCYNTLKLPTYKRSSTLRSKLLYAISSNTGFELS

SEQ ID NO: 99157 - protein, 269 aa, Setaria italica
  misc_feature (39)..(39): Xaa can be any naturally occurring amino acid
  Transcript Sequence Number=SeqID_33183
  Gene Ontology: Mol. function=acid-amino acid ligase activity; Cellular component=intracellular; Biological process=ubiquitin -dependent protein catabolic process
  Homolog annotation: Hit_ID=Q9AUK0; Match level="QueryCoverage=98%, HitCoverage=34%, E-value=1e-142, Identity=92%"; Hit description =Putative ubiquitin protein ligase
  Pfam annotation: Domain name=HECT; Domain location=1-269; Score =340.1; E_value=4.4e-99; Accession=PF00632.17; Description=HECT -domain (ubiquitin-transferase)
AKHSSEGILLDYTFSPVFVQKLLGRYNFLDELSTLDSSXELYRNLMQLKHYDGDVEDLCLDFTVTEELGGKRIIHELRPGGKSTSVTNDNKLHYVHAMADFKLNRQILPFANAFYRGLSDLISPSWLSLFNANEFNQLLSGGLQDFDVDDLRNNTKYTGGYTVSSRTVKLFWEVIKGLKPTERCLLLKFVTSCSRAPLLGFKYLQPSFTIHKVPCDVTLWASIGGQDVDRLPSASTCYNTLKLPTYKRSSTLRSKLLYAISSNTGFELS

SEQ ID NO: 99158 - protein, 206 aa, Setaria italica
  Transcript Sequence Number=SeqID_33184
  Gene Ontology: Mol. function=RNA-directed DNA polymerase activity; Biological process=RNA-dependent DNA replication
  Homolog annotation: Hit_ID=Q2QZQ0; Match level="QueryCoverage=100%, HitCoverage=24%, E-value=2e-88, Identity=73%"; Hit description =Ribonucleases P/MRP protein subunit POP1 containing protein, expressed
  Pfam annotation: Domain name=POPLD; Domain location=101-197; Score =13.8; E_value=1.2e-06; Accession=PF08170.4; Description=POPLD (NUC188) domain
VPNADEAPSEVGNMLSSMWMQPGKHDIFLSDCRELWDSSQSINPPVAEEVLCMEKQHERIKFFCLDSGNDQGQTTQEKDSFSRSCPVVLLKHAKKGMPSLGWSIILPLSWVKPFWLFLVSHGAHVIGLRERRWIATKFRMPCFPYDYPDSKAYASYMSKEAAVFDKAVECRPAAKRPPTVPMPPLWHCIMACFHKDDGILSGLEVD

SEQ ID NO: 99159 - protein, 162 aa, Setaria italica
  Transcript Sequence Number=SeqID_33185
  Gene Ontology: Mol. function=zinc ion binding
LNSNTHDDTQPRIKSRVPKVNKPNTVTGQNVVDAATDKGNAAPKGPEPPAVMQASQIQKGGAERGIVPAGYIGVPANVQQFVANQAAIRPSIVYMVPSGVDPHAFGNGVLMPVMYQQMFQVPQKPNGTVQDTSANGKKKRPRGQKLTETSQLSNGTPGPSSG

SEQ ID NO: 99160 - protein, 83 aa, Setaria italica
  misc_feature (7)..(7): Xaa can be any naturally occurring amino acid
  Transcript Sequence Number=SeqID_33186
RCQSFSXDRPHAQPLPIPGGCPRAKRTVSEVIESKPILEKRGKPPLFLPLPKPDPLHKRPGNSEIASEIVVASVSSNCSADNE

SEQ ID NO: 99161 - protein, 115 aa, Setaria italica
  misc_feature (14)..(14): Xaa can be any naturally occurring amino acid
  Transcript Sequence Number=SeqID_33187
EDYRLIKLTIIDFXKSKREKVLVVECRGHDAARLQNIDHLHGWEDDIVGLVEKEHGNQKVLLSFECETLKADKDAEDHIIKYMPNLRGLDAVVNIGKMCITGINLNEDDEPRGDN

SEQ ID NO: 99162 - protein, 138 aa, Setaria italica
  Transcript Sequence Number=SeqID_33188
  Gene Ontology: Mol. function=DNA binding; Cellular component=nucleus; Biological process=regulation of transcription, DNA-dependent
  Homolog annotation: Hit_ID=Q01HK1; Match level="QueryCoverage=67%, HitCoverage=32%, E-value=1e-42, Identity=88%"; Hit description =H0303A11-B0406H05.5 protein
  Pfam annotation: Domain name=B3; Domain location=55-138; Score=85.9; E_value=1.5e-22; Accession=PF02362.13; Description=B3 DNA binding domain
  Subcellular localization annotation: CTP_CleavageSite=48; ConfidenceScore=5.50e-01
ASASASTSASASASGTSSAAPFRSASGDGAGASGSGGGGGGGGAVDVEAVEKEHMFDKVLTPSDVGKLNRLVIPKQYAEKYFPLDAAGSEKGLLLSFEDTAGKHWRFRYSYWNSSQSYVMTKGWSRFVKEKRLVAGDT

SEQ ID NO: 99163 - protein, 44 aa, Setaria italica
  Transcript Sequence Number=SeqID_33189
  Gene Ontology: Mol. function=DNA binding; Cellular component=nucleus
VDSLHGLGDGGICGWGFDAAVDQMDVQGGGFCDLLSMTEFLGIN

SEQ ID NO: 99164 - protein, 48 aa, Setaria italica
  Transcript Sequence Number=SeqID_33190
  Gene Ontology: Mol. function=zinc ion binding
  Homolog annotation: Hit_ID=B9RW74; Match level="QueryCoverage=89%, HitCoverage=4%, E-value=7e-11, Identity=67%"; Hit description =Vacuolar membrane protein pep3, putative
MDAAGGGQLFSVDPLERQAARGHGVVTSMAAGSDVIVLGTSRGWLVRH

SEQ ID NO: 99165 - protein, 183 aa, Setaria italica
  Transcript Sequence Number=SeqID_33191
FFFSFCLLFSFSFFFPLTQRHKPQEEEEEEGGGFYKWRYAILVKSNHIIPTHPQTRPGQPHRRTARSTNHPSIQRLGVRIGTAARGATSLCSGGPCAGARATLAAFGQDVRLTCCDGFGWVGAAGAIAAGRGGGAPARGARHGTRASTSAARTTRRPWRGWRARSCRPASRPARPGLPAGPPA

SEQ ID NO: 99166 - protein, 50 aa, Setaria italica
  Transcript Sequence Number=SeqID_33192
APLWKRQETNYQKMNSILDKRHIYSGSKTEYIIDTSMAYTRPHQNIHLHS

SEQ ID NO: 99167 - protein, 120 aa, Setaria italica
  misc_feature (46)..(46): Xaa can be any naturally occurring amino acid
  Transcript Sequence Number=SeqID_33193
  Gene Ontology: Mol. function=protein dimerization activity; Cellular component=nucleus; Biological process=regulation of transcription, DNA-dependent
  Homolog annotation: Hit_ID=B6TN24; Match level="QueryCoverage=75%, HitCoverage=27%, E-value=8e-38, Identity=85%"; Hit description=BZIP transcription factor
MIQAMASQAGGGGGGDAGSAQRGQIQGLARQGSLYNLTLDEVQNHXLGEPLLSMNFDDLLKTVFPDGVDPNGPVIGKPDPASSLQRQGSIVMPPQLSKKTVDEVWKGIQDGPETSAREGG

SEQ ID NO: 99168 - protein, 223 aa, Setaria italica
  Transcript Sequence Number=SeqID_33194
  Homolog annotation: Hit_ID=B6SYZ1; Match level="QueryCoverage=98%, HitCoverage=44%, E-value=2e-88, Identity=77%"; Hit description =Pentatricopeptide repeat protein PPR566-6
  Subcellular localization annotation: CTP_CleavageSite=59; ConfidenceScore=5.19e-01
SDPMPQVKATPALMSRLLPAPALVKLRACGLYSHGHFPSTSRISCSSELSDRGSAKEVEAFEYSGETCAKNAADGDEGEYLGWSKEEIDAISALFDRPMRQKPLKPPNPAKQRALPLPLPHKTRLPVAPAPKQHVRLATRVALSSRASFSDQVRKNPEFLLGIAREIAAIPPEHGVSTVLDRWAKVPPKKGSLSLTIRELGHMGLPERALQTLCWAQRQKSCA

SEQ ID NO: 99169 - protein, 415 aa, Setaria italica
  misc_feature (409)..(409): Xaa can be any naturally occurring amino acid
  Transcript Sequence Number=SeqID_33195
  Gene Ontology: Mol. function=DNA-directed DNA polymerase activity; Cellular component=intracellular; Biological process=nucleobase, nucleoside, nucleotide and nucleic acid metabolic process
  Homolog annotation: Hit_ID=Q3LHS9; Match level="QueryCoverage=100%, HitCoverage=37%, E-value=1e-150, Identity=61%"; Hit description=DNA polymerase
  Pfam annotation: Domain name=3_5_exonuc; Domain location=2-202; Score= -19.6; E_value=0.0024; Accession=PF01612.12; Description=3'-5' exonuclease
FFHACDTEVANIDVKQETPVGHGKVTCFSIYSGTSGAEADFGNGKTCIWVDVLDGGQDVLMEFAPFFEDSSIRKIWHNYSFDSHVIENYGIKVSGFHADTMHLARLWDSSRRLDGGYSLEGLTNDHRVMGVVPKELQKIGKRSMKTIFGRKKIKKDGSEGKITAIEPVEILQREDRELWICYSSLDSMSTLRLYESLKSKLERKPWTFDGVPRGSMYDFYEEYWRPFGAVLVKMETAGMLVDRAYLSKIEKVAVAQRKLAADKFRKWASKYCPDAKYMNVNSDTQIRQLFFGGIENRCKPGEFLPTSKAIKVPNDETAVAEGKKVPKYRTIELFSIVEDLKTDIFTASGWPSVSGDALRNLAGKVPSDLVYTTDDVNDDECGCEAEISDCDLEDTSSYGTAYEAFGGGXKGKEAC

SEQ ID NO: 99170 - protein, 265 aa, Setaria italica
  misc_feature (217)..(217): Xaa can be any naturally occurring amino acid
  misc_feature (233)..(233): Xaa can be any naturally occurring amino acid
  Transcript Sequence Number=SeqID_33196
RFGNSKEETEDLPSEFAHPMKKANLSVAELLEDLQGRSSSPVGAASLRRHTGAKDWTASEKKTLAILGERSIDSEDPLEHITDGTSSEEEDVTENHLALVNKDVKHQTMADLFQEVFDPSNLEVAMLPMRSTGAGYHGRMQQIMQMEKDRHAEFVRQFNIEQGYLGGDSKGITVQIMSRSLEGKLTVCHCLFQEKSDSTITREASTDHAMSESRTMXTIIFSPKICDNVDLLXVGKHNSHLPPWKEIRLQEEDVILCTYFSHHGA

SEQ ID NO: 99171 - protein, 59 aa, Setaria italica
  Transcript Sequence Number=SeqID_33197
  Gene Ontology: Mol. function=hydrolase activity
  Homolog annotation: Hit_ID=O80475; Match level="QueryCoverage=67%, HitCoverage=14%, E-value=5e-12, Identity=70%"; Hit description =Putative acetone-cyanohydrin lyase
MEGGAKTTQHHFVLIHGVCHGAWCWYRVATALEAVGHRVTALDMAGCGASPGRGEEVAS

SEQ ID NO: 99172 - protein, 153 aa, Setaria italica
  Transcript Sequence Number=SeqID_33198
  Gene Ontology: Mol. function=pyridoxal phosphate binding; Cellular component=mitochondrion; Biological process=photorespiration
  Homolog annotation: Hit_ID=B6U6Q5; Match level="QueryCoverage=100%, HitCoverage=32%, E-value=4e-84, Identity=97%"; Hit description =Alanine--glyoxylate aminotransferase 2
  Pfam annotation: Domain name=Aminotran_3; Domain location=2-153; Score=-178.9; E_value=0.0019; Accession=PF00202.13; Description =Aminotransferase class-III
TAQKNWKFNVIQTGVHHAVNPDPYRGAFGSDAEKYVRDVQEIIEFGTTGQVAGFISEAIQGVGGIVEVSPGYLPLAYETVRKAGGLCIADEVQAGFARVGSHFWGFETHGVVPDIVTMAKGIGNGIPLGAVVTTPEIAQVLTRRCYFNTFGGN

SEQ ID NO: 99173 - protein, 121 aa, Setaria italica
  misc_feature (85)..(85): Xaa can be any naturally occurring amino acid
  misc_feature (107)..(107): Xaa can be any naturally occurring amino acid
  Transcript Sequence Number=SeqID_33199
  Homolog annotation: Hit_ID=Q5JLC8; Match level="QueryCoverage=95%, HitCoverage=5%, E-value=5e-39, Identity=78%"; Hit description =Putative THO complex 2
YGVRTLPPQKSRVALDSVVFVEEARREEELGSVLADIIAHLGQDITISGEYRNRLVKMTKSFVESSITAPRLLQERCEEFEGRFXLGEVEQSKLKGQDLKSKEVRVXNTRLLYQQTKFNLL

SEQ ID NO: 99174 - protein, 50 aa, Setaria italica
  Transcript Sequence Number=SeqID_33200
  Gene Ontology: Mol. function=ATPase activity, coupled to transmembrane movement of substances; Cellular component=integral to membrane; Biological process=transport
  Homolog annotation: Hit_ID=Q6J0P5; Match level="QueryCoverage=74%, HitCoverage=2%, E-value=2e-12, Identity=86%"; Hit description =Multidrug-resistance associated protein 3
MCDRDNSAMSDGKVVEYERPMKLMETEGSLFRELVKEYWSYTSNGNLNIS

SEQ ID NO: 99175 - protein, 30 aa, Setaria italica
  Transcript Sequence Number=SeqID_33201
CTVITVAHRIPTVMDCSMVLAMSDGMFLSH

SEQ ID NO: 99176 - protein, 218 aa, Setaria italica
  misc_feature (8)..(8): Xaa can be any naturally occurring amino acid
  misc_feature (12)..(12): Xaa can be any naturally occurring amino acid
  misc_feature (35)..(35): Xaa can be any naturally occurring amino acid
  misc_feature (43)..(43): Xaa can be any naturally occurring amino acid
  Transcript Sequence Number=SeqID_33202
  Gene Ontology: Mol. function=ATPase activity, coupled to transmembrane movement of substances; Cellular component=integral to membrane; Biological process=transport
  Homolog annotation: Hit_ID=Q6J0P5; Match level="QueryCoverage=100%, HitCoverage=14%, E-value=5e-95, Identity=78%"; Hit description =Multidrug-resistance associated protein 3
ADIYLLDXPFSXVDAHTATSLFNEYVMGALSDKTXLLVTHQVXDFLPVFDSILLMSDGEIIRSASYEDLLAYCQEFQNLVNAHKDTIGGSDLNKVTPNRAKEISIKETNDSHGSRYRETLKKSPADQLIKTEERDIGDTGLKPYIIYLCQSKGYLYASLCVISHLVFIAGQISQNSWMAANVQSTGISTLKLISVYIAIGVCTMFFLLSRSLAMVSLG

SEQ ID NO: 99177 - protein, 123 aa, Setaria italica
  Transcript Sequence Number=SeqID_33203
  Gene Ontology: Mol. function=ATPase activity, coupled to transmembrane movement of substances; Cellular component=integral to membrane; Biological process=transport
  Homolog annotation: Hit_ID=Q6J0P5; Match level="QueryCoverage=99%, HitCoverage=8%, E-value=8e-59, Identity=89%"; Hit description =Multidrug-resistance associated protein 3
  Subcellular localization annotation: CTP_CleavageSite=53; ConfidenceScore=5.53e-01
IARSLFSQLLNSLFRAPMSFFDSTPLGRVLSRVSSDLSIVDLDVPFAFMFSISASLNAYSNLGVLAVVTWQVLFISVPMIVLAIRLQRYYLASAKELMRINGTTKSALANHLGESVAGAITIR

SEQ ID NO: 99178 - protein, 983 aa, Setaria italica
  misc_feature (391)..(391): Xaa can be any naturally occurring amino acid
  Transcript Sequence Number=SeqID_33204
  Gene Ontology: Mol. function=ATPase activity, coupled to transmembrane movement of substances; Cellular component=integral to membrane; Biological process=transport
  Homolog annotation: Hit_ID=Q6J0P5; Match level="QueryCoverage=99%, HitCoverage=66%, E-value=0.0, Identity=88%"; Hit description =Multidrug-resistance associated protein 3
  Pfam annotation: Domain name=ABC_membrane; Domain location=415-689; Score=69.6; E_value=1.2e-17; Accession=PF00664.15; Description=ABC transporter transmembrane region
  Pfam annotation: Domain name=ABC_tran; Domain location=159-330; Score= 167.5; E_value=3.9e-47; Accession=PF00005.19; Description=ABC transporter
  Pfam annotation: Domain name=ABC_tran; Domain location=765-948; Score= 157.6; E_value=3.7e-44; Accession=PF00005.19; Description=ABC transporter
  Pfam annotation: Domain name=SMC_N; Domain location=754-952; Score= -134.0; E_value=0.098; Accession=PF02463.11; Description=RecFRecNSMC N terminal domain
  Pfam module annotation: Pfam domain module=ABC_membrane::ABC _tran::ABC_tran::SMC_N; Domain location=415-689::159-330::765 -948::754-952
LIHMKVLKLYAWEAHFKKVIEGLREVEYKWLSAFQLRRAYNSFLFWSSPVLVSAATFLACYLLKIPLDASNVFTFVATLRLVQDPIRQIPDVIGVVIQAKVAFTRITKFLDAPELNGQVRKKYCAGTEFPIVINSCSFSWDDNPSKPTLKNLNLVVKAGEKVAICGEVGSGKSTLLAAVLGEVPKTEGTIQVCGKIAYVSQNAWIQTGTVKDNILFGSSMDKQKYQETLERCSLVKDLEMLPYGDRTQIGERGVNLSGGQKQRVQLARALYQNADIYLLDDPFSAVDAHTATSLFNEYVMGALSDKTVLLVTHQVDFLPVFDSILLMSDGEIIRSASYEDLLAYCQEFQNLVNAHKDTIGGSDLNKVTPNRAKEISIKETNVTFKEKVEPXQDQLIKTEERDIGDTGLKPYIIYLCQSKGYLYASLCVISHLVFIAGQISQNSWMAANVQSTGISTLKLISVYIAIGVCTMFFLLSRSLAMVSLGVQTSRSLFSQLLNSLFRAPMSFFDSTPLGRVLSRVSSDLSIVDLDVPFAFMFSISASLNAYSNLGVLAVVTWQVLFISVPMIVLAIRLQRYYLASAKELMRINGTTKSALANHLGESVAGAITIRAFEEEDRFFQKNLELVDKNAGPYFYNFAATEWLIQRLETMSAAVLSFSAFVMALLPPGTFSPGFVGMALSYGLSLNMSFVFSIQNQCQLANQIISVERVNQYMDIPSEAAESIEENRPSPDWPQAGRVELRDLKIRYRQDAPLVLHGITCTFEGGDKIGIVGRTGSGKTTLIGALFRLVEPAGGKIIIDSVDITKIGLHDLRSRLGIIPQDPTLFHGTIRYNLDPLGQFSDQQIWEVLDKCQLLEAVQEKEQGLDSLVVEDGSNWSMGQRQLFCLGRALLRRCRILVLDEATASIDNATDAILQKTIRTEFKDCTVITVAHRIPTVMDCSMVLAMSDGKVVEYERPMKLMETEGSLFRELVKEYWSYTSNGNI

SEQ ID NO: 99179 - protein, 170 aa, Setaria italica
  Transcript Sequence Number=SeqID_33205
  Gene Ontology: Cellular component=integral to membrane
  Homolog annotation: Hit_ID=B6TN96; Match level="QueryCoverage=77%, HitCoverage=27%, E-value=3e-49, Identity=70%"; Hit description=AAP7
LIVPFFYGLGESEAEPDGGIGEGHDGGDNGEPRHVVEVGYEGEHSAPCDAHDEHFYMLLFGAAQLVLSFIPNFHNMTWLSVVAAIMSFTYATIGLGLGLAKTIENGTIKGSIAGVPMSTPAQKVWRVAQAIGDIAFAYPYTLVLLEIQDTLKSPPPESETMQKGNVIAVL

SEQ ID NO: 99180 - protein, 331 aa, Setaria italica
  Transcript Sequence Number=SeqID_33206
  Gene Ontology: Cellular component=integral to membrane
  Homolog annotation: Hit_ID=B9T659; Match level="QueryCoverage=94%, HitCoverage=68%, E-value=1e-127, Identity=67%"; Hit description =Amino acid transporter, putative
  Pfam annotation: Domain name=Aa_trans; Domain location=25-331; Score =174.4; E_value=3.3e-49; Accession=PF01490.10; Description =Transmembrane amino acid transporter protein
MAHDGSHSLELAAAPELDDDGHTPRTGNLWTCFAHIITAVIGCGVLALSWSVAQLGWVGGPVAMVCFAFVTYISAFLLSHCYRSPDLEKRQRNYTYMDAVRTHLGEKRTWLCGLLQYLNLYGTAIAYTITTATCLRAIKRANCYHNEGHGAPCDAHDEHFYMLLFGAAQLVLSFIPNFHNMTWLSVVAAIMSFTYATIGLGLGLAKTIENGTIKGSIAGVPMSTPAQKVWRVAQAIGDIAFAYPYTLVLLEIQDTLKSPPPESETMQKGNVIAVLATTFFYLGVGCFGYAAFGNAAPGNLLTGFGFYEPYWLIDFANACIVLHLLGGYQMF

SEQ ID NO: 99181 - protein, 46 aa, Setaria italica
  Transcript Sequence Number=SeqID_33207
ALQRLPPPPPSLGPLEPFWTAPLFCAFWDLATSAANFSRLANFSRQ

SEQ ID NO: 99182 - protein, 135 aa, Setaria italica
  misc_feature (28)..(28): Xaa can be any naturally occurring amino acid
  Transcript Sequence Number=SeqID_33208
  Gene Ontology: Mol. function=structural constituent of ribosome; Cellular component=intracellular; Biological process=translation
  Homolog annotation: Hit_ID=P50888; Match level="QueryCoverage=77%, HitCoverage=64%, E-value=2e-52, Identity=95%"; Hit description=60S ribosomal protein L24
  Pfam annotation: Domain name=Ribosomal_L24e; Domain location=9-69; Score=119.8; E_value=9.1e-33; Accession=PF01246.12; Description =Ribosomal protein L24e
LLSVFSWFRSIYPGKGIRFIRADSQVFXFANSKCKRYFHNRLKPAKLTWTAMYRKQHKKDIHAEAVKKRRRTTKKPYSRSIVGASLEVIQKKRAEKPEVRDAAREAALREIKERIKKTRVIQIVQSYVALVPFQR

SEQ ID NO: 99183 - protein, 102 aa, Setaria italica
  Transcript Sequence Number=SeqID_33209
  Gene Ontology: Mol. function=structural constituent of ribosome; Cellular component=intracellular; Biological process=translation
  Homolog annotation: Hit_ID=P50888; Match level="QueryCoverage=51%, HitCoverage=32%, E-value=4e-19, Identity=90%"; Hit description=60S ribosomal protein L24
LQDIHAEAVKKRRRTTKKPYSRSIVGATLEVIQKKRSEKPEVRDAAREAALRYVFHLSAELFLKFIIFWYMNFELVKLILLLFILLLPHCFSPCARKLFCLL

SEQ ID NO: 99184 - protein, 161 aa, Setaria italica
  Transcript Sequence Number=SeqID_33210
  Gene Ontology: Mol. function=structural constituent of ribosome; Cellular component=ribonucleoprotein complex; Biological process =translation
  Homolog annotation: Hit_ID=P50888; Match level="QueryCoverage=70%, HitCoverage=69%, E-value=1e-58, Identity=96%"; Hit description=60S ribosomal protein L24
  Pfam annotation: Domain name=Ribosomal_L24e; Domain location=3-73; Score=172.6; E_value=1.1e-48; Accession=PF01246.12; Description =Ribosomal protein L24e
MVLKTELCRFSGQKIYPGKGIRFIRADSQVFLFANSKCKRYFHNRLKPAKLTWTAMYRKQHKKDIHAEAVKKRRRTTKKPYSRSIVGASLEVIQKKRAEKPEVRDAAREAALREIKERIKKTKDEKKAKKAEVAKSQKAQNKGAVQKGSKGPKLGGGGGKR

SEQ ID NO: 99185 - protein, 105 aa, Setaria italica
  Transcript Sequence Number=SeqID_33211
  Gene Ontology: Mol. function=nucleoside-triphosphatase activity; Cellular component=membrane
  Homolog annotation: Hit_ID=B9P510; Match level="QueryCoverage=98%, HitCoverage=16%, E-value=3e-44, Identity=80%"; Hit description=White- brown-complex ABC transporter family (Fragment)
EWQPSFVTQSLVLTKRSFVNMYRDVGYYWLRFAIYIMLCICVGTIFYDVGNSYGSIQARGSMLNFVAAFLTFMAIGGFPSFVEDMKIFGRERLNGHYGVASFAIA

SEQ ID NO: 99186 - protein, 78 aa, Setaria italica
  Transcript Sequence Number=SeqID_33212
SSYLYSMIRDCFVMTDVAFSPNLHLVFQKSSQKYFLNYSPALPFYFSCWSCPYFPPTFPFPFKRLCCCFYQTHVVLLS

SEQ ID NO: 99187 - protein, 132 aa, Setaria italica
  Transcript Sequence Number=SeqID_33213
  Gene Ontology: Mol. function=nucleic acid binding; Cellular component= nucleus; Biological process=response to stress
  Homolog annotation: Hit_ID=Q99069; Match level="QueryCoverage=38%, HitCoverage=35%, E-value=8e-19, Identity=88%"; Hit description =Glycine-rich RNA-binding protein 1 (Fragment)
  Pfam annotation: Domain name=RRM_1; Domain location=21-69; Score =32.5; E_value=1.7e-06; Accession=PF00076.14; Description=RNA recognition motif. (a.k.a. RRM, RBD, o
GLLLAADGDEVAPADPPDPPGDVEESKIILDRDTQRSRGFGFVTFASEQAMRDAIEGMNGKELDGRSITVNEAQSRGGPPPRRKEEEEEGAGGDGPLQRVELAPQELRARLPRLPGLREPSWTDQEVRAHVL

SEQ ID NO: 99188 - protein, 91 aa, Setaria italica
  Transcript Sequence Number=SeqID_33214
PHVVHFLFYEFFGLAYEKMSVLSIDMSTKTMVSCYLYMNGNEILRRGDKCCQPDVDIDFVISKCLAPSPLPFPACEFPRFCNLSRKRKDME

SEQ ID NO: 99189 - protein, 130 aa, Setaria italica
  Transcript Sequence Number=SeqID_33215
RLLPPCTEPKFDYCRSDHRLSRRPSNVTPTPRLLNMISLGLWCGDKEEFVVAELTLYVPTIDRSQTKAFADICLLRSSSTDDQLGSKWDSWRVTIMSLTTPLLMISWNSPAGRPTAILPCSSSPPPSTTT

SEQ ID NO: 99190 - protein, 63 aa, Setaria italica
  misc_feature (28)..(28): Xaa can be any naturally occurring amino acid
  misc_feature (41)..(41): Xaa can be any naturally occurring amino acid
  misc_feature (45)..(45): Xaa can be any naturally occurring amino acid
  Transcript Sequence Number=SeqID_33216
RCCQCPWHCCRQCFRSNAKDIGFIKYRXRCCLAAVIENFTXSRNXSFNRRLNLCALAFCSDKE

SEQ ID NO: 99191 - protein, 102 aa, Setaria italica
  Transcript Sequence Number=SeqID_33217
LPDRYRRGIPIHPQVDIDRPHVVHFLFLEFGKAFEKMSVLSIDMSTKTVKSFYLYMDGNEILQPDDDIDFISSTSAYPTPLPFRPCEFPRFCYLSRKRKDME

SEQ ID NO: 99192 - protein, 154 aa, Setaria italica
  Transcript Sequence Number=SeqID_33218
  Subcellular localization annotation: CTP_CleavageSite=44; ConfidenceScore=5.19e-01
PIRNPKSSLVWSLDLEESGSRRSVPHTSRRLRLRLRLRLPLSLPAAGLQRLRRSPCPPPPRSGVPKWVLLEPYVFRRDDDESFPDESEAPIRASGTTSWGADFRIAFSLEEPPHISRLYAQLPGFPGPHEEEPLIMLATHRHLALLVVATTITT

SEQ ID NO: 99193 - protein, 121 aa, Setaria italica
  Transcript Sequence Number=SeqID_33219
NTTTWSILNPNNSVHGMIMIVLSKRRIKEDAPHPCSHSRDALDLLKFSAVLDEADVLGVAAEALPAAHEPVLPDQAVGVGAHAANPGSGAVVLGVRVPDVGVSHGGGGGGGGEEEVSTGKP

SEQ ID NO: 99194 - protein, 56 aa, Setaria italica
  Transcript Sequence Number=SeqID_33220
  Gene Ontology: Mol. function=structural constituent of ribosome; Cellular component=intracellular; Biological process=translation
  Homolog annotation: Hit_ID=B6T147; Match level="QueryCoverage=100%, HitCoverage=56%, E-value=7e-26, Identity=98%"; Hit description=40S ribosomal protein S29
  Pfam annotation: Domain name=Ribosomal_S14; Domain location=3-56; Score=80.5; E_value=6.2e-21; Accession=PF00253.13; Description =Ribosomal protein S14pS29e
MGHSNVWNSHPKNYGPGSRVCRVCANPHGLIRKYGLMCCRQCFRSNAKDIGFIKYR

SEQ ID NO: 99195 - protein, 93 aa, Setaria italica
  misc_feature (57)..(57): Xaa can be any naturally occurring amino acid
  misc_feature (75)..(75): Xaa can be any naturally occurring amino acid
  Transcript Sequence Number=SeqID_33221
  Gene Ontology: Mol. function=structural constituent of ribosome; Cellular component=intracellular; Biological process=translation
  Homolog annotation: Hit_ID=B6T147; Match level="QueryCoverage=100%, HitCoverage=91%, E-value=9e-34, Identity=80%"; Hit description=40S ribosomal protein S29
  Pfam annotation: Domain name=Ribosomal_S14; Domain location=3-56; Score=80.5; E_value=6.2e-21; Accession=PF00253.13; Description =Ribosomal protein S14pS29e
MGHSNVWNSHPKNYGPGSRVCRVCANPHGLIRKYGLMCCRQCFRSNAKDIGFIKYRXKMLPCCCHRELHLHQRKXSFNRRLNLCALAFCSDKE

SEQ ID NO: 99196 - protein, 415 aa, Setaria italica
  misc_feature (133)..(133): Xaa can be any naturally occurring amino acid
  Transcript Sequence Number=SeqID_33222
  Gene Ontology: Mol. function=receptor activity; Cellular component =endoplasmic reticulum lumen
  Pfam annotation: Domain name=DUF1618; Domain location=202-336; Score =75.8; E_value=1.6e-19; Accession=PF07762.6; Description=Protein of unknown function (DUF1618)
  Subcellular localization annotation: CTP_CleavageSite=55; ConfidenceScore=5.10e-01
GTTSWGAQFRIAFSLAKLPHISHLYAQLPVPGFLDRNVGTPLSIVATHRHLALVRVATRTSEMVTVQNFFIFTADEGPSSSLKALPLCTEPEFDYTRHSVRVPRFRRLPDGTPRLLNVRTWASGAEANSSWWXELTLFKPINHDKVFADICLLHSDRDQLGATWKSMRVEFLSTDDPDDADLFQISWWCTEAVIPFDKWLCWIDYHRGILFCDMSKLPNPPTVSFIWFPLDRLPISGNRTGTSTMCYRAVSVVDRGRALKFVNITRHDGIPFEALKPGTGFTITCHTLVLGRGSMAWKEDYTVTSGELWEANTPERLPRCILMFPQVDIDRPHVVHFLYIEFGYYACKKMWVVSIDMSTKTVESFSLYINGHEGLKTDDADLIDLIERKSVSPWPFLPCEFPKFLNLSRKREHME

SEQ ID NO: 99197 - protein, 515 aa, Setaria italica
  Transcript Sequence Number=SeqID_33223
  Gene Ontology: Mol. function=receptor activity; Cellular component =endoplasmic reticulum lumen
  Pfam annotation: Domain name=DUF1618; Domain location=299-426; Score =25.0; E_value=1.9e-07; Accession=PF07762.6; Description=Protein of unknown function (DUF1618)
RGPGVQDHPRSRHPEVPRLRLRHVRERAGDARRHRGDRRPSSSTAAVGGFPKWVLLEPYVFRRDDDESFPDESEAPIRASGTTSWGADFRIAFSLEEPPHISRLYAQLPGFPGPHEEEPLIMLATHRHLALLVVATTITTTNTTIITPRPSKPLVQNFFIFRANENNPSSSSLRLLPPCTEPKFDYCRSDHRLSRRPSNVTPTPRLLNMISLGLWCGDKEEFVVAELTLYVPTIDRSQTKAFADICLLRSSSTDDQLGSKWDSWRVTIMSPHNPSADDLLELSRWQTTAVIPFKKWLCWIDYNRGILFCDVSDKVRAPTVSFLWFPEDKSPLTRARKATSGTIGGVSVIDHGRLLKFVNVARHDGRAYGALQPGTGFTITCHTLVLGGSMAWKEDYTVTSDDLPDRYRRGIPIHPQVDIDWPHVVHFLFIEFGKAYEKMSVLSIDMSTKTVKSFYLYVDGNEILHDDKECLQPDDDIDFIRSTSLYPTPLPFLPCEFPTFCYLSRYVILLLPFYK

SEQ ID NO: 99198 - protein, 476 aa, Setaria italica
  Transcript Sequence Number=SeqID_33224
  Gene Ontology: Mol. function=nucleic acid binding
TLGNNIYFSRTESEGQPEENHKLMEVNQGFDVVTKTEFGSISNRKGESGNDLINAGVQNWLTLPLTVSYVNNDVTGSTDRLDLDQIMDEGASICQDHDIMPDMEQRGSIDALSGQDDSLNLCGNNTPQSDLLATKERNKDIDDETEAILPGYVSSVNVLDQYSFHTVDKPIDKPVLLSSHSIVVPGGELASSQVYVDPDHTYHSNTEDHVAVPSTKPDPLSSWIEAIVSEAKKEHQSCKSTQHSISSSDKLLAPKEDSRKAVSDSVVNSVVKSPPRINIASSTVSKVPAKQVALPSSSREPPRLNQNARHRTWRRDNVSSSISSLHVSQPSGLPPKLPIKKNGQSQNSYIRKGNALIRNPATGNHPHSSNLDAQNKLSKPVMRRSLNFVRKVDSNDAAAHSNLSVERPKTPPLPLHTKSISCAVNLLEPLSQTLQNQQLLETEKEDSNGQVISGVDNPLHRSEPLDAGKAVYVRPK

SEQ ID NO: 99199 - protein, 77 aa, Setaria italica
  Transcript Sequence Number=SeqID_33225
  Gene Ontology: Mol. function=metal ion binding
  Homolog annotation: Hit_ID=Q6ZKY1; Match level="QueryCoverage=53%, HitCoverage=15%, E-value=2e-16, Identity=95%"; Hit description=Zinc finger protein family-like
  Pfam annotation: Domain name=zf-C3HC4; Domain location=29-66; Score =37.2; E_value=6.4e-08; Accession=PF00097.17; Description=Zinc finger, C3HC4 type (RING finger)
VAGAEALELVEDDTEPGSGAGRGVVAGCCCVCMARAKGAAFIPCGHTFCRACARELLAGRGRCPLCNAAIVDVLDIF

SEQ ID NO: 99200 - protein, 118 aa, Setaria italica
  misc_feature (93)..(93): Xaa can be any naturally occurring amino acid
  Transcript Sequence Number=SeqID_33226
  Homolog annotation: Hit_ID=B6T1Y2; Match level="QueryCoverage=64%, HitCoverage=48%, E-value=8e-36, Identity=94%"; Hit description =Splicing factor, arginine/serine-rich 12
EEDNRHKKRKKNKHSDRNKGKERDSKERHSKEKEKSKRKDKDAVVKEISKDDYFAKNNEFATWLKEEKGKYFSDLSSESAHDLFLKFVKQWNXGKLPSQYYEGITSGPRSAHNWNIKA

SEQ ID NO: 99201 - protein, 80 aa, Setaria italica
  Transcript Sequence Number=SeqID_33227
APDGPLTAVAVRERRRVYALVEAGTTDGGKEWRIEEAAWKSESEGEMVVGLVFVGAALAIFMFWRFQMRQLAGNMNKKIR

SEQ ID NO: 99202 - protein, 105 aa, Setaria italica
  Transcript Sequence Number=SeqID_33228
  Gene Ontology: Mol. function=hydrolase activity, hydrolyzing O -glycosyl compounds; Cellular component=cytoplasm; Biological process= carbohydrate metabolic process
  Homolog annotation: Hit_ID=Q8W264; Match level="QueryCoverage=99%, HitCoverage=32%, E-value=4e-48, Identity=88%"; Hit description=Endo -1,3-beta-glucanase
  Pfam annotation: Domain name=Glyco_hydro_17; Domain location=1-103; Score=-30.4; E_value=3.5e-09; Accession=PF00332.10; Description =Glycosyl hydrolases family 17
NLFDAMVDAIYAALEKAGAPGVGVVVSESGWPSAGGFAASVENARAHNQGVIDHVRRGTPKRPGVLETYVFAMFNENQKPGEEIERHFGLFNPDKSPVYPITFPN

SEQ ID NO: 99203 - protein, 114 aa, Setaria italica
  Transcript Sequence Number=SeqID_33229
  Subcellular localization annotation: CTP_CleavageSite=39; ConfidenceScore=5.68e-01
VFFSFGTRRTAAPPATPIGIARSAPSRRDPPSIRRGGARARAGAAPLSSPARLPCSVSDAGAAPFPASPADPLWTDGRWTKERARPATPSPGRLPSPSRDVPSGRPSSSHPAPL

SEQ ID NO: 99204 - protein, 88 aa, Setaria italica
  Transcript Sequence Number=SeqID_33230
  Homolog annotation: Hit_ID=Q9LPN0; Match level="QueryCoverage=92%, HitCoverage=16%, E-value=3e-11, Identity=41%"; Hit description =F2J10.3 protein
MYVLFALKILPPSYRGISIRYFYYVRSALFGRLVVLGNGDQNKRPVNSSIQLEARVPLQICVSQKSSNLLNEEGTLPFAIDQLGIFWR

SEQ ID NO: 99205 - protein, 135 aa, Setaria italica
  Transcript Sequence Number=SeqID_33231
  Homolog annotation: Hit_ID=Q9LPN0; Match level="QueryCoverage=60%, HitCoverage=14%, E-value=1e-15, Identity=52%"; Hit description =F2J10.3 protein
MSLKLQLPQGLSFLRSVGWLEDRKVGSAAKQQLSPTLKLQTDKEVYRPGDSVIVTVEIHSPASLKDDAGQAVSGEDASSLLLDVLSFELKGIEKLDSQWFSVPKPLPGSKQRRGEHMFLDCSAPSLVSKVIIASG

SEQ ID NO: 99206 - protein, 118 aa, Setaria italica
  Transcript Sequence Number=SeqID_33232
  Subcellular localization annotation: CTP_CleavageSite=82; ConfidenceScore=5.12e-01
LLSLLLQIKANVSADLEGGYDSSKDEVSSISSYNPSKANPEFSLRNSLSMQSLSSRLSTSELFYNQLERPNFSSYSPIPRLSVSEISDDHVGASGSREERGEGELFRNYSANWRQELV

SEQ ID NO: 99207 - protein, 484 aa, Setaria italica
  misc_feature (43)..(43): Xaa can be any naturally occurring amino acid
  Transcript Sequence Number=SeqID_33233
  Homolog annotation: Hit_ID=Q9LPN0; Match level="QueryCoverage=97%, HitCoverage=88%, E-value=1e-110, Identity=47%"; Hit description =F2J10.3 protein
  Pfam annotation: Domain name=Rgp1; Domain location=19-430; Score= -10.0; E_value=6e-09; Accession=PF08737.2; Description=Rgp1
KLFVYAGQAVSEDASSLLLDVLSFELKGIEKLDSQWFSVPKPXPGSKQRRGEHMFLDCSAPSLVSKVIIASGQTKTYIVRVELPKILPPSYRGISIRYFYYVRSALFGRLVVLGNGDQNKRPVNSSIQLEARVPLQICVSQKSSNLLNEEGTLPFAIDQLGIFWREKDEDSEWIKANDNADLEEGYDSSKDEVSSVSSYNPSKANPEFSLRNSLSMQSLSSRLSTSEPFYNQVERPNFPSYSPIPRLSVSEISDDHDGGLVSPQRKLNHLLPDHPSNGQRFSPDSDVGLPLTPKNVDPAGSEGFTRGRSYNIRIDDQVLLRFSPKNSDSTYYFGDMIGGALTFFHGTGKRRCLEVSITLETSETINPRALHPSRRGSPTITKLHSEHHEVVADLHQTSFLFSIPIDGPMSFSTSKVTVQWSLRFEFFTTPEGTDPARYEHPLLVEKREKGEWVLPITVYAPPLRRRPTHGRNDRSVLPGNIFNS

SEQ ID NO: 99208 - protein, 84 aa, Setaria italica
  Transcript Sequence Number=SeqID_33234
QRNADNQLFAVVNRLAIVYSSQKQATYYQTRGVTRLVKLVAPQAHHKRESKCITNKMNITIRYFPWQRISQKSDSSQYSATPPV

SEQ ID NO: 99209 - protein, 152 aa, Setaria italica
  misc_feature (25)..(25): Xaa can be any naturally occurring amino acid
  Transcript Sequence Number=SeqID_33235
  Gene Ontology: Cellular component=plasma membrane
  Homolog annotation: Hit_ID=Q9SRX5; Match level="QueryCoverage=84%, HitCoverage=76%, E-value=5e-16, Identity=35%"; Hit description =F22D16.19 protein
  Pfam annotation: Domain name=DUF538; Domain location=16-127; Score =143.4; E_value=7.1e-40; Accession=PF04398.4; Description=Protein of unknown function, DUF538
PDGPAVAAAGISGQPSAYEMLEGFXLRTGILPDSVTGYTYRASDGAFEVFMGGDCEFDVDGGYRLTYRRRIYGNVEGGSIRNLGGVSVRMFLLNWGIDRVVMEDAGHLMFYVGPLSQAFPADNFEESPQCRGRRCGGVAAGDVGAAGGVAAM

SEQ ID NO: 99210 - protein, 91 aa, Setaria italica
  Transcript Sequence Number=SeqID_33236
TRTRRRAGFNSAAAASRRLTEREELELESGIFRGLCTRDLAWELGRGGGGLGESTNSGRVLEAGSTKASANSQGGSGCNLSRGFCGDDRWL

SEQ ID NO: 99211 - protein, 53 aa, Setaria italica
  Transcript Sequence Number=SeqID_33237
SCTKLGTNSSSNEGDNAIRTRKPAIYSDSSRNMPNTHPSISPQATHLQGQAMS

SEQ ID NO: 99212 - protein, 280 aa, Setaria italica
  misc_feature (145)..(145): Xaa can be any naturally occurring amino acid
  misc_feature (161)..(161): Xaa can be any naturally occurring amino acid
  misc_feature (175)..(175): Xaa can be any naturally occurring amino acid
  misc_feature (179)..(179): Xaa can be any naturally occurring amino acid
  Transcript Sequence Number=SeqID_33238
  Gene Ontology: Mol. function=aspartic-type endopeptidase activity; Cellular component=chromatin; Biological process=DNA integration
  Homolog annotation: Hit_ID=Q6I5B6; Match level="QueryCoverage=92%, HitCoverage=21%, E-value=4e-97, Identity=73%"; Hit description =Putative polyprotein
  Pfam annotation: Domain name=RVT_2; Domain location=1-56; Score= -198.9; E_value=0.079; Accession=PF07727.6; Description=Reverse transcriptase (RNA-dependent DNA pol
ETFLMFDLGPLSFFLGIEVSSMPEGFYLSQEKYIQDLLDRASLTDHRTVETPMELNVHLRATDGEPLEDPTRYRHIVGSLVYLGVTRPDISHAVHILSQFVSAPSHLHYSHLLRVLRYLRGTLSRRLFFPRSSSLHLQANCDATXASDPSDRQSLSAYCVXFLGGSLIAWKTKKXVAVXSRSSAEAKLRAMALVMAEVTWLRWLLEDFGVLVSVPTPLLSDSTGAISIARDPVKHELTKHIGADVSYTRSQVQDGVIALQYVPSELQLADFFTKAQTRVR

SEQ ID NO: 99213 - protein, 220 aa, Setaria italica
  misc_feature (9)..(9): Xaa can be any naturally occurring amino acid
  Transcript Sequence Number=SeqID_33239
  Gene Ontology: Mol. function=hydrolase activity, acting on acid anhydrides, in phosphorus-containing anhydrides; Cellular component =vacuole; Biological process=metabolic process
  Homolog annotation: Hit_ID=B9S370; Match level="QueryCoverage=99%, HitCoverage=16%, E-value=1e-107, Identity=84%"; Hit description =Helicase, putative
  Pfam annotation: Domain name=DSHCT; Domain location=28-217; Score =376.0; E_value=6.7e-110; Accession=PF08148.4; Description=DSHCT (NUC185) domain
MYKDQLNEXLKFQMSDEALQQMPEFQGRIDVLKVINYIDSDLVVQLKGRVACEMNSGEELISTECLFENQLDDLEPEEAVAIMSAFVFQQRNASEPSLTPKLAEAKKRLYDTAIRLGQLQAQFKVPVDPEEYARDNLKFGLVEVVYEWAKGTPFADICELTDVSEGLIVRTIVRLDETCREFRNAASIMGNSALYKKMEVASNAIKRDIVFAASLYVTGI

SEQ ID NO: 99214 - protein, 275 aa, Setaria italica
  Transcript Sequence Number=SeqID_33240
  Gene Ontology: Mol. function=catalytic activity; Cellular component =endoplasmic reticulum membrane; Biological process=metabolic process
  Homolog annotation: Hit_ID=B6T4Q4; Match level="QueryCoverage=99%, HitCoverage=98%, E-value=1e-146, Identity=89%"; Hit description =Delta-7-sterol-C5
  Pfam annotation: Domain name=FA_hydroxylase; Domain location=134-245; Score=89.9; E_value=9.2e-24; Accession=PF04116.5; Description=Fatty acid hydroxylase
MAAAHSGDYLGRFVAETGWYNEVVLSAVTPGNWWRGLPHPVQSWMRNCVGGYLLYFISGFLWCFVIYYWKRNAYIPKDSVPTNEAMRKQIIVASKAMPLYCALPTVSEYMIESGWTRCFFNISEVGVPMYFINLALYLIFVEFGIYWMHRELHDIKPLYKYLHATHHIYNKENTLSPFAGLAFHPVDGILQAIPHVFALFIFPTHFRTHIALLFVEAVWTANIHDCIHGKIWPVMGAGYHTIHHTTYRHNYGHYTIWMDWMFGTLREPVDILKNE

SEQ ID NO: 99215 - protein, 78 aa, Setaria italica
  Transcript Sequence Number=SeqID_33241
  Gene Ontology: Mol. function=structural constituent of nuclear pore; Cellular component=nuclear pore; Biological process=nucleocytoplasmic transport
  Homolog annotation: Hit_ID=Q9LQU6; Match level="QueryCoverage=61%, HitCoverage=3%, E-value=2e-16, Identity=77%"; Hit description =F10B6.25
NDAEAAKAAKDKAKELSLGLKSITQLYNDYAVPFNLWEVCLEMLSFANYSGDADSKIVREIWANSFHHRTCFCNTPLL

SEQ ID NO: 99216 - protein, 395 aa, Setaria italica
  Transcript Sequence Number=SeqID_33242
  Gene Ontology: Mol. function=structural constituent of nuclear pore; Cellular component=nuclear pore; Biological process=nucleocytoplasmic transport
  Homolog annotation: Hit_ID=Q9LQU6; Match level="QueryCoverage=98%, HitCoverage=27%, E-value=1e-106, Identity=50%"; Hit description =F10B6.25
SLYIGACKVADLGAPISTSQTKYLELLARYYVLKGEHIAAARMLLILAERQCSNSEEAPTLDKRYEYLRNAVLQAKSAGIAADSSRNPIDSSTVDLLEGKLAVLRFQMQIKQELELMAARVENILSNSESPNDPFPRDNILADAEAAKAAKDKAKELSLGLKSITQLYNDYAVPFNLWEVCLEMLSFANYSGDADSKIVREIWARLLDQALTRGGVAEACSVVKRVGSKLDPADGACLPLDIISLHLEKAALDRLSSGEELVGDDDVARALLGACKGLPEPVLAVYDQLLSNGAIMPSLNIKLRLLRSVLAILREWGMSVIAHRLGTTSAGASFFFDGTFSLNQTGTANQGARDKIISLANRYMTEVRRLNLPQNQTENVYRGFRELEEKLLSPY

SEQ ID NO: 99217 - protein, 178 aa, Setaria italica
  misc_feature (25)..(25): Xaa can be any naturally occurring amino acid
  Transcript Sequence Number=SeqID_33243
  Gene Ontology: Mol. function=catalytic activity; Cellular component =plasma membrane; Biological process=metabolic process
  Homolog annotation: Hit_ID=B6SW95; Match level="QueryCoverage=85%, HitCoverage=26%, E-value=8e-82, Identity=96%"; Hit description =Neutral/alkaline invertase
  Pfam annotation: Domain name=Invertase_neut; Domain location=39-178; Score=-157.9; E_value=2e-08; Accession=PF04853.4; Description=Plant neutral invertase
AGSRGGWGYGGGMMESYESMYSPGXGLRSYCGTPASSTRLSFEPHPLVGEAWDALRRSLVSFRGQPLGTIAAVDHSTDEVLNYDQVFVRDFVPSALAFLMNGEPEVVRNFLLKTLLLQGWEKRIDRFKLGEGAMPASFKVLKDPKRGVDKLVADFGESAIGRVAPVDSGFWWIIILRA

SEQ ID NO: 99218 - protein, 71 aa, Setaria italica
  Transcript Sequence Number=SeqID_33244
  Subcellular localization annotation: CTP_CleavageSite=45; ConfidenceScore=5.76e-01
MTTVSRALGSAFAGFTRTPVAAPAATTLHSPCGSSALLRHWQWSRASRARRFSSGRAARISMSLRAGIVGL

SEQ ID NO: 99219 - protein, 345 aa, Setaria italica
  Transcript Sequence Number=SeqID_33245
  Gene Ontology: Mol. function=zinc ion binding; Cellular component =nucleus; Biological process=regulation of transcription
  Homolog annotation: Hit_ID=Q6RYE2; Match level="QueryCoverage=97%, HitCoverage=50%, E-value=1e-138, Identity=65%"; Hit description =Putative transposase
  Pfam annotation: Domain name=SWIM; Domain location=211-247; Score =25.7; E_value=0.00018; Accession=PF04434.9; Description=SWIM zinc finger
SAMGKAVAEVFVEAWHGLCTFHIMQNAAKHLHAEKNEDTSILSDFSACMFEYVDMAEFEHKFDIMRKKVSKQTWLDGIYKLKEKWAECYMKDVFTLGMRRTQLNESESLNNDLKIHFKSDFDIIKFFKHFERVVQGKRDNELNSEFDSRKNLPKICMKRPPPILVQASKLYTPIIFEAFQGEYEKSLAACTKALEGDNEYLVGDFTFKEEYKVIGDPLKQTVSCSCRHFDRTGILCAHALKVLDLMNIKLLPPQYVLKRWTWEAWMETIQDNQGRNITENPMDAMLRYKFMSHKFLNLAHRAATFPECFVLVDSALDILGKQIEDKINECTVRSDDLFAGELVFW

SEQ ID NO: 99220 - protein, 203 aa, Setaria italica
  misc_feature (40)..(40): Xaa can be any naturally occurring amino acid
  Transcript Sequence Number=SeqID_33246
  Homolog annotation: Hit_ID=B6SJJ4; Match level="QueryCoverage=93%, HitCoverage=88%, E-value=1e-49, Identity=52%"; Hit description =Jasmonate-induced protein
PRQTERVVAKETAPNCFGEVVDDYKLNELVRYAGKAKTQXDRARQAWCAVNEDDKKGKALRYVDILKALYGNGQSTLCLVYNATGDTLYHVAHHDWYGYINDSKEGYPAEIGNSQWGVFHHVHRQGEPSGSMGAVVYRGKKKDGQDQDYLLAWSTPWGIWYRNKAYCEIGGVDYFKRRWDEIYVKLENADYSSRTKSGGCEIE

SEQ ID NO: 99221 - protein, 53 aa, Setaria italica
  Transcript Sequence Number=SeqID_33247
LVVCSWGAGAKEPAVLLVAPIPSWSFYFLIQWHFSYFCFFVTNLHCNHNSLLM

SEQ ID NO: 99222 - protein, 65 aa, Setaria italica
  Transcript Sequence Number=SeqID_33248
  Gene Ontology: Mol. function=hydrolase activity, hydrolyzing O -glycosyl compounds; Biological process=carbohydrate metabolic process
  Homolog annotation: Hit_ID=B6TCY1; Match level="QueryCoverage=98%, HitCoverage=12%, E-value=1e-18, Identity=73%"; Hit description =Glucan endo-1,3-beta-glucosidase 4
MSPKRLQGVVMLLMLMVLNVSGAFVGITIGNDMSNLPSATDIVAILKAKKIQHVRLIDSDHQMLT

SEQ ID NO: 99223 - protein, 142 aa, Setaria italica
  misc_feature (115)..(115): Xaa can be any naturally occurring amino acid
  Transcript Sequence Number=SeqID_33249
  Gene Ontology: Mol. function=heat shock protein binding; Cellular component=nucleus
SRRPEAIHSHYRRLSFLLSRSRPDRPCSLAFAEAARLVADAWAFLSDPVLKSALDAELHTAAAARAYHSPAPNLPQPHSQPPLPARPTPPAATPSPRQTPPAAIFSPRPTPPVAXPPRGRLRRRFPTPPGPTPPPVSPPPPS

SEQ ID NO: 99224 - protein, 169 aa, Setaria italica
  Transcript Sequence Number=SeqID_33250
  Gene Ontology: Mol. function=Rho guanyl-nucleotide exchange factor activity
  Homolog annotation: Hit_ID=B6U1X9; Match level="QueryCoverage=87%, HitCoverage=26%, E-value=6e-43, Identity=64%"; Hit description =Pollen-specific kinase partner protein
DTEKRELLAERAEGLLICLKQRFPGLTQTSLDMSKIQYNKDVGKSILESYSRVLESLASNIVTRIDDLLNIDELNRHAEQFSATGDADCKIACSQAAVTSFPVPASGTPFMTAYATPSFSPAQLASPSKKERTSLTPGRRSQHSRSTGAKKALTDHVSTEVKGVIISSG

SEQ ID NO: 99225 - protein, 180 aa, Setaria italica
  misc_feature (94)..(94): Xaa can be any naturally occurring amino acid
  Transcript Sequence Number=SeqID_33251
  Gene Ontology: Cellular component=plasma membrane
  Homolog annotation: Hit_ID=Q9XI89; Match level="QueryCoverage=97%, HitCoverage=34%, E-value=2e-75, Identity=73%"; Hit description =F7A19.6 protein
  Pfam annotation: Domain name=DUF1336; Domain location=1-164; Score =197.1; E_value=4.7e-56; Accession=PF07059.4; Description=Protein of unknown function (DUF1336)
SMFLGDSDGEGFSLVLYFRISEYYDKEVSEHFKDSIMRFFENESEKVKGFTSESTIMYRDRLKIMAGLVNPDDLQLGSTERKLVQAYNEKPAFXRPQHNFYEGENYFEVDLDIHRFSYIARKGLDSFRERLKNGILDLGLTIQAQKQEELPEQVLCCVRLNKIEFVNHGQVPTIVTVDEK

SEQ ID NO: 99226 - protein, 98 aa, Setaria italica
  Transcript Sequence Number=SeqID_33252
  Gene Ontology: Cellular component=plasma membrane
  Homolog annotation: Hit_ID=Q9XI89; Match level="QueryCoverage=51%, HitCoverage=9%, E-value=3e-16, Identity=76%"; Hit description =F7A19.6 protein
MLLGGNQIVKVRGILRNHQLMFHLLRHQGENYFEVDLDIHRFSYIARKGLDSFRERLKNGILDLGLTIQVSFPLDSPPNMYLSIFFSFFYLFADNLCP

SEQ ID NO: 99227 - protein, 115 aa, Setaria italica
  Transcript Sequence Number=SeqID_33253
  Gene Ontology: Mol. function=receptor activity; Cellular component =integral to membrane
  Homolog annotation: Hit_ID=Q53PX8; Match level="QueryCoverage=77%, HitCoverage=17%, E-value=8e-24, Identity=66%"; Hit description=PAN domain containing protein
  Pfam annotation: Domain name=PAN_1; Domain location=3-73; Score=8.4; E_value=0.029; Accession=PF00024.18; Description=PAN domain
  Pfam annotation: Domain name=PAN_2; Domain location=5-51; Score= -13.8; E_value=0.041; Accession=PF08276.3; Description=PAN-like domain
  Pfam module annotation: Pfam domain module=PAN_1::PAN_2; Domain location=3-73::5-51
RRKQVSVAYKEELPPETNRTAEECEAACAGNCSCWGAVYNGASGYCYLMDFPVETLVYEADDRKVGYFKVRKVPSPKRARMSPGVAAATAVLSLILAGLAAAGAYSGLPACGRGG

SEQ ID NO: 99228 - protein, 91 aa, Setaria italica
  Transcript Sequence Number=SeqID_33254
  Gene Ontology: Mol. function=catalytic activity; Biological process =metabolic process
  Homolog annotation: Hit_ID=B9IM06; Match level="QueryCoverage=98%, HitCoverage=16%, E-value=5e-36, Identity=77%"; Hit description=4 -Coumarate:CoA ligase (Fragment)
PAELEAMLIAHPGIADAAVVPIKDDSCGEIPVAFVVRSDGSEITEDEIKQYVAKQVVFYKRLHKIFFVETIPKAPSGKILRKDLRAKLAAC

SEQ ID NO: 99229 - protein, 106 aa, Setaria italica
  Transcript Sequence Number=SeqID_33255
  Homolog annotation: Hit_ID=Q2HS18; Match level="QueryCoverage=97%, HitCoverage=16%, E-value=6e-25, Identity=50%"; Hit description =Tetratricopeptide-like helical
KNVEVGERVINRIMELEPSNSWNYVVSSKIYATSDRMDDSARMIGLMRERGVSKTPGCSWVEVKGKVLEFYASAEPQHGAEDMYQLMDILVDEMRLEGYVPNLDLV

SEQ ID NO: 99230 - protein, 66 aa, Setaria italica
  Transcript Sequence Number=SeqID_33256
STHLQDFLTVDLHANNCWVPAYQIFSLQICMALYHASLYINVQHLFHLLCLIMSCLFDLLCPHIIE

SEQ ID NO: 99231 - protein, 92 aa, Setaria italica
  Transcript Sequence Number=SeqID_33257
  Gene Ontology: Mol. function=cytokinin dehydrogenase activity; Cellular component=extracellular region; Biological process =cytokinin metabolic process
  Homolog annotation: Hit_ID=Q6YW50; Match level="QueryCoverage=85%, HitCoverage=15%, E-value=9e-31, Identity=75%"; Hit description =Putative cytokinin dehydrogenase 1
  Pfam annotation: Domain name=Cytokin-bind; Domain location=1-92; Score=-109.0; E_value=1.8e-06; Accession=PF09265.2; Description =Cytokinin dehydrogenase 1, FAD and cytok
ALMDNLSFEPGFVFTKDVTFVQFLDRVLEEERVLRSAGVWEVPHPWLNLFVPRSRILDFDNGVFKGLLRDANPAGIILMETLEDTIVKVKYA

SEQ ID NO: 99232 - protein, 228 aa, Setaria italica
  Transcript Sequence Number=SeqID_33258
  Gene Ontology: Mol. function=receptor activity; Cellular component =anchored to membrane; Biological process=cell wall catabolic process
  Homolog annotation: Hit_ID=Q84XG7; Match level="QueryCoverage=82%, HitCoverage=55%, E-value=9e-38, Identity=42%"; Hit description =Erwinia induced protein 1
  Pfam annotation: Domain name=LysM; Domain location=37-80; Score=32.8; E_value=1.4e-06; Accession=PF01476.12; Description=LysM domain
ANNVSDPNKVAVGQQLWIPVPCSCDPVGGQPVVHFTYVVPAGSSVAGIAQEFGSTEENILAVNKMPDAKGLLAGQVLDVPLRACGSAISNTAIDRNLLVPNGSYILTANNCVMCGCSSSTWQLDCQPTQGLSSSFCPAAKCGDMFLGNTSSTSSCESRTCSYAGYTNSTSFAILANITTSNVCNAGMSPMAQPAHSSAFRLEPSWFRWTELVVSLHVVLLCVGYLRQD

SEQ ID NO: 99233 - protein, 133 aa, Setaria italica
  misc_feature (84)..(84): Xaa can be any naturally occurring amino acid
  misc_feature (127)..(127): Xaa can be any naturally occurring amino acid
  Transcript Sequence Number=SeqID_33259
  Gene Ontology: Mol. function=DNA-directed RNA polymerase activity; Cellular component=nucleus; Biological process=transcription
  Homolog annotation: Hit_ID=Q1L5Z7; Match level="QueryCoverage=100%, HitCoverage=15%, E-value=2e-71, Identity=95%"; Hit description=DNA -directed RNA polymerase (Fragment)
GFVADKDILEHICYDFSDTQMMELLRPSLEEAFVIQNQQVALDYIGKRGATVGVTREKRIKYAKEILQKEMLPHVGVGEFCETXKAYYFGYIIHRLLMCALGRRAEDDRDHYGNKRLDLAGPLLGGXFRMLFR

SEQ ID NO: 99234 - protein, 1068 aa, Setaria italica
  Transcript Sequence Number=SeqID_33260
  Gene Ontology: Mol. function=DNA-directed RNA polymerase activity; Cellular component=nucleus; Biological process=transcription
  Homolog annotation: Hit_ID=A7PJ31; Match level="QueryCoverage=100%, HitCoverage=89%, E-value=0.0, Identity=90%"; Hit description=DNA -directed RNA polymerase
  Pfam annotation: Domain name=RNA_pol_Rpb2_1; Domain location=1-335; Score=153.9; E_value=4.7e-43; Accession=PF04563.7; Description=RNA polymerase beta subunit
  Pfam annotation: Domain name=RNA_pol_Rpb2_2; Domain location=86-278; Score=326.7; E_value=4.6e-95; Accession=PF04561.6; Description=RNA polymerase Rpb2, domain 2
  Pfam annotation: Domain name=RNA_pol_Rpb2_3; Domain location=351-416; Score=120.4; E_value=5.7e-33; Accession=PF04565.8; Description=RNA polymerase Rpb2, domain 3
  Pfam annotation: Domain name=RNA_pol_Rpb2_4; Domain location=450-512; Score=128.6; E_value=1.9e-35; Accession=PF04566.5; Description=RNA polymerase Rpb2, domain 4
  Pfam annotation: Domain name=RNA_pol_Rpb2_5; Domain location=535-586; Score=88.4; E_value=2.5e-23; Accession=PF04567.9; Description=RNA polymerase Rpb2, domain 5
  Pfam annotation: Domain name=RNA_pol_Rpb2_6; Domain location=591-963; Score=707.5; E_value=1e-209; Accession=PF00562.20; Description=RNA polymerase Rpb2, domain 6
  Pfam annotation: Domain name=RNA_pol_Rpb2_7; Domain location=965 -1057; Score=195.8; E_value=1.2e-55; Accession=PF04560.12; Description=RNA polymerase Rpb2, domain 7
  Pfam module annotation: Pfam domain module=RNA_pol_Rpb2_1::RNA_pol _Rpb2_2::RNA_pol_Rpb2_3::RNA_pol_Rpb2_4::RNA_pol_Rpb2_5::RNA_pol_Rpb2_ 6::RNA_pol_Rpb2_7; Domain location=1-335::86-278::351-416::450 -512::535-586::591-963::965-1057
YSAPLYVDVSYRVMKKGHDCEEVTETSDYPKVFIGKVPIMLRSSYCTLYQQSEKDLTELGECPYDQGGYFIINGSEKVLIAQEKMSTNHVYVFKKRQPNKFSYVAEVRSMAENQNRPASSMFVRMLSRAGAKGGSSGQYIRATLPYIRADIPIIIVFRALGFVADKDILEHICYDFSDTQMMELLRPSLEEAFVIQNQQVALDYIGKRGATVGVTREKRIKYAKEILQKEMLPHVGVGEFCETKKAYYFGYIIHRLLMCALGRRAEDDRDHYGNKRLDLAGPLLGGLFRMLFRKLTRDVRSYVQKCVDNGKEVNLQFAIKAKTITSGLKYSLATGNWGQANQAGTRAGVSQVLNRLTYASTLSHLRRLNSPIGREGKLAKPRQLHNSHWGMMCPAETPEGQACGLVKNLALMVYITVGSAANPILEFLEEWGTENFEEISPAVIPQAAKIFVNGCWVGIHRNPDLLVKTLRRLRRQIDVNTEVGVVRDIRLKELRLYTDYGRCSRPLFIVENQRLLIKKAHIRALQQRETPDEGWHELVSKGYIEYIDTEEEETTMISMTINDLINARHNPEEAYSETYTHCEIHPSLILGVCASIIPFPDHNQSPRNTYQSAMGKQAMGIYVTNYQLRMDTLAYVLYYPQKPLVTTRAMEHLHFRQLPAGINAIVAISCYSGYNQEDSVIMNQSSIDRGFFRSLFFRSYRDEEKKMGTLVKEEFGRPNRENTMGMRHGSYDKLDDDGLAPPGTRVSGEDVIIGKTSPIPQDDAQGQASRYSKRDHSTSLRHSESGMVDQVLLTTNADGLRFVKVRMRSVRIPQIGDKFSSRHGQKGTVGMTYTQEDMPWTIEGITPDIIVNPHAIPSRMTIGQLIECIMGKVAAHMGKEGDATPFTDVTVDNISKALHKCGYQMRGFETMYNGHTGRKLTAMIFLGPTYYQRLKHMVDDKIHSRGRGPVQILTRQPAEGRSRDGGLRFGEMERDCMIAHGAAFFLKERLFDQSDAYRVHVCEKCGLIAIANLKKNSFECRGCKNKTDIVQVHIPYACKLLFQELMAMAIAPRMLTHDMKTGKDQKKR

SEQ ID NO: 99235 - protein, 163 aa, Setaria italica
  misc_feature (86)..(86): Xaa can be any naturally occurring amino acid
  Transcript Sequence Number=SeqID_33261
  Gene Ontology: Mol. function=electron carrier activity
  Homolog annotation: Hit_ID=B9SAY8; Match level="QueryCoverage=58%, HitCoverage=21%, E-value=2e-11, Identity=40%"; Hit description =Reticuline oxidase, putative
PHQAQCRWSLEVEEGKARIKTKAVMQPSFAHLCLLLLVFLLVWPCSPQEQEHDGDGALHESFLRCVASLSPATTDPSRLVHAPSVXSYPSLLNATIQNLRFASPRTPRPALLLTPATVADARACVACCRRHGLTVRVRSGGHDYEGLSYRSVPPAPRAPALRC

SEQ ID NO: 99236 - protein, 82 aa, Setaria italica
  Transcript Sequence Number=SeqID_33262
  Homolog annotation: Hit_ID=UPI0001A8937A; Match level="QueryCoverage =58%, HitCoverage=6%, E-value=5e-13, Identity=83%"; Hit description =integral membrane single C2 domain protein
VGLPCRKKAAHMVKHAGKTTAHNLKSMFSRKGLDKSKEECQNDEEGDVVAMKIDGMAADPPVPSNDAVDAPESVADGKDKVQ

SEQ ID NO: 99237 - protein, 283 aa, Setaria italica
  Transcript Sequence Number=SeqID_33263
  Homolog annotation: Hit_ID=UPI0001A8937A; Match level="QueryCoverage =89%, HitCoverage=36%, E-value=3e-82, Identity=64%"; Hit description =integral membrane single C2 domain protein
PEEHVQQGGTPKVGKASTPRSSFSSRTNNESESSEEFQKMSDEFEPVDIEGSEKPDVWVHRPGSDVTSTWEPRKGRPRCQDSKIQRENDACSDSPRSSVSESQRSDSSTEEPTGGRSHRHLRKVKKGLGKLAGAVFHRSPKNETDDDASPCVTPHPNIQPVGESRVSVTYVVDQDPGSNRKGTVTDEEQHSSPEREEPNSPTKRHLRKKAAHMVKHAGKTTAHNLKSMFSRKGLDKSKEECQNDEEGDVVAMKIDGMAADPPVPSNDAVDAPESVADGKDKVQ

SEQ ID NO: 99238 - protein, 104 aa, Setaria italica
  Transcript Sequence Number=SeqID_33264
HLFCSQCNASLSKDKVLNDYTSRQIEELTRDVTAVISIFDRRFSLKFADIAEKILIFCCHDSLLFIAYVLLWGCKSPDVSIDRHGLECCSLRPINYLLLVSFKE

SEQ ID NO: 99239 - protein, 76 aa, Setaria italica
  misc_feature (59)..(59): Xaa can be any naturally occurring amino acid
  Transcript Sequence Number=SeqID_33265
  Gene Ontology: Mol. function=hydrolase activity, acting on acid anhydrides, catalyzing transmembrane movement of substances; Cellular component=integral to membrane; Biological process=proton transport
  Homolog annotation: Hit_ID=Q7XPY2; Match level="QueryCoverage=100%, HitCoverage=11%, E-value=2e-30, Identity=66%"; Hit description =Plasma membrane ATPase
DATDAARSASDIVLTEPGLSVIISAVLTSRCIFQRMKNYTIYAVSITIRIVDRVKPSPXPDSWKLKEIFATGVVLG

SEQ ID NO: 99240 - protein, 82 aa, Setaria italica
  Transcript Sequence Number=SeqID_33266
KEREKKKLPSKTGHPTIPSYSSIWWWYSALQLGLLGQISHTVFFFVLVHHRKNSCSNQMTPFANTGRAGKGFVDIPAVSHTV

SEQ ID NO: 99241 - protein, 233 aa, Setaria italica
  misc_feature (29)..(29): Xaa can be any naturally occurring amino acid
  misc_feature (207)..(207): Xaa can be any naturally occurring amino acid
  Transcript Sequence Number=SeqID_33267
  Gene Ontology: Mol. function=hydrolase activity, acting on acid anhydrides, catalyzing transmembrane movement of substances; Cellular component=integral to membrane; Biological process =metabolic process
  Homolog annotation: Hit_ID=Q7XPY2; Match level="QueryCoverage=100%, HitCoverage=27%, E-value=1e-93, Identity=70%"; Hit description =Plasma membrane ATPase
  Pfam annotation: Domain name=Cation_ATPase_N; Domain location=5-87; Score=113.6; E_value=6.4e-31; Accession=PF00690.18; Description =Cation transporterATPase, N-terminus
  Pfam annotation: Domain name=E1-E2_ATPase; Domain location=99-232; Score=59.5; E_value=1.3e-14; Accession=PF00122.12; Description=E1-E2 ATPase
  Pfam module annotation: Pfam domain module=Cation_ATPase_N::E1-E2 _ATPase; Domain location=5-87::99-232
MGGLEEIKNEAVDLENIPIEEVFEQLKCXTREGLSSNEGAQRLEIFGPNKLEEKKESKILKFLGFMWNPLSWVMEMAAIMAIALANGGGKPPDWEDFVGIIVLLVINSTISFIEENNAGNAAAALMANLAPKTKVLRDGRWGEQEAAILVPGDIISIKLGDIVPADARLLEGDPLKVDQSALTGESLPVTKGPGDEVFSGSTCKQGXHFQKVLTAIGNFCICSIAVGIVIEII

SEQ ID NO: 99242 - protein, 854 aa, Setaria italica
  misc_feature (130)..(130): Xaa can be any naturally occurring amino acid
  misc_feature (710)..(710): Xaa can be any naturally occurring amino acid
  misc_feature (720)..(720): Xaa can be any naturally occurring amino acid
  misc_feature (824)..(824): Xaa can be any naturally occurring amino acid
  Transcript Sequence Number=SeqID_33268
  Gene Ontology: Mol. function=hydrolase activity, acting on acid anhydrides, catalyzing transmembrane movement of substances; Cellular component=integral to membrane; Biological process =metabolic process
  Homolog annotation: Hit_ID=Q7XPY2; Match level="QueryCoverage=100%, HitCoverage=89%, E-value=0.0, Identity=86%"; Hit description=Plasma membrane ATPase
  Pfam annotation: Domain name=E1-E2_ATPase; Domain location=1-219; Score=228.9; E_value=1.3e-65; Accession=PF00122.12; Description=E1 -E2 ATPase
  Pfam annotation: Domain name=Hydrolase; Domain location=223-509; Score=67.6; E_value=4.6e-17; Accession=PF00702.18; Description =haloacid dehalogenase-like hydrolase
  Pfam module annotation: Pfam domain module=E1-E2_ATPase::Hydrolase; Domain location=1-219::223-509
LLVINSTISFIEENNAGNAAAALMANLAPKTKVLRDGRWGEQEAAILVPGDIISIKLGDIVPADARLLEGDPLKVDQSALTGESLPVTKGPGDEVFSGSTCKQGEIEAVVIATGVHTFFGKAAHLVDSTXNQVGHFQKVLTAIGNFCICSIAVGIVIEIIVMFPIQHRAYRSGIENLLVLLIGGIPIAMPTVLSVTMAIGSHKLSQQGAITKRMTAIEEMAGMDVLCSDKTGTLTLNKLSVDKNLVEVFCKGVDKDHVLLLAARASRTENQDAIDAAMVGMLADPKEARAGIREVHFLPFNPVDKRTALTYIDSDGNWHRVSKGAPEQILDLCNCREDMRRKVHSIIDKYAERGLRSLAVARQEVPEKSKDASGGPWQFVGLLPLFDPPRHDSAETIRKALVLGVNVKMITGDQLAIGKETGRRLGMGTNMYPSSSLLGTNKDSTLESLPVDELIEKADGFAGVFPEHKYEIVKRLQEKKHIVGMTGDGVNDAPALKKADIGIAVADATDAARSASDIVLTEPGLSVIISAVLTSRCIFQRMKNYTIYAVSITIRIVLGFMLIALIWKYDFSPFMVLIIAILNDGTIMTISKDRVKPSPLPDSWKLKEIFATGVVLGSYLALMTVIFFWAMHKTDFFPEKFGVKPIRDSEGKMMSALYLQVSIVSQALIFVTRSRSWSFVERPGLLLVTAFLLAQLVATFLAVYANWGFXARIEGIGWGXWAGVVWLYSIVFYFPLDLFKFFIRFVLSGRAWDNLLENKTAFTTKKDYGREEREAQWATAQRTLHGLQPPEAASNTLFNDKSSYRELSEIAEQAKRRAEIARLXRELNTLKGHVESVVKLKGLDIDTIQQNYTV

SEQ ID NO: 99243 - protein, 238 aa, Setaria italica
  Transcript Sequence Number=SeqID_33269
  Gene Ontology: Mol. function=protein tyrosine kinase activity; Cellular component=plasma membrane; Biological process=protein amino acid phosphorylation
  Homolog annotation: Hit_ID=B6SSJ5; Match level="QueryCoverage=76%, HitCoverage=23%, E-value=5e-29, Identity=42%"; Hit description=Wound and phytochrome signaling involved receptor like kinase
  Pfam annotation: Domain name=LRR_1; Domain location=104-126; Score =4.8; E_value=36; Accession=PF00560.25; Description=Leucine Rich Repeat
  Pfam annotation: Domain name=LRR_1; Domain location=30-53; Score =12.6; E_value=1.2; Accession=PF00560.25; Description=Leucine Rich Repeat
  Pfam annotation: Domain name=LRR_1; Domain location=55-77; Score =13.1; E_value=0.94; Accession=PF00560.25; Description=Leucine Rich Repeat
  Pfam annotation: Domain name=LRR_1; Domain location=79-102; Score =6.3; E_value=19; Accession=PF00560.25; Description=Leucine Rich Repeat
  Pfam module annotation: Pfam domain module=LRR_1::LRR_1::LRR_1::LRR _1; Domain location=104-126::30-53::55-77::79-102
NLTQLEVFNAAGFGLPGSIPAWLGDGLPPTFQSLDISACNVSGEIPASALAGLTRLRTLNLSGNAFSGALPVAVWSLPGLSVLDVSRANLTGPLPTTGISLPANAQVVDLSENLFYGIVPEAFRRLFAQVLLTNISGNYFDGKLSVPDSGGGNVSSELNCFLDAPEQRTQADCQQFYASRGLPYDGPVTPPAPQPAPAPARKKKHKNLRYILIGAIGGGLLLIAAVAAVVFCIACSGR

SEQ ID NO: 99244 - protein, 338 aa, Setaria italica
  Transcript Sequence Number=SeqID_33270
  Gene Ontology: Mol. function=RNA binding
  Homolog annotation: Hit_ID=Q84ZX0; Match level="QueryCoverage=100%, HitCoverage=42%, E-value=8e-36, Identity=31%"; Hit description=HEN4
  Pfam annotation: Domain name=KH_1; Domain location=268-330; Score =31.9; E_value=2.6e-06; Accession=PF00013.21; Description=KH domain
  Pfam annotation: Domain name=KH_1; Domain location=67-134; Score =32.4; E_value=1.9e-06; Accession=PF00013.21; Description=KH domain
  Pfam module annotation: Pfam domain module=KH_1::KH_1; Domain location=268-330::67-134
IEEETGACIDVSAPVSCCRERVITICALEKPDSEYHIVQSALLLIFDRMMEVESNTRSTFEKTSQFSARALVLKTQFDCLVGLGGSIIKEMVNATGARIQILDDTDVPDCASSFELVVQITGELMNVRDALCLVCWKLRNHVFSDGTDYNNGHIPSSEIAESNATSQANIYSTSQYLMDNAHKVDHGPSLSYGMDSVEKTFSSLELSPSEIQKPDNENGVMIDYSDNGIQKPTEPNGIVINNLNHGIVFPEENNLVREVQHAAITSITYETAVSGSILNLVYGESGNNLAQLTELSGADIAVYDPPSEGNEAMIMVSGPPDQAQSAQRLLVELILQGQ

SEQ ID NO: 99245 - protein, 99 aa, Setaria italica
  Transcript Sequence Number=SeqID_33271
  Subcellular localization annotation: CTP_CleavageSite=43; ConfidenceScore=5.26e-01
RPPPWTGKTRRRARSRSATSAATIAITRTGVIRGRPRGPRRVSARHRWRRGEPGEGAIAQDEGAATAADAGRALAPAPEPDNNSDANLVRSPQSQRVKE

SEQ ID NO: 99246 - protein, 425 aa, Setaria italica
  Transcript Sequence Number=SeqID_33272
  Gene Ontology: Mol. function=cyclopropane-fatty-acyl-phospholipid synthase activity; Biological process=lipid biosynthetic process
  Homolog annotation: Hit_ID=B6SV21; Match level="QueryCoverage=96%, HitCoverage=46%, E-value=0.0, Identity=92%"; Hit description =Cyclopropane fatty acid synthase
  Pfam annotation: Domain name=CMAS; Domain location=123-402; Score =344.9; E_value=1.6e-100; Accession=PF02353.12; Description =Cyclopropane-fatty-acyl-phospholipid synthase
  Pfam annotation: Domain name=MTS; Domain location=170-289; Score= -83.4; E_value=0.018; Accession=PF05175.6; Description=Methyltransfera se small domain
  Pfam annotation: Domain name=Methyltransf_11; Domain location=189 -288; Score=42.9; E_value=1.2e-09; Accession=PF08241.4; Description =Methyltransferase domain
  Pfam annotation: Domain name=Methyltransf_12; Domain location=189 -286; Score=40.8; E_value=5.3e-09; Accession=PF08242.4; Description =Methyltransferase domain
  Pfam annotation: Domain name=NodS; Domain location=168-331; Score= -84.5; E_value=0.012; Accession=PF05401.3; Description=Nodulation protein S (NodS)
  Pfam module annotation: Pfam domain module=CMAS::MTS::Methyltransf _11::Methyltransf_12::NodS; Domain location=123-402::170-289::189 -288::189-286::168-331
FLGQYISVGNLVLLEEGGTMFSFGEAGKKCHAKSVLRVHDPMFYWKVATEADLGLADAYINGYFSFVDKREGLLNLFLILIANRDANKSTSSGTSKRGWWTPLLLTAGVASAKYFLRHISRKNSVTQTRQNISQHYDLSNEFFSLFLDPSMTYSCAIFKTEDESLEAAQRRKIGLLIDKAKVERDHHVLEIGCGWGSLAIQLVKQTGCKYTGITLSVEQLQYAQKKVKEAGLEDHISFMLCDYRQIPTRRKYDRIISCEMIEGVGHEYMDDFFGCCESLLAQDGLFVLQFISIPEERYEEYRRSSDFIKEYIFPGGCLPSLARITSAMSAASRLCIEHLENIGYHYYPTLIRWRDNFMANKDAISALGFDDKFIRIWEYYFIYCAAGFKSRTLGNYQIVFSRPGNDKLGDNDPYASFPAANQDSS

SEQ ID NO: 99247 - protein, 89 aa, Setaria italica
  Transcript Sequence Number=SeqID_33273
  Gene Ontology: Mol. function=DNA binding; Cellular component=nucleus
  Homolog annotation: Hit_ID=B4FRV0; Match level="QueryCoverage=62%, HitCoverage=14%, E-value=6e-12, Identity=68%"; Hit description=DNA -binding protein
KRGRAAEIRPDGSLLRPLNATPISASVPDDAGGAQYTPAAAVGAVMKRGRGRPVGFVSRATPISVAVTAAAPTAAVVVSAPAPQTLVRA

SEQ ID NO: 99248 - protein, 92 aa, Setaria italica
  Transcript Sequence Number=SeqID_33274
MYAMASAGGTEEPALFVKQGSKLHSKMLSKEAAAQLAVPSFRVYYSVASAGAVPFLWESQPGTPKNDSPSASALPPLTPPSSYYSADRGGAG

SEQ ID NO: 99249 - protein, 79 aa, Setaria italica
  Transcript Sequence Number=SeqID_33275
  Gene Ontology: Mol. function=protein serine/threonine kinase activity; Biological process=protein amino acid phosphorylation
  Homolog annotation: Hit_ID=Q6EQQ3; Match level="QueryCoverage=100%, HitCoverage=9%, E-value=9e-29, Identity=74%"; Hit description =Serine/threonine-specific receptor protein kinase-like
TYLSDTQTHISATAAGTAGYMDPEYYLTGRLTESSDVYSFGVVLLEVATGMPPIVPGHGHIIQRVKQKIATGDIGSIAD

SEQ ID NO: 99250 - protein, 115 aa, Setaria italica
  misc_feature (107)..(107): Xaa can be any naturally occurring amino acid
  Transcript Sequence Number=SeqID_33276
PPAPPSESIADYVQEVLQVQLYISKHRRPAPPLTPPTLHLLHLLHFYLQPTSPPPAMEENAARPRTGRWRRATEYCKYGNVRFKRRVFQDNEKWTFLDVRLQGGTLXVPRLRVDN

SEQ ID NO: 99251 - protein, 60 aa, Setaria italica
  Transcript Sequence Number=SeqID_33277
ESLQRKRPNHGNSFLHPPLNLTLFFCSKDHLVGSLAHFTSRDLSIILHHFIIISILVFCI

SEQ ID NO: 99252 - protein, 154 aa, Setaria italica
  Transcript Sequence Number=SeqID_33278
  Gene Ontology: Mol. function=binding
  Homolog annotation: Hit_ID=Q2QN60; Match level="QueryCoverage=99%, HitCoverage=43%, E-value=2e-74, Identity=60%"; Hit description =Pentatricopeptide, putative, expressed
  Pfam annotation: Domain name=PPR; Domain location=24-58; Score=18.2; E_value=0.035; Accession=PF01535.12; Description=PPR repeat
  Pfam annotation: Domain name=PPR; Domain location=86-120; Score=37.8; E_value=4.3e-08; Accession=PF01535.12; Description=PPR repeat
  Pfam module annotation: Pfam domain module=PPR::PPR; Domain location =24-58::86-120
TAGVAPVRAAHSHVVKLGSVEDTFVGNALIDAYSKSGAVSDATKVFDEMPVRDVVSWNTAMAAMVRQGEVAGARRMFEEMPEKDTVSWNTILDGYAKAGEAEQAFELFQLMPERNVVSWSTVLSAYCMKGDMEMARVIFDKMPTKNLVTWTIMV

SEQ ID NO: 99253 - protein, 53 aa, Setaria italica
  Transcript Sequence Number=SeqID_33279
PRVEQTQFKSFQEREDEVNHFCIALHLILMGPIKVCLVFIIIPYQPGFYLSVG

SEQ ID NO: 99254 - protein, 71 aa, Setaria italica
  Transcript Sequence Number=SeqID_33280
AAVIGGVDNIWIEDRSSRDSKSKALKTLSSKSQFRKASCTLDHNLFLCNLYFYALYAYAMHFKNINMMGPI

SEQ ID NO: 99255 - protein, 81 aa, Setaria italica
  Transcript Sequence Number=SeqID_33281
PCPSGARTPSPPIDRKEICEFVYRHTDLPRMEDWKMELFTISFVNTMEDRETFRDLDDDSENVREGLRRWRRVSVAQYELR

SEQ ID NO: 99256 - protein, 83 aa, Setaria italica
  Transcript Sequence Number=SeqID_33282
  Gene Ontology: Mol. function=electron carrier activity; Biological process=gibberellin catabolic process
  Homolog annotation: Hit_ID=A1KXL0; Match level="QueryCoverage=100%, HitCoverage=17%, E-value=4e-30, Identity=81%"; Hit description =Cytochrome P450-like protein (Fragment)
PRADDFVVDNCKNIYFAGHETSAVTATWCLMLLAAHPEWQDRARAEVLEVCGGAAGAAAPDFDAVARMRTVHAVVLETLRLFP

SEQ ID NO: 99257 - protein, 104 aa, Setaria italica
  Transcript Sequence Number=SeqID_33283
  Gene Ontology: Mol. function=catalytic activity; Biological process =metabolic process
  Homolog annotation: Hit_ID=B6ST13; Match level="QueryCoverage=94%, HitCoverage=16%, E-value=4e-37, Identity=75%"; Hit description=AMP binding protein
PAVAGAPVRVMTGGAPPPPRVLFAVEDLGFVVYHIYGLTETYGPATVCTWMPEWDALPAEERARLKARQGSHHIAMQDVDVKNPDTMESVPHDGRTLGEVMFRG

SEQ ID NO: 99258 - protein, 620 aa, Setaria italica
  Transcript Sequence Number=SeqID_33284
  Gene Ontology: Mol. function=oxidoreductase activity, acting on the CH-CH group of donors; Cellular component=mitochondrial inner membrane; Biological process=electron transport chain
  Homolog annotation: Hit_ID=B6U124; Match level="QueryCoverage=100%, HitCoverage=100%, E-value=0.0, Identity=89%"; Hit description =Succinate dehydrogenase flavoprotein subunit,mitochondrial
  Pfam annotation: Domain name=DAO; Domain location=37-373; Score= -29.0; E_value=0.00089; Accession=PF01266.16; Description=FAD dependent oxidoreductase
  Pfam annotation: Domain name=FAD_binding_2; Domain location=37-433; Score=604.2; E_value=1.4e-178; Accession=PF00890.16; Description=FAD binding domain
  Pfam annotation: Domain name=Pyr_redox_2; Domain location=37-422; Score=-46.3; E_value=0.0026; Accession=PF07992.6; Description =Pyridine nucleotide-disulphide oxidore
  Pfam annotation: Domain name=Succ_DH_flav_C; Domain location=488-620; Score=292.4; E_value=9.9e-85; Accession=PF02910.12; Description =Fumarate reductasesuccinate dehydroge
  Pfam module annotation: Pfam domain module=DAO::FAD_binding_2::Pyr _redox_2::Succ_DH_flav_C; Domain location=37-373::37-433::37-422::488- 620
MWRSCVSRGLRKAQAAASASRLFSTSSSYTVVDHTYDAVVVGAGGAGLRAAIGLSEHGFNTACITKLFPTRSHTVAAQGGINAALGNMTEDDWRWHMYDTVKGSDWLGDQDSIQYMCREAPKAVIELENYGLPFSRTEDGKIYQRAFGGQSLDFGKGGQAYRCACAADRTGHAMLHTLYGQAMKHNTQFFVEYFALDLLMDNEGTCQGVIALNMEDGTLHRFRASNTILATGGYGRAYFSATSAHTCTGDGNAMVARAGLPLQDLEFVQFHPTGIYGAGCLITEGSRGEGGILRNSEGERFMERYAPTAKDLASRDVVSRSMTMEIREGRGVGPLKDHIYLHLNHLPPEVLKERLPGISETAAIFAGVDVTKEPIPVLPTVHYNMGGIPTNYHGEVVHIKGDNPDTVVPGLMAAGEAACASVHGANRLGANSLLDIVVFGRACANRVAEISKPGEKQKPLEKGVGEKTIAWLDKLRNANGSLPTSKIRLNMQRVMQNNAAVFRTQETLKEGCGLISKAWESFHDVKISDRSLIWNSDLIETIELENLLINACITMHSAEARKESRGAHAREDFTTRDDENWMKHSLGYWENEKVRLAYRPVHMNTLDDEVQSFPPKARVY

SEQ ID NO: 99259 - protein, 136 aa, Setaria italica
  misc_feature (16)..(16): Xaa can be any naturally occurring amino acid
  Transcript Sequence Number=SeqID_33285
  Gene Ontology: Mol. function=cysteine-type endopeptidase activity; Cellular component=plasma membrane; Biological process=proteolysis
  Homolog annotation: Hit_ID=B6U746; Match level="QueryCoverage=100%, HitCoverage=36%, E-value=3e-43, Identity=67%"; Hit description =Metacaspase type II
GSIRTTLFHHFGHDAXPKVKRFVKVMVAKLRHDGKEVEQSHALRAALEQDVHSVEEVYAGPAAAAAAGRVPRNGVLVSGCQTDETSADATTPDGVSYGALSNAIQAVLAEGKRGAAVTNRELVVRARELLAKQGYT

SEQ ID NO: 99260 - protein, 223 aa, Setaria italica
  misc_feature (5)..(5): Xaa can be any naturally occurring amino acid
  Transcript Sequence Number=SeqID_33286
  Homolog annotation: Hit_ID=B9SAF5; Match level="QueryCoverage=99%, HitCoverage=46%, E-value=4e-49, Identity=45%"; Hit description =Transporter, putative
HAIYXVFSALPFFQLVSCMFVEDSPKGLQSAIDEHKYVDNQGAEKCSSEALGYEGTRRRKKIRKSNKSRPLSKRAEANEKHNGPINSSPCLSLRSAFFSLCTAFRQPTILRPMVWFFFSNVIIPNISTVMFYYQTEELHLEASFLGTARVIGWFSLILGTYTYNRYFKHKQLRNILVFAHVGLAIISLLDIALVSRLHVPYGIGDKYMVLWGSALADAINQFK

SEQ ID NO: 99261 - protein, 297 aa, Setaria italica
  Transcript Sequence Number=SeqID_33287
  Gene Ontology: Mol. function=transferase activity; Cellular component= chloroplast; Biological process=isoprenoid biosynthetic process
  Homolog annotation: Hit_ID=A9ZN09; Match level="QueryCoverage=84%, HitCoverage=80%, E-value=1e-104, Identity=72%"; Hit description=2-C -methyl-D-erythritol 4-phosphate cytidylyltransferase
  Pfam annotation: Domain name=IspD; Domain location=75-296; Score =189.7; E_value=8.1e-54; Accession=PF01128.11; Description =Uncharacterized protein family UPF0007
  Pfam annotation: Domain name=NTP_transferase; Domain location=76-297; Score=-93.8; E_value=0.088; Accession=PF00483.15; Description =Nucleotidyl transferase
  Pfam module annotation: Pfam domain module=IspD::NTP_transferase; Domain location=75-296::76-297
  Subcellular localization annotation: CTP_CleavageSite=58; ConfidenceScore=5.39e-01
MELRLCLRLHARLPPATTPPPPPFAAPAVLPASRRIRTGGSYGVALRRPTRRSNPAIRASEADGAPGVAVKERSVSVILLSGGQGKRMGASMPKQYLPLLGLPIALHSLKTFCQLKEMKEVVVVCDPDYSDVFEGSIENLQIPLKFACPGKERQDSVFNGLQEIDGDSELVCVHDSARPLVSSEDVKKVLQDAAVHGAAVLGVPVKATIKEANSDSFVVKTLDRKTLWEMQTPQVMKPDLLKAGFELVKRDGLEVTDDVSIVEYLKHPVYITEGSYTNIKVTTPDDMLLAERLMSGK

SEQ ID NO: 99262 - protein, 131 aa, Setaria italica
  misc_feature (111)..(111): Xaa can be any naturally occurring amino acid
  Transcript Sequence Number=SeqID_33288
  Gene Ontology: Mol. function=DNA-directed DNA polymerase activity; Cellular component=nucleus; Biological process=DNA replication
  Homolog annotation: Hit_ID=B9RMM9; Match level="QueryCoverage=94%, HitCoverage=19%, E-value=5e-35, Identity=60%"; Hit description=Alpha DNA polymerase, putative
NPSGHCFVASKLIDSIPVSVDAQLPSAKKQAVDNGNHHQNSDAGTLPRALSSVIAAGPYTTTDNLLFEPLQELLSYACRKQPQLLILMGPFIDSDHPDIKKGTVDQTFHDXFFHFEILRKIQDFYPVILGN

SEQ ID NO: 99263 - protein, 117 aa, Setaria italica
  Transcript Sequence Number=SeqID_33289
  Gene Ontology: Mol. function=metal ion binding; Cellular component =nucleus; Biological process=chromatin modification
  Homolog annotation: Hit_ID=B9RZJ4; Match level="QueryCoverage=100%, HitCoverage=34%, E-value=4e-39, Identity=67%"; Hit description =Histone-lysine N-methyltransferase ATXR6, putative
  Subcellular localization annotation: CTP_CleavageSite=53; ConfidenceScore=5.06e-01
LVVSKKKRKLLPFNPCEDPAQRLRQMASLATALTATGAAFSNHLTYQPGMAPRSANRAALEAGGMQVLPKEDVEALSQCQRMMERGECPPLLVVYDPVEGFTVEADRFIRDLTIITE

SEQ ID NO: 99264 - protein, 89 aa, Setaria italica
  Transcript Sequence Number=SeqID_33290
  Gene Ontology: Cellular component=cytoskeleton; Biological process =phagocytosis
  Homolog annotation: Hit_ID=Q2RB17; Match level="QueryCoverage=100%, HitCoverage=31%, E-value=4e-30, Identity=69%"; Hit description =Phagocytosis and cell motility protein ELMO1, putative, expressed
ILSVVSLCRKMSTKVGVHFIQLLEDDEAAFDNLFCVAFQVLDAQWLARQASYMEFNEVLKSTRVQLEKELTMGCISSVQELPSFRMLTR

SEQ ID NO: 99265 - protein, 79 aa, Setaria italica
  Transcript Sequence Number=SeqID_33291
  Gene Ontology: Cellular component=cytoskeleton
  Homolog annotation: Hit_ID=Q2RB17; Match level="QueryCoverage=100%, HitCoverage=27%, E-value=3e-17, Identity=58%"; Hit description =Phagocytosis and cell motility protein ELMO1, putative, expressed
MASKAIKRRPCRTETDSTSEKRMETTIPNPVTEPLLGNGPHEDKSKRYEPATWSGFWDGTRQECLRWAHLLSIFIAQSA

SEQ ID NO: 99266 - protein, 129 aa, Setaria italica
  misc_feature (11)..(11): Xaa can be any naturally occurring amino acid
  misc_feature (19)..(19): Xaa can be any naturally occurring amino acid
  misc_feature (85)..(85): Xaa can be any naturally occurring amino acid
  misc_feature (92)..(92): Xaa can be any naturally occurring amino acid
  Transcript Sequence Number=SeqID_33292
  Gene Ontology: Cellular component=cytoskeleton; Biological process =phagocytosis
  Homolog annotation: Hit_ID=Q9SS63; Match level="QueryCoverage=77%, HitCoverage=54%, E-value=4e-38, Identity=71%"; Hit description =T12J13.11 protein
  Pfam annotation: Domain name=ELMO_CED12; Domain location=11-129; Score=80.7; E_value=5.1e-21; Accession=PF04727.5; Description =ELMOCED-12 family
VPLNLSPLQVXRLRLLRQXRLDVPYDCSSVKHQGALKEHWRLAYPDRQLPPLKSDLWKEMGWQNSDPSTDFRAGGFLSLENLIYXARNYPDXSFHRLLHKVEGKRAEWEYPFAAGGVNISYMLVQMLDL

SEQ ID NO: 99267 - protein, 353 aa, Setaria italica
  misc_feature (122)..(122): Xaa can be any naturally occurring amino acid
  misc_feature (204)..(204): Xaa can be any naturally occurring amino acid
  Transcript Sequence Number=SeqID_33293
  Gene Ontology: Cellular component=cytoskeleton; Biological process =phagocytosis
  Homolog annotation: Hit_ID=Q2RB17; Match level="QueryCoverage=94%, HitCoverage=99%, E-value=2e-86, Identity=52%"; Hit description =Phagocytosis and cell motility protein ELMO1, putative, expressed
  Pfam annotation: Domain name=ELMO_CED12; Domain location=122-304; Score=178.5; E_value=1.8e-50; Accession=PF04727.5; Description =ELMOCED-12 family
MASKAIKRRPCRTETDSTSEKRMETTIPNPVTEPLLGNGPHEDKSKRYEPATRSGFWDGTRQDCLRWAHLLSIFIAQSARKIVNVLSEFGSLIARLFGCSSAPQSSQNGQTVPLNLSPLQVXRLRLLRQRLDVPYDCSSVKHQDALKELWRLAYPDRQLPPLKSDLWKEMGWQNSDPSTDLGQVGSCLHDKLSCIMLTPLEPIXFYAELAGQDSFHRLLHKVEGKRAEWEYPFAAGGVNISYMLVQMLDLQSGKMSTKAGVHFIQLLEDDEAAFDNLFCVAFQVLDAQWLARQASYMEFNEVLKSTRVQLEKELTMGCISSVQELPSFRMLKSFALIRLRFLVECWHHLWILL

SEQ ID NO: 99268 - protein, 210 aa, Setaria italica
  Transcript Sequence Number=SeqID_33294
  Gene Ontology: Mol. function=transcription factor activity; Cellular component=nucleus; Biological process=regulation of transcription, DNA-dependent
  Homolog annotation: Hit_ID=B6T5I4; Match level="QueryCoverage=99%, HitCoverage=52%, E-value=1e-78, Identity=71%"; Hit description =AP2/EREBP transcriptional factor WRI1
  Pfam annotation: Domain name=AP2; Domain location=4-56; Score=69.0; E_ value=1.7e-17; Accession=PF00847.12; Description=AP2 domain
RGVSKYKGVARHHHNGRWEARIGRVFGNKYLYLGTFDTQEEAAKAYDLAAIEYRGANAVTNFDISCYLDHPLLLAQLQQDPQVVPALNQEPQPDQSETTVQESDSSEEKTPDNNAEPDDNAEPDANAEPANNAEPLTVDDSIEESLWSPCMDYELDTMSRSNFGSSINLNEWFTDADFDSNIGCLFDGCSLVDEGSKDGVGLADFSLFEE

SEQ ID NO: 99269 - protein, 42 aa, Setaria italica
  Transcript Sequence Number=SeqID_33295
  Gene Ontology: Mol. function=transcription factor activity; Cellular component=nucleus; Biological process=regulation of transcription, DNA-dependent
  Homolog annotation: Hit_ID=B6T5I4; Match level="QueryCoverage=92%, HitCoverage=9%, E-value=5e-18, Identity=100%"; Hit description =AP2/EREBP transcriptional factor WRI1
GFSRGVSKYRGVARHHHNGRWEARIGRVFGNKYLYLGTFGMD

SEQ ID NO: 99270 - protein, 127 aa, Setaria italica
  misc_feature (32)..(32): Xaa can be any naturally occurring amino acid
  misc_feature (95)..(95): Xaa can be any naturally occurring amino acid
  misc_feature (108)..(108): Xaa can be any naturally occurring amino acid
  Transcript Sequence Number=SeqID_33296
  Pfam annotation: Domain name=PPR; Domain location=17-51; Score=19.6; E_value=0.013; Accession=PF01535.12; Description=PPR repeat
PESQLLVFDGPKETDVFSWTVILSGYVRVDEXYEVIECFRSMLQGNKRPHHTSNLLKCCSDLATGILKLHAPTILIGNQNRLEEFEYSNALVDMXKCENVTDAEMLFXESTYDEVAWNVTICGLWLL

SEQ ID NO: 99271 - protein, 96 aa, Setaria italica
  misc_feature (75)..(75): Xaa can be any naturally occurring amino acid
  Transcript Sequence Number=SeqID_33297
RLLVLELLSISFKEGAEHQTSLDWGDELYDGESDELQSIGLQSGETCPLPENWCAYISGSQRPASHPSHEVLQVXYLTAWLANVNIKKSRIDAIFE

SEQ ID NO: 99272 - protein, 261 aa, Setaria italica
  Transcript Sequence Number=SeqID_33298
RNVRNQWSHLHAATEQWLAAAADGRSHASLVVNAHISHRDMPGTDLGVLKDMPGIRDKASSKLALREEQYGDMLLSCYKNMVRALCRLVKASRSMRCFSKVSPNGSVAQFSERQDDLNDLGDGGGAPVFKWFSILEFESLAQELVEMFVSDLKLKRLLVLELLSISFKEGAEHQTSLDWGDELYDGESDELQSIGLQSGETCPLPENWCAYISGSQRPASHPSHEVLQVYLTAWLANVNIKKSRIDAIFELVEEEMKIKLS

SEQ ID NO: 99273 - protein, 73 aa, Setaria italica
  Transcript Sequence Number=SeqID_33299
MAPPRSHLLPALLVLCACTVAPPPAPVAAANVPITTCRSFCGNITVDYPFALHPGCGHAGLRDLLFCINGALM

SEQ ID NO: 99274 - protein, 75 aa, Setaria italica
  Transcript Sequence Number=SeqID_33300
  Gene Ontology: Mol. function=serine-type carboxypeptidase activity; Cellular component=extracellular region; Biological process =proteolysis
  Homolog annotation: Hit_ID=B9SCM6; Match level="QueryCoverage=93%, HitCoverage=16%, E-value=1e-12, Identity=52%"; Hit description =Retinoid-inducible serine carboxypeptidase, putative
LGDSWISPEDFTLSYTPLLLSVSRLDDNAGDEASKMAETVKEQIASGNFTDAEGSWNDLLHFIGTWSGHVVSADS

SEQ ID NO: 99275 - protein, 457 aa, Setaria italica
  Transcript Sequence Number=SeqID_33301
  Gene Ontology: Mol. function=serine-type carboxypeptidase activity; Cellular component=extracellular region; Biological process =proteolysis
  Homolog annotation: Hit_ID=Q67Y83; Match level="QueryCoverage=92%, HitCoverage=93%, E-value=1e-144, Identity=57%"; Hit description =Serine carboxypeptidase-like 51
  Pfam annotation: Domain name=Peptidase_S10; Domain location=29-454; Score=239.1; E_value=1.1e-68; Accession=PF00450.14; Description =Serine carboxypeptidase
MDRPCCPLALLPLLLCLASLRAGSAASITTGTPDGSERWGYVEVRPKAHLFWWYYKSPQRTSSPAKPWPTVLWLQGGPGASGVGLGNFLEVGPLDVNLKPRNSTWLQKADLIFVDNPVGVGYSYVEDDTLLVTTDWQQAADATTLLKALVKEVPTLQSSPLFLVAESYGGKYAATLGASVARAVRAGELKVNLAGVALGDSWISPEDFTLSYTPLLLSVSRLDDNAGDEANKKAENVKRQITGGQFADAQRSWTDLLDIIGTRSGNVDMYNFLLDSGMDPVSADTPTVSSPSNVQALRYATYLGSQDSDSNTIDSIMNGVIKEKLRIVPKDLKWVEVSQAVYNTLVNDFMKPRIDEIDELLSYGINVTVYNGQLDVICSTNGAEAWVQKLKWDGLKSFLSLPRQSLYCGQSKGTKAFVRSYKNLHFYWILGAGHFVPADQPCIALSMIGSITQSPAS

SEQ ID NO: 99276 - protein, 47 aa, Setaria italica
  Transcript Sequence Number=SeqID_33302
RRSAHRRPAPPLTAQHPRSLLSILAHCPASSCCLASPAGPTWRTNGG

SEQ ID NO: 99277 - protein, 95 aa, Setaria italica
  Transcript Sequence Number=SeqID_33303
  Gene Ontology: Mol. function=protein dimerization activity; Cellular component=nucleus; Biological process=regulation of transcription, DNA-dependent
  Homolog annotation: Hit_ID=B6TN24; Match level="QueryCoverage=72%, HitCoverage=21%, E-value=3e-21, Identity=72%"; Hit description=BZIP transcription factor
MGSQTMASKAGGGGGGGAGGGGAGAAQRGQMQNLSRQGSLYNLTLDEVQSHLGEPLHSMNLDELLKSVFPDGLEHDGGTTSQYEQTSGLLRQGSI

SEQ ID NO: 99278 - protein, 72 aa, Setaria italica
  Transcript Sequence Number=SeqID_33304
  Gene Ontology: Mol. function=nucleic acid binding; Cellular component= cytoplasm; Biological process=multicellular organismal development
  Homolog annotation: Hit_ID=Q7XSA2; Match level="QueryCoverage=75%, HitCoverage=4%, E-value=4e-27, Identity=98%"; Hit description =Protein argonaute 1B
DVLPRVGQWNMMNKKMVNGGRVSNWACINFSRNVQDSAARGFCHELAIMCQISGRCPAHALEGADRSLSAEQ

SEQ ID NO: 99279 - protein, 36 aa, Setaria italica
  Transcript Sequence Number=SeqID_33305
  Gene Ontology: Mol. function=nucleic acid binding; Cellular component= cytoplasm; Biological process=multicellular organismal development
  Homolog annotation: Hit_ID=B9SJV6; Match level="QueryCoverage=100%, HitCoverage=3%, E-value=1e-15, Identity=100%"; Hit description =Eukaryotic translation initiation factor 2c, putative
AGIQGTSRPAHYHVLWDENKFTADGLQSLTNNLCYT

SEQ ID NO: 99280 - protein, 165 aa, Setaria italica
  misc_feature (58)..(58): Xaa can be any naturally occurring amino acid
  misc_feature (148)..(148): Xaa can be any naturally occurring amino acid
  Transcript Sequence Number=SeqID_33306
  Gene Ontology: Mol. function=nucleic acid binding; Cellular component= cytoplasm; Biological process=multicellular organismal development
  Homolog annotation: Hit_ID=Q7XSA2; Match level="QueryCoverage=95%, HitCoverage=11%, E-value=2e-49, Identity=63%"; Hit description =Protein argonaute 1B
VTVVDSKICHPTEFDFYLCSHAGIQGTSRPAHYHVLWDENKFTADELQTLTNNLCYTXLYTAPSIHYFPRTLELLPIKHCFNFCRYARCTRSVSIVPPAYYAHLAAFRARFYMEPDTSDSGSMAVAPWPSTRWARSSRAAGSVAVRPXPALKENVKRVIVLLLRC

SEQ ID NO: 99281 - protein, 227 aa, Setaria italica
  misc_feature (11)..(11): Xaa can be any naturally occurring amino acid
  Transcript Sequence Number=SeqID_33307
  Gene Ontology: Mol. function=nucleic acid binding; Cellular component= cytoplasm; Biological process=multicellular organismal development
  Homolog annotation: Hit_ID=Q7XSA2; Match level="QueryCoverage=100%, HitCoverage=20%, E-value=1e-109, Identity=86%"; Hit description =Protein argonaute 1B
  Pfam annotation: Domain name=DUF1785; Domain location=142-194; Score =105.5; E_value=1.8e-28; Accession=PF08699.2; Description=Domain of unknown function (DUF1785)
TYFFAELPDKXLHHYDVSITPEVTSRGVNRAVMGELVTLYRQSHLDGRLPAYDGRKSLYTAGPLPFTSRTFEITLQDEEDSLGGGQGGQRRQRVFKVVIKFANRADLHHLAMFLSGRQPDAPQEALQVLDIVLRELPTARYCPVGRSFYSPNLGRRQQLGDGLETWRGFYQSIRPTQMGLSLNIGMSSTAFIEPLPVIDFVAELLNRDVSVRPLSDSDRVKIKKALR

SEQ ID NO: 99282 - protein, 54 aa, Setaria italica
  Transcript Sequence Number=SeqID_33308
  Subcellular localization annotation: CTP_CleavageSite=27; ConfidenceScore=5.10e-01
RFYMEPDTSDSGSMASGARGPPPGGARSSRAAGSVAVRPLPALKENVKRVMFYC

SEQ ID NO: 99283 - protein, 294 aa, Setaria italica
  Transcript Sequence Number=SeqID_33309
  Gene Ontology: Mol. function=nucleic acid binding; Cellular component= cytoplasm; Biological process=multicellular organismal development
  Homolog annotation: Hit_ID=Q7XSA2; Match level="QueryCoverage=35%, HitCoverage=9%, E-value=4e-35, Identity=82%"; Hit description =Protein argonaute 1B
RRRQSDWRRPCQFRRALRRALRRRRASDRGSIMVRKKRTGPGESSGEAPGVPGQGSSQRPETTQQHGGGRGLLPQQGARGAGQHQGRGGYQGRGGPPESQPRDYQGRGGYQGRGGPPSQHPGGPPEVQLRGYQGRGGPPSQHPGGGPPEYQGRGGPRPRGGVPQPHYGRRGGGSVGPSVPPGPSRSVPELHQAPYVQYQAPVAVSPSTLGASSSSQPAEAEVSTGQVQQQFQELAIRGQSSTSQAVQMAPASSKSVKFPLRPGKGTYGSRCIVKANHFFAELPDKDLHHYDVSP

SEQ ID NO: 99284 - protein, 644 aa, Setaria italica
  misc_feature (74)..(74): Xaa can be any naturally occurring amino acid
  misc_feature (505)..(505): Xaa can be any naturally occurring amino acid
  Transcript Sequence Number=SeqID_33310
  Gene Ontology: Mol. function=nucleic acid binding; Cellular component= cytoplasm; Biological process=multicellular organismal development
  Homolog annotation: Hit_ID=Q7XSA2; Match level="QueryCoverage=100%, HitCoverage=57%, E-value=0.0, Identity=91%"; Hit description=Protein argonaute 1B
  Pfam annotation: Domain name=PAZ; Domain location=1-116; Score=136.2; E_value=1e-37; Accession=PF02170.14; Description=PAZ domain
  Pfam annotation: Domain name=Piwi; Domain location=269-592; Score =533.4; E_value=2.7e-157; Accession=PF02171.9; Description=Piwi domain
  Pfam module annotation: Pfam domain module=PAZ::Piwi; Domain location= 1-116::269-592
DRVKIKKALRGVKIEVTHRGNMRRKYRISGLTSQATRELSFPIDDRGTVKTVVQYFLETYGFSIQHTSLPCLQXVGNQQRPNYLPMEVCKIVEGQRYSKRLNEKQITALLKVTCQRPQEREKDILQTVHHNAYFEDPYAQEFGIKIDERLAAVEARVLPPPRLKYHDSGREKDVLPRVGQWNMMNKKMVNGGRVSSWACINFSRNVQDNAARMFCQELAQMCQVSGMDFALEPVLPPSYARPEHVERALKGRYQDAMNILRPQGRELDLLIVILPDNNGSLYGDLKRICETDLGLVSQCCLTKHVFKANKQQYLANVALKINVKVGGRNTVLVDALARRIPLVSDRPTIIFGADVTHPHPGEDSSPSIAAVVASQDWPEVTKYAGLVSAQAHRQELIQDLFKVWQDPQRGTVTGGMVKELLISFRRATGQKPQRIIFYRDGVSEGQFYQVLLYELDAIRKACASLEPNYQPPVTFVVVQKRHHTRLFANNHKDQRSVDRSGNILXPGTVVDSKICHPTEFDFYLCSHAGIQGTSRPAHYHVLWDENKFTADGLQSLTNNLCYTYARCTRSVSVVPPAYYAHLAAFRARFYLEPDTSDSGSMVSGATMSRGPQPGSSRSSRAVGNVAVRPLPALKENVKRVMFYC

SEQ ID NO: 99285 - protein, 1104 aa, Setaria italica
  Transcript Sequence Number=SeqID_33311
  Gene Ontology: Mol. function=nucleic acid binding; Cellular component= cytoplasm; Biological process=multicellular organismal development
  Homolog annotation: Hit_ID=Q7XSA2; Match level="QueryCoverage=86%, HitCoverage=85%, E-value=0.0, Identity=92%"; Hit description=Protein argonaute 1B
  Pfam annotation: Domain name=DUF1785; Domain location=391-443; Score =110.2; E_value=6.9e-30; Accession=PF08699.2; Description=Domain of unknown function (DUF1785)
  Pfam annotation: Domain name=PAZ; Domain location=444-581; Score =173.5; E_value=5.9e-49; Accession=PF02170.14; Description=PAZ domain
  Pfam annotation: Domain name=Piwi; Domain location=734-1055; Score =548.9; E_value=5.9e-162; Accession=PF02171.9; Description=Piwi domain
  Pfam module annotation: Pfam domain module=DUF1785::PAZ::Piwi; Domain location=391-443::444-581::734-1055
MICDLDMAMRVENGRPHQVPIMVRKKRTGPGGSGETSGESSGASGQGSSQRPERTQQHGGGRGWPQQGGRGGGQYQGRGGHYQGRGGPGPHHPGGGPPEYHPRDYQGRGGEYQGRGGDYQGRGGEYQGRGGPRPRGGMPQPYYGGQRGGSVGRNVPPGPSRTVPELHQAPYVQYQAPMVSPSPSGPGSSSQPVTEVSSGHVQQQFQQLSIRGQTSTSQEIQVAPASSKSVRFPLRPGKGTYGDRCIVKANHFFAELPDKDLHQYDVSITPEVTSRGVNRAVMGELVTLYRQSQLGGRLPAYDGRKSLYTAGPLPFTSRTFEITLQDEEDSLSGGQGGQRRERVFRVVIKFAARADLHHLAMFLAGRQADAPQEALQVLDIVLRELPTARYSPVGRSFYSPDLGRRQQLGEGLESWRGFYQSIRPTQMGLSLNIDMSSTAFIEPLPVIDFVAQLLNRDISVRPLSDSDRVKIKKALRGVKVEVTHRGNMRRKYRISGLTSQATRELSFPVDDRGTVKTVVQYFMETYGFSIQHTTLPCLQVGNQQRPNYLPMEVCKIVEGQRYSKRLNEKQITALLKVTCQRPQERELDILQIVHHNAYYEDPYAQEFGIRIDERLAAVEARVLPPPRLKYHDSGREKDVLPRVGQWNMMNKKMVNGGRVSNWACINFSRNVQDSAARGFCHELAIMCQISGMDFALEPVLPPLTARPEHVERALKARYQDAMNILRPQGRELDLLIVILPDNNGSLYGDLKRICETDLGLVSQCCLTKHVFKMSKQYLANVALKINVKVGGRNTVLVDALTRRIPLVSDRPTIIFGADVTHPHPGEDSSPSIAAVVASQDWPEVTKYAGLVSAQAHRQELIQDLFKVWQDPQRGTVTGGMIKELLISFKRATGQKPQRIIFYRDGVSEGQFYQVLLYELDAIRKACASLEPNYQPPVTFVVVQKRHHTRLFANNHNDQRTVDRSGNILPGTVVDSKICHPTEFDFYLCSHAGIQGTSRPAHYHVLWDENKFTADELQTLTNNLCYTYARCTRSVSIVPPAYYAHLAAFRARFYMEPDTSDSGSMASGARGPPPGGARSSRAAGSVAVRPLPALKENVKRVMFYC

SEQ ID NO: 99286 - protein, 209 aa, Setaria italica
  Transcript Sequence Number=SeqID_33312
  Gene Ontology: Biological process=olfactory learning
  Homolog annotation: Hit_ID=Q80WB5; Match level="QueryCoverage=76%, HitCoverage=73%, E-value=3e-23, Identity=41%"; Hit description=WDYHV motif-containing protein 1
  Pfam annotation: Domain name=WDYHV; Domain location=9-202; Score =297.0; E_value=4.1e-86; Accession=PF09764.1; Description =Uncharacterized conserved protein
STTTKSISEENIYMLCKELIRIGVADPMGTDLYVVFISNEEKKVPLWHQKASNSDEGFICWDYHVICAQAKRNKGEVLDLVWDLDSDLPFPSPFSQYVSDAIQPLAFGDSIYRRLFRVVHAPLFLQSFASDRSHMKNPAGNWIQLPPKYDPIMAADGTTDNLNEYIAMSVEDVADLESVVNDVYSNKHGVVVNETILPRFFARLPGSHP

SEQ ID NO: 99287 - protein, 120 aa, Setaria italica
  misc_feature (108)..(108): Xaa can be any naturally occurring amino acid
  Transcript Sequence Number=SeqID_33313
  Gene Ontology: Mol. function=nucleotide binding
  Homolog annotation: Hit_ID=Q1EP28; Match level="QueryCoverage=85%, HitCoverage=12%, E-value=1e-34, Identity=64%"; Hit description =Dynamin family protein
KVLIYYYLISKFYLLTNNLIIGADDIGSKSGSSYSTICAISARYFAKMREVLIERNVPSALNSGFLTPCRERLFLALGFELFAVNDDKFMDMFVAPGLLTLYQNERQXYLLKRQKILLCC

SEQ ID NO: 99288 - protein, 488 aa, Setaria italica
  Transcript Sequence Number=SeqID_33314
MEAEEEENCIQGQGLILSAVDEVSDGVEEKRLECDPVSVEIKKCEPEQALDIKKLEPVEPMEAKKLEIKKSESVHVVEIKKCEPVKAGQIKKSEPVNSVETQNPKLVQAVEINKCEHAQELEVKKLEPVEPLEIRKSDPVEPVEIKKSEPVKPRSSIAQRIKLWEAQVCGNIKPVLEDEENSVESSLEVGPVKDLKKCMRFEADPCVNNRNSEQQAQDAAHDQESTNEQHEQEFKDVKEYTRSETETSSAKCSQNDEAEEVALAVSLPEEELQQGCKDEQPEPELQEQVYEIAQAEQELQEMEEVYADVTSSPAMWNGRESPLKSSSIAGRVHSRTSSENLVSEGSPSRKDKEWKRTLACKLYEERMQLRLCRDRAVVEGSDNMDMLWEAYEVGGGGGGGKGRGGKRSGSKAKSVANDKVEELVDEGEEEEEEDDDEEVRQLCCLQALKLSTRKMNFGGGKPSLSKITKVLRRMTALSRMGSRRKQSG

SEQ ID NO: 99289 - protein, 61 aa, Setaria italica
  Transcript Sequence Number=SeqID_33315
QKYITMKEQNWENRSHKKNNIDIRGYKIKVACRTKVPVCIKNITIKTSSQCNFPFLNDQLN

SEQ ID NO: 99290 - protein, 97 aa, Setaria italica
  Transcript Sequence Number=SeqID_33316
LCLHPGRNKNLQGCIVRLVYFLHKQQKNESADNKIPENSRQNVGKQHAEDQKYKEISRYQEAQIFKDLAKHADNNSNQQTLDIAKREHNTQSLTGNM

SEQ ID NO: 99291 - protein, 146 aa, Setaria italica
  misc_feature (63)..(63): Xaa can be any naturally occurring amino acid
  misc_feature (108)..(108): Xaa can be any naturally occurring amino acid
  misc_feature (123)..(123): Xaa can be any naturally occurring amino acid
  Transcript Sequence Number=SeqID_33317
  Gene Ontology: Mol. function=catalytic activity; Biological process =cellular metabolic process
  Homolog annotation: Hit_ID=B7EIE5; Match level="QueryCoverage=100%, HitCoverage=84%, E-value=2e-70, Identity=88%"; Hit description=(RAP Annotation release2) dTDP-4-dehydrorhamnose reductase family protein
IIYGPQTISPVAKSLPIQWMDSVLSQGQQVEFFNDEFRCPVYVKDMVDVILSLAKTWLSDGKXVQVLLNVGGPDRVSRLQMADSVATVRGYNHSIIKSVSASSVNRGXASPSDISMDITKLTXMLSIKPISFQDGVRATLDAEANS

SEQ ID NO: 99292 - protein, 94 aa, Setaria italica
  misc_feature (6)..(6): Xaa can be any naturally occurring amino acid
  misc_feature (24)..(24): Xaa can be any naturally occurring amino acid
  Transcript Sequence Number=SeqID_33318
RAAAAXAKEEEAEEEQDDRGTPRXLPTMFGRIREGARARREEKEREREKVARRRQAAGVDAGEPAAALGSLEANSKVAKMMAMMGYKKGMGLGK

SEQ ID NO: 99293 - protein, 115 aa, Setaria italica
  misc_feature (111)..(111): Xaa can be any naturally occurring amino acid
  Transcript Sequence Number=SeqID_33319
  Gene Ontology: Mol. function=hydrolase activity; Cellular component =cytoplasm; Biological process=fatty acid metabolic process
  Homolog annotation: Hit_ID=Q84VJ1; Match level="QueryCoverage=99%, HitCoverage=35%, E-value=2e-58, Identity=92%"; Hit description =Biostress-resistance-related protein (Fragment)
  Pfam annotation: Domain name=Abhydrolase_2; Domain location=1-114; Score=-53.1; E_value=0.00078; Accession=PF02230.8; Description =PhospholipaseCarboxylesterase
THGLGDNGASWSQLLETLPLPNIKWICPTAPTRPVSVFGGFPSTAWFDVADLSEDAPDDVEGMDASAAHVANLLSTEPADIKLGVGGFSMGAATALYSATCFAHGKYGNDXPYPV

SEQ ID NO: 99294 - protein, 153 aa, Setaria italica
  Transcript Sequence Number=SeqID_33320
  Gene Ontology: Mol. function=protein serine/threonine kinase activity
  Homolog annotation: Hit_ID=Q9LQA1; Match level="QueryCoverage=96%, HitCoverage=13%, E-value=1e-16, Identity=32%"; Hit description =F4N2.17
  Pfam annotation: Domain name=DUF150; Domain location=3-149; Score= -9.2; E_value=8.4e-05; Accession=PF02576.9; Description =Uncharacterised BCR, YhbC family COG0779
FITIRVRIEKLSTRYGSPTIDDIEAYTIAYRAKLDDAESAGKIPQNISLEVSSPGVERVVRVPEELERFKERTMYVRYTTTSDEAAATPQEGDGVLRLISYDMDLRECTWGIADVKINRQQAGKGRPLSKKQREWQLQTPFESLKLVRLYSEC

SEQ ID NO: 99295 - protein, 67 aa, Setaria italica
  Transcript Sequence Number=SeqID_33321
  Gene Ontology: Mol. function=structural constituent of ribosome; Cellular component=ribonucleoprotein complex; Biological process =translation
  Homolog annotation: Hit_ID=B6TP32; Match level="QueryCoverage=100%, HitCoverage=49%, E-value=3e-24, Identity=86%"; Hit description=50S ribosomal protein L34
  Pfam annotation: Domain name=Ribosomal_L34; Domain location=24-67; Score=61.7; E_value=2.8e-15; Accession=PF00468.9; Description =Ribosomal protein L34
GLRLPRFFIDDVENPAANEPLLLIKRTYQPSTIKRKRTHGFLTRKSTKGGRKVIARRIAKGRHRLSV

SEQ ID NO: 99296 - protein, 80 aa, Setaria italica
  Transcript Sequence Number=SeqID_33322
TNSNRITANLRFRMINNDETLNFDAIPSPKQCSPAVPQELMVCKAQNDADSAMCQPNHVMYSFPVTFFIGNNSLLSATKI

SEQ ID NO: 99297 - protein, 129 aa, Setaria italica
  Transcript Sequence Number=SeqID_33323
  Gene Ontology: Mol. function=structural constituent of ribosome; Cellular component=ribonucleoprotein complex; Biological process =translation
  Homolog annotation: Hit_ID=B6TP32; Match level="QueryCoverage=62%, HitCoverage=59%, E-value=1e-33, Identity=88%"; Hit description=50S ribosomal protein L34
  Pfam annotation: Domain name=Ribosomal_L34; Domain location=86-129; Score=61.7; E_value=2.8e-15; Accession=PF00468.9; Description =Ribosomal protein L34
AGSSLLGRLLASPSQPLLRAGLPPLARLQPHVPPPPAAAVDAYEAEAVARLTSVPCEISFPCGLPSLRFFIDDVENPAANEPLLLIKRTYQPSTIKRKRTHGFLTRKSTKGGRKVIARRIAKGRHRLSV

SEQ ID NO: 99298 - protein, 87 aa, Setaria italica
  Transcript Sequence Number=SeqID_33324
  Gene Ontology: Cellular component=integral to membrane
  Homolog annotation: Hit_ID=B9RP33; Match level="QueryCoverage=90%, HitCoverage=22%, E-value=2e-21, Identity=60%"; Hit description=UDP -sugar transporter, putative
LISCLVGFSGLVCGPSVLFLTYIQGDLKRAIEFPYLYSPGFQAVLLFSCILAFLLNYTIFWNTILNSALTQSMCGNLKVGLLFGIGW

SEQ ID NO: 99299 - protein, 103 aa, Setaria italica
  misc_feature (53)..(53): Xaa can be any naturally occurring amino acid
  Transcript Sequence Number=SeqID_33325
  Gene Ontology: Cellular component=integral to membrane
  Homolog annotation: Hit_ID=B9RP33; Match level="QueryCoverage=88%, HitCoverage=25%, E-value=3e-31, Identity=70%"; Hit description=UDP -sugar transporter, putative
PTNQGFISVALIVFGAFIAGARDLSFDARGYAIVFVANITTAVYLATINRIGXSGLNSFGLMWCNGLVCGPSVLFLTYIQGDLKRAIEFPYLYSPGFQVTPWI

SEQ ID NO: 99300 - protein, 66 aa, Setaria italica
  Transcript Sequence Number=SeqID_33326
  Gene Ontology: Cellular component=integral to membrane
  Homolog annotation: Hit_ID=B9RP33; Match level="QueryCoverage=98%, HitCoverage=18%, E-value=1e-15, Identity=63%"; Hit description=UDP -sugar transporter, putative
FVPFRILLRTTPLSLAYLLYMLASMESVRGVNVPMYTTLRRTTVVFTMTMEYFLAKQKHTPPIIGR

SEQ ID NO: 99301 - protein, 354 aa, Setaria italica
  Transcript Sequence Number=SeqID_33327
  Gene Ontology: Mol. function=UDP-N-acetylgalactosamine transmembrane transporter activity; Cellular component=integral to membrane; Biological process=embryonic development ending in birth or egg hatching
  Homolog annotation: Hit_ID=B9RP33; Match level="QueryCoverage=82%, HitCoverage=82%, E-value=1e-113, Identity=68%"; Hit description=UDP -sugar transporter, putative
  Pfam annotation: Domain name=DUF6; Domain location=58-197; Score =10.2; E_value=0.02; Accession=PF00892.12; Description=Integral membrane protein DUF6
  Pfam annotation: Domain name=TPT; Domain location=206-348; Score =41.6; E_value=3e-09; Accession=PF03151.8; Description=Triose -phosphate Transporter family
  Pfam annotation: Domain name=UAA; Domain location=49-354; Score= -116.0; E_value=0.00015; Accession=PF08449.3; Description=UAA transporter family
  Pfam module annotation: Pfam domain module=DUF6::TPT::UAA; Domain location=58-197::206-348::49-354
AERGKEWLGVGGERGQLLPVSADDGKGNGGGGAGDDAALFKGSAMTRRGAFAALSYMACSVLLVMFNKAALSSYNFPCANVITLLQMVCSTCLLYVLRRLKIISFTNSDPSVPSDSLFFVPFRILLRTTPLSLAYLLYMLASMESVRGVNVPMYTTLRRTTVVFTMTMEYFLAKQKHTPPIIGSVALIVFGAFIAGARDLSFDARGYAIVFVANITTAVYLATINRIGKSSGLNSFGLMWCNGLVCGPSVLFLTYIQGDLKRAIEFPYLYSPGFQAVLLFSCILAFLLNYTIFWNTILNSALTQSMCGNLKDFFTVGIGWVLFGGLPFDLLNVIGQGLGFLGSGLYAYCKIKGK

SEQ ID NO: 99302 - protein, 478 aa, Setaria italica
  Transcript Sequence Number=SeqID_33328
  Gene Ontology: Mol. function=protein serine/threonine kinase activity; Cellular component=plasma membrane; Biological process =protein amino acid phosphorylation
  Homolog annotation: Hit_ID=B6TR03; Match level="QueryCoverage=93%, HitCoverage=92%, E-value=0.0, Identity=94%"; Hit description=Protein kinase APK1A
  Pfam annotation: Domain name=Pkinase; Domain location=125-405; Score =172.2; E_value=1.5e-48; Accession=PF00069.17; Description=Protein kinase domain
  Pfam annotation: Domain name=Pkinase_Tyr; Domain location=125-405; Score=118.5; E_value=2.1e-32; Accession=PF07714.9; Description =Protein tyrosine kinase
  Pfam module annotation: Pfam domain module=Pkinase::Pkinase_Tyr; Domain location=125-405::125-405
EGKRRGEKDGKRKGTGKAKAKAAALVVEDAAPVTGCWIRFPRLRGCMSSRAKVDSSTSGGGGQSKPAIDGCKDCQDQSVPPASCSTTTSNTGSISPSSIVGEELKLAFQLRRFTFNELKCATRNFRPESLLGEGGFGCVFKGWIEENGTAPVKPGTGLTVAVKTLNHDGLQGHKEWVAEVDFLGNLQHPHLVKLVGYCIEDDQRLLVYEFMPRGSLENHLFRKSLPLPWAIRMKIALGAAKGLAFLHEEAERPVIYRDFKTSNILLDADYNAKLSDFGLAKDGPEGDKTHVSTRVMGTYGYAAPEYVMTGHLTSKSDVYSFGVVLLEMMTGRRSMDKNRPNGEHNLVEWARPYLGERRRFYKLVDPHLDGNFSIKGAQKTAQLAHACLSRDPKARPLMSQVVEVLKPLQNLKDMASSSYFFQSMQHERRTALASPQGSQSMKAQSTFARNGQQPLRSLSYGPHASPYRQSPRPDGKRQ

SEQ ID NO: 99303 - protein, 120 aa, Setaria italica
  Transcript Sequence Number=SeqID_33329
GGAAVAARCRRADVESFGGVRLARCKAARLDWCGTVEVEMCRAIDVSRCGAVTGERCRVVNAAGCGSVAVAHAEVNMVEEEQLLSMNEPGAAFSAPAASHVCGAAEEDPAAAGDTASYLS

SEQ ID NO: 99304 - protein, 180 aa, Setaria italica
  Transcript Sequence Number=SeqID_33330
  Gene Ontology: Mol. function=2 iron, 2 sulfur cluster binding; Biological process=electron transport chain
  Homolog annotation: Hit_ID=B6U5I8; Match level="QueryCoverage=77%, HitCoverage=75%, E-value=4e-59, Identity=76%"; Hit description=2Fe -2S ferredoxin
  Pfam annotation: Domain name=Fer2; Domain location=69-153; Score =59.8; E_value=1e-14; Accession=PF00111.19; Description=2Fe-2S iron -sulfur cluster binding domain
MLSRLSRAGLQALNRARPGQNSVPSRSHEVEAISTYMIRAGRNLFCSSTNATTGDSNNKLEARISVTFVDKDGEEKLVKVPIGMSMLEAAHENDIELEGACEGSLACSTCHVIVTDVNYYNKMEDPVDEENDMLDLAFGLTETSRLGCQVIASPELDGIRLALPAATRNFAVDEYVAKSH

SEQ ID NO: 99305 - protein, 311 aa, Setaria italica
  misc_feature (142)..(142): Xaa can be any naturally occurring amino acid
  misc_feature (172)..(172): Xaa can be any naturally occurring amino acid
  Transcript Sequence Number=SeqID_33331
  Gene Ontology: Mol. function=metal ion binding; Cellular component =plasma membrane
  Homolog annotation: Hit_ID=B9SVA9; Match level="QueryCoverage=99%, HitCoverage=44%, E-value=2e-93, Identity=57%"; Hit description =Protein binding protein, putative
  Pfam annotation: Domain name=VWA; Domain location=124-305; Score =95.3; E_value=2.1e-25; Accession=PF00092.20; Description=von Willebrand factor type A domain
  Pfam annotation: Domain name=VWA_CoxE; Domain location=58-278; Score=- 83.5; E_value=0.053; Accession=PF05762.6; Description=VWA domain containing CoxE-like protei
  Pfam module annotation: Pfam domain module=VWA::VWA_CoxE; Domain location=124-305::58-278
NARINPGNGYQNGGHMTILRPLPRARSSGRLHHLAALLPDNDPSTFNDDEPLELSCEATEDPQQGSLRTVEIKTHPEFTEVPENTSERNFTVLIHLKAPLAQHLQTPSNLEDSKGPCTTRAPVDLITVLDVSGSMAGTKLAXFKRAMGFVIQNLGSSDRLSVIAFSSSARRXFPLRRMTESGRQQSLMAVNSLTSNGGTNIAEGLRKGSKVIEERKAKNPVCSIILLSDGQDTYTVSPTAGVHKGAPEYCALLPSTNGNQQVPVHVFGFGADHDSVSLHSISQTSGGTFSFIETEAAIQDAFAQCIGGLLS

SEQ ID NO: 99306 - protein, 232 aa, Setaria italica
  Transcript Sequence Number=SeqID_33332
  Gene Ontology: Mol. function=metal ion binding; Cellular component =plasma membrane
  Homolog annotation: Hit_ID=B9SVA9; Match level="QueryCoverage=94%, HitCoverage=26%, E-value=1e-38, Identity=43%"; Hit description =Protein binding protein, putative
  Pfam annotation: Domain name=PHD; Domain location=103-150; Score=4.7; E_value=0.008; Accession=PF00628.21; Description=PHD-finger
  Pfam annotation: Domain name=zf-C3HC4; Domain location=104-147; Score= 45.0; E_value=2.9e-10; Accession=PF00097.17; Description=Zinc finger, C3HC4 type (RING finger)
  Pfam module annotation: Pfam domain module=PHD::zf-C3HC4; Domain location=103-150::104-147
  Subcellular localization annotation: CTP_CleavageSite=61; ConfidenceScore=5.14e-01
MESRWRKAKMSLGLNLCVYVPRTLEGDDSNSPNTGSSTAALVSPVASSSSAATSANTTPTAASAEQSNGKANAGAGALMPTTPTPTSAGLRLSKSGSKSFKKTCAICLTTMKPGQGHALFTAECSHTFHFHCISANVKHGSSSCPVCRIKWKELPFRGPLPAELPQVNARINPGNGYQNGGHMTILRPLPRARSSGRLHHLAALLPDNEPLVNPSTNSLELSCEATEDPQQG

SEQ ID NO: 99307 - protein, 210 aa, Setaria italica
  Transcript Sequence Number=SeqID_33333
  Gene Ontology: Mol. function=binding
VLSKLPQEEGVKSAQLGTKDPWEECGCILWDLAASKPQAELMMKNLVLEVLLANLHVTQSPRVKEICIGIMGNLACHESLVNAISMQNGLIATVVGQLFLDDSACLSETFRFLAAVLRSSASVSWAEALLPDEILSRVLWIVGNTLNSTLLEKSIDFLSTVIDNQDVTAILLQPLIKVGLVDHVISLLASEIEKLSDESKFDRSVSLDLI

SEQ ID NO: 99308 - protein, 52 aa, Setaria italica
  Transcript Sequence Number=SeqID_33334
GHGSLFTPPLICLKTLRGTEGVEGRPFLHQYSLVVGPGYQGAEDSLHFKYDV

SEQ ID NO: 99309 - protein, 66 aa, Setaria italica
  misc_feature (57)..(57): Xaa can be any naturally occurring amino acid
  Transcript Sequence Number=SeqID_33335
  Gene Ontology: Mol. function=signal transducer activity; Biological process=G-protein coupled receptor protein signaling pathway
  Homolog annotation: Hit_ID=B6TWS6; Match level="QueryCoverage=96%, HitCoverage=16%, E-value=6e-25, Identity=87%"; Hit description =Guanine nucleotide-binding protein alpha-1 subunit
CAQILYDGAKELAQVESDSSKYVLSPDNQEIGEKLSEIGAKLDYPLLNKELVQDVRXLWQDPAIQE

SEQ ID NO: 99310 - protein, 74 aa, Setaria italica
  Transcript Sequence Number=SeqID_33336
  Gene Ontology: Mol. function=signal transducer activity; Biological process=G-protein coupled receptor protein signaling pathway
  Homolog annotation: Hit_ID=B6TWS6; Match level="QueryCoverage=100%, HitCoverage=18%, E-value=5e-33, Identity=93%"; Hit description =Guanine nucleotide-binding protein alpha-1 subunit
GAGELGKSTIFKQIKLIFQTGFDEGELRSYTSVIHANVYQTIKILYDGAKELAQVESDSSKYVLSPDNQEIGEK

SEQ ID NO: 99311 - protein, 235 aa, Setaria italica
  misc_feature (131)..(131): Xaa can be any naturally occurring amino acid
  misc_feature (145)..(145): Xaa can be any naturally occurring amino acid
  Transcript Sequence Number=SeqID_33337
  Gene Ontology: Mol. function=signal transducer activity; Cellular component=photoreceptor outer segment membrane; Biological process=G- protein coupled receptor protein signaling pathway
  Homolog annotation: Hit_ID=B6TWS6; Match level="QueryCoverage=99%, HitCoverage=54%, E-value=2e-97, Identity=78%"; Hit description =Guanine nucleotide-binding protein alpha-1 subunit
  Pfam annotation: Domain name=G-alpha; Domain location=23-235; Score= -21.9; E_value=1.1e-17; Accession=PF00503.12; Description=G-protein alpha subunit
MSVLTCVIESMGSSCSRHHSLNEAEAAENAKSADIDRRILQETKAEQHIHKLLLLGAGESGKSTIFKQIKLLFQTGFDEAELRSYTSVIHANVYQTIKILYDGAKELAQVESDSSKYVLSPDNQALRCLCXLIEASHRPPCPNFXEIGEKLSEIGAKLDYPLLNKELVQDVRKLWQDPAIQETYSRGSILQVPDCARYFMSNLDRLAEVDYVPPKEDMLYARVQTNWLSVEVQFR

SEQ ID NO: 99312 - protein, 217 aa, Setaria italica
  misc_feature (69)..(69): Xaa can be any naturally occurring amino acid
  Transcript Sequence Number=SeqID_33338
  Gene Ontology: Mol. function=signal transducer activity; Cellular component=apical cortex; Biological process=G-protein coupled receptor protein signaling pathway
  Homolog annotation: Hit_ID=B6TWS6; Match level="QueryCoverage=95%, HitCoverage=49%, E-value=1e-88, Identity=78%"; Hit description =Guanine nucleotide-binding protein alpha-1 subunit
  Pfam annotation: Domain name=G-alpha; Domain location=23-216; Score= -48.7; E_value=5.4e-16; Accession=PF00503.12; Description=G-protein alpha subunit
MSVLTCVIESMGSSCSRPHSLNEAEAAENARSADIDRQILQQTKAEQHIHKLLLLALLPAAVPNRAFVXGAGELGKSTIFKQIKLIFQTGFDEGELRSYTSVIHANVYQTIKILYDGAKELAQVESDSSKYVLSPDNQEIGEKLSEIGAKLDYPLLNKELVQDVRKLWQDPAIQETYSRGSILQVPDCAQYFMSNLDRLAEVDYVPTKWCIVKQPLK

SEQ ID NO: 99313 - protein, 216 aa, Setaria italica
  misc_feature (194)..(194): Xaa can be any naturally occurring amino acid
  Transcript Sequence Number=SeqID_33339
  Gene Ontology: Mol. function=nucleoside-triphosphatase activity; Cellular component=peroxisome; Biological process=peroxisome organization and biogenesis
  Homolog annotation: Hit_ID=B9RV01; Match level="QueryCoverage=100%, HitCoverage=20%, E-value=2e-48, Identity=49%"; Hit description =Peroxisome biogenesis factor, putative
  Pfam annotation: Domain name=PEX-1N; Domain location=20-96; Score =127.1; E_value=5.8e-35; Accession=PF09262.3; Description=Peroxisome biogenesis factor 1, N-terminal
ISLPDGTIAQLSVTRSLAKADSVSIEPYSEDDWEILESRADLAEETILKQVGIVYEGMKFPLWLDGHNIVKFVVVSSYPEKSVVQLVPGTEVAVAPKNRKEPSQDVKKQSALDEQVKTKALLRVQPADGKYTHTFKYKGVDIGVVLSYAVLIHPDTATSISVGNLQLVTVSPKSSKKGITQNSKEVAQKKGFQXLKKAHEAAVYILLSESVAKGHV

SEQ ID NO: 99314 - protein, 172 aa, Setaria italica
  Transcript Sequence Number=SeqID_33340
  Gene Ontology: Mol. function=nucleoside-triphosphatase activity; Cellular component=peroxisome; Biological process=peroxisome organization and biogenesis
  Homolog annotation: Hit_ID=B9RV01; Match level="QueryCoverage=100%, HitCoverage=15%, E-value=4e-50, Identity=59%"; Hit description =Peroxisome biogenesis factor, putative
  Pfam annotation: Domain name=AAA; Domain location=1-102; Score=21.6; E_value=3e-07; Accession=PF00004.21; Description=ATPase family associated with various cellular activities (AAA)
RVINQVLTELDGVETLTGVFVFAATSKPQLIDAALLRPGRFDRLIFCDFPQWDERLEILKVHSRTVSLASDASLEDVASLTEGFTGADLAAILTDAGLAAVHELLDNRENGVPESEPCISKELLMSVARKARPSTPADEKRRYDREFGEFVSSRKSVSTKARESKGKKVTLA

SEQ ID NO: 99315 - protein, 729 aa, Setaria italica
  Transcript Sequence Number=SeqID_33341
  Gene Ontology: Mol. function=nucleoside-triphosphatase activity; Cellular component=peroxisome; Biological process=peroxisome organization and biogenesis
  Homolog annotation: Hit_ID=B9RV01; Match level="QueryCoverage=97%, HitCoverage=66%, E-value=0.0, Identity=48%"; Hit description =Peroxisome biogenesis factor, putative
  Pfam annotation: Domain name=AAA; Domain location=280-482; Score =86.0; E_value=1.4e-22; Accession=PF00004.21; Description=ATPase family associated with various cellular activities (AAA)
  Pfam annotation: Domain name=AAA; Domain location=568-725; Score =192.0; E_value=1.7e-54; Accession=PF00004.21; Description=ATPase family associated with various cellular activities (AAA)
  Pfam annotation: Domain name=AAA_2; Domain location=564-693; Score= -37.3; E_value=0.0086; Accession=PF07724.6; Description=ATPase family associated with various
  Pfam annotation: Domain name=AAA_3; Domain location=568-696; Score= -8.0; E_value=0.0028; Accession=PF07726.3; Description=ATPase family associated with various
  Pfam module annotation: Pfam domain module=AAA::AAA::AAA_2::AAA_3; Domain location=280-482::568-725::564-693::568-696
PLSKKRTHEAAVYILLSESVAKGHVMLPYSIRHFISADVHSWVYIKTYSANITKDEPVVTISSLRFKMHVKDAHDNSELVSQETDTSRITRIPPENDDFFQEAHYGESKSLQDADIESISESVSKHKFFIKHWLIGQLKEMGLHAGHTEISSIILPANVVLHFEATYQKPNRGVELLYLLTFTSENSTFDNTQLKVETAWSAPIGNPENVELHFRKLELGEPVSFGSVMDSSSTDGFKLTQSSLGWMENAMSDVIKRLSVLLSSTSLRLFNRLKFPFPGHVLVYGPRGSGKTALTRASAKYFEDHKEILAHVIYRDCSKLALGKAKETRQAIEDSISEALLHSPSIIIFDDLDSVITVSSDPQVSQSSSSSDSLVRYLADIMDEYKDKTQNTCGYGPIAFMASVQSLQSLPQDLTSSGRFDFHIELPALAAPERTALLKHQVEEHELQCSGEVLSEIASKCEGYDAYDLEILVDRAVHAAASRFVLLSNASRNSLKPTLVMEDFSKAMHGFLPVAMRDLRKYAPDDKDGGWEDVGGLNEAVTIIKETLELPSKYPNIFTRAPVRLRSNILLYGPPGCGKTHIVRAAAAACSLRFISVKGPELLNKYIGSSEQSVRDFFAKAVAAAPCLLFFDEFDSIAPQRGTHSAGVSDRVVNQFLTELDGVETLTGVFVFAATSKPQLIDAALLRPGRFDRLIFCDFPQWDERLEILKVHSRTVVTLLYFSLLYFCL

SEQ ID NO: 99316 - protein, 388 aa, Setaria italica
  Transcript Sequence Number=SeqID_33342
  Gene Ontology: Mol. function=signal transducer activity; Cellular component=apical cortex; Biological process=G-protein coupled receptor protein signaling pathway
  Homolog annotation: Hit_ID=B6TWS6; Match level="QueryCoverage=100%, HitCoverage=100%, E-value=0.0, Identity=93%"; Hit description =Guanine nucleotide-binding protein alpha-1 subunit
  Pfam annotation: Domain name=G-alpha; Domain location=23-384; Score =530.0; E_value=2.9e-156; Accession=PF00503.12; Description=G-protein alpha subunit
MSVLTCVIESMGSSCSRHHSLNEAEAAENAKSADIDRRILQETKAEQHIHKLLLLYKSGKSTIFKQIKLLFQTGFDEAELRSYTSVIHANVYQTIKILYDGAKELAQVEPDSSKYVLSPDNQEIGEKLSEIGAKLDYPLLNKELVQDVRKLWQDPAIQETYSRGSILQVPDCAQYFMSNLDRLAEVDYVPTKEDVLHARVRTNGVVETQFSPLGESKRGGEVYRLYDVGGQRNERRKWIHLFEGVNAVIFCAAVSEYDQMLFEDETKNRMMETKELFDWVLKQRCFEKTSFMLFLNKFDIFERKIQKVPLSVCEWFKDYQPTAPGKQEVEHAYEFVKKKFEELYFQSSKPDRVDRVFKIYRTTALDQKLVKKTFKLIDESMRRSREGT

SEQ ID NO: 99317 - protein, 157 aa, Setaria italica
  Transcript Sequence Number=SeqID_33343
  Gene Ontology: Mol. function=5'-3' exoribonuclease activity; Cellular component=intracellular; Biological process=nucleobase, nucleoside, nucleotide and nucleic acid metabolic process
  Homolog annotation: Hit_ID=Q9FQ03-2; Match level="QueryCoverage=72%, HitCoverage=14%, E-value=4e-43, Identity=73%"; Hit description =Isoform 2 of 5'-3' exoribonuclease 3
  Pfam annotation: Domain name=XRN_N; Domain location=1-157; Score =209.2; E_value=1.1e-59; Accession=PF03159.10; Description=XRN 5'-3' exonuclease N-terminus
MGVPAFYRWLAEKYPMVVVDVVEEEPVEIEGVRVPVDTSKPNPNGLEFDNLYLDMNGIIHPCFHPEDRPSPTTFAEVFQCMFDYIDRLFVMVRPRKLMYMAIDGVAPRAKMNQQRSRRFRAAKDASDAAAEEERLREEFEREGRRLPAKQQSQTCDS

SEQ ID NO: 99318 - protein, 74 aa, Setaria italica
  Transcript Sequence Number=SeqID_33344
AIGRGAAHLVTLAAHQLLRSRRGRNDQHDADEREGCHLQGGGAGAGGHSNSTRWFCLRLVPSKLSDDELLADVS

SEQ ID NO: 99319 - protein, 35 aa, Setaria italica
  Transcript Sequence Number=SeqID_33345
DANGDKMLLLPYQSITHLTSIVVIRSIYCIYGAKE

SEQ ID NO: 99320 - protein, 73 aa, Setaria italica
  Transcript Sequence Number=SeqID_33346
  Gene Ontology: Mol. function=nucleotide binding
AKQLADASVRGWLAKLKEVAYDIDDLLDSYSAKSMHLKQRQMKLPTKVGEGRCWQRKENAGGARTISGVADAV

SEQ ID NO: 99321 - protein, 98 aa, Setaria italica
  Transcript Sequence Number=SeqID_33347
  Gene Ontology: Mol. function=cytokinin dehydrogenase activity; Cellular component=vacuole; Biological process=cytokinin metabolic process
  Homolog annotation: Hit_ID=B6V8F7; Match level="QueryCoverage=100%, HitCoverage=18%, E-value=2e-38, Identity=81%"; Hit description =Cytokinin dehydrogenase 10
  Pfam annotation: Domain name=Cytokin-bind; Domain location=18-98; Score=-167.0; E_value=0.011; Accession=PF09265.2; Description =Cytokinin dehydrogenase 1, FAD and cytok
LGQFGVITRARIPLRRAPRAVRWTRVVYASFADYTADAEWLVTRPPEEAFDYVEGFAFVNSDDPVNGWPSVPIPGGARFDASLLPAGAGPVLYCLEVA

SEQ ID NO: 99322 - protein, 66 aa, Setaria italica
  misc_feature (18)..(18): Xaa can be any naturally occurring amino acid
  misc_feature (20)..(20): Xaa can be any naturally occurring amino acid
  Transcript Sequence Number=SeqID_33348
  Gene Ontology: Cellular component=exocyst; Biological process=vesicle docking during exocytosis
ARQLVNLLMSNSPETFLXNXLVVALFTEKFRDTSESYFSTFGTRGARQNPKKKSLDTLIKRLREAS

SEQ ID NO: 99323 - protein, 70 aa, Setaria italica
  Transcript Sequence Number=SeqID_33349
  Gene Ontology: Cellular component=exocyst; Biological process=vesicle docking during exocytosis
  Homolog annotation: Hit_ID=Q9LXX6; Match level="QueryCoverage=97%, HitCoverage=8%, E-value=3e-14, Identity=52%"; Hit description =Probable exocyst complex component 6
LMSNSPETFLNPVIREKSYNKLDYRKVAIISEKFRDTSESYFSTFGTRGARQNPKKKSLDTLIKRLREAS

SEQ ID NO: 99324 - protein, 534 aa, Setaria italica
  Transcript Sequence Number=SeqID_33350
  Gene Ontology: Cellular component=exocyst; Biological process=vesicle docking during exocytosis
  Homolog annotation: Hit_ID=B6VH03; Match level="QueryCoverage=62%, HitCoverage=100%, E-value=1e-158, Identity=81%"; Hit description =Putative exocyst complex subunit Sec15-like family protein (Fragment)
  Pfam annotation: Domain name=Sec15; Domain location=188-534; Score =32.3; E_value=4.2e-11; Accession=PF04091.4; Description=Exocyst complex subunit Sec15-like
GSNEAAAAPSAAASFDLTPLYRAMHIHQTLALGERFKKYYLENRKLQLTSDFDVIAATPFLESHQVFFSQIAGFFIVEDRVFRTGGGLTSRPDVDALWDAAVGKMVSVMEDNFSRMQTANHLLLITDYAALLSATMRRYGYPVGMLLDVLAKHRDKYHDLLLADCRRQVAEALAADKFDQMLMRKEYEYSMNVLAFGIQSSDITPAFPYVAPFSCTVPDICRIVRSFIEDSVSFMAHGGGGDTYAAVKKYLGRILSEVVDASIQKLVDSGSGLSVSQAMQVAANMTVMERACEFFTRHAAQLCGVPLRAVERGRRDFPLRRSRDAAEALLLRLLRAKADEFMRQSDGVNWMADDPPPGGNEYANEVIIYLETLTSTAQQILPLPVLRRVLVAVLAHVSERIVELFLNDSVKRFNANAVTGIDTDLKMFEAFADGMSSLFADSDQESVKNEMKAALVEARQLVNLLMSNSPETFLNPVIREKSYNKLDYRKVAIISEKFRDTSESYFSTFGTRGARQNPKKKSLDTLIKRLREAS

SEQ ID NO: 99325 - protein, 63 aa, Setaria italica
  misc_feature (7)..(7): Xaa can be any naturally occurring amino acid
  Transcript Sequence Number=SeqID_33351
GGCVFLXPALAERRRSSTSGTSATTARMATAAANIAGVASIASIKIFALVFPYCLCCKGPDFQ

SEQ ID NO: 99326 - protein, 118 aa, Setaria italica
  Transcript Sequence Number=SeqID_33352
  Gene Ontology: Cellular component=plasma membrane; Biological process= protein modification process
  Homolog annotation: Hit_ID=B6SQ65; Match level="QueryCoverage=100%, HitCoverage=100%, E-value=1e-59, Identity=94%"; Hit description =Ubiquitin-fusion protein
  Pfam annotation: Domain name=ubiquitin; Domain location=13-94; Score =8.1; E_value=0.045; Accession=PF00240.15; Description=Ubiquitin family
MSAVQEQFEIKFRLPDGTDIGPRRFPPASTVATLKETIIAQWPKDKEKGPRTVNDLKLINAGKILENNKTLSECKSPICDFSGMTTMHVVVRAPTSGKQSEKRAAKKAKDFRCGCAIM

SEQ ID NO: 99327 - protein, 411 aa, Setaria italica
  Transcript Sequence Number=SeqID_33353
  Gene Ontology: Mol. function=substrate-specific transmembrane transporter activity; Cellular component=integral to membrane; Biological process=transmembrane transport
  Homolog annotation: Hit_ID=Q9LKH1; Match level="QueryCoverage=94%, HitCoverage=66%, E-value=1e-140, Identity=63%"; Hit description =Putative Na+/myo-inositol symporter
  Pfam annotation: Domain name=Sugar_tr; Domain location=2-381; Score =26.5; E_value=5.6e-10; Accession=PF00083.16; Description=Sugar (and other) transporter
LAFTKVPGTWRWMLGIAGVPALVQFILMLMLPESPRWLYRKGRKEEAESILRKIYPANEVEQEIDAMRQSVEEEVRLEGSIGEQGLIGKLRKALGSKVVRRGLMAGVIVQVAQQFVGINTVMYYSPTIVQLAGFASNNTAMALSLITSGLNAIGSVVSMFFVDRAGRRRLMLISLVGIIVWLAVLGGTFLGAAHHAPPVSDLETRLLANQTQACPGFNPNVRWSCVNCLKAASTCGFCAHQGDKLLPGACLALNDASRRTCRAGHREFYTEGCPNNFGWLALIGLGAYIVSYSPGMGTVPWIVNSEIYPLRFRGICGGIAAVANWVSNLIVTQTFLSLTKALGTAATFFLFCGVSSLALVIVFFTVPETKGLQFEEVERMLERKDYKPWKRYHGVGDVGPGKNREIGLSAP

SEQ ID NO: 99328 - protein, 44 aa, Setaria italica
  Transcript Sequence Number=SeqID_33354
MAIPLVLVVLPLGLLFLLSGLIVNTIQAILFVTIRPFSKSFYRR

SEQ ID NO: 99329 - protein, 130 aa, Setaria italica
  Transcript Sequence Number=SeqID_33355
  Gene Ontology: Mol. function=1-acylglycerol-3-phosphate O -acyltransferase activity; Cellular component=integral to membrane; Biological process=phospholipid biosynthetic process
  Homolog annotation: Hit_ID=Q41745; Match level="QueryCoverage=80%, HitCoverage=27%, E-value=6e-40, Identity=76%"; Hit description=1 -acyl-sn-glycerol-3-phosphate acyltransferase PLS1
LVCFQGILNVVLPLGLLFLLSGLIVNAVQAVLFVSIRPLSKSLYRRINRFLAELLWLQLIWLVDWWAGVKVQLHADQETYQLMGKEHALIISNHRSDIDWLIGWILAQRSGCLGSTLAIMKKSSKFLPVS

SEQ ID NO: 99330 - protein, 47 aa, Setaria italica
  Transcript Sequence Number=SeqID_33356
  Gene Ontology: Mol. function=1-acylglycerol-3-phosphate O -acyltransferase activity; Cellular component=integral to membrane; Biological process=phospholipid biosynthetic process
  Homolog annotation: Hit_ID=Q41745; Match level="QueryCoverage=95%, HitCoverage=12%, E-value=3e-19, Identity=100%"; Hit description=1 -acyl-sn-glycerol-3-phosphate acyltransferase PLS1
IHVRMKRHAMSEMPKSDEDVSKWCKDIFVAKDALLDKHLATGTFDCR

SEQ ID NO: 99331 - protein, 158 aa, Setaria italica
  Transcript Sequence Number=SeqID_33357
  Gene Ontology: Mol. function=1-acylglycerol-3-phosphate O -acyltransferase activity; Cellular component=integral to membrane; Biological process=phospholipid biosynthetic process
  Homolog annotation: Hit_ID=Q41745; Match level="QueryCoverage=99%, HitCoverage=41%, E-value=1e-60, Identity=69%"; Hit description=1 -acyl-sn-glycerol-3-phosphate acyltransferase PLS1
VVPAIYDTTVIIPKDSPAPTMLRILKGQSSVVHVRIKRHAMSDMPKSDEDVSKWCKDIFVAKDALLDEHIATGTFDEEIRPIGRPIKSLLVVLSWSCLLLYGACRFLQWTQLLSTWKGVILFVAGLTLVTCIMHVFVLFSQSERSSSARAARNRVKKD

SEQ ID NO: 99332 - protein, 107 aa, Setaria italica
  Transcript Sequence Number=SeqID_33358
  Gene Ontology: Mol. function=1-acylglycerol-3-phosphate O -acyltransferase activity; Cellular component=integral to membrane; Biological process=phospholipid biosynthetic process
  Homolog annotation: Hit_ID=Q41745; Match level="QueryCoverage=100%, HitCoverage=28%, E-value=1e-43, Identity=82%"; Hit description=1 -acyl-sn-glycerol-3-phosphate acyltransferase PLS1
QKECKDIFVAKDALLDKHLATGTFDEEIRPIGRPVKSLLVTLFWACLLLFGAIQFFKWTQLLSTWRGVAFTAAGMALVTGVMHVFIMFSQAERSSSARAARNRVKKE

SEQ ID NO: 99333 - protein, 369 aa, Setaria italica
  Transcript Sequence Number=SeqID_33359
  Gene Ontology: Mol. function=1-acylglycerol-3-phosphate O -acyltransferase activity; Cellular component=integral to membrane; Biological process=phospholipid biosynthetic process
  Homolog annotation: Hit_ID=Q41745; Match level="QueryCoverage=93%, HitCoverage=92%, E-value=0.0, Identity=93%"; Hit description=1-acyl -sn-glycerol-3-phosphate acyltransferase PLS1
  Pfam annotation: Domain name=Acyltransferase; Domain location=68-223; Score=33.4; E_value=8.2e-07; Accession=PF01553.13; Description =Acyltransferase
MAMPLVLVVLPLGLLFLLSGLIVNAVQAVLFVSIRPLSKSLYRRINRFLAELLWLQLVWVVDWWAGVKVQLHADEETYRSMGKEHALIISNHRSDIDWLIGWILAQRSGCLGSTLAVMKKSSKFLPVIGWSMWFAEYLFLERSWAKDEKTLKWGLQRLNDFPRPFWLALFVEGTRFTPAKLLAAQEYAASQGLPAPRNVLIPRTKGFVSAVSIMRDFVPAIYDTTVIVPKDSPQPTMLRILKGQPSVIHVRMKRHAMSEMPKSDEDVSKWCKDIFVAKDALLDKHLATGTFDEEIRPIGRPVKSLLVTLFWACLLLFGAIQFFKWTQLLSTWRGVAFTAAGMALVTGVMHVFIMFSQAERSSSARAFST

SEQ ID NO: 99334 - protein, 97 aa, Setaria italica
  misc_feature (89)..(89): Xaa can be any naturally occurring amino acid
  Transcript Sequence Number=SeqID_33360
  Gene Ontology: Mol. function=extracellular-glutamate-gated ion channel activity; Cellular component=integral to membrane; Biological process=ion transport
  Homolog annotation: Hit_ID=Q69L05; Match level="QueryCoverage=100%, HitCoverage=10%, E-value=2e-25, Identity=53%"; Hit description =Putative Avr9/Cf-9 rapidly elicited protein 141
VVESMNGALGIHFYVPKSTELNNFTTRWNIRYQIDNPTDPLPKLNIFGLWNYDTIWAVAQAAEKVGLANATFRKPVSKTKINRLGSLGXSSNGPELL

SEQ ID NO: 99335 - protein, 127 aa, Setaria italica
  Transcript Sequence Number=SeqID_33361
AGVEGARRGSHKFKGGKDCTPQLLPSDEDEDGDDDSDLELAVQKNTSKSISKSCKRKLYRDIEQVHCQVKSDEDDLELDHEGDAPTGYYFCKNGPVSDYHLTEEDREEISSIRIPAQSTNPVFVQVI

SEQ ID NO: 99336 - protein, 131 aa, Setaria italica
  misc_feature (111)..(111): Xaa can be any naturally occurring amino acid
  Transcript Sequence Number=SeqID_33362
  Gene Ontology: Mol. function=metal ion binding; Cellular component =integral to membrane; Biological process=multicellular organismal development
  Homolog annotation: Hit_ID=B9SCF7; Match level="QueryCoverage=98%, HitCoverage=24%, E-value=7e-38, Identity=58%"; Hit description=Zinc finger protein, putative
  Pfam annotation: Domain name=zf-DHHC; Domain location=60-124; Score =110.7; E_value=4.9e-30; Accession=PF01529.12; Description=DHHC zinc finger domain
FLFLTSSRDPGIVPRNARPPERGGDDPPADADDVATPSTEWVMSAANPHLRLPRTRDVAVAGGHVVRVKYCDTCLLYRPPRASHCSICNNCVQKFDHHCPWVGQCIGLRNXRFFFLFISTSTFLCLYVFVL

SEQ ID NO: 99337 - protein, 111 aa, Setaria italica
  Transcript Sequence Number=SeqID_33363
  Gene Ontology: Mol. function=transferase activity, transferring glycosyl groups; Cellular component=integral to membrane; Biological process=1,3-beta-glucan biosynthetic process
  Homolog annotation: Hit_ID=Q9LUD7; Match level="QueryCoverage=99%, HitCoverage=5%, E-value=5e-54, Identity=87%"; Hit description =Putative callose synthase 8
FADPLRVRFHYGHPDIFDRIFHLTRGGISKASKTINLSEDVFAGYNSILRRGNIIYNEYIQVGKGRDVGLNQISKFEAKVANGNSEQTISRDIHRLGRRFDFFRMLSCLFY

SEQ ID NO: 99338 - protein, 179 aa, Setaria italica
  Transcript Sequence Number=SeqID_33364
  Gene Ontology: Mol. function=nucleic acid binding; Cellular component= nucleus; Biological process=regulation of transcription, DNA-dependent
  Homolog annotation: Hit_ID=A8I426; Match level="QueryCoverage=98%, HitCoverage=12%, E-value=4e-98, Identity=95%"; Hit description =Required to maintain repression 1
  Pfam annotation: Domain name=Helicase_C; Domain location=1-78; Score =41.6; E_value=3.2e-09; Accession=PF00271.23; Description=Helicase conserved C-terminal domain
WREGKEILQMDGTHQERYRQASIEAFNNPNNDSRVLLASTRACCEGISLTGASRVVLLDVVWNPAVGRQAISRAFRIGQKKFVYTYNLITYGTGEGDKYDRQAEKDHLSKLVFSTEDEFNNVRNMLSKAEMEHCSKLISEDKVLEEMTSHDQLKGMFLKIHYPPTESNIVFTYNQIAPV

SEQ ID NO: 99339 - protein, 240 aa, Setaria italica
  Transcript Sequence Number=SeqID_33365
MQNPEKLATRSSDANRKVKEGLDMSGSSLSAEPKIIASVEKQKDDMQIRGYSIESALAELSPDATEYVGNSLPAPEETSKSISEDDGVGSTEKSELVAGEALLESAVALELQQSLAGQEFNAMLGESNLERKLAEQNIVHGQASKGEDNQTDDPAVCRLSEHVTVVENADVYGLVLIESNSKIEDDQAEVNASVESLISECKEQMAVCEGFGTSPELLAVDEKHAEEPESCLDFASGNDK

SEQ ID NO: 99340 - protein, 339 aa, Setaria italica
  misc_feature (316)..(316): Xaa can be any naturally occurring amino acid
  Transcript Sequence Number=SeqID_33366
  Gene Ontology: Cellular component=plasma membrane
  Pfam annotation: Domain name=CaM_binding; Domain location=234-339; Score=38.6; E_value=2.5e-08; Accession=PF07839.3; Description=Plant calmodulin-binding domain
YQASKGEDTQTDDPAVCRLSEHVTVVENADVYGLVLIESNSKIEDDQAEVNASVESLISECKEQMAVCEGFGTSPELLAVDEKHAEEPESCLDFASGNAVENAKADEVFDASMDNSTSHCQSISETSSDGGLLEEPKSMLIERSDSAVDEVASVSNGSTFEQDGMKSKVFIPQSPEELSNDEFYEEYDFESSESDETGTEDEEATINRDMGESKSGDSRPRRISTVELDDTSITPYKMKFKRGKIVELTPDSSGPRRLKFRRKSANEGSDRESQPTRRIYKRNSTSNAVPTNPDMESPGVKLRHQDAQEKKDAQGXFNNVIEETASKLVESRKRQGKGL

SEQ ID NO: 99341 - protein, 119 aa, Setaria italica
  Transcript Sequence Number=SeqID_33367
SNRPGVCIWKMIDTCVLGSTRLGSLECMDVHPTDPWIVTVHDILNYYVITVHTCAVLIWKIDPETGACEVRMMSECPSDYFKIYSVKFIARMQWVVCAGSSARITVLTYAGNSSLKPLD

SEQ ID NO: 99342 - protein, 58 aa, Setaria italica
  Transcript Sequence Number=SeqID_33368
TAQINQFFGTHSGMIRNSNIKLASCQFTLKLYIFSHYLINQDNCSLENISRAVPGFYG

SEQ ID NO: 99343 - protein, 900 aa, Setaria italica
  Transcript Sequence Number=SeqID_33369
  Gene Ontology: Mol. function=RNA binding; Cellular component=nucleus
  Homolog annotation: Hit_ID=Q2QX78; Match level="QueryCoverage=100%, HitCoverage=81%, E-value=0.0, Identity=76%"; Hit description=Nrap protein, expressed
  Pfam annotation: Domain name=Nrap; Domain location=1-898; Score =723.3; E_value=1.8e-214; Accession=PF03813.6; Description=Nrap protein
KRPVLHVYPATEIADLPGFYVRIIPTANSLFNVSKLNVSTRNNVRAYTKDGINLPTAKYNCSILEDMFLEENAEFISSTVADWKALQEALVLVKVWARQRTSIYTHDCLNGYLISAILVFLTVDSGGSIITRSMTTRQIFRVVMNFLATSKVWAKGLVIQSMKKRTITKEDIANCLKTFDVAICDISGHVNLSFRMTKSAFLELQDEAACALNCLDKCRDGGFEELFMTKVDFGAKFDSCLRINLKGNSKVTALSCCVDDESWRILEKDVQSLLQQGLTDRTKMIRVLWRSTPSEWKIMDGFSEFGSSPLLVGIMLSSLEKSFRLVDIGPNPENRSEAIKFRKFWGEKAELRRFKDGNIAESTVWESESWERHTIIKRIADYVLMKHLSLQKDDLTHVVDQLDFCLLVDGQDPVSSSGALLEAFDTLSKQLRLLDDVPLKISTVQPLDSAFRHTSVFPPEPHPLAYGKNSQRLPNFATTCIRSMEVMIQLEGSGNWPLDPVAMEKTKTAFLLKIGESLEDRGMYVSASEDEVNVLTSGYSFLLKIFHERGLVLQKQAGDDNTQSALSQDKVLFQRSQHSSMINGLHGRYQMYGPVVRLAKRWISAHLFSSIISEEAVELVVAYLFLKPFPFHAPSSRVAGFLRFLRLLSSFDWTFSPMVIDINNDFNLKDEKEINENFMMSRKSYEQNPHDIEPAMFLATSYDKASEAWTKQSPSKSVLKRMAVYAKSSAELLTNLILNGQSGQYTWECLFQTPMGNYDAVVLLHQEKLCRPHHVLFPAEIPNGKLVIWGKPSKDFHPYMPLNKGVVKSLHDARDKLLVNFDPTTYFLRDLKCAFPKTFKLWYGSEGGDAVGLTWENPKKRGREEADETMPELTSILKEVGDVGKGLVRGVYLLKAPKLQ

SEQ ID NO: 99344 - protein, 77 aa, Setaria italica
  Transcript Sequence Number=SeqID_33370
  Pfam annotation: Domain name=F-box; Domain location=7-58; Score=29.2; E_value=1.6e-05; Accession=PF00646.25; Description=F-box domain
MNLCHYFPSSGTPLDDDDLLTQVLLFLPSPSSLGHASLVCKRWHQLISDPRFHRRFCACHQKPPLLGVFSTDSICSG

SEQ ID NO: 99345 - protein, 177 aa, Setaria italica
  Transcript Sequence Number=SeqID_33371
HLYSLLVLTFFFFEYLALRRSLRQDLDELLLNQFPVHTMPALFNRVGQLLGLALDVEVVSPGEDPAVEVVGPGEDPAVEVVGPGEDPAVEGEEEDGQGEDWVGQEEEDGQRIIHHLIFLSSDEEDGQGEDWVGQGEDGQQILHHLIFLSSDEDDDGVEEQDEQIMHHLIFLSSDEDD

SEQ ID NO: 99346 - protein, 142 aa, Setaria italica
  Transcript Sequence Number=SeqID_33372
  Homolog annotation: Hit_ID=B2Z6N3; Match level="QueryCoverage=95%, HitCoverage=5%, E-value=2e-29, Identity=44%"; Hit description =Neuroblastoma-amplified gene
EKQLADQARMLRQILPDIDTSRFLSGDVNYIKRVIFSFVDSVKLEKKHILKEAVKIAETYGLQRTEVLLRFLACSLLSEYWDNNHILNEISDFREDIVRSAKGVIDMIYSDVYPEIDGYNKQRLSYIYGIPSACHSILEGDQ

SEQ ID NO: 99347 - protein, 98 aa, Setaria italica
  Transcript Sequence Number=SeqID_33373
  Gene Ontology: Mol. function=oxidoreductase activity; Biological process=oxidation reduction
  Homolog annotation: Hit_ID=Q7XC87; Match level="QueryCoverage=93%, HitCoverage=21%, E-value=4e-31, Identity=64%"; Hit description =Oxidoreductase, 2OG-Fe oxygenase family protein
CKRLLDGAFIVNVGDILEILSNGRYKSVEHRAIVHSTKERMSAAVFHQPCQDSTVAPLPELVKNDGRAQYSSISFMDFIKGYFAAKLDGRSYLESLKS

SEQ ID NO: 99348 - protein, 528 aa, Setaria italica
  Transcript Sequence Number=SeqID_33374
  Gene Ontology: Mol. function=catalytic activity; Cellular component =peroxisome; Biological process=metabolic process
  Homolog annotation: Hit_ID=B6UBI2; Match level="QueryCoverage=95%, HitCoverage=95%, E-value=0.0, Identity=74%"; Hit description =Peroxisomal-coenzyme A synthetase
  Pfam annotation: Domain name=AMP-binding; Domain location=34-449; Score=390.4; E_value=3.2e-114; Accession=PF00501.20; Description=AMP- binding enzyme
MAEEAPTLTALLKKAAAAFPSRRAVTVPGKLELTHAALDALVDAAAARLAADAGVRPGHVVALSFPNTVELVIMFLAVIRARAVAAPLNPAYTQEEFEFYLSDSESRLLLTNAEGNPAAQAAAAKLGLPHAAATLKDAAGPVHLHGLAAANAANGNGFHQEKDDHNEASDVALFLHTSGTTSRPKGVPLTQANLAASVGNIRSVYRLAETDATVVVLPLFHVHGLLCGLLSSLASGASVRLPAAGRFSASTFWADMRAAGATWYTAVPTIHQIILDRHASKPEAAGYPALRFIRSCSASLAPVILEKLEAAFGAPVLEAYAMTEASHLMTSNPLPEDGPRKPGSVGRPVGQEMAILDEEGARVAAGKPGEVCVRGANVTAGYKGNPEANEAAFRFGWFHTGDIGVVDEEGYLHLVGRIKELINRGGEKISPIEVDAVLLDHPAVKQAVSFGVPDDKYGEEINCAVIPREGLVIGEDDVVAHCRKNLASFKVPKKVFVTDDLPKTATGKIQRRIVAQHFVVQPKAGSAA

SEQ ID NO: 99349 - protein, 78 aa, Setaria italica
  misc_feature (46)..(46): Xaa can be any naturally occurring amino acid
  Transcript Sequence Number=SeqID_33375
  Gene Ontology: Mol. function=ferredoxin-NADP+ reductase activity; Cellular component=thylakoid membrane; Biological process=oxidation reduction
  Homolog annotation: Hit_ID=Q8RVZ9; Match level="QueryCoverage=100%, HitCoverage=32%, E-value=5e-27, Identity=54%"; Hit description =Ferredoxin--NADP reductase
  Pfam annotation: Domain name=NAD_binding_1; Domain location=1-77; Score=40.1; E_value=8.6e-09; Accession=PF00175.13; Description =Oxidoreductase NAD-binding domain
TGTGIAPFRSFLWKMFFEKHDDYQFNGLAWLFLGVPTSSSLLYPDXEYKEELWELLKKDNTYVYMCGLKGMEKGIDEI

SEQ ID NO: 99350 - protein, 75 aa, Setaria italica
  Transcript Sequence Number=SeqID_33376
  Gene Ontology: Mol. function=ferredoxin-NADP+ reductase activity; Cellular component=thylakoid membrane; Biological process=electron transport chain
  Homolog annotation: Hit_ID=B6T9S5; Match level="QueryCoverage=98%, HitCoverage=19%, E-value=1e-22, Identity=74%"; Hit description =Ferredoxin--NADP reductase
RGRKMYIQTRMAEYKEELWELLKKKDNTYVYMCGLKGMEKGIDEIMTDLAAKDGIDWFEYKKKLKKGEQWNVEVY

SEQ ID NO: 99351 - protein, 67 aa, Setaria italica
  Transcript Sequence Number=SeqID_33377
  Gene Ontology: Mol. function=ferredoxin-NADP+ reductase activity; Cellular component=thylakoid membrane; Biological process=oxidation reduction
  Homolog annotation: Hit_ID=Q9SLP6; Match level="QueryCoverage=73%, HitCoverage=13%, E-value=6e-16, Identity=77%"; Hit description =Ferredoxin--NADP reductase
RRRCCPSSEAPTAPCLSTHTCRRRCWLKGMEKGIDEIMVTLAEKDGIDWFEYKKQLKKGEQWNVEVY

SEQ ID NO: 99352 - protein, 35 aa, Setaria italica
  Transcript Sequence Number=SeqID_33378
YMYLHYNSHSICIQRVIFIQSTALLLVDCMNITLW

SEQ ID NO: 99353 - protein, 545 aa, Setaria italica
  Transcript Sequence Number=SeqID_33379
  Gene Ontology: Mol. function=acid-amino acid ligase activity; Cellular component=intracellular; Biological process=ubiquitin -dependent protein catabolic process
  Homolog annotation: Hit_ID=B9S9V5; Match level="QueryCoverage=97%, HitCoverage=14%, E-value=0.0, Identity=59%"; Hit description=E3 ubiquitin protein ligase upl2, putative
EAPLDATTSSSIELFLPECICNVARLLETVLQNTDTCRLFIEKKGIEAVLQLFKLPVLPVSVSIGQSISVAFKNFSPQHSVSLARAVCSFFRDHLKLTNELLGLISGTKLVDSELVKQSALMKSLSTLEGLLSLANFLLKGTTIMISELAFADAEILKELGKVYTEVTWQISLLSDAKVDKQESDQDDVAGDASISNASERDSDDDTSAAPVARYMNSVSARASLSPWSMEQDFVSAVRSAANMHRHGRHSLSRIRGRLSGVLDATHTDLDGPFSPAEISRSHDASKKSPEVVVSELLTKLGYTMRSFLSTLVKGLPARRRADSNLSPASRSLVTALAQLFLSALGYSGHSTAGFEMSLSVKCRYLGKVVEDMAVLTFDSRRRSCNSALVNSFYVNGTFKEVLTTFEATSQLLWTLPFSAPAGTDQGSSINEKVSHNSWLLDTLQSYCKLLEYYVNSTFLLSPSSSHNQLLVQPIVTELSINLFPVPSEPESFVRMLQSQILDAVLPVWNHKIFPECSPTLVTSLVSIMNNICSAVGDLKQSRNI

SEQ ID NO: 99354 - protein, 315 aa, Setaria italica
  misc_feature (55)..(55): Xaa can be any naturally occurring amino acid
  misc_feature (100)..(100): Xaa can be any naturally occurring amino acid
  misc_feature (157)..(157): Xaa can be any naturally occurring amino acid
  misc_feature (205)..(205): Xaa can be any naturally occurring amino acid
  Transcript Sequence Number=SeqID_33380
  Gene Ontology: Mol. function=ferredoxin-NADP+ reductase activity; Cellular component=thylakoid membrane; Biological process=electron transport chain
  Homolog annotation: Hit_ID=P41344; Match level="QueryCoverage=100%, HitCoverage=86%, E-value=1e-151, Identity=85%"; Hit description =Ferredoxin--NADP reductase, leaf isozyme, chloroplastic
  Pfam annotation: Domain name=NAD_binding_1; Domain location=168-284; Score=142.2; E_value=1.6e-39; Accession=PF00175.13; Description =Oxidoreductase NAD-binding domain
TSTTDTAAVEADAKPKKVSKKQEEGVVTNKYRPKEPYVGKCLLNTKITGDDAPGXTWHMVFSTEGEIPYREGQSIGVIADGEDKNGKPHKLRLYSIASSXALGDFGDSKTVSLCVKRLVYTNEAGEVVKGVCSNFLCDLKPGADVQITGPVGKEMLXDPKDPNANIIMLATGTGIAPFRSFLWKMFFEKHDDYQFNGLAWLFLGXPTSSSLLYPDEFEKMKTKAPNNFRVDYAVSREQTNAQGEKMYIQTRMAEYKEELWELLKKDNTYVYMCGLKVMEKGIDEIMVTLAEKDGIDWFEYKKQLKKGEQWNVEVY

SEQ ID NO: 99355 - protein, 360 aa, Setaria italica
  misc_feature (104)..(104): Xaa can be any naturally occurring amino acid
  misc_feature (146)..(146): Xaa can be any naturally occurring amino acid
  Transcript Sequence Number=SeqID_33381
  Gene Ontology: Mol. function=ferredoxin-NADP+ reductase activity; Cellular component=thylakoid membrane; Biological process=oxidation reduction
  Homolog annotation: Hit_ID=Q9SLP5; Match level="QueryCoverage=91%, HitCoverage=89%, E-value=1e-151, Identity=79%"; Hit description =Ferredoxin--NADP reductase
  Pfam annotation: Domain name=NAD_binding_1; Domain location=213-329; Score=144.3; E_value=3.8e-40; Accession=PF00175.13; Description =Oxidoreductase NAD-binding domain
  Subcellular localization annotation: CTP_CleavageSite=40; ConfidenceScore=5.73e-01
MTAAAVSLSSSPAKANAAAALSPSSCSHFLAYPRRSAAGRAMRVQVSTTETAEAAAAPVKKAKISKKQDEGVVTNKYKPVEPYVGRCLLNTRITGDNAPGETWXMVFSTEGELPYREGQSIGVIADGVDKNGKPHKVRLYSIASSXAIGDFGDSKTVSLCVKRLVYTNDQGEIVKGVCSNFLCDLKPGSEVKITGPVGKEMLMPKDPNATIIMLATGTGIAPFRSFLWKMFFEEHDDYKYTGLAWLFLGVPTSDTLLYKEELEKMKEIAPHNFRLDFAVSREQTNAAGEKMYIQTRMAEYKEELWELLKKDNTYVYMCGLKGMEKGIDEIMTDLAAKDGIDWFEYKKKLKKGEQWNVEVY

SEQ ID NO: 99356 - protein, 345 aa, Setaria italica
  misc_feature (84)..(84): Xaa can be any naturally occurring amino acid
  Transcript Sequence Number=SeqID_33382
  Gene Ontology: Mol. function=ferredoxin-NADP+ reductase activity; Cellular component=thylakoid membrane; Biological process=oxidation reduction
  Homolog annotation: Hit_ID=Q9SLP6; Match level="QueryCoverage=94%, HitCoverage=90%, E-value=1e-161, Identity=83%"; Hit description =Ferredoxin--NADP reductase
  Pfam annotation: Domain name=NAD_binding_1; Domain location=198-314; Score=147.9; E_value=3.1e-41; Accession=PF00175.13; Description =Oxidoreductase NAD-binding domain
  Subcellular localization annotation: CTP_CleavageSite=41; ConfidenceScore=5.26e-01
SSPAAKAPASPAAAHFLSYRPRAARAVIRAQTSTTDTAAVEADAKPKKVSKKQEEGVVTNKYRPKEPYVGKCLLNTKITGDDAXPGETWHMVFSTEGEIPYREGQSIGVIADGEDKNGKPHKLRLYSIASSALGDFGDSKTVSLCVKRLVYTNEAGEVVKGVCSNFLCDLKPGADVQITGPVGKEMLMPKDPNANIIMLATGTGIAPFRSFLWKMFFEKHDDYQFNGLAWLFLGVPTSSSLLYPDEFEKMKTKAPNNFRVDYAVSREQTNAQGEKMYIQTRMAEYKEELWELLKKDNTYVYMCGLKGMEKGIDEIMVTLAEKDGIDWFEYKKQLKKGEQWNVEVY

SEQ ID NO: 99357 - protein, 208 aa, Setaria italica
  misc_feature (107)..(107): Xaa can be any naturally occurring amino acid
  Transcript Sequence Number=SeqID_33383
  Gene Ontology: Mol. function=ferredoxin-NADP+ reductase activity; Cellular component=thylakoid membrane; Biological process=electron transport chain
  Homolog annotation: Hit_ID=P41344; Match level="QueryCoverage=90%, HitCoverage=52%, E-value=9e-93, Identity=84%"; Hit description =Ferredoxin--NADP reductase, leaf isozyme, chloroplastic
  Pfam annotation: Domain name=NAD_binding_1; Domain location=61-177; Score=147.6; E_value=3.7e-41; Accession=PF00175.13; Description =Oxidoreductase NAD-binding domain
MSISFTKRGPCNLDVSTRLQVTQGVCSNFLCDLKPGADVQITGPVGKEMLMPKDPNANIIMLATGTGIAPFRSFLWKMFFEKHDDYQFNGLAWLFLGVPTSSSLLYXNEFEKMKTKAPNNFRVDYAVSREQTNAQGEKMYIQTRMAEYKEELWELLKKDNTYVYMCGLKGMEKGIDEIMVTLAEKDGIDWFEYKKQLKKGEQWNVEVY

SEQ ID NO: 99358 - protein, 126 aa, Setaria italica
  misc_feature (121)..(121): Xaa can be any naturally occurring amino acid
  Transcript Sequence Number=SeqID_33384
  Gene Ontology: Mol. function=protein kinase activity; Biological process=protein amino acid phosphorylation
  Homolog annotation: Hit_ID=B9RWV4; Match level="QueryCoverage=67%, HitCoverage=8%, E-value=6e-11, Identity=44%"; Hit description =Receptor protein kinase, putative
LLNMSARRRAEAAAPEQKELESIVTGSSTTKSSSGNGGKQLAAGKMVTFGPGTSLRSEDLVAGADALLSKATEIGRGAFGTVYRASVGEGRVVAIKKLAAASAVASRDDFDREVRVLGKAXHPNLL

SEQ ID NO: 99359 - protein, 157 aa, Setaria italica
  Transcript Sequence Number=SeqID_33385
  Gene Ontology: Mol. function=protein serine/threonine kinase activity; Biological process=protein amino acid phosphorylation
  Homolog annotation: Hit_ID=B6SWP8; Match level="QueryCoverage=100%, HitCoverage=21%, E-value=1e-76, Identity=88%"; Hit description =Carbohydrate binding protein
  Pfam annotation: Domain name=Pkinase; Domain location=35-157; Score= -108.6; E_value=0.05; Accession=PF00069.17; Description=Protein kinase domain
  Pfam annotation: Domain name=Pkinase_Tyr; Domain location=35-156; Score=-116.8; E_value=5.8e-06; Accession=PF07714.9; Description =Protein tyrosine kinase
  Pfam module annotation: Pfam domain module=Pkinase::Pkinase_Tyr; Domain location=35-157::35-156
LAVATKRDGLASVAAFARSPREFSYKELSAATRGFDASRVIGNGAFGTVYKGIVPDTGAMVAVKRCTNASASANGEQARSEFLSELSIIAGLRHRNLLRLQGWCYEKGEILLVYDYMRNGSLDKALFDASAPVLPWHHRREILAGVASALAYLHHEC

SEQ ID NO: 99360 - protein, 311 aa, Setaria italica
  Transcript Sequence Number=SeqID_33386
  Gene Ontology: Mol. function=signal transducer activity; Biological process=response to light stimulus
  Homolog annotation: Hit_ID=B9SND2; Match level="QueryCoverage=97%, HitCoverage=47%, E-value=7e-53, Identity=43%"; Hit description =Signal transducer, putative
  Pfam annotation: Domain name=NPH3; Domain location=1-147; Score=39.1; E_value=5.4e-13; Accession=PF03000.6; Description=NPH3 family
TFAPSVFLLIPADSSDDAMYNVDVVTAILEEFMLHNKDVSEPKLQEDDDDTMDVANNLIASISGSSKVAIVAKLVDGYLSEISKDPSLPLEKFIALAESVPPASRPVHDALYRAIDVYLKEHPGLSKSEKKRLCALMDCKKLSADASAHAVQNERLPLRVVVQVLFFEQVRQSSASAAAVPSADARSFLLPREDGTSCGSSRSATTTATEDEQWAGVVGAPTSTSGGDASSLRSVSLAASKRGDSSGGKKKSKGGAVVPAPAKRVLGKLWSGKASSGENSGSDDTSESPAGSVNLEETKSTPSRITRHSVS

SEQ ID NO: 99361 - protein, 62 aa, Setaria italica
  Transcript Sequence Number=SeqID_33387
MGCGDRDIVTAAMERQPWRRRHGWQLPLHPLQLVGAAVFGLLVAAFYIVLGPYIGQHPFARA

SEQ ID NO: 99362 - protein, 51 aa, Setaria italica
  Transcript Sequence Number=SeqID_33388
CKYILFVANTFISDIIYVCSLVIAHAGDGNFHTIILFDPSKDDQRKEAERL

SEQ ID NO: 99363 - protein, 184 aa, Setaria italica
  misc_feature (154)..(154): Xaa can be any naturally occurring amino acid
  Transcript Sequence Number=SeqID_33389
  Gene Ontology: Mol. function=oxidoreductase activity
  Homolog annotation: Hit_ID=B9SDP2; Match level="QueryCoverage=95%, HitCoverage=31%, E-value=4e-78, Identity=74%"; Hit description=D -lactate dehydrogenase, putative
  Pfam annotation: Domain name=FAD_binding_4; Domain location=64-182; Score=95.9; E_value=1.4e-25; Accession=PF01565.15; Description=FAD binding domain
PGVDHRVGGKDSTELIVKGEHRRVPREFIDELASFLGDNLTVDYEERSFHGTPQNSFHKAANVPDVVVFPSSQEEVQKIVMACNKYKIPIVPYGGATSIEGHTLAPHGGVCIDMTLMKKIKSLHIEDMDVVVEPGVGWIELNEYLKPYGLFFPXLDPGPGATIGGMCATRCSGSLSRTCSIPHS

SEQ ID NO: 99364 - protein, 397 aa, Setaria italica
  Transcript Sequence Number=SeqID_33390
  Gene Ontology: Mol. function=oxidoreductase activity; Biological process=oxidation reduction
  Homolog annotation: Hit_ID=B9SDP2; Match level="QueryCoverage=100%, HitCoverage=71%, E-value=0.0, Identity=86%"; Hit description=D -lactate dehydrogenase, putative
  Pfam annotation: Domain name=FAD-oxidase_C; Domain location=149-390; Score=282.5; E_value=9.3e-82; Accession=PF02913.11; Description=FAD linked oxidases, C-terminal domain
  Pfam annotation: Domain name=FAD_binding_4; Domain location=1-113; Score=102.4; E_value=1.5e-27; Accession=PF01565.15; Description=FAD binding domain
  Pfam module annotation: Pfam domain module=FAD-oxidase_C::FAD_binding_ 4; Domain location=149-390::1-113
PIVPYGGATSIEGHTLAPHGGVCIDMTLMKKIKSLHIEDMDVVVEPGVGWIELNEYLKPYGLFFPLDPGPGATIGGMCATRCSGSLAVRYGTMRDNVINLQAVLPNGDVVKTGSRARKSAAGYDLARLIIGSEGTLGVITEVTLRLQKLPSHSVVAMCNFKTVKDAADVAIATMLSGIQVSRVELLDEVQIRAINMANGKNLPEVPTLMFEFIGTEAYALEQTLLVQKIANEHHGSDFVFVEEPEAKTELWKIRKEALWAGFAMKPDHEAMITDVCVPLSRLAECISTSKQLLDASPLTCLVIAHAGDGNFHTIILFDPSKDDQRKEAERLNHFMVHTALSMEGTCTGEHGVGTGKMKYLEKELGIESLRTMKRIKAALDPNNIMNPGKLIPPHVCI

SEQ ID NO: 99365 - protein, 66 aa, Setaria italica
  Transcript Sequence Number=SeqID_33391
  Gene Ontology: Mol. function=nucleotidyltransferase activity
  Homolog annotation: Hit_ID=Q2RBE2; Match level="QueryCoverage=87%, HitCoverage=7%, E-value=7e-13, Identity=63%"; Hit description =Nucleotidyltransferase family protein, putative, expressed
LSLIYCIAQVLAFGSVPLKTYLPDGDIDLTVLGNTSYDSTLVNDVSCILESEEQNSDAEFVVKDLE

SEQ ID NO: 99366 - protein, 81 aa, Setaria italica
  Transcript Sequence Number=SeqID_33392
DKEFINSSVDKAIVPPRNSDACYTRFRSKHLNIIDPLKEYNNLGRSVNRGLNWPRYVYLEKLSFTTGDAGPNHFVSLWFVP

SEQ ID NO: 99367 - protein, 129 aa, Setaria italica
  Transcript Sequence Number=SeqID_33393
  Subcellular localization annotation: CTP_CleavageSite=28; ConfidenceScore=5.26e-01
QNPLDRICQENVSLPSQTNVPSNGLSPSSSYAASEVSSVSRCYSFEDSAEMHGSGTDMHFPRKRACYCDTHKEQLASSRENGKILSNQTVSFESNQSPAPGAKFVSHKEQVFGLAMRHATVDRQGTQGI

SEQ ID NO: 99368 - protein, 69 aa, Setaria italica
  Transcript Sequence Number=SeqID_33394
  Subcellular localization annotation: CTP_CleavageSite=34; ConfidenceScore=5.69e-01
GTFPSTLKSNRATNTQTASKAFTFASPLVLQRSRAATTQNRPPGFCKVGDEDEFPPLSAGIRIFLGALI

SEQ ID NO: 99369 - protein, 943 aa, Setaria italica
  Transcript Sequence Number=SeqID_33395
  Gene Ontology: Mol. function=nucleotidyltransferase activity
  Homolog annotation: Hit_ID=B9RX12; Match level="QueryCoverage=32%, HitCoverage=37%, E-value=1e-110, Identity=62%"; Hit description =Nucleic acid binding protein, putative
  Pfam annotation: Domain name=NTP_transf_2; Domain location=3-82; Score=23.0; E_value=0.00053; Accession=PF01909.15; Description =Nucleotidyltransferase domain
DYARRLVGSALGCEVLAFGSVPLKTYLPDGDIDLTVLGNTSYDSTLVNDVSCILESEEQNSDAEFVVKDLERINAEVRLIKCTIENIIVDISFNQTGGICALCFLELVDRKVGKNHLFKRSIILIKAWCYYESRLLGAHHGLISTYALEVLILYIFNLFHKSLNSPLEVLYRFLEYFSKFDWDNYCISLNGPVALSSLPNLIVEATFAHTDDLLFDKEFIKSSVDKAIVPPRNSDACYTRFRSKHLNIIDPLKEYNNLGRSVNRASFNRIRTAFLYGARKLGHILMLPPEVIPDEIYVFFKNTLGRNGRGVRPDTDSNGALRASFGTGEALLEDISSMKISCNEEHENITSYHLSKSLCDENLYVGMNGPTHLSSSFPRVHNTALSTDLSTRSSNFVHHAPKQYSSFYQGNGRAGSGKCYLNQEVEQECIQSQVPLNNPSPLNSFAGVNASELVTEQKIIDVPVEKQHLPPSPLSLPDLSGDLDSQFRCLRQVQYHLEYLFDGFLQSVQDASSADTFEKDPFHIPACSILLNRDSGTPRLLLPSSSKSNGRNVSPVSFSQSTEYALQHSQNQNPLDRICQENVSLPSQTNVPSNGLSPSSSYAASEVSSVSRCYSFEDSAEMHGSGTDMHFPRKSCDTHKEQLASSRENGKILSNQTVSFESNQSPAPGAKFVSHKEQVALDSRTNEIAVDQALKIQGYLQSDREIVEKLNCHTQKKIFSHDNEARQVPKYRQDVCSNKNFLQKRCDTGMECTRAPGTMNQMPKHQSFNNRNTTECARSSLSKNLPIKQSFGTRKEHEIFDLPTKQRPICQPLKLENRRSGWDCSKKIPAEKQNYNNHKVPLSFVGGAGDISSQEKPPVSKTFQPYFPVANGRPLETIEFGSLGPFALKSNRATNTQTASKAFTFASPLVLQRSRAATTQNRPPGFCKVGDEDEFPPLSAGIR

SEQ ID NO: 99370 - protein, 203 aa, Setaria italica
  Transcript Sequence Number=SeqID_33396
  Gene Ontology: Mol. function=protein binding
  Pfam annotation: Domain name=UPF0047; Domain location=79-201; Score =147.0; E_value=5.9e-41; Accession=PF01894.9; Description =Uncharacterised protein family UPF0047
  Subcellular localization annotation: CTP_CleavageSite=45; ConfidenceScore=5.75e-01
MHSAAIARAPAVISSASVRPRRGAAPAVISSASGRPRRGARGAVRCEVASSSAPSAAAPQAAKWAQRTVVLPPQRRGCHLITPKIVNEIRDDLAEFKCGMAHLFLQHTSASLTINENYDSDVQADTETFLSRIVPEGPSAPWRHTMEGPDDMPAHIKSSMFGCSLTVPITNGRLNMGTWQGIWLCEHRDYATPRQIVITLNGI

SEQ ID NO: 99371 - protein, 757 aa, Setaria italica
  misc_feature (75)..(75): Xaa can be any naturally occurring amino acid
  Transcript Sequence Number=SeqID_33397
  Gene Ontology: Mol. function=ARF GTPase activator activity; Cellular component=cytoplasm; Biological process=regulation of ARF GTPase activity
  Homolog annotation: Hit_ID=Q6ZD39; Match level="QueryCoverage=100%, HitCoverage=90%, E-value=0.0, Identity=71%"; Hit description =Putative ARF GTPase-activating domain-containing protein
  Pfam annotation: Domain name=Ank; Domain location=665-697; Score =34.6; E_value=3.9e-07; Accession=PF00023.22; Description=Ankyrin repeat
  Pfam annotation: Domain name=Ank; Domain location=698-730; Score =29.9; E_value=1e-05; Accession=PF00023.22; Description=Ankyrin repeat
  Pfam annotation: Domain name=ArfGap; Domain location=425-569; Score =167.5; E_value=3.9e-47; Accession=PF01412.10; Description=Putative GTPase activating protein for Arf
  Pfam annotation: Domain name=PH; Domain location=220-354; Score=69.6; E_value=1.2e-17; Accession=PF00169.21; Description=PH domain
  Pfam module annotation: Pfam domain module=Ank::Ank::ArfGap::PH; Domain location=665-697::698-730::425-569::220-354
GPVMTKFTIALREIGTYKEVLRSQVEHMLNDRLLNFVDIDLHDVKDAHKRFDKASLAYDQIREKYLSLKKGTRPXTITTAIEEELHSARSSFEQARFNLVTSLSHIEAKKRFEFLEAVSATMDSHLRYFKQGYELLHQMEPYINQVLAYAQQSRERANKEQASLVERMHEYKRQIDRESRSSVNGLNDCYNGDGIPTIGRSSHKMIEAVMQSSTRGKVQTIRQGYLSKRSSNLRADWKRRFFVLDSRGMLYYYRKQITRPPAGCSIQRGVNPPEHGSGLLSRLFSSHYHGIVHDEKSVARHTVNLLTSTIKVDAEQSDLRFCFRIISPTKVYTLQAESAVDQMDWIEKITGVIASLLSSQSPEQCFMSSPKGSGHDRSASESSSFSSSVEFEPSISDDLVLEKNSGNGQHDVRGTHHHRTNMKPEKPIDLLRKVDGNNMCADCGASEPDWASLNLGALLCIECSGVHRNLGVHISKVRSLTLDVRVWEPSVINLFQSLGNMFVNNIWEEMLPSSNNGRPDDNLSVDGSDTSQYLSVKKPKHKDAFSAKEKFIHAKYVDKEFIQNYSMDESQLAQQMWNSVSANDKKSAYSLIVRSRANVNLVWGDMPSSSCLTLGKALQLEHPASTPGGSPRFFDCNSHDKIYAGEPLSPASTSSRTDDMEDSCEGLSLLHLACRVADVGMVELLLQYGANVNMIDSRGRTPLHHCILKGRHQHAKLLLSRGADSQAMDQDGRTASQYAIDCRTTDEDILILLEDHS

SEQ ID NO: 99372 - protein, 46 aa, Setaria italica
  Transcript Sequence Number=SeqID_33398
SQLEVLVFRGGLAGSGGSHPLDVLQVVRATKASSDMLLSRVLLCYK

SEQ ID NO: 99373 - protein, 96 aa, Setaria italica
  Transcript Sequence Number=SeqID_33399
  Subcellular localization annotation: CTP_CleavageSite=58; ConfidenceScore=5.36e-01
KQPSPDLRPLPPLRRPATQPPPPPVSTPPMTTTGDSSDDEDQATFYTAPKTAKSSFSRSTSQRSGLEPTAPQPQPPAPDPVLGPTPPQSPTPRCPC

SEQ ID NO: 99374 - protein, 58 aa, Setaria italica
  Transcript Sequence Number=SeqID_33400
CPKTISLVSYSVMRVPLIKKLATRNSIFSLNLLILLVQRLVVILQLLLQYLVITTLNG

SEQ ID NO: 99375 - protein, 263 aa, Setaria italica
  Transcript Sequence Number=SeqID_33401
NDLNNKIRDSIQRARTDYFQYPTKEYPSELKPLFSAFGLKNFTITTLRSFLLYYLPLVPKPHTDSDDEDDDLLEEAPREPVDLVTPFYNSVKQIMRETSIVTTRRVLERIVVRHVSQRTAWKLLKDASKSAKRKAARGMSTPEYTFCVARTTFRAHALGVSAAWVVQSLIEVYRCFIRKPSEDDELPSNGDEQFDDTDKFRLFGRKIYGITIKSCFSLVLASIGAGIGALLHPVHGQWFGCALGDVAGPVIAIIVFERMQLPL

SEQ ID NO: 99376 - protein, 102 aa, Setaria italica
  misc_feature (75)..(75): Xaa can be any naturally occurring amino acid
  misc_feature (79)..(79): Xaa can be any naturally occurring amino acid
  Transcript Sequence Number=SeqID_33402
MWSQEHDNFFLTACLCCSLVPLIMLSGTGALAIFLRKSFGMDITTSDYDDKEIEENIAYNCRANNLDVLPHIRHXWGDXFPVSRPDWDIVIASDILLCKCIS

SEQ ID NO: 99377 - protein, 113 aa, Setaria italica
  Transcript Sequence Number=SeqID_33403
HIRHTWGDPFPVSRPDWDIVIASDILLYVKQYDNLVKTASFLLKEYKKTSEKAGCTTITDKSGRTQVPARSPMFLMSWRRRIGKDQSLFFTGCEKAGLEVRHLGDLVYLISFK

SEQ ID NO: 99378 - protein, 186 aa, Setaria italica
  Transcript Sequence Number=SeqID_33404
  Pfam annotation: Domain name=Methyltransf_16; Domain location=7-168; Score=-24.6; E_value=1.2e-05; Accession=PF10294.1; Description =Putative methyltransferase
LWPGTFSFATWLVKNQSILDGQRVLELGSGTGALAIFLRKSFGMDITTSDYDDKEIEENIAYNCRANNLDVLPHIRHTWGDPFPVSRPDWDIVIASDILLYVKQYDNLVKTASFLLKEYKKTSEKAGCTTITDKSGTQVPARSPMFLMSWRRRIGKDQSLFFTGCEKAGLEVRHLGDLVYLISFKS

SEQ ID NO: 99379 - protein, 47 aa, Setaria italica
  Transcript Sequence Number=SeqID_33405
  Gene Ontology: Mol. function=transferase activity
MSGALDVRSLTLIIKEQEAKIKKLEHDIKTQEAKMKKLENEFRSRNA

SEQ ID NO: 99380 - protein, 84 aa, Setaria italica
  misc_feature (51)..(51): Xaa can be any naturally occurring amino acid
  Transcript Sequence Number=SeqID_33406
  Gene Ontology: Mol. function=phosphotransferase activity, alcohol group as acceptor; Cellular component=chromosome
  Homolog annotation: Hit_ID=Q9M3G7; Match level="QueryCoverage=60%, HitCoverage=1%, E-value=1e-09, Identity=56%"; Hit description =Serine/threonine-protein kinase ATM
TKPFPGLRFLFSSLFSEWFTCLGYFYLAWHSLLLISVARQLFSHVWEVVKXGPSFQLEYNMILRQLLAVKEYRYQMKPRTYSSF

SEQ ID NO: 99381 - protein, 129 aa, Setaria italica
  misc_feature (92)..(92): Xaa can be any naturally occurring amino acid
  misc_feature (101)..(101): Xaa can be any naturally occurring amino acid
  Transcript Sequence Number=SeqID_33407
  Gene Ontology: Mol. function=nucleic acid binding
MHMSLGNALQLTYMQMMSTSESNMLYCAETKLPSIAPNLQTLCLTSHDEVELPNIRHDSILEYSDYNSYSRHLLQHSHENLKNVMITGFCSXKSVIEFTNXLLGHAPILECLTLDTRCGHERRYTSRQC

SEQ ID NO: 99382 - protein, 120 aa, Setaria italica
  misc_feature (79)..(79): Xaa can be any naturally occurring amino acid
  misc_feature (107)..(107): Xaa can be any naturally occurring amino acid
  Transcript Sequence Number=SeqID_33408
  Gene Ontology: Mol. function=nucleic acid binding
  Homolog annotation: Hit_ID=Q7XK21; Match level="QueryCoverage=80%, HitCoverage=12%, E-value=6e-13, Identity=44%"; Hit description =OSJNBa0044K18.24 protein
MIVDHVQVELPNIRHDSILEYSDYNSYSRHLLQHSHENLKNVMITGFCSAKSVIEFTNLIIGHAPILECLTLDTRMWPXRKIHKSTMCLHMFEEDLVEAQSACLAIXRHVVGNVPSTVSL

SEQ ID NO: 99383 - protein, 122 aa, Setaria italica
  misc_feature (23)..(23): Xaa can be any naturally occurring amino acid
  misc_feature (47)..(47): Xaa can be any naturally occurring amino acid
  Transcript Sequence Number=SeqID_33409
  Subcellular localization annotation: CTP_CleavageSite=84; ConfidenceScore=5.59e-01
PPLAPASPPPPPPPPRTHGGPCXPPPPPPVPGLRRRHGPPRGPPTPXAPRYPAAQGISVPRRPRNLALFFIADCAAEVTLEQKRARSVQRQLLMQRQTMDASAPEIEGWTCQKDCVQDGGKE

SEQ ID NO: 99384 - protein, 120 aa, Setaria italica
  Transcript Sequence Number=SeqID_33410
QQVLPATRTARRSPIRRQWSPIRGRDPQIATASSAPSVGNENEDKRVGMGWMDGWMDGNPVGPLAHHSHTGRSGSHTLSQPGPVKALPGTKVLKQRTRTDDLHGGDLTLPVIIPTPLNID

SEQ ID NO: 99385 - protein, 588 aa, Setaria italica
  Transcript Sequence Number=SeqID_33411
  Homolog annotation: Hit_ID=Q00RL5; Match level="QueryCoverage=86%, HitCoverage=99%, E-value=1e-107, Identity=42%"; Hit description =OSIGBa0117N13.2 protein
MCKATGRNRNSLTPRRRPPKQIGGLHPHVLGDGEAACPPYKSKPRCLPHRGEHIADSQSSTGRAHRSLGISDGTAEVTMEQKRARSVQRQLLMQRQTMDASAPEIEGWTCQKGDCVQDGGRSESEPILPEDILCQIHTLMPMRDAALASGVSWGFLRSWGCYPYLIFDIKTLGINEDARNIDEITSDFISRVDHIVTKHTGIGVKTFKLQTYPCDNVHPSYVDRWLNVAITPGIEEFELQMPWRNKIEYNFPCSLLSTERGRLMRSLFLDHCAFHPGVEVGCLSSLTSVHLTSVHITGEELCSFLSKSLALKQLDIYKCSDIVCLKIPYVLVQLTFLQVQGCVMLEMIESNAPNLSQFKYIGHPIHMSLGNALQLTHMQMMSTSESNMLYCAGTKLPSIAPNLQTLCLTSRDEKVNTPMLVGKFFYLKHLEVALIEPSLSPDYDFCSLVSFLSGSPALDTFILRVELPTIRHDSVLEYSDYNSYSRHLLQHSHENLKNVMITGFCSAKSMIEFTNLIIELAPILECLTLDTSRGHERKIHKSTMCLHMFEEDLVEAQRARLAIERHVVGNVPSTVSLKLIEPCSKCLS

SEQ ID NO: 99386 - protein, 76 aa, Setaria italica
  Transcript Sequence Number=SeqID_33412
  Subcellular localization annotation: CTP_CleavageSite=64; ConfidenceScore=5.49e-01
AISARARHLLPLASKKQWKPPCLSSVSKLSPPGICFFWSIFSGLPGLSITSAPFAAIFLSDHCSLSSEPPSFSDNS

SEQ ID NO: 99387 - protein, 120 aa, Setaria italica
  misc_feature (40)..(40): Xaa can be any naturally occurring amino acid
  Transcript Sequence Number=SeqID_33413
  Subcellular localization annotation: CTP_CleavageSite=44; ConfidenceScore=5.37e-01
GGFVALDVGALSSSLAGDAGPPPGTPTAPPRTPRAANRHXKVVRSLSRKGDRKPTDGDANGTAGGGGERPQLFVHVAAGDLGDAPSSARLVVHTPLASTPGSKSRRFGRRPAPWLDPRRV

SEQ ID NO: 99388 - protein, 104 aa, Setaria italica
  Transcript Sequence Number=SeqID_33414
RRGRRPLGLLANARKRKEGFVQLFLMAGVFMMSLRSLGQKHRLRDLAEDAADLRRERDVLSHRMRDLQDALRREADADASGALASHLRRIFTAHPAPATAAEDQ

SEQ ID NO: 99389 - protein, 87 aa, Setaria italica
  Transcript Sequence Number=SeqID_33415
  Homolog annotation: Hit_ID=B6UCE2; Match level="QueryCoverage=68%, HitCoverage=10%, E-value=3e-19, Identity=80%"; Hit description =Peptide-N4-asparagine amidase A
  Subcellular localization annotation: CTP_CleavageSite=70; ConfidenceScore=5.23e-01
MSASSASSSLLLLSLCLALLSHFAAASPRPRDLRFSAEDIAAVEAALPLRHRRSSGTTFFEVDRPLRPPKGSSGPCSTLLLSHSFAF

SEQ ID NO: 99390 - protein, 554 aa, Setaria italica
  Transcript Sequence Number=SeqID_33416
  Gene Ontology: Mol. function=peptide-N4-(N-acetyl-beta-glucosaminyl)as paragine amidase activity; Cellular component=plasma membrane
  Homolog annotation: Hit_ID=B6UCE2; Match level="QueryCoverage=96%, HitCoverage=93%, E-value=0.0, Identity=81%"; Hit description=Peptide- N4-asparagine amidase A
WPRRGRGEVGEQSEAEGEDIAAVEAALPLRHRRSSGTTFFEVDRPLRPPKGSSGPCSTLLLSHSFAFTLTKPPVTAAYSPPECLLEAGAVSLAVLEWRAECRGVQYDRIFGVWLGGAELLRGSTAEPRPGGVAWSVSKDVTRYAPLLAAGNATLAVYLGNLIDDTYNGVYHANLTLHLYFRRAARSSSPQPAAAADAIVPVSRSLPLNDGLWFVVQNSTDVQSARLAVPPNAYRAVLEVYVSSHYADEFWYMNTPEQNGPFREVTVLLDGDVVGAVWPFPVIYTGGINPLIWRPITSIGSFNMPTYDIELTPFLGKLLDGEHHELGFKVTNALNSWYVDANLHLWLDGKSSKTTGGLVAYDAPKLAGSIVSHSADGIDGEYEATASRNITATGWVSSSRGNVTTTFTQRLSFANTNVVSSHGSAQAINQTTDALTSVSGGGAQAQQQVHQSFPLYIFLGGDGSGTSSQRLMRRVEIGFEEARSGAVTSTLRNRQAAAAEVTLRDDAVVGASWRMHQTYAYGASDGGCYLRNVSSVGYDVLFDHRDASCAGARGR

SEQ ID NO: 99391 - protein, 273 aa, Setaria italica
  Transcript Sequence Number=SeqID_33417
  Homolog annotation: Hit_ID=Q9M8K3; Match level="QueryCoverage=99%, HitCoverage=45%, E-value=1e-109, Identity=67%"; Hit description =F28L1.9 protein
GPLGALESNGWVYSAHCSFRLFAADAAWRCLDGKWLFFWGDSNHVDTIRNLLTFVLGVTDTSAVTRRFDAVFTNPSGGPGTLRITSIFNGHWNMSMNYLGLHSLRNREFRQLIRSYFMSSDHVPDVVILNSGLHDGCYWTSVRAYAQGAEFAAQFWSGIMAKVRARVHASPRVFYRTTIATGGYARDLAFNPSKMEAFNGVLVEKMRRHGVLTGGVIDNFDMTFPWHYDNRCNDGVHYGRAPARLVWRDGKIGHQYFVDLMLGHVLLNAICNG

SEQ ID NO: 99392 - protein, 237 aa, Setaria italica
  Transcript Sequence Number=SeqID_33418
  Gene Ontology: Cellular component=chloroplast
  Homolog annotation: Hit_ID=B9T5G9; Match level="QueryCoverage=98%, HitCoverage=67%, E-value=2e-47, Identity=29%"; Hit description =Pentatricopeptide repeat-containing protein, putative
  Pfam annotation: Domain name=PPR; Domain location=128-162; Score =13.3; E_value=0.24; Accession=PF01535.12; Description=PPR repeat
  Pfam annotation: Domain name=PPR; Domain location=57-91; Score=46.7; E_value=9.1e-11; Accession=PF01535.12; Description=PPR repeat
  Pfam annotation: Domain name=PPR; Domain location=92-126; Score=2.0; E_value=5.2; Accession=PF01535.12; Description=PPR repeat
  Pfam module annotation: Pfam domain module=PPR::PPR::PPR; Domain location=128-162::57-91::92-126
LILGYPNLGLQVEEHVIAMGLQSDLQVSTGLVDMYCKCGSIQHAREIFDSVSNRDLAIWSAMINGYACNGEGSEAVTLFSEMQNRGVRPDAIVFTHILTACNHCGLVDEGLNCFHSIAMEYSIKPSIEHYMCMMDLLCKAGHLSSAMKFFKEMPVQLRNQVLAPLISAHRAHGVDSSIEFVSEELLNLDSQDSGHCILISNMLSCLGEWKKARNYRRIISKQGLVKKPGCSYIELGA

SEQ ID NO: 99393 - protein, 127 aa, Setaria italica
  Transcript Sequence Number=SeqID_33419
  Gene Ontology: Mol. function=DNA binding; Cellular component=nucleus; Biological process=regulation of transcription
  Homolog annotation: Hit_ID=Q6H666; Match level="QueryCoverage=100%, HitCoverage=34%, E-value=4e-61, Identity=85%"; Hit description =Putative OsNAC7 protein
  Pfam annotation: Domain name=NAM; Domain location=3-127; Score=282.4; E_value=1e-81; Accession=PF02365.7; Description=No apical meristem (NAM) protein
SHVPPGFRFHPTDEELVDYYLRKKVASNKIDLDVIKDVDLYKIEPWDLQEKCKIGMEEQNEWYFFSHKDKKYPTGTRTNRATTAGFWKATGRDKPIYTKNCLVGMRKTLVFYRGRAPNGQKSDWIMH

SEQ ID NO: 99394 - protein, 50 aa, Setaria italica
  Transcript Sequence Number=SeqID_33420
RLFCYDDTRKVPRTFLERGMAWSEVKHFIFQSPASPTVILRQYMHIHFTS

SEQ ID NO: 99395 - protein, 397 aa, Setaria italica
  Transcript Sequence Number=SeqID_33421
  Gene Ontology: Mol. function=protein binding; Cellular component =cytoplasm; Biological process=metabolic process
  Homolog annotation: Hit_ID=Q84MV3; Match level="QueryCoverage=39%, HitCoverage=57%, E-value=5e-60, Identity=75%"; Hit description =Putative PRIP-interacting protein, 5'-partial (Fragment)
  Pfam annotation: Domain name=Methyltransf_15; Domain location=298 -397; Score=-23.0; E_value=1.8e-09; Accession=PF09445.2; Description =RNA cap guanine-N2 methyltransferase
  Pfam annotation: Domain name=WW; Domain location=141-171; Score=20.5; E_value=0.0071; Accession=PF00397.18; Description=WW domain
  Pfam module annotation: Pfam domain module=Methyltransf_15::WW; Domain location=298-397::141-171
LDKEGRPYVEEQEESGCSTIYSAERGYEAENQCELGTSEPPDNLGNTAKAEYPIQENQAADSVFLESEMLRHDSVDGESARSCVSICQEERLSTKEDQLSVKTLSVPHDNNDFGLEACPSLAEQSSVDEHAESSASNFCYEYGDWTVVWDPFYSRYYFYNIQTQESTWYPPEGLEDFASYNSRDATIELVELGSKHTSMAVQENNQVGDDKHLDAQEQDHCSELHYLSKIPDEEPIIHSMITTFHEGQYTKNKHNDSTTDVLEMDQDVASTKKKKRVRRSQSYHSCQDMAGNISNDIIKYWTQRYSLFSLFDSGIKMDEEGWFSVTPEPIAKHHASRVGAGVIIDCFTGVGGNAIQFATKCKHVIAVDIDPQKIDCAHHNASIYGVNDHIDFIVDDF

SEQ ID NO: 99396 - protein, 170 aa, Setaria italica
  Transcript Sequence Number=SeqID_33422
  Gene Ontology: Mol. function=protein binding; Cellular component =cytoplasm; Biological process=metabolic process
  Homolog annotation: Hit_ID=Q84MV3; Match level="QueryCoverage=98%, HitCoverage=59%, E-value=1e-84, Identity=85%"; Hit description =Putative PRIP-interacting protein, 5'-partial (Fragment)
  Pfam annotation: Domain name=Methyltransf_15; Domain location=1-168; Score=147.7; E_value=3.5e-41; Accession=PF09445.2; Description=RNA cap guanine-N2 methyltransferase
MKHHASRVGAGVIIDCFTGVGGNAIQFATKCKHVIAVDIDPQKIDCAHHNASIYGVNDHIDFIVDDFINIAPHLKGETAFMSPPWGGPDYAKVDVYDMKGMLKPCDGYSLFKLGTMIASRVVMFLPRNVDLNQLADMSLSVDPPWAVEVEKNFLNGKLKAITAYFEEQDS

SEQ ID NO: 99397 - protein, 66 aa, Setaria italica
  Transcript Sequence Number=SeqID_33423
PIHTTNRRHLQPKEQDNRANSKRKLNSFLVNSKYIPYLRGVDPDGGTIVFSLITRFFRRLDFVLDA

SEQ ID NO: 99398 - protein, 466 aa, Setaria italica
  Transcript Sequence Number=SeqID_33424
  Gene Ontology: Mol. function=hydrolase activity, acting on glycosyl bonds; Cellular component=vacuole; Biological process=cell wall organization and biogenesis
  Homolog annotation: Hit_ID=B6U0W6; Match level="QueryCoverage=92%, HitCoverage=90%, E-value=0.0, Identity=80%"; Hit description =Polygalacturonase
  Pfam annotation: Domain name=Glyco_hydro_28; Domain location=60-416; Score=54.2; E_value=5e-13; Accession=PF00295.9; Description=Glycosyl hydrolases family 28
  Subcellular localization annotation: CTP_CleavageSite=57; ConfidenceScore=5.04e-01
ATFVAQTQWSSVSGMYCNDLTPSVERPHSASITDFGAVGDGVTLNTKAFQNALFYLNSFANKGGAQLFVPAGRWLTGSFSLISHLTLSLDKEAVILGSPDSSDWPVIDALPSYGRGRELPGKRHQSLIFGSNLTDVIITGANGTIDGQGAIWWDWFHNHTLNYTRPPLVELMYSTRVVISNLTFTNSPFWNIHPVYCSQVLVQHLTILAPISSPNTDGIDPDSSTNVCIEDCYIRNGDDIVVIKSGWDEYGISFAHPSSNISIRNITGQTRNSAGIALGSEMSGGISDVRAEGIRIVNSVHGIRIKTAPGRGGYVKNVYVADVSLENVSIAIRITGNYGEHPDENYNKNALPTISNITIKNIVGVNISVAGMLQGIQGDPFSNICLSNVSLSVRSTNPWNCSLVEGYSNSVLPEICEQLRTSPGPGQVCYDGNSYPAAAAQPQSPQKSSASRLLNPFLYISWFLCR

SEQ ID NO: 99399 - protein, 419 aa, Setaria italica
  Transcript Sequence Number=SeqID_33425
  Gene Ontology: Mol. function=zinc ion binding
  Homolog annotation: Hit_ID=Q10NX3; Match level="QueryCoverage=63%, HitCoverage=76%, E-value=3e-77, Identity=58%"; Hit description=FAR1 family protein, expressed
  Pfam annotation: Domain name=FAR1; Domain location=2-70; Score=67.0; E_value=7.2e-17; Accession=PF03101.7; Description=FAR1 family
NSIISRQIVCSKEGFREVRTKKVVTDEGKTKRPRMITRVGCKAMIVVKKMNSGKWMVSKFEKEHNHSLSYSKMVPITSNNTSGEVADFTAKSADPNDVKNEGCSAGTQCNPADSLTVLYNNLCQEALKFAEEGSVTEEIYHVAVSALKEAAKKVAEVKRSRPALPNRDLISESKHDVFQVQTMSTLQCSTQVELKTTLSRRPLQESASNLLLVPTNIITDSRLYNRVDNVPLSSDFLKNGRQGRHATEGSFVHFENIKETSTQKPQNTSSNQAIHGKDEGIHGSSGETMVAIPAIPLALCMPVTQNLPRSSADGPYRLLAAPIEAVPISYCPAEPIRQPQRGVCALGPFAGVLSELNKPGTGPNSLVHATALACGARAVPLEEAASLINAVESKIRSGGAIIAKMPSSNLTSPFPPAIF

SEQ ID NO: 99400 - protein, 125 aa, Setaria italica
  misc_feature (118)..(118): Xaa can be any naturally occurring amino acid
  Transcript Sequence Number=SeqID_33426
  Homolog annotation: Hit_ID=B9RXC4; Match level="QueryCoverage=90%, HitCoverage=3%, E-value=1e-14, Identity=41%"; Hit description =Vacuolar protein sorting-associated protein, putative
LDNFSVIDENFVPAGYAVPIYVEETLDEFFFQHREARSSEHLIEKRMNAVSHYMISIEFDGTSGPSKPMSMDLVGIYFFEVNFSSSKKPILGEESLGAFSSNRKGNDGLIVPVVLDVXLQNYSKR

SEQ ID NO: 99401 - protein, 73 aa, Setaria italica
  Transcript Sequence Number=SeqID_33427
  Subcellular localization annotation: CTP_CleavageSite=33; ConfidenceScore=5.53e-01
MASPSGNPNPTPSAPFELSKLFRPPPNPNHPTTAPSPTGVFPGAPGPAAGPPLTGPYSYPPATPPFHRGPYLQ

SEQ ID NO: 99402 - protein, 54 aa, Setaria italica
  Transcript Sequence Number=SeqID_33428
SQVRQSTTPPPPPPPPPPHEDRSIHAFSVTANKRWSSYDDDDEEEFFVTICIHT

SEQ ID NO: 99403 - protein, 87 aa, Setaria italica
  Transcript Sequence Number=SeqID_33429
  Pfam annotation: Domain name=DUF2462; Domain location=1-83; Score= -1.4; E_value=0.096; Accession=PF09495.2; Description=Protein of unknown function (DUF2462)
  Subcellular localization annotation: CTP_CleavageSite=29; ConfidenceScore=5.15e-01
MTQKQTMFKGQSKKKTIPPNRHGKAPHVRKGKRVVKPTKFTKDMDAEKELTKFINQCNEIKAANLASKEGGDLSILKVDGDQSKSKK

SEQ ID NO: 99404 - protein, 335 aa, Setaria italica
  Transcript Sequence Number=SeqID_33430
  Gene Ontology: Mol. function=hydrolase activity, hydrolyzing O -glycosyl compounds; Cellular component=extracellular region; Biological process=cell wall organization and biogenesis
  Homolog annotation: Hit_ID=Q5NAT0; Match level="QueryCoverage=100%, HitCoverage=52%, E-value=1e-112, Identity=61%"; Hit description =Endoglucanase 2
  Pfam annotation: Domain name=CBM49; Domain location=244-322; Score =136.8; E_value=6.7e-38; Accession=PF09478.2; Description =Carbohydrate binding domain CBM49
  Pfam annotation: Domain name=Glyco_hydro_9; Domain location=2-199; Score=-74.9; E_value=2e-11; Accession=PF00759.11; Description =Glycosyl hydrolase family 9
  Pfam module annotation: Pfam domain module=CBM49::Glyco_hydro_9; Domain location=244-322::2-199
FLLQGKAGGAHADVLRRYKQKADLFACSCLGKGGSNNVRRTPGGMIYHQSWNNVQFVTSASFLLAAYADHLAAARQEAQCPSGGVRPSELLAFAKSQVDYILGSNPRATSYMVGYGATYPRQAHHCGASIVSIKADPAFVSCQAGYNSWYHRRGSNPNLLVGATVGGPDEYDNFADERDNYQQTEATTYNNAPLMGVLARLAAGHGGGRFGHSLADEVDATSMKSDNKTSLPSPSPAVEHYSPIEIEQNATASWTERSKTYHRYSVTVTNRSLKTVHELHIGISKLYGRVWGVDKARYGYVFPSWLQSLPAGKSAAFVYIQAAPPADVWVTGYKL

SEQ ID NO: 99405 - protein, 69 aa, Setaria italica
  Transcript Sequence Number=SeqID_33431
ICRYIYIKSYVRRKIKINSNLGWSSFYNEIEIQITVVLYLDGFGDCCSLVSNNAKSVFLVGQHTINLLS

SEQ ID NO: 99406 - protein, 143 aa, Setaria italica
  Transcript Sequence Number=SeqID_33432
  Subcellular localization annotation: CTP_CleavageSite=76; ConfidenceScore=5.86e-01
NAGAVKIPFLPLFRRPLNSGSPRTSSSSSRLSSSARAPSSSLSTFPLSLKLPSAILLLLLLFPSNGGPFRQLSSARCSGNSTSGGSGDSSCSVVRRRSFIGDPNGDPHHGLILRGCTGGHADYTELHPRGYYRILLLSAMHLL

SEQ ID NO: 99407 - protein, 71 aa, Setaria italica
  Transcript Sequence Number=SeqID_33433
  Gene Ontology: Mol. function=carboxylesterase activity
MEEKYYQQSPAEDLTLAKLLVRPGNQFLEDPVMKDEALLTAGNYGSVRKVFVVAKADGSSTEEMQRWMGGH

SEQ ID NO: 99408 - protein, 325 aa, Setaria italica
  misc_feature (45)..(45): Xaa can be any naturally occurring amino acid
  Transcript Sequence Number=SeqID_33434
  Gene Ontology: Mol. function=ARF guanyl-nucleotide exchange factor activity; Cellular component=intracellular; Biological process =regulation of ARF protein signal transduction
  Homolog annotation: Hit_ID=B9RDE3; Match level="QueryCoverage=91%, HitCoverage=16%, E-value=3e-94, Identity=64%"; Hit description =Cytohesin 1, 2, 3, putative
NALGLDDEHIELLLLKTLLSAVTSTSVRLHGDCLLRAVRACYDIXNLGSRSAVNQATAKASLVQMLVIVFRRMEADSSTVPVQPIVVADMIELPDDGSGSTPTADPNVVQGFISKIIGDFDPLARTTSSAGAGAGATVAHDGAFETTAAAEEGANPADLLDSTDKDMLDAKYWEISMYKTAIEGRKDELGVEGAVVGTLDDDADVRIGNKLRRDAFLVFRALCKLSMKTPPKDAPADPIVMRGKILALELLKILLENAGAVFRTSERFLGAIKQYLCLSLLKNCASSHMIVFQLSCSIFISLVSRFRPGLKAEIGVFFPMIILRV

SEQ ID NO: 99409 - protein, 136 aa, Setaria italica
  Transcript Sequence Number=SeqID_33435
PRLASLPEPDCCLDAEGEESSSSTATRERGDASKGAPEVQNASNELFGCSSNEVSKHNIGIAEVHFSRDDSSAEMTNLHPLLPCDYGSSVPTLTPCCSHPETVFSPNWKQDDPQTKAMYHNGAGYPDSESHPPHPP

SEQ ID NO: 99410 - protein, 115 aa, Setaria italica
  Transcript Sequence Number=SeqID_33436
HSRPPVSSTTNRRGLRADTRRSRPAAGCWLGYLQPMSDPEPRIEKCRGGGRRLAPGKRASSVTKRRCPSGHSLASWLNSLNPNRKAWDEEEDTSASGQSGNYILGAGRAEKRRRG

SEQ ID NO: 99411 - protein, 109 aa, Setaria italica
  misc_feature (37)..(37): Xaa can be any naturally occurring amino acid
  Transcript Sequence Number=SeqID_33437
  Homolog annotation: Hit_ID=B6SJB7; Match level="QueryCoverage=100%, HitCoverage=100%, E-value=4e-11, Identity=45%"; Hit description=PRAS- rich protein
  Subcellular localization annotation: CTP_CleavageSite=59; ConfidenceScore=5.48e-01
MATEVCRPHNILLPAPHRIRPAASSHRRPSSNNPAGXATRRSPPACRRHHGRKAASRPAAEVYAGPAFSTSPEPSALPLPQFPVKKAAAAVAAVDDAATRDLRRILRLE

SEQ ID NO: 99412 - protein, 128 aa, Setaria italica
  Transcript Sequence Number=SeqID_33438
  Gene Ontology: Mol. function=binding; Cellular component=mitochondrion
  Homolog annotation: Hit_ID=Q67UW7; Match level="QueryCoverage=97%, HitCoverage=26%, E-value=2e-56, Identity=58%"; Hit description =Putative pentatricopeptide (PPR) repeat-containing protein
  Pfam annotation: Domain name=PPR; Domain location=82-116; Score=47.6; E_value=4.9e-11; Accession=PF01535.12; Description=PPR repeat
QRNFWSNIQEHELPNSPILTILLGVGGNLGASKLGQQIHTLAVKLGMDSGLIVANALISMYFKCGSADSLKVFDSMEERDIFTWNTVITGYAQHGLGREAIRIYQQMESAGVLPNEVTFVGLLHACSH

SEQ ID NO: 99413 - protein, 457 aa, Setaria italica
  Transcript Sequence Number=SeqID_33439
  Gene Ontology: Mol. function=Rab GTPase activator activity; Cellular component=intracellular; Biological process=regulation of Rab GTPase activity
  Homolog annotation: Hit_ID=Q67YN2; Match level="QueryCoverage=58%, HitCoverage=48%, E-value=1e-115, Identity=74%"; Hit description =GTPase activator protein of Rab-like small GTPases-like protein
  Pfam annotation: Domain name=TBC; Domain location=180-402; Score= -61.6; E_value=0.004; Accession=PF00566.10; Description=TBC domain
SEFRLPCSYSLDSSEAERDAVKAQNRKGYLLLRKHCLRKSAYSMEGSKQSTNKTAGVNPEESISSEKGEESGCASPVESVEVPENAIVEEAISTEEGNPCLSTEQELQDDTSETKPEKMDENQSSSSSSNDEDSERSNVTHVEASHKDLASVCEPSLEDEQESIPRYSNTGGNMDDIEVSKAARPVKSARATEDFETWQRIIRLDAVRANDEWVSYSPSQASVSREKAVESAKAVCLKDYEHLEPCRIHHASRLVAILEAYAIYDQEIGYCQGMSDLLAPLLSVLEEDDEAFWCFAGFMRKARHNFRLDEVGIRRQLNMVARIIKYKDFHLYRHLEMLQAEDCFFVYRMVVVMFRRELTFEQTLCLWEVMWADQAANRAGIAKSSWRRMRLGAPPTDDLLLYAIAASVLQKRKLIIESYSSMDEIIRECNSMAGQLDIWKLLDDAHDLVVTLHNRIE

SEQ ID NO: 99414 - protein, 43 aa, Setaria italica
  misc_feature (1)..(6): Xaa can be any naturally occurring amino acid
  Transcript Sequence Number=SeqID_33440
XXXXXXRGDGPGAVSNLHPHTCFRELFCILTGNCRDILHIGDC

SEQ ID NO: 99415 - protein, 76 aa, Setaria italica
  Transcript Sequence Number=SeqID_33441
  Gene Ontology: Mol. function=substrate-specific transmembrane transporter activity; Cellular component=integral to membrane; Biological process=transmembrane transport
  Homolog annotation: Hit_ID=B6ST40; Match level="QueryCoverage=100%, HitCoverage=14%, E-value=8e-14, Identity=67%"; Hit description=Sugar carrier protein C
  Subcellular localization annotation: CTP_CleavageSite=38; ConfidenceScore=5.33e-01
RKEQTARGGSQYCKFDSQLLTAFTSSLYLAALVASFFVASVARSLGRKWSMFGGGVSFLAGAVLNAAAQNVAMLIV

SEQ ID NO: 99416 - protein, 277 aa, Setaria italica
  Transcript Sequence Number=SeqID_33442
MASYDGDEDSGRRRPPSQHRPSGGGSGDLASSAKLVAEAAKLALQDHSLEKVDKGRVAGAAADLLHAASQYGKLEGKPVGGYLGKAEEYLHQYGRKEGGAGGKHQGEEETKYGKKPSGGHGGGRYEEEEEGYKKKPGGGSGYGGGRYEEEEDHRKKPSSAGYGGGRYEQEDDYQKKPTSGGYGGGRYEQEDGYNKKPTSGGYGGGRYEQEDEYKRPPSGGSGGAYGGGRYEEDEYKKKPSAGGYGGGRYEEEDDYRKKPSAGGYGGGGRYEDEYSKK

SEQ ID NO: 99417 - protein, 269 aa, Setaria italica
  misc_feature (108)..(108): Xaa can be any naturally occurring amino acid
  misc_feature (147)..(147): Xaa can be any naturally occurring amino acid
  Transcript Sequence Number=SeqID_33443
  Gene Ontology: Mol. function=hydrolase activity
  Homolog annotation: Hit_ID=B6TUZ9; Match level="QueryCoverage=88%, HitCoverage=87%, E-value=2e-84, Identity=66%"; Hit description =Receptor protein kinase-like protein
  Pfam annotation: Domain name=DUF303; Domain location=94-194; Score =107.2; E_value=5.7e-29; Accession=PF03629.10; Description=Domain of unknown function (DUF303)
MARLQPALPFLLLLLLIAGAAAGRAGGVRTLIFILAGQSNMSGRGGATSGVWDGVVPPECAPSPRILRLSPALRWEEAHEPLHADIDVGNVLGVGPGMPFAHAVLAAXQGRGATVGLVPCAQGGTPLANWTRGTELYERMVTRARAXMAGCNGGGELAAILWYQGETDAMKREDAELYQGRMEALVRDVRRDLGRPDLLVIQVGIATAQYNGKFLGRVREAQKAVTATVPNVKYVDAMGLPIASDKTHLTTEAQVQLGNMLAKSYLETL

SEQ ID NO: 99418 - protein, 47 aa, Setaria italica
  Transcript Sequence Number=SeqID_33444
  Gene Ontology: Mol. function=metal ion binding; Cellular component =mitochondrial intermembrane space protein transporter complex; Biological process=protein import into mitochondrial inner membrane
  Homolog annotation: Hit_ID=B6TML5; Match level="QueryCoverage=89%, HitCoverage=56%, E-value=6e-12, Identity=73%"; Hit description =Mitochondrial import inner membrane translocase subunit Tim10
MAAGGAPTNMQKEQMFGLAEKEMEYRVDLFNRLTQTCFATILILSLY

SEQ ID NO: 99419 - protein, 88 aa, Setaria italica
  Transcript Sequence Number=SeqID_33445
AINRRPQPPPPSLGSRHAGRHGHHLGQDEPDAPQGPGYPAAGQLADQHAVGGRLGGGDTVLDPGGQNCSRTPWRGVLICPLVQHLLFY

SEQ ID NO: 99420 - protein, 70 aa, Setaria italica
  Transcript Sequence Number=SeqID_33446
PLAYQQSIEKRIVIGCLVTCATGRTPRSGEAILPGTLTPTDRDVAPESHILGEQASNDKAIPSFLTGSED

SEQ ID NO: 99421 - protein, 78 aa, Setaria italica
  misc_feature (49)..(49): Xaa can be any naturally occurring amino acid
  Transcript Sequence Number=SeqID_33447
KNKSLVSFSTNCTQRKTQCLVISTKFLAHLMKQSARQLYYRSTTEKKTXKEIAKFLADLMIEAQENFWEVDCLDKLHI

SEQ ID NO: 99422 - protein, 98 aa, Setaria italica
  Transcript Sequence Number=SeqID_33448
LQGATTREETSSLGELASLTTPPLMPKVKLPQLPPNYYSSASLSPPIRNQQEQHPNSAPPPELAAATTAPASAERAAGATAAAEAEAEAPELGKRERR

SEQ ID NO: 99423 - protein, 78 aa, Setaria italica
  Transcript Sequence Number=SeqID_33449
  Gene Ontology: Mol. function=microtubule motor activity; Cellular component=microtubule associated complex; Biological process =microtubule-based movement
  Homolog annotation: Hit_ID=Q01IZ0; Match level="QueryCoverage=100%, HitCoverage=6%, E-value=3e-40, Identity=97%"; Hit description =OSIGBa0102D10.3 protein
NMVRNEYNPSIAYAFDKVFGPATTTRHVYDVAAQHVVSGAMQGINGTVFAYGVTSSGKTHTMHGEQKSPGIIPLAVKD

SEQ ID NO: 99424 - protein, 106 aa, Setaria italica
  misc_feature (15)..(15): Xaa can be any naturally occurring amino acid
  Transcript Sequence Number=SeqID_33450
  Gene Ontology: Mol. function=ligase activity
  Homolog annotation: Hit_ID=B6UC42; Match level="QueryCoverage=100%, HitCoverage=36%, E-value=2e-34, Identity=72%"; Hit description=Tumor- related protein
EIRSTTGHVKEIKRXKSNFVVKTVSKSKMDPKYQHPSIHLYMMDLKAPLFTEAGASDNGNEEEEDILNPGEDEDPEVKSEPCSGSLEANSGSLDEWDIRRCGAMAA

SEQ ID NO: 99425 - protein, 444 aa, Setaria italica
  Transcript Sequence Number=SeqID_33451
  Gene Ontology: Mol. function=nucleic acid binding; Cellular component= lysosome; Biological process=regulation of transcription from RNA polymerase II promoter
  Homolog annotation: Hit_ID=B9SPT6; Match level="QueryCoverage=88%, HitCoverage=95%, E-value=1e-139, Identity=61%"; Hit description =Nucleolysin tia-1, putative
  Pfam annotation: Domain name=RRM_1; Domain location=157-227; Score =83.8; E_value=6.3e-22; Accession=PF00076.14; Description=RNA recognition motif. (a.k.a. RRM, RBD, o
  Pfam annotation: Domain name=RRM_1; Domain location=281-347; Score =58.9; E_value=2e-14; Accession=PF00076.14; Description=RNA recognition motif. (a.k.a. RRM, RBD, o
  Pfam annotation: Domain name=RRM_1; Domain location=72-138; Score =55.8; E_value=1.7e-13; Accession=PF00076.14; Description=RNA recognition motif. (a.k.a. RRM, RBD, o
  Pfam module annotation: Pfam domain module=RRM_1::RRM_1::RRM_1; Domain location=157-227::281-347::72-138
MNGPSHQQQQQRLRQQQQQQQQALLMQQALQQQQQYQSGVLAAAAAAAMTQMEPISNGNLPPGFDPSTCRSVYVGNVNPNVTESLLIEVFQSAGLVERCKLIRKEKSSFGFVDYYDRRSAALAIMTLHGRHIYGQAIKVNWAYASTQREDTSGHFHIFVGDLSSEVNDATLYACFSAYPSCSDARVMWDNKTGRSRGYGFVSFRNQQEAENAITEMTGKWLGSRQIRCNWATKNNSEEKPETDNHNAVVLTNGGSSNSATDASQDGGSKENPENNPDCTTVYVGNIGHEVNRDELHRHFYNLGVGAIEEIRVQQEKGFGFVRYSNHGEAALAIQMANGLVVRGKPIKCSWGTKPTPPGTASKPLPPPVAPYQPAVAMPGVPQGFTAAELLAYQRQLALSQAAAGQIAGQHGLAGQVSAGLLAGSQALYDGYPNQSSAQQLMYYN

SEQ ID NO: 99426 - protein, 109 aa, Setaria italica
  Transcript Sequence Number=SeqID_33452
  Gene Ontology: Mol. function=binding
  Homolog annotation: Hit_ID=B9RT68; Match level="QueryCoverage=99%, HitCoverage=7%, E-value=6e-17, Identity=45%"; Hit description =Nucleotide binding protein, putative
KSKLLVSDGLESCLDAGSEVTTIWQLLNNTYEVRHKSSVRQDILDQLLDSISTSKKDKVIRASVYVLLLMISEDRNVMRGIKRKDFHLSNLATALKRDVHEAAILIYLL

SEQ ID NO: 99427 - protein, 44 aa, Setaria italica
  Transcript Sequence Number=SeqID_33453
  Gene Ontology: Mol. function=protein phosphatase type 2A regulator activity; Cellular component=protein phosphatase type 2A complex; Biological process=signal transduction
  Homolog annotation: Hit_ID=B6SVA8; Match level="QueryCoverage=100%, HitCoverage=6%, E-value=3e-18, Identity=97%"; Hit description =Protein phosphatase type 2A regulator/ signal transducer
LDLTWSKSDYLLTSSKDKTVRLWKPGCDGCLAVFKHKDYVTCVQ

SEQ ID NO: 99428 - protein, 67 aa, Setaria italica
  Transcript Sequence Number=SeqID_33454
ALAPWRVEAGGNGAVLPVKGSKAHNLWTASVGHRLYSYATGSTTNGSNNSYPQSPITCTLHLQDSVL

SEQ ID NO: 99429 - protein, 48 aa, Setaria italica
  Transcript Sequence Number=SeqID_33455
NQIRPNLDKRMTFKGFLAATMRSKMWISTYVYCTHAFQEGRTKKPIPP

SEQ ID NO: 99430 - protein, 116 aa, Setaria italica
  Transcript Sequence Number=SeqID_33456
  Subcellular localization annotation: CTP_CleavageSite=38; ConfidenceScore=5.01e-01
AWGAIRASGGGAGGAGGWRGRGWGWGRLLQRRGGRQMRGRRGGHRRRGCGDRRPCRREGKPIKSRGQEELQAAESDERCALVDDERWEGARRAERNTAERFAEVGWPRRGREEIRR

SEQ ID NO: 99431 - protein, 71 aa, Setaria italica
  Transcript Sequence Number=SeqID_33457
TYMRTRMFHEKSRSIELFQEDMQKVKVRCTFALSKCSSCIQIIDMSFLVACNVWIMIFHVWVEKKGQQNYN

SEQ ID NO: 99432 - protein, 102 aa, Setaria italica
  Transcript Sequence Number=SeqID_33458
LYMLQDDVWSIRISACELPVWISNMLLVHDRIYCMVGTISLCLTWYPKFFTIELSKPVAFGDGEIRLSCQWFKDRSCSCEGAPNLHLDPQVRLWQQGELVAV

SEQ ID NO: 99433 - protein, 116 aa, Setaria italica
  misc_feature (91)..(91): Xaa can be any naturally occurring amino acid
  Transcript Sequence Number=SeqID_33459
  Gene Ontology: Mol. function=transcription factor binding; Cellular component=intracellular; Biological process=regulation of transcription, DNA-dependent
  Homolog annotation: Hit_ID=B6TV03; Match level="QueryCoverage=98%, HitCoverage=33%, E-value=2e-37, Identity=76%"; Hit description=RAB, member of RAS oncogene family-like 3
KEALIKFFRMLIRRRYFSNEPPAPSPWSLTPREDTILPVETLGGGTDSFQRKSLSGEGFMYNGVVPLPAQRNLTPPPTLNPQQPVTSLDNXRYHRFSSSSLPDVSSGRTSREDMNL

SEQ ID NO: 99434 - protein, 62 aa, Setaria italica
  Transcript Sequence Number=SeqID_33460
ASIAVGSDVAVDEGCDVDNGGGDVDEGGSDVDKGGDVTAGVVVDGFALPVLSAVTEVSCRCL

SEQ ID NO: 99435 - protein, 118 aa, Setaria italica
  Transcript Sequence Number=SeqID_33461
  Gene Ontology: Mol. function=hydrolase activity; Cellular component =mitochondrion
  Homolog annotation: Hit_ID=B6T551; Match level="QueryCoverage=99%, HitCoverage=67%, E-value=2e-49, Identity=79%"; Hit description=Nudix hydrolase 13
  Pfam annotation: Domain name=NUDIX; Domain location=19-118; Score =20.1; E_value=0.0023; Accession=PF00293.20; Description=NUDIX domain
MCDLVARTGRHLQRYEDGRRLVAGCIPFRYRDIKDEQKKLVEVLMINSQSGPGLLFPKGGWENDETVEEAAAREAIEEAGVRGDLVKLLGFYDFKSKQPEGMCRAAVFALHVKEELVL

SEQ ID NO: 99436 - protein, 90 aa, Setaria italica
  misc_feature (26)..(26): Xaa can be any naturally occurring amino acid
  Transcript Sequence Number=SeqID_33462
  Gene Ontology: Mol. function=transferase activity, transferring glycosyl groups; Cellular component=integral to membrane; Biological process=cellulose biosynthetic process
  Homolog annotation: Hit_ID=B6SW15; Match level="QueryCoverage=100%, HitCoverage=12%, E-value=4e-35, Identity=77%"; Hit description=CSLE6- cellulose synthase-like family E
LVVATVLSLMAYNYPPEKLNVYLSDXGGSILTFYALWEASAFAKRWLPFCKRHNIEPRSPAAYFAELEEPRDPSISKEWSFIKGLYDEMT

SEQ ID NO: 99437 - protein, 57 aa, Setaria italica
  Transcript Sequence Number=SeqID_33463
KVKRYSTGRGPHSYALSKHSSHLLPRYVSSGGVYVLLMLQLFLIIRPLLSRPPPHPP

SEQ ID NO: 99438 - protein, 423 aa, Setaria italica
  Transcript Sequence Number=SeqID_33464
  Gene Ontology: Mol. function=protein binding
  Homolog annotation: Hit_ID=Q10PT8; Match level="QueryCoverage=99%, HitCoverage=44%, E-value=1e-132, Identity=58%"; Hit description =Leucine Rich Repeat family protein, expressed
SDHSAEDEPIRTDHREFDIEEFHDSNQRNGHLGQNSGHLVGQKGKQRFKRRIFALKNHNGTKIEIIKMNGDQVDEHVLAEGNGHLTCDPSKSTPKKEGSESHYSRILPKNVSTNITSCTTGEHMIVKDFINLEVAKNDKSETCEQVACCAYLFQEAGALVQREVALLQSSQNKLYVLLLDMVCDGKETKPRVLGSYTLESLEKVSIGLGLQALRVHMVDDTTHLFFTRTSKEAQDVLWLLSVTNTNFPKLNHEIHLQSWENIQVKLFEKCICGSAKKGIFLYSMLMFWRNDAEDDSFFIRSIFVIEGSILVCIEDLDQFGRVPDDSDPPYFSLDASCSINNIQEVVMDQRNGKCLTLILDNHRQEEFHNSIQNPSNKQSDEIDAVHTWKLEWFSEEALLKFISVLKALYSTAAASSLPVKCIS

SEQ ID NO: 99439 - protein, 37 aa, Setaria italica
  Transcript Sequence Number=SeqID_33465
FHVEPQKIAVFRAFIRCFSCFTINFLLCSYRYGKMNV

SEQ ID NO: 99440 - protein, 153 aa, Setaria italica
  misc_feature (9)..(9): Xaa can be any naturally occurring amino acid
  misc_feature (45)..(45): Xaa can be any naturally occurring amino acid
  Transcript Sequence Number=SeqID_33466
  Gene Ontology: Cellular component=plasma membrane
FDLIAETRXRKSTEFLQMLNTSSDGRSSKVHEVPQKEWKILCGSXVKQDTDQLRVMYREGPEGTPFHTLLLEGFADGPIDVCTCVSWESALYKKWFPQYNLPTFRIDQSGCLKKVRIGEEICLVRVKVPWPVSEREALLHYFELEYLKEDLVI

SEQ ID NO: 99441 - protein, 124 aa, Setaria italica
  misc_feature (106)..(106): Xaa can be any naturally occurring amino acid
  Transcript Sequence Number=SeqID_33467
MQAVSTVATCDEDYKRALRGPLYVRIREYQDSDDKVKVTTKEENATEVPPDNPIVQNRLAVTNTTSNSEIVEEESEQNMSLKMDILPTSPSYQPAERAQQVENKPXISPEVEHALGILDTAIAV

SEQ ID NO: 99442 - protein, 58 aa, Setaria italica
  Transcript Sequence Number=SeqID_33468
RAPLLRLSMTLRSAIRVHGEESLDTNGFHQNGLGKNRESKQARKTKRWPCCLTPATIG

SEQ ID NO: 99443 - protein, 549 aa, Setaria italica
  Transcript Sequence Number=SeqID_33469
  Gene Ontology: Cellular component=plasma membrane
  Homolog annotation: Hit_ID=Q9SRM6; Match level="QueryCoverage=75%, HitCoverage=74%, E-value=1e-43, Identity=32%"; Hit description =T19F11.12 protein
MEKRKRVLELRDRLDRTLALPDLAEESSLRALVKKQMQASSLTGSDEGDIDLIAETRAKEVSEFLQMLNTSSDGRSSKVHEVPQKEWKVKQDTDQLRVMYREGPEGTPFHTLLLEGFADGPIDVCTCVSWESALYKKWFPQYNLPTFRIDQSGCLKKVRIGEEICLVRVKVPWPVSEREALLHYFELEYLKEDLVIVIMKTISDLDTINIRTHGFSRDGIPEAGDTVRIDVFGGFVLQRITKERSFFRAIANMDIKLDFVPPWFINFISRQLIGSGHKLYQKAVSTVATCDEDYKRALRGPLYVRIREYQDSDDKVKVTTKEENATEVPPDNPIVQNRLAVTNTTSNSEIVEEESEQNMSLKMDILPTSPSYQPAERAQQVENKPFISPEVEHALGILDTAIAVIRGDKTTNITTLQNLLSYDAASKGSTVSSRSSRANIRNADNLLNGGPATTQPQDSREIRQAYSLPSEKVSDRAEDAIDKGSLKNSTASTVTRTMSMTLRSAIRVHGEESLDTNGFHQNGLGKNRESKQARKTKRWPCCLTPATIG

SEQ ID NO: 99444 - protein, 68 aa, Setaria italica
  Transcript Sequence Number=SeqID_33470
  Gene Ontology: Mol. function=histone-lysine N-methyltransferase activity; Cellular component=nucleus; Biological process=chromatin modification
  Homolog annotation: Hit_ID=Q8L821; Match level="QueryCoverage=100%, HitCoverage=9%, E-value=4e-32, Identity=95%"; Hit description=SET domain-containing protein SET118
NLFVQCVLSSHNDVKLAKVTLFAADTILPLQELSYDYGYRLDSVVGPDGEIVKLPCHCGAPDCRKRLY

SEQ ID NO: 99445 - protein, 83 aa, Setaria italica
  Transcript Sequence Number=SeqID_33471
HLSVSDLNKLQLSFSSESWIHSWLKMNPCTAVVHTCVAQAMEIEEGPRNLRIIACEFFVPRTPFPELLKLYIVSSFGNGRVHV

SEQ ID NO: 99446 - protein, 45 aa, Setaria italica
  Transcript Sequence Number=SeqID_33472
LMIPYCSCVCHHDHVTFHSLNVMCFGICCLQHKSSSINVTRISVT

SEQ ID NO: 99447 - protein, 575 aa, Setaria italica
  Transcript Sequence Number=SeqID_33473
TSTSTLLTDDSVLRTGEDFNASSSGAAAEAGVEAEIKEAVPFIKLSDVASEAEKAEPDATRTEPEAERAVTVDTDVGTGDGAAAATAEEENPVAEAVSCDTEAPVDCTGDRDLFNLLMRTAIERFPDLHFYRFGRPVAVPGSPMECDLAWRFRPAADAIGTGRTTYYKDYRRFALTRDVNTCTLVVDSVGEYHSGVGAKRSGKRKGKKGKKGKREAPVTDFVPAKTQVRLDENAANNEAAGAVAEPVFVVGEAVNDSLPVVASESEFSRGRYLIYMGGGERCKSMNHFIWGFLCALGEAQFLNRTLVMDLNVCLNARYTSSGKDEEKDFRLYFDFEHLKESASVIDQSQFWQDWGKWQKKDRLKNFYTEDIRMTPMKLRDVKDTLIMRKFGNVEPDNYWSRVCEGETEGVIKRPWHFLWKSRRLMEIVSAISSRMNWDFDSVHVVRGEKAQNTQLWPNLDRDTSPDSLLMTLNDKVGAGRYLYIATDEPDKSFFDPLKEKYKTRFLDDFKDLWDENSEWFTETKELSNGKPVEFDGYMRVAVDTEVFLRGKRHLETFNDLTRDCKDGVNTCPASS

SEQ ID NO: 99448 - protein, 85 aa, Setaria italica
  Transcript Sequence Number=SeqID_33474
  Gene Ontology: Mol. function=binding
  Homolog annotation: Hit_ID=B9REU1; Match level="QueryCoverage=100%, HitCoverage=5%, E-value=2e-31, Identity=80%"; Hit description =Guanine nucleotide-exchange, putative
GEPSFRRLVLRLVSHVIRLYSSSLVTESEVFLNMLVKVTRQDLPLWHQILVLEILRGFCVEACTLRLLFQTFDMNPVNTNVVENI

SEQ ID NO: 99449 - protein, 52 aa, Setaria italica
  Transcript Sequence Number=SeqID_33475
MQKGRSRLLGTRFICVPGLCSLHKASVASDSAHLPSASPPLRRREARPSAPS

SEQ ID NO: 99450 - protein, 89 aa, Setaria italica
  Transcript Sequence Number=SeqID_33476
  Pfam annotation: Domain name=F-box; Domain location=6-53; Score=25.0; E_value=0.0003; Accession=PF00646.25; Description=F-box domain
SRFKSSYRPFLSQEIQLLVLSLLSLKDAARASTVSRNWRKLWTWHPNLCFDGTKSGSADEDSVKIEKAKFIETVNAIIQQHSGIGLNKF

SEQ ID NO: 99451 - protein, 302 aa, Setaria italica
  Transcript Sequence Number=SeqID_33477
  Gene Ontology: Mol. function=binding; Cellular component=nuclear pore; Biological process=intracellular protein transport
  Homolog annotation: Hit_ID=B6TJW5; Match level="QueryCoverage=99%, HitCoverage=63%, E-value=1e-136, Identity=79%"; Hit description =Importin alpha-1b subunit
  Pfam annotation: Domain name=Arm; Domain location=100-141; Score =30.6; E_value=6.5e-06; Accession=PF00514.15; Description =Armadillobeta-catenin-like repeat
  Pfam annotation: Domain name=Arm; Domain location=143-183; Score =50.5; E_value=6.6e-12; Accession=PF00514.15; Description =Armadillobeta-catenin-like repeat
  Pfam annotation: Domain name=Arm; Domain location=17-56; Score=15.0; E_value=0.15; Accession=PF00514.15; Description=Armadillobeta -catenin-like repeat
  Pfam annotation: Domain name=Arm; Domain location=186-226; Score =27.5; E_value=5.6e-05; Accession=PF00514.15; Description =Armadillobeta-catenin-like repeat
  Pfam annotation: Domain name=Arm; Domain location=58-98; Score=28.7; E_value=2.4e-05; Accession=PF00514.15; Description=Armadillobeta -catenin-like repeat
  Pfam annotation: Domain name=HEAT; Domain location=149-185; Score =7.6; E_value=5.8; Accession=PF02985.14; Description=HEAT repeat
  Pfam annotation: Domain name=HEAT; Domain location=196-228; Score =4.0; E_value=16; Accession=PF02985.14; Description=HEAT repeat
  Pfam annotation: Domain name=HEAT; Domain location=22-58; Score=2.1; E_value=27; Accession=PF02985.14; Description=HEAT repeat
  Pfam annotation: Domain name=HEAT; Domain location=63-100; Score=5.4; E_value=11; Accession=PF02985.14; Description=HEAT repeat
  Pfam module annotation: Pfam domain module=Arm::Arm::Arm::Arm::Arm::HE AT::HEAT::HEAT::HEAT; Domain location=100-141::143-183::17-56::186 -226::58-98::149-185::196-228::22-58::63-100
IPVLRTAMWALSNLCFGKFPAEVQVKPILEIVSQLIHSADEKILADACWTVYYICGGVDDAIQDILDVGVCPQLVNLLMHGSASVLLPVIMALARISAGDDAQVQVLIENGILDCLAQLLARSYPKNIKKQACLIVSNIATGSKDQIQAVIDASIISPLIVLLKTSEADIKKEAAWALSNAASGASSEQIQYLVSRGCLEPLCSVLTYQDPDLVHACLEGLENILQAGEAGKKGEESGTNPYAQFILECGWLDKLEDLQEVNNDRIYELVMKLLQSYWEEEVSESDDPIVPGSNDSADTVET

SEQ ID NO: 99452 - protein, 76 aa, Setaria italica
  misc_feature (49)..(49): Xaa can be any naturally occurring amino acid
  Transcript Sequence Number=SeqID_33478
  Gene Ontology: Mol. function=binding
  Homolog annotation: Hit_ID=B6U9W6; Match level="QueryCoverage=100%, HitCoverage=21%, E-value=1e-32, Identity=90%"; Hit description=Sel1 -like repeat
  Pfam annotation: Domain name=Sel1; Domain location=41-74; Score=15.4; E_value=0.23; Accession=PF08238.4; Description=Sel1 repeat
  Pfam annotation: Domain name=Sel1; Domain location=9-40; Score=19.0; E_value=0.02; Accession=PF08238.4; Description=Sel1 repeat
  Pfam module annotation: Pfam domain module=Sel1::Sel1; Domain location=41-74::9-40
RRAARLGSAAAMVDAGLMCWEEGRRREAVEYYRSAAELGHPVGMCNLGXSYLEADPHKAEEAIRWFYPSASAGNAR

SEQ ID NO: 99453 - protein, 56 aa, Setaria italica
  misc_feature (54)..(54): Xaa can be any naturally occurring amino acid
  Transcript Sequence Number=SeqID_33479
LHLVVYLMGINLCVSPLSMFNMYSIKFSKERRGGKKGRPPTSQEIGNLNLQISXVL

SEQ ID NO: 99454 - protein, 262 aa, Setaria italica
  Transcript Sequence Number=SeqID_33480
  Homolog annotation: Hit_ID=UPI000034F426; Match level="QueryCoverage =25%, HitCoverage=8%, E-value=1e-26, Identity=83%"; Hit description =SIT4 phosphatase-associated family protein
QAFRYGIYSNDDIEEAQGSLERDDEDVYFDDESAEVVISSLRLGDDQDGSSLFTNSNWFTFDGERGINDRISDSVPSSSPNSEEISLETEEADDGKVIGTEDEMETVCLGNGSTEEAKDVAECVEQLNCSTANEPLQNTDSLERHSDVSNGSTEVGTAAAAESSAPSVEIAAESSAPSVEIAAEKTADEPLMVERTVGEPAVSSDLDNSISEATPGANGSEPADPEVSSEQVGNDTDVQQPVKEVAGEDVDETKTDAVKASD

SEQ ID NO: 99455 - protein, 553 aa, Setaria italica
  Transcript Sequence Number=SeqID_33481
  Gene Ontology: Mol. function=protein phosphatase binding; Cellular component=cytoplasm; Biological process=regulation of phosphoprotein phosphatase activity
  Homolog annotation: Hit_ID=Q7XTT5; Match level="QueryCoverage=90%, HitCoverage=64%, E-value=0.0, Identity=68%"; Hit description =OSJNBa0058K23.19 protein
  Pfam annotation: Domain name=SAPS; Domain location=37-397; Score =437.5; E_value=2.1e-128; Accession=PF04499.7; Description=SIT4 phosphatase-associated protein
VLRTLVEDEELMDLLFSFVKPDHPHSTLLSGYFSKVVICLMLRKTAPLMNYVQGHPEIVVQLVDLIGITSIMEVLIRLIGADENIYSNYGDTLQWLENTDVLEMIADKFSSSDSPEVHANAAEILCAVTRCAPPSLAAKICSPSFVGRLFHHALEESRPKSVLVHSLSVCISLLDPKRLASASYQAFRSNLSHGALVTASPETVDGMLESLGNLLMLLDTSAAENVLPTTYGCLRPPLGKHRLKIVEFISVLLTIGSETAEKELIRQSAIKRSIDLFFEYPYNNFLHHHVENIIVSCLEGKRTELVEHVLNECDIVGKILVAERLSSLSTESNGPTIPSEEKAPPRIGNVGHMTRIANKLIQLGNSNSTIQAHLQENTEWVEWQTNVLVKRNEVENVYHWACGRPTSLHDRGRDSDDDDFRDRDYDVAALANNLSQAFRYGIYSNDDIEEAQGSLERDDEDVYFDDESAEVVISSLRLGDDQDGSSLFTNSNWFTFDGERGINDRISDSVPSSSPNSEEISLETEEADDGKVIGTEDEMETVCLGNGSTEEAK

SEQ ID NO: 99456 - protein, 66 aa, Setaria italica
  Transcript Sequence Number=SeqID_33482
IQIPLPPKGDGTNYIEMKVSNPDRYHEAKQWNLRSKMQGVFGSLVLTKISITSNVWILIRSIKHRL

SEQ ID NO: 99457 - protein, 49 aa, Setaria italica
  Transcript Sequence Number=SeqID_33483
SRLVFLVKNFCLTAFILVCHTLFTIRCNIFTLHHMLKEKCLKFSLKGLD

SEQ ID NO: 99458 - protein, 114 aa, Setaria italica
  misc_feature (40)..(40): Xaa can be any naturally occurring amino acid
  Transcript Sequence Number=SeqID_33484
  Pfam annotation: Domain name=F-box; Domain location=23-70; Score =21.3; E_value=0.0039; Accession=PF00646.25; Description=F-box domain
RRPGEEGEGFEVAAAAAAQEEEDRISALPEDLRLRILALXPLKPAIRTGALSTRWRALWARRWPAPSSLDLHLRPGDDPEELLRSLECRGRRRLDRFSLTIHPYRSPYYPASRT

SEQ ID NO: 99459 - protein, 41 aa, Setaria italica
  Transcript Sequence Number=SeqID_33485
RLWSCKSAGVELTFLISDVNGKGIVLLVYFDPLFSPNNRNT

SEQ ID NO: 99460 - protein, 96 aa, Setaria italica
  Transcript Sequence Number=SeqID_33486
  Gene Ontology: Mol. function=receptor activity; Cellular component =endoplasmic reticulum; Biological process=intracellular protein transport
  Homolog annotation: Hit_ID=B6U1I6; Match level="QueryCoverage=100%, HitCoverage=44%, E-value=2e-28, Identity=73%"; Hit description=B -cell receptor-associated protein 31-like containing protein
SSTSREEVEKLQMENQSLREKEGNSSGEMKKLQREIAKLNESMKKLKFENEEHERKASAAEAHVNALQKQSEELLLEYDRLLEDNQILQTQLLSRG

SEQ ID NO: 99461 - protein, 203 aa, Setaria italica
  Transcript Sequence Number=SeqID_33487
  Gene Ontology: Mol. function=metal ion binding
  Homolog annotation: Hit_ID=Q7XQ90; Match level="QueryCoverage=100%, HitCoverage=4%, E-value=3e-95, Identity=84%"; Hit description =OSJNBa0018M05.18 protein
  Subcellular localization annotation: CTP_CleavageSite=64; ConfidenceScore=5.20e-01
FLPMRVTQDASLSTANSTVIRMPLSSKCLKELEAGSNRVKQIFDRFTQNPSSTLLFLRSIIQVSLSTWEDGASQPTLNYSVLVDPSVASLRNPFSEKKWRKFQISRIFSSTSAAIKMQAIDVHVIESGCSYIDKWFVSLSLGSGQTRNMALDRRYLAYNLTPAAGVAAHIARNGVSTNIHPSSCILSPLPLSGFLSMPVHNSG

SEQ ID NO: 99462 - protein, 238 aa, Setaria italica
  misc_feature (140)..(140): Xaa can be any naturally occurring amino acid
  Transcript Sequence Number=SeqID_33488
  Homolog annotation: Hit_ID=Q2QUQ5; Match level="QueryCoverage=96%, HitCoverage=55%, E-value=1e-114, Identity=53%"; Hit description =Pentatricopeptide, putative, expressed
  Pfam annotation: Domain name=PPR; Domain location=183-217; Score =16.4; E_value=0.1; Accession=PF01535.12; Description=PPR repeat
  Pfam annotation: Domain name=PPR; Domain location=47-81; Score=40.3; E_value=7.4e-09; Accession=PF01535.12; Description=PPR repeat
  Pfam annotation: Domain name=PPR; Domain location=82-116; Score=22.2; E_value=0.0021; Accession=PF01535.12; Description=PPR repeat
  Pfam module annotation: Pfam domain module=PPR::PPR::PPR; Domain location=183-217::47-81::82-116
RNSWCLVRRLLSTHPFLANSLLDLYTKGGMLDTASKIFNRITQKDVASWNTMILGYGMLGQLDVAFELFDLMKDDGIDYDHVSYIAVLSACSHGGLVERGKKYFSQMLAQNMKPQQMHYACMVDLLGRAGQLSESAEINXNMPFRANSDVWGAMLGSCRIHGNIELARWAAEHLFELKPEHSGYYTLLMNMYAEVGMWSEANEIKTLMKSRKVQKNPAYSWVQNDNKLQAFLVGNTYE

SEQ ID NO: 99463 - protein, 70 aa, Setaria italica
  Transcript Sequence Number=SeqID_33489
IALLFCLFQVLLLIPVEFLRWVIIALAGGVSSWFIALNLKECTEGADLMVLIASAAVLQLAIKPSDQLLL

SEQ ID NO: 99464 - protein, 79 aa, Setaria italica
  misc_feature (62)..(62): Xaa can be any naturally occurring amino acid
  Transcript Sequence Number=SeqID_33490
GESEAEERDGEEEEEEEADSGEKERFAVGIARCGAMRGEESRWRNLAAPNAVEAMARSGGRXRGDRARPLSRVRDGGGA

SEQ ID NO: 99465 - protein, 703 aa, Setaria italica
  Transcript Sequence Number=SeqID_33491
  Gene Ontology: Mol. function=guanyl-nucleotide exchange factor activity; Cellular component=endomembrane system; Biological process= biological_process
  Homolog annotation: Hit_ID=Q8H7M0; Match level="QueryCoverage=99%, HitCoverage=38%, E-value=0.0, Identity=84%"; Hit description =Putative adapter protein SPIKE1
MEPAAAAAGEGQRFKRIPRQAWSGNLELDPLLNENLDQWPHLNELVQCYKADFVKDDGKYGRYESVAPPSFQNQIFEGPDTDIETELQLCNVRHSKPEDATEDDTPSTSGRQIYETEPSASSSKVHCSLSPLPAYEPAYDWENERSLIFGQRVPESLPAITNSGLKITVKVLSLSFQAGLIEPFSGTICLYNRDRREKLSEDFYFHILPTDMQDAQISLDRRGVFSLDAPSPSVCLLIQLEKAATEEGGVTPSVYSRKEPVHLTEKEKQKLQVWSRIMPYKESFAWAMIPLFEGNHAGGLGDAASPSSPLAPSISGSSSQDSIVDPISKLTLDGKLNHYSSGSSVIVEISNLNKVKESYIEDSLQDPKRKVHKPVKGVLRLEVEKLHDGHHDADNVSEGGSMANDLNDAGDLSNGRCNRSSFDGIRSSVNSSGVAQKDAHHNGKISSCENSDSFQAFDFRMMTRSEPFSQLFHCLYVYPLTVSLSRKRNLFVRVELRKDDSDIRKPPLEAVHPRERNTMLQKWGHTQIAVGTRMALYHDELKISLPALLTPQHHLVFTFFHVDLQMKLEAPKPVIVGYSVLPLSTHIQLLSDVSLPILRELVPHYLQESGKERMDYLEDGKTVFRLRLRLCSSLFPVNERIRDFFVEYDRHTLHTSPPWGSELLEAINSLKNVESTALLQFLQPILNKLLHLIGDGGETLQVC

SEQ ID NO: 99466 - protein, 84 aa, Setaria italica
  Transcript Sequence Number=SeqID_33492
IDKYTATPFSTNFSVHCLFPFIVQLSLSCFSLIESETEPVMYLIWFGDTGLLGRTGHLGTKVHHVCSILTIQTSHLDARLTSFV

SEQ ID NO: 99467 - protein, 62 aa, Setaria italica
  Transcript Sequence Number=SeqID_33493
PTQSILSSTLQPLAPSGQQPSQQLSTQEDGDGDPQKRLQATLQLAATLLKQIQNQSNPGAQK

SEQ ID NO: 99468 - protein, 46 aa, Setaria italica
  Transcript Sequence Number=SeqID_33494
EQAQAAKIQEQENLLRAAVNYGEGLRVPGDQRQPQSLPSHLVEVLF

SEQ ID NO: 99469 - protein, 555 aa, Setaria italica
  Transcript Sequence Number=SeqID_33495
MDAAAAALGAASGPGAPPPGAAAGEQQAAPRVERLSAGVQQQLNLEGMRARAVGLYKAISRILEDFDVIARTNPAASPKWQDVLGQFSMVSMELFNIVEDIKNVSKVFVVYPRNVNAENAPILPVMLSSKLLPEMEVEEATKREQLLSGITNLPVPTQIEKIKVRIDMIGSACETAEKVIADCRKSYGLGTRQGTNLVPTLDKAQAAKIQEQENLLRAAVNYGEGLRVPGDQRQPQSLPSHLVEVLSFGDGQQSFGDNSGGYPKNSSTFTPSGVNTQGNPVQASGGQLLGRPAPSPGGTGTPNFENVSTPPMPYANSPRSGTNMMNTPSPQQHLTPQQQRQKLIQASQQQQLHAQQQLRPSAAGMLAQSTLPQLQDLQGQAQQKLQVPGQQQMQYNQALSQQFHNRQMQPGRMQPGMAQSQLNQGTQLRSHLGQFAGPANSAMFTAAQASSNSQMMANMPGTMQSQSLMPQMQYGMAGGHPQRSHPSQMLTDQMFGMGATNSNMMGMQQQQQQQQQQGVYGNMQAGAQNMQQGMVGLQNQGQNPNFPQQRQQNQQ

SEQ ID NO: 99470 - protein, 124 aa, Setaria italica
  Transcript Sequence Number=SeqID_33496
  Gene Ontology: Mol. function=transferase activity
  Homolog annotation: Hit_ID=Q5EXL9; Match level="QueryCoverage=100%, HitCoverage=25%, E-value=2e-42, Identity=65%"; Hit description=HGA1
  Pfam annotation: Domain name=DUF563; Domain location=1-123; Score =22.4; E_value=1e-10; Accession=PF04577.6; Description=Protein of unknown function (DUF563)
VAQLQGPAAAPACTVTYGVPAVIFALGGLTGNFWHDFSDVLVPLFVASRRYGGEVQFLITNMQPWWPEAYRTILRGLSKYDAVDLDGDEHVRCFPHVTVGLHQHNGLSIFPEWVPGGPLSTHDF

SEQ ID NO: 99471 - protein, 79 aa, Setaria italica
  Transcript Sequence Number=SeqID_33497
  Gene Ontology: Mol. function=nucleotide binding; Cellular component =intracellular
  Homolog annotation: Hit_ID=Q6ZJ99; Match level="QueryCoverage=83%, HitCoverage=15%, E-value=2e-28, Identity=95%"; Hit description =Putative GTP-binding protein ERG
  Pfam annotation: Domain name=KH_2; Domain location=15-76; Score=19.2; E_value=0.0031; Accession=PF07650.9; Description=KH domain
MDWKELKDGSLRVEQHFITPKQSQRQILVGKNGSKIGRIGIEANEELRSIFKKNVHLILQVRVAKKEKCLNKISKACID

SEQ ID NO: 99472 - protein, 66 aa, Setaria italica
  misc_feature (46)..(46): Xaa can be any naturally occurring amino acid
  Transcript Sequence Number=SeqID_33498
MMFRAVLSGAISLLLLAAAAVAGGERRSYIVQMDVEKMPAPFVEHXGWYLSVLSSLASATTTAAGT

SEQ ID NO: 99473 - protein, 111 aa, Setaria italica
  Transcript Sequence Number=SeqID_33499
  Gene Ontology: Mol. function=microtubule motor activity; Cellular component=microtubule associated complex; Biological process =microtubule-based movement
  Homolog annotation: Hit_ID=Q93XF3; Match level="QueryCoverage=96%, HitCoverage=11%, E-value=2e-52, Identity=93%"; Hit description =Kinesin heavy chain (Fragment)
MHLCSAKKLQREREMLCRQMQKRLTIQERESMYTKWGISLSSKRRRLQVARRLWTETKDLEHVRESASLVARLIGLLEPGKALREMFGLSFAPQQFTRRSHNSWRYGRSLD

SEQ ID NO: 99474 - protein, 952 aa, Setaria italica
  Transcript Sequence Number=SeqID_33500
  Gene Ontology: Mol. function=microtubule motor activity; Cellular component=microtubule associated complex; Biological process =microtubule-based movement
  Homolog annotation: Hit_ID=Q93XF3; Match level="QueryCoverage=94%, HitCoverage=99%, E-value=0.0, Identity=83%"; Hit description=Kinesin heavy chain (Fragment)
  Pfam annotation: Domain name=Kinesin; Domain location=46-363; Score =457.9; E_value=1.5e-134; Accession=PF00225.15; Description=Kinesin motor domain
LVSSIGGSYLVGDAPVQWDKVDGAEVANGGGGGGAGRLEKILVSVRLRPLSDKEIARGDPAEWECINDTTIISRSTFPDRPTAPTAYSFDRVFRTDCNTKEVYNEGAKAVALSVVSGINSSVFAYGQTSSGKTYTMNGITEYTAADIYDYIAKHEERAFVLKFSAIEIYNEVVRDLLSAESTSLRLWDDAEKGTYVENLTEVVLRDSDHLKELISVCEAQRRTGETYLNENSSRSHQILKLTIESSAREFLGKDKSTTLVASVNFVDLAGSERASQALSAGTRLKEGCHINRSLLTLGTVIRKLSKVRNGHIPYRDSKLTRILQPSLGGNARTAIICTMSPARSHMEQSRNTLLFASCAKEVVTNAQVNVVMSDKALVKQLQKELARLESELRCPASYSGLEALVKEKDSQIRKMEKEIKELKSQRDLAQSRLQDLLQVVGDNHGSKHPVASGRNFTFDVPQPCEDEQSTTSEVVSSGQNFRFQGRHIAQRDYRPQQSENNAQFATSLSYSVCSPPFSGMPPTNGRDDNSQISNEDSEDLCKEVRCIETNETEENECLESLAVGSNSLQDSNVGSSMHGNNDPNPSVYSRQNDVSPITLEQHLENVKKPFANLVMDLGSSTRNSSSSRVIGRSRSCRSLMGSTLFEDLEKEDCTPPSRSFMDHPGRPEGCQRRVSALNYDAESETLSRAGSMLSEITTARDGLKPNGSVAGDTEFAGIGEFVAELKEMAQVQYQKQRGDQAENGELAEGTIRSVGLDPIMDALQSPSRWPLEFEKKQQEIIDLWHGCNVSLVHRTYFFLLFKGDPADAIYMEVELRRLSFLKDTYSNGSMGRNVVAGSLNTSLVSSAKKLQREREMLCRQMQKRLTIQERESMYTKWGISLSSKRRRLQVARRLWTETKDLEHVRESASLVARLIGLLEPGKALREMFGLSFAPQQFTRRSHNSWRYGRSLD

SEQ ID NO: 99475 - protein, 73 aa, Setaria italica
  Transcript Sequence Number=SeqID_33501
LLHDCLYTHRHKLITSKLVTCLWPKFGTIESMLLLLYHGCSCIHLIVYLLYQFTVATGCILSYLIVMNIISCL

SEQ ID NO: 99476 - protein, 276 aa, Setaria italica
  Transcript Sequence Number=SeqID_33502
  Gene Ontology: Mol. function=nucleoside-triphosphatase activity; Biological process=defense response
  Homolog annotation: Hit_ID=B5UBC0; Match level="QueryCoverage=96%, HitCoverage=26%, E-value=1e-51, Identity=45%"; Hit description=NBS -LRR class disease resistance protein
  Pfam annotation: Domain name=NB-ARC; Domain location=85-276; Score= -108.4; E_value=0.012; Accession=PF00931.14; Description=NB-ARC domain
PWQAAIRRTLYEIRTWKLRRDIAARIAELKERAQHVGDRRSRYGVPDPKPGKKKSNLGGATGYLAAEHQETTRQLIGIMKPVGVKDLADLEKWISSDESRKQRGVLSIVGFGGVGKTTVAMALYRKHGPQFQCRAMVTVSQNADPEVVLRDILNQVKPQANNGEQQGKDSSRDISEKRIPVIGGILSRFRQPSPNKEEDGNAGQDKHNQIKSELENYLRGTRYLLLIDDVWSSSTWQNIKKCFPENGEGSRIIVTTRFQAVAVTCSSRKDHDHIHP

SEQ ID NO: 99477 - protein, 46 aa, Setaria italica
  Transcript Sequence Number=SeqID_33503
SGSIPTVLTNILHQHHNDHKAQRQHLIPERSFGGGFFYQPDSMQLF

SEQ ID NO: 99478 - protein, 169 aa, Setaria italica
  Transcript Sequence Number=SeqID_33504
  Gene Ontology: Mol. function=ubiquitin-protein ligase activity
  Homolog annotation: Hit_ID=B9SIX2; Match level="QueryCoverage=99%, HitCoverage=3%, E-value=1e-19, Identity=36%"; Hit description =Ubiquitin-protein ligase, putative
GLSFTQRILKLVCGLTMEFPPDASDAMMLSSVARCADSLPALFRLKFKFSNHDRVFCVDGVGTILLQILEEFLQLMQIIVCNSDICCTVQVCVLSSMLEIFSPNIWRYERSGTCLVPPLAYSPRVVQFVLKLLKDTKRWTRRVDRDKPDKDAFYYSFNHELNDLSCHVR

SEQ ID NO: 99479 - protein, 96 aa, Setaria italica
  Transcript Sequence Number=SeqID_33505
IFYNVFHILNIWFLIYRRMVFLHVLDILLSDKGTHGSPPTRIPVGPNRWACPTMLCGTRHEDAWSTSSEAGRTNSARISRDTCCSPTQIAFHVTID

SEQ ID NO: 99480 - protein, 252 aa, Setaria italica
  Transcript Sequence Number=SeqID_33506
  Gene Ontology: Mol. function=transferase activity, transferring groups other than amino-acyl groups
  Homolog annotation: Hit_ID=Q9FVY9; Match level="QueryCoverage=89%, HitCoverage=41%, E-value=1e-102, Identity=84%"; Hit description =Benzoyl-CoA:benzyl alcohol/phenylethanol benzoyltransferase, putative, expressed
  Pfam annotation: Domain name=Transferase; Domain location=1-230; Score=-79.0; E_value=4.6e-07; Accession=PF02458.7; Description =Transferase family
LRTLVVRYTKGTIIPLDDMVHRSFFFGRREVAAVRAHLPPHLRSRASTFDLLTGLLWRCRTVALAPDADEEMRMICIVNARGGKSGGGAAIPEGYYGNAFAFPVAVATAGDLAARPLGHAVELVKRAKGEVGAEYMRSVADLMVLRGRPHFTVVRAYLASDVTKAGFGDLDFGWGKPVYGGPAKGGVGAIPGVASFLIPFKNAKGEDGIVVPMCLPGPAMETFVRELGKLLSPPAEQPQEDASSFPVIRSAL

SEQ ID NO: 99481 - protein, 55 aa, Setaria italica
  Transcript Sequence Number=SeqID_33507
NWKAQNLRSSGPFKSFPWLFVYFVYEPKLNQLLIHIKPSSEYVHNDLARFRNRTC

SEQ ID NO: 99482 - protein, 63 aa, Setaria italica
  Transcript Sequence Number=SeqID_33508
  Gene Ontology: Mol. function=transferase activity, transferring glycosyl groups; Biological process=metabolic process
  Homolog annotation: Hit_ID=Q8LKT1; Match level="QueryCoverage=90%, HitCoverage=12%, E-value=1e-22, Identity=87%"; Hit description =Putative glucosyl transferase
MTETTIMAAPAPQPHVMVLPFPAQGHVIPLMELSHRLVDYGFKIYFVNTEFNHDCILKSMQNK

SEQ ID NO: 99483 - protein, 81 aa, Setaria italica
  Transcript Sequence Number=SeqID_33509
  Gene Ontology: Mol. function=calcium ion binding
  Homolog annotation: Hit_ID=Q10BR5; Match level="QueryCoverage=100%, HitCoverage=7%, E-value=5e-36, Identity=83%"; Hit description =Calreticulin family protein, expressed
YAIRGMYSEVIALAVTMVREGVIPDRFLITRILQACAYTEDLELGMAMHSLAIRKGFMGRVRDVPVGNSVLAMYVKCGELG

SEQ ID NO: 99484 - protein, 105 aa, Setaria italica
  misc_feature (30)..(30): Xaa can be any naturally occurring amino acid
  Transcript Sequence Number=SeqID_33510
  Gene Ontology: Mol. function=DNA binding; Cellular component=nucleus
  Homolog annotation: Hit_ID=B4FMQ3; Match level="QueryCoverage=95%, HitCoverage=35%, E-value=8e-17, Identity=50%"; Hit description=MYB transcription factor TaMYB1
  Subcellular localization annotation: CTP_CleavageSite=58; ConfidenceScore=5.42e-01
PPRCRGVDQASPGFHHDSARSHFQELSPSXSPSPPSPSSSAAYPFSGELVAAMQEMIRAEVRRYMSGTGLRAGCGAGAVGEACIVEGVMRAAAERVGATVVVTRP

SEQ ID NO: 99485 - protein, 131 aa, Setaria italica
  Transcript Sequence Number=SeqID_33511
  Gene Ontology: Mol. function=potassium ion transmembrane transporter activity; Cellular component=integral to membrane; Biological process=potassium ion transport
  Homolog annotation: Hit_ID=Q7XLC6; Match level="QueryCoverage=100%, HitCoverage=16%, E-value=3e-58, Identity=83%"; Hit description =Probable potassium transporter 11
MASLSESEVTNRGSMWELDQNLDQPMDEEAGRLKNMYREKKFSSVLLIRLAFQSLGVVFGDLGTSPLYVFYNIFPRGVDDDEDVIGALSLIIYTLTLIPLLKYVFVVLRANDNGQGGTFALYSLLCRHAKI

SEQ ID NO: 99486 - protein, 65 aa, Setaria italica
  Transcript Sequence Number=SeqID_33512
  Gene Ontology: Mol. function=microtubule motor activity; Cellular component=microtubule associated complex; Biological process =microtubule-based movement
ILDLLSDAAECVLQQSVIKGLQEVPLSNFADAESLVSRGMLKRSTAATSANSKSSRSQCIITIRG

SEQ ID NO: 99487 - protein, 105 aa, Setaria italica
  misc_feature (15)..(15): Xaa can be any naturally occurring amino acid
  misc_feature (50)..(50): Xaa can be any naturally occurring amino acid
  Transcript Sequence Number=SeqID_33513
  Gene Ontology: Mol. function=microtubule motor activity; Cellular component=microtubule associated complex; Biological process =microtubule-based movement
  Homolog annotation: Hit_ID=Q9LNT1; Match level="QueryCoverage=86%, HitCoverage=9%, E-value=5e-21, Identity=55%"; Hit description =T20H2.17 protein
  Subcellular localization annotation: CTP_CleavageSite=46; ConfidenceScore=5.38e-01
KSGLLVAMGPTGSGXTHTIFGSPRNPGILPLMLRQIFNAQDETRLLANRXRSFSLSMFEILSEGKGERILDLLSDAAECVLQQSVIKGLQEFKWHGCVLLRIPIG

SEQ ID NO: 99488 - protein, 107 aa, Setaria italica
  Transcript Sequence Number=SeqID_33514
  Homolog annotation: Hit_ID=B9RZS9; Match level="QueryCoverage=39%, HitCoverage=18%, E-value=2e-10, Identity=69%"; Hit description =Transcription factor, putative
  Subcellular localization annotation: CTP_CleavageSite=24; ConfidenceScore=5.58e-01
LQAARRARLRAPASPSSRHGAATSASTSAPGQGSSTPPLARKAKVLGRLVPGCRKLPFSTLLEETTDYIAALQMQIRVMTAVAEALSAISATSSSSNSGAGSSSSPA

SEQ ID NO: 99489 - protein, 280 aa, Setaria italica
  Transcript Sequence Number=SeqID_33515
  Gene Ontology: Mol. function=phosphoenolpyruvate carboxylase activity; Cellular component=cytoplasm; Biological process=carbon utilization by fixation of carbon dioxide
  Homolog annotation: Hit_ID=Q8S2Z8; Match level="QueryCoverage=100%, HitCoverage=29%, E-value=1e-160, Identity=97%"; Hit description =Putative C4 phosphoenolpyruvate carboxylase
VASSFSNMLNLTNLAEEVQLAHLRRNKLKRGDFADEGFAATESDIEETLKRLVTELGKSKEEVFDALKNQTVDLVFTAHPTQSVRRSLLQKHARIRNCLTQLYAKDITEDDKQELDEALQREIQACFRTDEIRRAQPTPQDEMRYGMSYFHETIWKGVPKFLRRVDTALKNIGIDERLPYNAPLIQFSSWMGGDRDGNPRVTPEVTRDVCLLARMMASNLYFSQIEELMFELSMWRCNDELRARAEELHASSQKISKHYIEFRRKPPANEPYRVVLGYVR

SEQ ID NO: 99490 - protein, 322 aa, Setaria italica
  misc_feature (84)..(84): Xaa can be any naturally occurring amino acid
  misc_feature (295)..(295): Xaa can be any naturally occurring amino acid
  misc_feature (306)..(306): Xaa can be any naturally occurring amino acid
  Transcript Sequence Number=SeqID_33516
  Gene Ontology: Mol. function=signal recognition particle binding; Cellular component=signal recognition particle receptor complex; Biological process=SRP-dependent cotranslational protein targeting to membrane
  Homolog annotation: Hit_ID=B9STS5; Match level="QueryCoverage=76%, HitCoverage=42%, E-value=2e-90, Identity=72%"; Hit description =Signal recognition particle receptor alpha subunit, putative
  Pfam annotation: Domain name=SRP54; Domain location=214-317; Score= -1.5; E_value=1.8e-10; Accession=PF00448.14; Description=SRP54-type protein, GTPase domain
  Pfam annotation: Domain name=SRP54_N; Domain location=108-193; Score =9.4; E_value=0.012; Accession=PF02881.11; Description=SRP54-type protein, helical bundle domain
  Pfam module annotation: Pfam domain module=SRP54::SRP54_N; Domain location=214-317::108-193
GNAGGRKQDGSDGDSGKDEYSGEPEPKDGGAFNLSMLQFLRDKFIHSKNTDTKKNKPDKKGRQKDHDKEPSHKKLDFSDPAERXKVTDHVAVKEGLSKMDKDEQVGDVSKAKGWFSSVFQSIAAGNSVIGKSDLQPAVKALKDRLMTKNVAEEIAEKLCESIAASLEGKKVGSFTSIASTVQAAMEEALLRILTPSRSIDILRDVHAAKERERPYVIVFVGVNGVGKSTNLAKVAYWLLQHDLSVTLAACDTFRSGAVEQLRTHARRLQIPIFEKGYERDPAVVAKQAIQEATRXKSDVVLVDTAXGRMQDNAIDYDKDYQE

SEQ ID NO: 99491 - protein, 64 aa, Setaria italica
  Transcript Sequence Number=SeqID_33517
NLHDLFSKEAERLASDLSQALSRTACMAYIISQFVVFPSYKSWKLPYELGCLKQVLNQSMACRF

SEQ ID NO: 99492 - protein, 50 aa, Setaria italica
  Transcript Sequence Number=SeqID_33518
  Subcellular localization annotation: CTP_CleavageSite=33; ConfidenceScore=5.05e-01
ATIFTTKWSFVTQLSHRLLFCRRSLSTILPSLPGESASRQLLEYTQTSSS

SEQ ID NO: 99493 - protein, 70 aa, Setaria italica
  Transcript Sequence Number=SeqID_33519
RRELEAALARLAVAEEGEERLCLQLGELEAEAVTQAVEYREHVRALSERLAFADGVLRNSGIAAGVGSSG

SEQ ID NO: 99494 - protein, 82 aa, Setaria italica
  Transcript Sequence Number=SeqID_33520
  Gene Ontology: Mol. function=beta-amylase activity; Biological process=polysaccharide catabolic process
  Homolog annotation: Hit_ID=B9S1Q4; Match level="QueryCoverage=57%, HitCoverage=7%, E-value=7e-18, Identity=89%"; Hit description=Beta -amylase, putative
  Pfam annotation: Domain name=DUF822; Domain location=1-81; Score =96.8; E_value=7.4e-26; Accession=PF05687.5; Description=Plant protein of unknown function (DUF822)
VSQEREREREKERTKLRERHRRAITSRMLAGLRQHGNFPLPARADMNDVLAALARAAGWTVQPDGTTFRSSNPPSLSPPPPS

SEQ ID NO: 99495 - protein, 70 aa, Setaria italica
  misc_feature (56)..(56): Xaa can be any naturally occurring amino acid
  Transcript Sequence Number=SeqID_33521
  Gene Ontology: Mol. function=hydrolase activity
  Subcellular localization annotation: CTP_CleavageSite=64; ConfidenceScore=5.10e-01
MRLSSSLQDLPTFTRIDALERGSSIGSDLSSGRAKTVRTLQRDGPVASFSKERTPXSSPTNRKKCMRAAG

SEQ ID NO: 99496 - protein, 52 aa, Setaria italica
  Transcript Sequence Number=SeqID_33522
TGLQMIKSRYENVALYVCVDRRQIDEHVDLSVALLYMCASTVGRSMNMLTYQ

SEQ ID NO: 99497 - protein, 224 aa, Setaria italica
  Transcript Sequence Number=SeqID_33523
  Gene Ontology: Mol. function=metalloexopeptidase activity; Cellular component=exocyst; Biological process=cellular process
  Homolog annotation: Hit_ID=B6U0I0; Match level="QueryCoverage=95%, HitCoverage=32%, E-value=1e-116, Identity=94%"; Hit description=Xaa -Pro aminopeptidase 1
  Pfam annotation: Domain name=Peptidase_M24; Domain location=2-201; Score=-8.4; E_value=1.4e-08; Accession=PF00557.16; Description =metallopeptidase family M24
TKLTEVSVSDKLEGFRATKEHFRGLSFPTISSVGPNAAVIHYKPEASTCSEMDAGKIYLCDSGAQYLDGTTDITRTVHFGKPSLHEKSCYTAVLKGHIALDIAVFPNGTTGHALDIQSHGLCPPLWREGLDYRHGTGHGIGSYLNVHEGPHLISFRPSARNVPLQASMTVTDEPGYYEDGSFGIRLENVLICKEANAKFNFGDKGYLAFEHITIGSSLFTLGFL

SEQ ID NO: 99498 - protein, 162 aa, Setaria italica
  Transcript Sequence Number=SeqID_33524
  Gene Ontology: Mol. function=oxidoreductase activity; Biological process=metabolic process
  Homolog annotation: Hit_ID=B9SVQ6; Match level="QueryCoverage=92%, HitCoverage=34%, E-value=3e-35, Identity=48%"; Hit description =Monoxygenase, putative
YETSKATNLETGAMQVSGFAGNKNGGEEVRVRALDRKALLEALAEELPPGTVRFSSKLVSIDTERAAGDASETVVLRLDDGAVIRAKVLIGCDGVHSVVARWLGLPEPASSGRSAVRGLSTFPGGHGAKRELRQFLSQGLRAGMVPISDTDIYWFLVNDTVP

SEQ ID NO: 99499 - protein, 95 aa, Setaria italica
  Transcript Sequence Number=SeqID_33525
MMRPTTSSSWMPSVSSAALFAATLVLLAGAGCDGALLKAHFYRHSCPAAEAVVRDIVAARVAADPAALPAKLLRLFFHDCFVRGCDASVLLELRT

SEQ ID NO: 99500 - protein, 64 aa, Setaria italica
  Transcript Sequence Number=SeqID_33526
ALLDGEGSVAPVLRDLHEAVHGLPNNGVLQGAAVRHRVPQLKVSRHDRHQSEQNHQSLHRVALR

SEQ ID NO: 99501 - protein, 160 aa, Setaria italica
  Transcript Sequence Number=SeqID_33527
  Gene Ontology: Mol. function=nucleoside-triphosphatase activity
  Homolog annotation: Hit_ID=Q2R029; Match level="QueryCoverage=88%, HitCoverage=20%, E-value=2e-41, Identity=62%"; Hit description=AAA -type ATPase family protein, putative, expressed
MDDAPCSSRDIEGPSNLNTFREGDRVEYTGSAFKLTQRGPAYGSRGKVVLAFENNQLSKLGVRFNNPITYGNNLGGLCEGNHGFYCHADELRPDSFAGEEVDSVALGKLIEVISEESKSGNLIVLLKDVQKLFTECRESHASLRSELPPGVLIIGVSHSD

SEQ ID NO: 99502 - protein, 91 aa, Setaria italica
  Transcript Sequence Number=SeqID_33528
  Gene Ontology: Mol. function=isomerase activity; Cellular component =endoplasmic reticulum; Biological process=cell redox homeostasis
  Homolog annotation: Hit_ID=Q7XRB5; Match level="QueryCoverage=100%, HitCoverage=17%, E-value=1e-29, Identity=64%"; Hit description =OSJNBa0006B20.4 protein
PVVRLFKPFDDLFADSQDFDKDALQKFIEVSGFPTVVNFDTNPTNHKYLLKYFENDGTKAMLFLSFDDDRIDAFKSQFYEAAKQYGVKNIS

SEQ ID NO: 99503 - protein, 146 aa, Setaria italica
  misc_feature (130)..(130): Xaa can be any naturally occurring amino acid
  Transcript Sequence Number=SeqID_33529
  Gene Ontology: Mol. function=phosphoprotein phosphatase activity; Biological process=actin cytoskeleton organization and biogenesis
  Homolog annotation: Hit_ID=Q7XWS7; Match level="QueryCoverage=84%, HitCoverage=7%, E-value=3e-50, Identity=81%"; Hit description=Formin- like protein 12
VMDFHEDLVSLEAASKLQLKALAEEQQAVVKGLEKVELELTASESDGPVSDVFRKTLKEFIDHSSADVRSLSAFYSEVGKSADALALYFGEDPAKFPFEQVATTLLFFVGLFRKATDENLKQIEAEKKKXAQKEAEKEANQDKNYL

SEQ ID NO: 99504 - protein, 143 aa, Setaria italica
  misc_feature (6)..(6): Xaa can be any naturally occurring amino acid
  misc_feature (15)..(15): Xaa can be any naturally occurring amino acid
  misc_feature (140)..(140): Xaa can be any naturally occurring amino acid
  Transcript Sequence Number=SeqID_33530
  Gene Ontology: Mol. function=ATPase activity, coupled to transmembrane movement of substances; Cellular component=integral to membrane; Biological process=transport
  Homolog annotation: Hit_ID=B9I9S5; Match level="QueryCoverage=100%, HitCoverage=8%, E-value=1e-24, Identity=43%"; Hit description =Multidrug resistance protein ABC transporter family
  Subcellular localization annotation: CTP_CleavageSite=77; ConfidenceScore=5.03e-01
RRGHRXALELSDVPXLSPAHRPERMHELFTRHWPSSSSSSSTGAAAAAASNPVRHTLFRTFWPLFLLNASLALLRLTVMYVGPTLIQSFVDYTKVGAERPLGEGARLVATLLAAKCAEALCSHQYNFHCQKLGMQIRGAXIVA

SEQ ID NO: 99505 - protein, 719 aa, Setaria italica
  Transcript Sequence Number=SeqID_33531
  Gene Ontology: Mol. function=ATPase activity, coupled to transmembrane movement of substances; Cellular component=integral to membrane; Biological process=transport
  Homolog annotation: Hit_ID=B9SAP4; Match level="QueryCoverage=99%, HitCoverage=46%, E-value=0.0, Identity=63%"; Hit description =Multidrug resistance-associated protein 2, 6 (Mrp2, 6), abc -transoprter, putative
  Pfam annotation: Domain name=ABC_membrane; Domain location=2-269; Score=66.5; E_value=9.9e-17; Accession=PF00664.15; Description=ABC transporter transmembrane region
  Pfam annotation: Domain name=ABC_tran; Domain location=350-521; Score= 125.0; E_value=2.5e-34; Accession=PF00005.19; Description=ABC transporter
  Pfam annotation: Domain name=SMC_N; Domain location=339-525; Score= -128.9; E_value=0.041; Accession=PF02463.11; Description=RecFRecNSMC N terminal domain
  Pfam module annotation: Pfam domain module=ABC_membrane::ABC _tran::SMC_N; Domain location=2-269::350-521::339-525
LDYRTTTVMYVGDRTTRIPRSFVDYTKVGAERPLGEGARLVATLLAAKCAEALCSHQYNFHCQKLGMQIRGALIVALYRKGLRLSCSARQRHGLGMIVNYMAVDAQQLSDMMLQIHYLWLMPLQVGVALGLLYTYLGPPVTSALVGVAGVMVFVLLGTRRNNHYQFSLMKERDQRMKATNEMLNYMRVIKFQAWEEHFNARIGRFRRLEFGWLSRFMYSISGNIIALWSAPVVVSALVFATCVLWGGTRLDAGLVFTATSFFKILQEPMRNFPQAMIQASQAMISLQRLDSYMTSAELDDGAVEREPAAAASGGDGGAAVQVKDGVFAWDDEVEDGQEVLRGIDLDIRTGALAAVVGMVGSGKSSLLGCILGEMRKVSGKVKVCGSTAYVAQTAWIQNGTIEENILFGKPMHRERYKEVIRVCCLEKDLEMMEFGDQTEIGERGINLSGGQKQRIQLARAVYQDCDIYLLDDVFSAVDAHTGTEIFKECVRGALKNKTVVLVTHQVDFLHNADIIYVMKDGMIVQSGKYDELLQLGSDFAALVAAHDSSMELVESAAPASEGELPLSRQPSSKRNADSPSSSSIVAPKAEKASARLIKDEERASGHVSLAVYKQYMTEAWGWWGPLVVVAVSIAWQCSLVASDYWLADETSAENAASFRPSLFISVYSIIAAVSVVLVAARSFLVAFIGLQTADKFFKQILNSILHAPMSFFDTTPSGR

SEQ ID NO: 99506 - protein, 574 aa, Setaria italica
  Transcript Sequence Number=SeqID_33532
  Gene Ontology: Mol. function=ATPase activity, coupled to transmembrane movement of substances; Cellular component=integral to membrane; Biological process=transport
  Homolog annotation: Hit_ID=Q8LGN7; Match level="QueryCoverage=95%, HitCoverage=71%, E-value=0.0, Identity=85%"; Hit description =Multidrug resistance-associated protein MRP1 (Fragment)
  Pfam annotation: Domain name=ABC_membrane; Domain location=8-287; Score=72.1; E_value=2e-18; Accession=PF00664.15; Description=ABC transporter transmembrane region
  Pfam annotation: Domain name=ABC_tran; Domain location=359-542; Score= 169.3; E_value=1.1e-47; Accession=PF00005.19; Description=ABC transporter
  Pfam annotation: Domain name=MMR_HSR1; Domain location=360-464; Score= -16.0; E_value=0.03; Accession=PF01926.15; Description=GTPase of unknown function
  Pfam module annotation: Pfam domain module=ABC_membrane::ABC _tran::MMR_HSR1; Domain location=8-287::359-542::360-464
SLFLLLLFYRRCGARLVVVAVSIAWQCSLVASDYWLADETSAENAASFRPSLFISVYSIIAAVSVVLVAARSFLVAFIGLQTADKFFKQILNSILHAPMSFFDTTPSGRILSRASSDQTNVDLFLPFFVWMSVSMYITVISVLIVTCQVAWPSVVAIIPLVILNLWYRGYYLATSRELTRLESITKAPVIHHFSETVQGVMTIRCFRKEDSFLQENLNRVNASLKMDFHNNGANEWLGFRLELIGSFVLCFTALLMVTLPSSFVQPEYVGLSLSYGLSLNQVLFWAIWISCFIENKMVSVERIKQFTNIPSEAAWRIKECLPDANWPTKGDIDVIDLKFRYRHNTPLVLKGITISIHGGEKIGVVGRTGSGKSTLIQALFRIVEPSEGKIIIDGVDICTLGLHDLRSRFGIIPQEPVLFEGTIRSNIDPLEQYSDDEIWQALERCQLREAVTSKSEKLDASVVDNGENWSVGQRQLLCLGRVMLKRSRILFMDEATASVDSQTDAVIQKIIREDFSACTIISIAHRIPTVMDCDRVLVIDAGLAKEFDRPANLIERPSLFGALVQEYANRSSDV

SEQ ID NO: 99507 - protein, 68 aa, Setaria italica
  misc_feature (37)..(37): Xaa can be any naturally occurring amino acid
  Transcript Sequence Number=SeqID_33533
ASIRSFQAYEPLISFPVPHSFCSRVQNKNADRRSEAXKKQKEKRRKLNEEPHPQNENDPVDDAKEDDD

SEQ ID NO: 99508 - protein, 72 aa, Setaria italica
  Transcript Sequence Number=SeqID_33534
  Homolog annotation: Hit_ID=B6TN37; Match level="QueryCoverage=100%, HitCoverage=16%, E-value=9e-29, Identity=90%"; Hit description=F-box domain containing protein
ERLRVLEVVGAPLRDSAVRDAIAACPNLTDLSMLGCDCSGTVALDLHLLVRCRLDILGAGNCSLLITAPRLE

SEQ ID NO: 99509 - protein, 163 aa, Setaria italica
  Transcript Sequence Number=SeqID_33535
ATPRSLRSVRGGGVKPPHGDWPTLLASAGTQSAVSRGADRERELKTQANGEIAKLRGLLDEERGEHSALRDAARIVCDDFGVAPEEGSSSLPARVLEVRRRRREIAVDALHLGVRRAFGVFGSHYSGINFAGMSEGYAAGYTEAELDEIDAAVTAPAEVLAKL

SEQ ID NO: 99510 - protein, 48 aa, Setaria italica
  Transcript Sequence Number=SeqID_33536
PDAQLGTRKLVPTAEILVDGPDLRSELAYPDTWRSWNFEGGRIFCLFL

SEQ ID NO: 99511 - protein, 244 aa, Setaria italica
  Transcript Sequence Number=SeqID_33537
  Gene Ontology: Mol. function=ubiquitin-protein ligase activity; Cellular component=plasma membrane; Biological process=ubiquitin -dependent protein catabolic process
  Homolog annotation: Hit_ID=B9RG78; Match level="QueryCoverage=100%, HitCoverage=29%, E-value=1e-103, Identity=60%"; Hit description =Ankyrin-repeat containing protein, putative
  Pfam annotation: Domain name=Ank; Domain location=21-53; Score=31.7; E_value=3e-06; Accession=PF00023.22; Description=Ankyrin repeat
  Pfam annotation: Domain name=Ank; Domain location=54-86; Score=32.4; E_value=1.8e-06; Accession=PF00023.22; Description=Ankyrin repeat
  Pfam module annotation: Pfam domain module=Ank::Ank; Domain location =21-53::54-86
RELVRTLLAVGADPTAQDDPHCRTALHTAAMIDDVELVKIILEAGVDVNIRNAQNTTPLHVALNRGANSCVGLLLAAGANCNIQDDDGDNAFHIAADAAKMIRENMTWIVQMLQQPSPAVDVRNHRGWTLRDFLERLPREWIYEELMETLEDKGVHLSPTIYEVADWVKFRRTVTSPAFGWQGAGPRSIGFVQSIVDNDHLVVSFCTGEARVLTSEVIKVIPLNRGQHVQLKPDVPEPRFGWRG

SEQ ID NO: 99512 - protein, 744 aa, Setaria italica
  Transcript Sequence Number=SeqID_33538
  Homolog annotation: Hit_ID=Q9FY48; Match level="QueryCoverage=97%, HitCoverage=46%, E-value=0.0, Identity=45%"; Hit description=E3 ubiquitin-protein ligase KEG
MLLILQKIVDNDHLVVSFCTGEARVLTSEVIKVIPLNRGQHVQLKPDVPEPRFGWRGQSRDSIGTVLCVDDDGILRVGFPGASRGWRADPAEIERVEEYKVGNWVRIRPSLTVAVHGMESITPGSVGIVYSIRPDSSLLLGLCYLSNPWLCEPEEVEHVDPFKIGDQVCVKRSVAEPRYAWGGETHHSVGKIIDIESDGLLIIDIPNRAAPWQADPSDMEKIENFKVGDWVRVKATVPSPKYGWEDVTRNSIGIVHSLQDDGDVGIAFCFRSKLFLCSVADVEKAQPFEVGEKVHVSPSISQPRLGWLNETAATIGAIARIDMDGTLNIKVSGRKSLWKVAPGDAERLSAFEVGDWVRQKPSIGSRPTYDWNSIGRISIAVVHSIQDSGYLELAGCFRNGKWLTHNTDIEKVESFKIGQHVRFRAGISEPRWGWRDARPDSRGIIAGVHADGEVRVAFFGVPGLWRGDPADLEIEKIFEVGEWVRLRNDADQWRSLRPGSIGVVHGVGYQGDVWDGTIHVAFCGEQERWIGPSSQLEGVSKFVVGQRVRIRGCIRQPRFGWSNHNHLSIGTISSIDADGKLRIHTPAGARAWLIDPAEVEKVEEEEEICVGDWVKVKDSIATPTYQWGDVNHNSIGVVHRADDGELWIAFCFCERLWLCKAWEVEKVRPFRQGDKVRIRPGLVSPRWGWGMETYASKGEVIGVDANGKLRIKFRWRDRLWIGDPADIILDDAPSLTEAPNGFFS

SEQ ID NO: 99513 - protein, 42 aa, Setaria italica
  Transcript Sequence Number=SeqID_33539
  Gene Ontology: Mol. function=nucleic acid binding
  Homolog annotation: Hit_ID=B6SWC9; Match level="QueryCoverage=85%, HitCoverage=7%, E-value=2e-12, Identity=91%"; Hit description =Ubiquitin-protein ligase/ zinc ion binding protein
RSLCHLCRCGHEFCYSCGADFASGVQTCQCVFWDDEAIEPSS

SEQ ID NO: 99514 - protein, 509 aa, Setaria italica
  Transcript Sequence Number=SeqID_33540
  Gene Ontology: Mol. function=nucleic acid binding
  Homolog annotation: Hit_ID=B6SWC9; Match level="QueryCoverage=100%, HitCoverage=100%, E-value=0.0, Identity=85%"; Hit description =Ubiquitin-protein ligase/ zinc ion binding protein
  Pfam annotation: Domain name=IBR; Domain location=260-331; Score =39.2; E_value=1.6e-08; Accession=PF01485.13; Description=IBR domain
  Pfam annotation: Domain name=zf-C3HC4; Domain location=193-241; Score= 20.7; E_value=0.00045; Accession=PF00097.17; Description=Zinc finger, C3HC4 type (RING finger)
  Pfam module annotation: Pfam domain module=IBR::zf-C3HC4; Domain location=260-331::193-241
MEERIPEAGAGNSRGEDDFRSCCGDEEEWEDTEESFTAGVTKGELDETSVRLFFKGVSSPEAEGKKLSGIGVVMERSPGVPVLKVQKKLDFYVEELVAEHLALMDGLLVALQNGIRKIFAFTNSEKLYFQIAEAEILEDQLLVALGHRILELVDKLEDFDLILLPSFELERPLQLAKEAIGIRYLSPYEVGTCPICCEEKLGSQMIKTGCSHTFCYNCLAAYVEEKLLTSKRPIRCPQLRCKYLISASECKSFLPVSSYDSLERAFAEAGTSDMERFYCPFPNCSVLLDLSQHFSRASSSSQSDLSCVECPECHRDICINCGVPWHIMMGCDEYQSLPVEERDAGDLSLHRLAQNNRWRRCQRCRRMIELTQGCFHMTCWCGHEFCYSCGADFASGVQTCQCVFWDDEAIEPSSAARSSQAASEIWAWDTFDCMPTAAVEGYSEQERAQLALIQRFLAGGFSLGDNPCQSPPRCADSYIVDTMKDLHQLPWLERFVSVISDSYNDDYIQ

SEQ ID NO: 99515 - protein, 95 aa, Setaria italica
  Transcript Sequence Number=SeqID_33541
RCVVNACPLYDSIHACAWSLELLAPCSWLLTMQAGCVDLCWRACVAHSQQQKASTTLQLKKSGNQQTSGANWGEWRPLQYLRFCQNMSSSSIDKD

SEQ ID NO: 99516 - protein, 42 aa, Setaria italica
  Transcript Sequence Number=SeqID_33542
VLCKNEMHVCYYSKEQLTLNDNLSELLNLWFYSLKCSADICA

SEQ ID NO: 99517 - protein, 80 aa, Setaria italica
  misc_feature (23)..(23): Xaa can be any naturally occurring amino acid
  Transcript Sequence Number=SeqID_33543
  Subcellular localization annotation: CTP_CleavageSite=38; ConfidenceScore=5.13e-01
GYVGRWGRGDWSESSSNGEKRRXEGQARRLAKASSSSSASVASSSASWASGSTVMDWGSPEDAELQSGDGFSLLVYAWKS

SEQ ID NO: 99518 - protein, 148 aa, Setaria italica
  Transcript Sequence Number=SeqID_33544
  Gene Ontology: Mol. function=potassium ion transmembrane transporter activity; Cellular component=membrane; Biological process=potassium ion transport
  Homolog annotation: Hit_ID=Q1T6Z3; Match level="QueryCoverage=91%, HitCoverage=15%, E-value=6e-56, Identity=76%"; Hit description =Potassium transporter
QPFGTRTFLQAGHMFRCVARYGYKDVRKEDHGFFEQLLVESLEKFLRREAQEIALEASTTDAERDDISVVSEVPQSPACEGDLQTPLLSDQRSGDDNRMGTRDGNAPVLPSSSMSAEEDPALEYELEALREAIASGFTYLLAHGDVRA

SEQ ID NO: 99519 - protein, 775 aa, Setaria italica
  misc_feature (100)..(100): Xaa can be any naturally occurring amino acid
  Transcript Sequence Number=SeqID_33545
  Gene Ontology: Mol. function=potassium ion transmembrane transporter activity; Cellular component=membrane; Biological process=potassium ion transport
  Homolog annotation: Hit_ID=Q1T6Z3; Match level="QueryCoverage=99%, HitCoverage=89%, E-value=0.0, Identity=85%"; Hit description =Potassium transporter
  Pfam annotation: Domain name=K_trans; Domain location=30-775; Score =1447.9; E_value=0; Accession=PF02705.8; Description=K+ potassium transporter
RVDSLDVEAMNVRGAHGHSSKELSMVSTIAMAFQTLGVVYGDMGTSPLYVFSDVFSKVPIKSEVEILGALSLVMYTIALIPFAKYVFIVLKANDNGEGGXTFALYSLICRYAKVSLLPNQQRVDEDISSFRLKLPTPELERAMFVKDCLEKKPLFKNILLFLVLMGTSMVIGDGILTPSMSVMSAVSGLQGQVRGFDTDAVVIVSIIVLVLLFSVQRFGTGKVGFMFAPILGLWFLNLGSIGIYNIVKYDISVVRAFNPVYIYLFFATNGLKAWSALGGCVLCITGAEAMFADLGHFSVKSIQIAFTAIVFPCLLIAYMGQAAFLMKNPLAVQRVFYDSVPGVLFWPVFVIATLAAMIASQAMISATFSCIKQAMALGCFPRIKIIHTSKKVMGQIYIPVMNWFLMVMCIIIVAAFRSTNDIANAYGIAEVGVMMVSTVLVTLVMMLIWQTNLFLVLFFPILFGTVEFVYLTAVLSKIKEGGWLPLAFSSLFLCIMYTWNYGSVLKYQSEMRGKISLDCILDLGATLGTVRVPGIGLVYNELVQGIPSIFGQLLVTLPAMHSTIVFVCIKYVPIPYVPLEERFLFRRVGQKDYHMFRCVARYGYKDVRKEDHGFFEQLLVESLEKFLRREAQEIALEASTTDAERDDISVVSEVPQSPACEGDLQTPLLSDQRSGDDNRMGTRDGNAPVLPSSSMSAEEDPALEYELEALREAIASGFTYLLAHGDVRARKESFFTKKFIINYFYAFLRRNCRAGTATLKVPHSNIMRVGMTYMV

SEQ ID NO: 99520 - protein, 159 aa, Setaria italica
  misc_feature (47)..(47): Xaa can be any naturally occurring amino acid
  misc_feature (85)..(85): Xaa can be any naturally occurring amino acid
  Transcript Sequence Number=SeqID_33546
  Gene Ontology: Mol. function=DNA binding
  Pfam annotation: Domain name=DUF296; Domain location=2-73; Score =37.2; E_value=6.6e-08; Accession=PF03479.7; Description=Domain of unknown function (DUF296)
EPPGSLVATLRGQFEILSLTGTVLPPPAPPGASSLSVYLAGGQGQVXGGNVVGQLIAAGPVVLMAASFANAIYERLPLEGEEEPXTATAAAATATEPQGEAEPAGAQPQQQEASQSSGVTGGDAGGGGIGHGMSLYDLGGNMAGYQLPGDNFGSWRPTF

SEQ ID NO: 99521 - protein, 165 aa, Setaria italica
  misc_feature (91)..(91): Xaa can be any naturally occurring amino acid
  misc_feature (134)..(134): Xaa can be any naturally occurring amino acid
  misc_feature (144)..(144): Xaa can be any naturally occurring amino acid
  Transcript Sequence Number=SeqID_33547
  Gene Ontology: Mol. function=RNA-directed DNA polymerase activity; Biological process=RNA-dependent DNA replication
  Homolog annotation: Hit_ID=Q8S461; Match level="QueryCoverage=100%, HitCoverage=8%, E-value=4e-31, Identity=45%"; Hit description =Putative prpol
VAAVERKRGSTPEGAPGFFDKLLEGPCPNHEFPAKHAYKDRNLMKRYFVGNPVKGDRKRKPDEEKKGDEEKEDGFPKVDGCFMIFGGSAAXTPSASKKLERREVYAAEPATPAFLDWSGPAITFDRSDHPGRVXSPGRYPLVVXDPIVGTTRLTKVLMDGGSGLN

SEQ ID NO: 99522 - protein, 363 aa, Setaria italica
  misc_feature (33)..(33): Xaa can be any naturally occurring amino acid
  Transcript Sequence Number=SeqID_33548
  Gene Ontology: Cellular component=membrane
  Homolog annotation: Hit_ID=B6SKY9; Match level="QueryCoverage=100%, HitCoverage=80%, E-value=1e-178, Identity=88%"; Hit description =Integral membrane protein DUF6 containing protein
  Pfam annotation: Domain name=DUF6; Domain location=169-310; Score =39.4; E_value=1.4e-08; Accession=PF00892.12; Description=Integral membrane protein DUF6
  Pfam annotation: Domain name=DUF6; Domain location=31-149; Score =27.4; E_value=6e-05; Accession=PF00892.12; Description=Integral membrane protein DUF6
  Pfam module annotation: Pfam domain module=DUF6::DUF6; Domain location=169-310::31-149
KRARGRPVWRRILFASKKTRSIIMLNALTVIYXSSDIPVLKEVEALTEPAVFNMVRFVVAAIPFIPFAVCAFGDRRVRNAGLELGVWVSLAYLAQAIGLLSSDAGRASFITAFTVIVVPLIDGLLGASIPKLTWFGAIVSLVGIGLLECGGSPPCVGDVLNFFSAVFFGIHMLRTEQISRSTDKKKFLALLSFEVLVVALSSILWFMFKDGYVDTSESSFESWTFGMLWDTAASFPWIPALYTGVLSTVLCMWAEMVAMGDVSATETAIVYGLEPVWGAAFAWFLLGERWDNAALIGAALVLCGSLTVQLFGSVPEKSKKVQKRNSNPLETPMKRQDYLYLSPIPVDSRKIMGRQLERKDNAL

SEQ ID NO: 99523 - protein, 78 aa, Setaria italica
  Transcript Sequence Number=SeqID_33549
  Gene Ontology: Cellular component=membrane
  Homolog annotation: Hit_ID=B6SKI7; Match level="QueryCoverage=62%, HitCoverage=9%, E-value=4e-23, Identity=97%"; Hit description=CrcB -like protein
LLLGNFFTCYYRVTTYDALLSNYAFDNDKVFTRYGLQKLFGPECLALTSDQSPLYPDLPSNMLGSFLMGWFGIIFKAD

SEQ ID NO: 99524 - protein, 152 aa, Setaria italica
  Transcript Sequence Number=SeqID_33550
  Gene Ontology: Mol. function=protein binding; Cellular component =nucleus
  Homolog annotation: Hit_ID=B6TQ58; Match level="QueryCoverage=100%, HitCoverage=100%, E-value=2e-63, Identity=79%"; Hit description =Fiber protein Fb2
  Pfam annotation: Domain name=Di19; Domain location=1-147; Score=8.7; E_value=9.5e-09; Accession=PF05605.4; Description=Drought induced 19 protein (Di19)
MEDEHHAEANAGVCPICAGKVDMLVDHMSLQHRAFLKDKWRNQQGLSGSRYSTLASLKRDLESISRSSRAAPVSTVPDPLLSSFVGNFSEVDLPRDAKKEPLDETEVGSDNLDQKAAESVDEPLLPEVKVERIRRSQFVQGLVLSLIFDDIV

SEQ ID NO: 99525 - protein, 78 aa, Setaria italica
  Transcript Sequence Number=SeqID_33551
  Homolog annotation: Hit_ID=B6UHQ3; Match level="QueryCoverage=97%, HitCoverage=32%, E-value=7e-09, Identity=52%"; Hit description =Plasma membrane associated protein
MALMLWEALGRRNVAGPLLLLNLVLYVFMMGFASWALNSFVDGHHKQYYSPDVYMCMGTRAAGPRDEAALQFIQSATD

SEQ ID NO: 99526 - protein, 77 aa, Setaria italica
  Transcript Sequence Number=SeqID_33552
  Homolog annotation: Hit_ID=B6UHQ3; Match level="QueryCoverage=81%, HitCoverage=31%, E-value=6e-09, Identity=54%"; Hit description =Plasma membrane associated protein
MALMLWEALGRRNVAGPLLLLNLVLYVFMMGFASWALNSFVDGHHKQYYSPGPRDEAALQFIQSALLAAVVGAAAKV

SEQ ID NO: 99527 - protein, 132 aa, Setaria italica
  Transcript Sequence Number=SeqID_33553
SLQGLPPHSYVSSQGQPYQQGIPSSQQHLHSQPSQPHGQPYMQQHVPGYGYAGHHVQTSAGRPTSHLAPPQQFLHQPGGPVNSFQDAIKQQPTMLRSDNVVLASQLPAAGQPMGQGSVALGTHASQPGKSRN

SEQ ID NO: 99528 - protein, 208 aa, Setaria italica
  Transcript Sequence Number=SeqID_33554
  Gene Ontology: Mol. function=protein kinase activity; Cellular component=extracellular region; Biological process=protein amino acid phosphorylation
  Homolog annotation: Hit_ID=Q2R2T2; Match level="QueryCoverage=95%, HitCoverage=35%, E-value=1e-74, Identity=69%"; Hit description=ABC1 family protein
MEKFSLVLLDHGIYRELDQKFRLDYCQLWKALILLDTKTILELGEQFGVGKYAKYFPVIFTGRTLESKSALGTQMSSEEQRRLKEDLSSLGMDDISSFMEALPRDFYVILRTDGLLRSILGNLGAPRHVRLLTYAKCAIHGLEKQPKLESGAINRMFLQVKTNISYLHLRVLIEIAGLLAKVNDARHKAVSKLRQMFREISQGLHLLT

SEQ ID NO: 99529 - protein, 105 aa, Setaria italica
  Transcript Sequence Number=SeqID_33555
  Gene Ontology: Mol. function=aminoacyl-tRNA ligase activity
  Homolog annotation: Hit_ID=Q84T06; Match level="QueryCoverage=95%, HitCoverage=14%, E-value=3e-51, Identity=87%"; Hit description =Unknow protein
DRRLPRWRLRGMWELASVLNFLHVFRPLLNVAVEFTAEELEDAIITSNGTLDDVHMPLLKSIPPVSRMAMGRGTWVTVLCKKLKHWWHWVAEGDLPIVASHGAGN

SEQ ID NO: 99530 - protein, 105 aa, Setaria italica
  Transcript Sequence Number=SeqID_33556
  Subcellular localization annotation: CTP_CleavageSite=84; ConfidenceScore=5.59e-01
VDPISNGRRRNSPVKASHRSYSLNLQGVQSSDPGFSFEAPSNLRTSLSDRPVSSSRGGSPSSFSGSDMNRRGRRQSISPTPSRRASSYNSNDRDHFGSYSKASDK

SEQ ID NO: 99531 - protein, 35 aa, Setaria italica
  Transcript Sequence Number=SeqID_33557
LNVEIIKLSLTQLVHQPSQQLSVHRGLFQTIVGLK

SEQ ID NO: 99532 - protein, 121 aa, Setaria italica
  misc_feature (51)..(51): Xaa can be any naturally occurring amino acid
  Transcript Sequence Number=SeqID_33558
  Gene Ontology: Mol. function=phosphoribulokinase activity; Cellular component=chloroplast; Biological process=reductive pentose -phosphate cycle
  Homolog annotation: Hit_ID=B6TYM1; Match level="QueryCoverage=91%, HitCoverage=26%, E-value=4e-54, Identity=90%"; Hit description =Phosphoribulokinase
  Pfam annotation: Domain name=PRK; Domain location=1-121; Score=108.7; E_value=2e-29; Accession=PF00485.10; Description=Phosphoribulokinase Uridine kinase family
MAKVSVRAICNFDLMYEQVKAIKEGQTIEKPIYNHVTGLLDPPEVITPPNXFLFIEGLHPMFDERVRDLLDFSIYLDISDEVKFAWKIQRDMAERGHSLESIQASIEARKPDFDAFIDPQK

SEQ ID NO: 99533 - protein, 420 aa, Setaria italica
  Transcript Sequence Number=SeqID_33559
  Gene Ontology: Mol. function=phosphoribulokinase activity; Cellular component=chloroplast; Biological process=reductive pentose -phosphate cycle
  Homolog annotation: Hit_ID=P26302; Match level="QueryCoverage=89%, HitCoverage=92%, E-value=0.0, Identity=86%"; Hit description =Phosphoribulokinase, chloroplastic
  Pfam annotation: Domain name=PRK; Domain location=83-282; Score =398.1; E_value=1.5e-116; Accession=PF00485.10; Description =Phosphoribulokinase  Uridine kinase family
  Subcellular localization annotation: CTP_CleavageSite=75; ConfidenceScore=5.35e-01
MKSEGSCPPCLLPPLLLLVKKMTCFCLKPAHTTTSLHSPCTTVSNAGFRQKQVIFFTSNRRGGRRHGGARTFQISCSVEKPVVIGLAADSGCGKSTFMRRLTSVFGGAAEPPKGGNPDSNTLISDTTTVICLDDYHSLDRTGRKEKGVTALDPRANNFDLMYEQVKAIKEGQTIEKPIYNHVTGLLDPPEVITPPKIFVIEGLHPMFDERVRDLLDFSIYLDISDEVKFAWKIQRDMAERGHSLESIQASIEARKPDFDAFIDPQKQYADAVIEVLPTQLIPDDNEGKVLRVKLIMKEGVKHFNPVYLFDEGSSISWVPCGRKLTCSYPGIKFAYGPDTYFGHEVSVLEMDGQFDRLDELIYVESHLSNLPSTKFYGEVTQQMLKHADFPGSNNGRDLFHCCFLGSLHALAFAVSPLRRI

SEQ ID NO: 99534 - protein, 207 aa, Setaria italica
  misc_feature (14)..(14): Xaa can be any naturally occurring amino acid
  Transcript Sequence Number=SeqID_33560
  Gene Ontology: Mol. function=oxidoreductase activity, acting on sulfur group of donors, disulfide as acceptor; Biological process =protein metabolic process
  Homolog annotation: Hit_ID=B4FGU9; Match level="QueryCoverage=100%, HitCoverage=84%, E-value=1e-113, Identity=94%"; Hit description =Peptide methionine sulfoxide reductase
  Pfam annotation: Domain name=PMSR; Domain location=6-158; Score =181.8; E_value=1.9e-51; Accession=PF01625.13; Description=Peptide methionine sulfoxide reductase
RGGAPATAVFALGXFWRSEAAFGCLPGVIRTSVGYAGGSKANPEYRNLADHAECVKVEYDPRLIHYRQLLDVFWASHDPREVFGQGPDVGNQYRSVIFTNGTIEARLAALSKEKEQAKDRSSVITTQIQPLGVFHPAEPEHQKFELKRKPFLLQLIGNLPEEELLTSTLAAKLNAYAAELCPANTQKRISSKINEISKKGWPILREI

SEQ ID NO: 99535 - protein, 197 aa, Setaria italica
  Transcript Sequence Number=SeqID_33561
  Gene Ontology: Mol. function=transporter activity; Cellular component= intracellular; Biological process=transport
  Homolog annotation: Hit_ID=B6U127; Match level="QueryCoverage=99%, HitCoverage=32%, E-value=2e-68, Identity=68%"; Hit description =Phosphatidylinositol transporter/ transporter
SCSSDGKHLLDMNPGSPQGTQQVERVSIQSICQKHFSTFGWLHCLGNIALILHGTSAVRTLEDLARGLATVLIRISSFFHFFVCRQERMLENVHSCADAEQAKPQPVREEDMSASLQRLEKLESLCNHLMSKPPDMPKDKELVLFQAFDRIKSLEADLERTKTALEAAVAKQMELEDSVEALQHRSASVVRRRLCCS

SEQ ID NO: 99536 - protein, 41 aa, Setaria italica
  Transcript Sequence Number=SeqID_33562
GQHQQQHHQLLQESNNPPIAIIRFKYSFFLNMHDCSLLMTR

SEQ ID NO: 99537 - protein, 131 aa, Setaria italica
  Transcript Sequence Number=SeqID_33563
PQARSGSGPRVRRSSLVINKFVGAEPAATCEINAGAAPTAPQEHSPKHSRRSTGSTTTAVAALAAASVLSATAPPPCNGEDVVPGATCGENKLLMTAKRRSSKEELLNHMRRCNQLRGQLFFWEPRIATSS

SEQ ID NO: 99538 - protein, 57 aa, Setaria italica
  Transcript Sequence Number=SeqID_33564
  Subcellular localization annotation: CTP_CleavageSite=25; ConfidenceScore=5.19e-01
PTSTRQPLQIALTPNNGHLRSAAVRMAYFAKKQTMTATPLSSSLEEAKRNEPVVKMC

SEQ ID NO: 99539 - protein, 63 aa, Setaria italica
  misc_feature (40)..(40): Xaa can be any naturally occurring amino acid
  Transcript Sequence Number=SeqID_33565
  Gene Ontology: Mol. function=protein serine/threonine kinase activity; Biological process=protein amino acid phosphorylation
  Homolog annotation: Hit_ID=Q53K08; Match level="QueryCoverage=77%, HitCoverage=4%, E-value=3e-15, Identity=69%"; Hit description =Leucine Rich Repeat family protein, expressed
ADYGSLGRASHRSDVFRYGIILLEVFTGKRPTDPMFVGEXALKQWIHQPFRGILTRKGQKGKP

SEQ ID NO: 99540 - protein, 50 aa, Setaria italica
  Transcript Sequence Number=SeqID_33566
  Subcellular localization annotation: CTP_CleavageSite=36; ConfidenceScore=5.09e-01
EPSQTKSSRSQNRSGRRGHEGPRTAPRPFRILARSRVATIAAAPPRLTRP

SEQ ID NO: 99541 - protein, 93 aa, Setaria italica
  misc_feature (49)..(49): Xaa can be any naturally occurring amino acid
  Transcript Sequence Number=SeqID_33567
  Homolog annotation: Hit_ID=B4FWB9; Match level="QueryCoverage=98%, HitCoverage=15%, E-value=2e-41, Identity=84%"; Hit description=GRAM domain containing protein
FICVTKKIFFPYMKVVIPLRDIDEIRRSQHAVINPAITIFLRMGAGGFXGVPPLGCPDGRVRYKFASFWNRNHTFRALQRAVKNFQMMIEAEK

SEQ ID NO: 99542 - protein, 95 aa, Setaria italica
  misc_feature (70)..(70): Xaa can be any naturally occurring amino acid
  Transcript Sequence Number=SeqID_33568
  Homolog annotation: Hit_ID=B4FWB9; Match level="QueryCoverage=100%, HitCoverage=15%, E-value=2e-44, Identity=89%"; Hit description=GRAM domain containing protein
DKMDLVFETLQQVHDVPFGSFFEVHCRWSVKTISSDSCSLNISAGAHFKKWCIMQSKIKSGAVDELKKEXKEMLDFAQAYMLKVRSPNQENSDLT

SEQ ID NO: 99543 - protein, 80 aa, Setaria italica
  Transcript Sequence Number=SeqID_33569
DMNFYLYTKPFLTREMYTAQVLMVLGHRFLFVSFFVYIFNNTKLTCSESALYFTFYTYTSVKLPEWVEENKEKQKRKRNL

SEQ ID NO: 99544 - protein, 158 aa, Setaria italica
  Transcript Sequence Number=SeqID_33570
  Homolog annotation: Hit_ID=B4FWB9; Match level="QueryCoverage=82%, HitCoverage=21%, E-value=2e-73, Identity=96%"; Hit description=GRAM domain containing protein
KLPIRKQGTRTSSLTKGCNCPVNAAQSSGTFPCTAEQFFSILLSDDSSYITEYRTDRKDKDINLGQWHVADEYDGQVRELNCKSICHSPMCPPYSAMTEWQHMVLSADKMDLVFETVQQVHDVPFGSFFEVHCRWSVKTISSDSCSLNISAGAHFKKW

SEQ ID NO: 99545 - protein, 50 aa, Setaria italica
  Transcript Sequence Number=SeqID_33571
  Homolog annotation: Hit_ID=B6SXN2; Match level="QueryCoverage=100%, HitCoverage=9%, E-value=2e-14, Identity=72%"; Hit description=GTP binding protein
RGLIPEPRTKILVKAIHMKKDGAVTEDQSANITGKNLKLDPRSRLFHVHK

SEQ ID NO: 99546 - protein, 74 aa, Setaria italica
  misc_feature (68)..(68): Xaa can be any naturally occurring amino acid
  Transcript Sequence Number=SeqID_33572
EILLRTGKEISDFHGLSVFCIAFTSLLGQLYRKRYLCDEADSELKYARDLLVENDAIISCKPCKLTMXISVDMQ

SEQ ID NO: 99547 - protein, 147 aa, Setaria italica
  misc_feature (115)..(115): Xaa can be any naturally occurring amino acid
  Transcript Sequence Number=SeqID_33573
  Homolog annotation: Hit_ID=O64555; Match level="QueryCoverage=95%, HitCoverage=23%, E-value=1e-25, Identity=45%"; Hit description =YUP8H12R.46 protein
GGVSMLGHGDVSFPYLIESFPMLLLCSEDNHLKPLIDFLEYIGIPNPRIASVLLSFPPIILSDIENDIKPRIHEWEKAGIEQEHIGSRMLLKYPWILSTSVIENYKRILLFLKRXKISSTVLGIAVKSWPHILGCSTQRMNFNSGAV

SEQ ID NO: 99548 - protein, 68 aa, Setaria italica
  Transcript Sequence Number=SeqID_33574
METPLSTRRITRSLAAAAAASAQKSAAAGTDSAAQFSLAKNATAGDPQPRAALHDITNDSPIVGLAAG

SEQ ID NO: 99549 - protein, 187 aa, Setaria italica
  Transcript Sequence Number=SeqID_33575
RVLECVSRRCLLQFCAEKSAAAGTDSAAQFSLAKNATAGEPQPRAALHDITNDSPIVGLAAGGLHGTDKTPASTAAKTRRRAPRRTPGSGEALLRGQVKALLHKVEEEQGCAPAALVRPARIQALLGVSRSPAQLLAPTPANTPQIGPVPAAREGLLMPDGVPVVPCVLEEEELLLPKLQIIAAPLP

SEQ ID NO: 99550 - protein, 78 aa, Setaria italica
  Transcript Sequence Number=SeqID_33576
  Homolog annotation: Hit_ID=Q7XVU8; Match level="QueryCoverage=98%, HitCoverage=9%, E-value=1e-12, Identity=50%"; Hit description =OSJNBa0035B13.3 protein
ITEHLISSHCTLKAIDTNLDQPEETKTINLWAWTANRTWTANQSSIPKCVWLTFTGRARDARLESVLVSKTPPEHWQC

SEQ ID NO: 99551 - protein, 132 aa, Setaria italica
  Transcript Sequence Number=SeqID_33577
  Subcellular localization annotation: CTP_CleavageSite=13; ConfidenceScore=5.42e-01
METAAAKAARLARSSLAAAAPCPAANGGVVVFFAALVAGALVTASWMYASARVTPISPVGTPTLAHDAATGPEPAPAPPRFTDAGTKSTNQTPANFAPPPRPPELPPAPSPAGAAAPAPRECPAYFRWIHED

SEQ ID NO: 99552 - protein, 209 aa, Setaria italica
  Transcript Sequence Number=SeqID_33578
  Gene Ontology: Cellular component=integral to membrane
  Homolog annotation: Hit_ID=B4FET6; Match level="QueryCoverage=92%, HitCoverage=53%, E-value=3e-84, Identity=81%"; Hit description=ATPUP3
  Pfam annotation: Domain name=TPT; Domain location=36-188; Score =137.8; E_value=3.5e-38; Accession=PF03151.8; Description=Triose -phosphate Transporter family
ASVNAVALLTVGAVVLGLHVSSDRPPGVTRGQYWLGFILTLGAAALYGLVLPLVELAYRRAAGGGRAVTYALVIEMQLVMGFFATAFCTVGMIVNKDFQAIPREAKHFELGEARYYTVLVWSAVLWQCFFLGAVGVIFCVHTLLAGILIAVFIPVTEVAAVIFLHEKFSSEKGVALVLSLWGLASYSYGEWSDSRAKKKAEAAAEGQAS

SEQ ID NO: 99553 - protein, 96 aa, Setaria italica
  Transcript Sequence Number=SeqID_33579
RQKYEPLWIEGGDHGNLERFPVYARHLKKFLSAIKKLPAEKESAAESEKSPAENKTLSDDVAICEVPSMISRRLEPSRKSAIHEQPMLGTGHVDKR

SEQ ID NO: 99554 - protein, 568 aa, Setaria italica
  Transcript Sequence Number=SeqID_33580
  Gene Ontology: Mol. function=protein serine/threonine kinase activity; Biological process=protein amino acid phosphorylation
  Homolog annotation: Hit_ID=B9SRB8; Match level="QueryCoverage=91%, HitCoverage=72%, E-value=1e-138, Identity=50%"; Hit description =Serine-threonine protein kinase, plant-type, putative
  Pfam annotation: Domain name=APH; Domain location=245-433; Score= -15.7; E_value=0.03; Accession=PF01636.15; Description=Phosphotransfer ase enzyme family
  Pfam annotation: Domain name=Lectin_legB; Domain location=1-157; Score=35.2; E_value=9.9e-13; Accession=PF00139.11; Description =Legume lectin domain
  Pfam annotation: Domain name=Pkinase; Domain location=242-517; Score =169.8; E_value=8.2e-48; Accession=PF00069.17; Description=Protein kinase domain
  Pfam annotation: Domain name=Pkinase_Tyr; Domain location=242-517; Score=76.1; E_value=1.3e-19; Accession=PF07714.9; Description =Protein tyrosine kinase
  Pfam module annotation: Pfam domain module=APH::Lectin_legB::Pkinase:: Pkinase_Tyr; Domain location=245-433::1-157::242-517::242-517
ASGKDGGPPPGSYGGYLGLTNASTDGNATNEFVAVELDSVKQSYDPDDNHIGLDVNSVRSTVTTPLARFGIELAPVPNATNDGSIYLWIDYNGTTRHIWVYIAPASANANIRKPATPVLNASLDLSTILLGKKGYFGFSASTGVEYQLNCVNMWNMTVEVLHDDSAPKKAPLSGWKLGVAIGAPCAAALALGLLAGLYFMKKRKKVGDDPSSVFNNATLLRSIPGVPKEFDFKDLRKGTGNFDEKMKLGQGGYGVVYRATVPGNNGQSVEVAVKQFSGANTKGQEDFLAELSIINRLRHRNLVKLVGWCHDNGVLLLVYDYMPYGSLDRHIFGGKDSPGLDWRQRHTVVAGVASALNYLHHEFDQTVIHRDIKPSNIMLDSSYHARLGDFGLARALESDKTSYTDKIGVPGTLGYIAPECFHTGRATRESDVFGFGAVILEVICGRRISCCNPAGCSQLLEWVWKLHGAGRVLEAVDPRLAGEYDEEEAERLLLLGLACSHPNPRKRPTAQTILQNLQTRSVPPLPVPTSKPVFMWPVPLVDGEVVEEEGEYGGEETAGTSMSHSELT

SEQ ID NO: 99555 - protein, 220 aa, Setaria italica
  Transcript Sequence Number=SeqID_33581
  Homolog annotation: Hit_ID=Q00SL2; Match level="QueryCoverage=53%, HitCoverage=43%, E-value=2e-11, Identity=33%"; Hit description=UV radiation resistance associated protein (ISS)
GENGRGRLKDMEQKLRMRQQYMITQVAQIYPVRPLDEQSPDHKPGFTTNITKTRNAGSGFQNGSQNRPLAIFGLQLSKLSVKKTGYFSDKTEFQKSSTVLGYAAHVVSLIASYLNIPLRYPLRFGGSQSYVLDHAPAVEPSSITSVVSSVHPSTSMRTMEFPLFFDGQETTRSAYAIFLLNKDIEQLLNYIGAESLGPRHVLSNLKQLTTIVQSQQYISS

SEQ ID NO: 99556 - protein, 161 aa, Setaria italica
  Transcript Sequence Number=SeqID_33582
  Gene Ontology: Mol. function=hydrolase activity, hydrolyzing O -glycosyl compounds; Cellular component=cell wall; Biological process= carbohydrate metabolic process
  Homolog annotation: Hit_ID=C5IG71; Match level="QueryCoverage=83%, HitCoverage=41%, E-value=2e-55, Identity=79%"; Hit description =Xyloglucan xyloglucosyl transferase
  Pfam annotation: Domain name=Glyco_hydro_16; Domain location=34-161; Score=77.0; E_value=6.7e-20; Accession=PF00722.13; Description =Glycosyl hydrolases family 16
  Subcellular localization annotation: CTP_CleavageSite=49; ConfidenceScore=5.16e-01
MAATCAAALVVALMMVSWAAVLAAASLDTSPVPFQAGFMPLFGGDNLVRSPDGRSVRLKLDRRTGSGFVSKSAYHHGYFSASIKLPDDHTAGVVVAFYLSNGDVFPRNHDEVDFELLGNRRGHEWRVQTNIYGNGSTSRGREERYLLPFDPTLRHHAYAVA

SEQ ID NO: 99557 - protein, 112 aa, Setaria italica
  Transcript Sequence Number=SeqID_33583
  Gene Ontology: Cellular component=membrane
  Homolog annotation: Hit_ID=B6U3D7; Match level="QueryCoverage=89%, HitCoverage=28%, E-value=4e-22, Identity=53%"; Hit description =Nodulin protein
MGMMGSCLGGGLPVAVMLCLNVVAAVMVSLVKVAMDGGMNPLVIVTLQQLTASVFLAPIAFFKERKSRPKLTLEIFAYIFVSAALGAALRQYMIFVALRYTTATFVTAFSNI

SEQ ID NO: 99558 - protein, 134 aa, Setaria italica
  misc_feature (96)..(96): Xaa can be any naturally occurring amino acid
  Transcript Sequence Number=SeqID_33584
  Homolog annotation: Hit_ID=Q7EZN3; Match level="QueryCoverage=71%, HitCoverage=23%, E-value=2e-13, Identity=41%"; Hit description =OJ1005_B10.23 protein
AMATGMEQFKDAHDRFQSVVQHVSTTTAAMEQFKDALDHFQTITQNGRVIAEVEYGTDMQEKSLCEEPQRKAKVTAISEVEKLGLTGIEVVTAASXFAKEPNQMDMFLALPEIYKKDYILQMLSGGQSIQYSVG

SEQ ID NO: 99559 - protein, 35 aa, Setaria italica
  Transcript Sequence Number=SeqID_33585
CARRAALPWHSPAAPLHDANYTATLLGPVNQCLLS

SEQ ID NO: 99560 - protein, 104 aa, Setaria italica
  Transcript Sequence Number=SeqID_33586
QRLHASRAPDTEYGRAKVFLHNHHLCAVATQLVAPPLLVLSLLALWRVQGKDFFEGLEGLGWLVGWSVAMKEAALLAARWVVAVWSVVTVITLVCYKRGWLFVL

SEQ ID NO: 99561 - protein, 117 aa, Setaria italica
  Transcript Sequence Number=SeqID_33587
  Gene Ontology: Mol. function=transferase activity; Biological process= auxin mediated signaling pathway
  Homolog annotation: Hit_ID=B6SUR9; Match level="QueryCoverage=94%, HitCoverage=47%, E-value=2e-42, Identity=77%"; Hit description =Glutathione S-transferase
  Pfam annotation: Domain name=GST_N; Domain location=3-76; Score=76.1; E_value=1.2e-19; Accession=PF02798.12; Description=Glutathione S -transferase, N-terminal domain
MSPPVKLIGAFGSPAVHRAEAALRLKGVPYELILEDLENKSELLLTHNPIHKKVPVLLHGDRTICESLVILEYIDETFDGPALLPTDPYDRAMARFWAHFMDYKVLKLQPFLAINPK

SEQ ID NO: 99562 - protein, 95 aa, Setaria italica
  Transcript Sequence Number=SeqID_33588
  Gene Ontology: Mol. function=transferase activity, transferring glycosyl groups; Cellular component=membrane
  Homolog annotation: Hit_ID=Q337B5; Match level="QueryCoverage=94%, HitCoverage=17%, E-value=2e-43, Identity=92%"; Hit description =Fringe protein, putative, expressed
  Pfam annotation: Domain name=DUF604; Domain location=1-94; Score= -4.8; E_value=1.1e-12; Accession=PF04646.4; Description=Protein of unknown function, DUF604
LSFPLAVALARTLDVCIERYPKLYGSDDRLHACITELGVPLTREYGFHQWDIRGNAHGLLASHPIAPFISIHHVELVDPIYPGLNSLESFWYSCF

SEQ ID NO: 99563 - protein, 104 aa, Setaria italica
  Transcript Sequence Number=SeqID_33589
  Homolog annotation: Hit_ID=B9R7G8; Match level="QueryCoverage=87%, HitCoverage=7%, E-value=5e-22, Identity=57%"; Hit description =Ribonuclease p/mrp subunit, putative
TALKASERTVKWHGTLVARALLEDQKLALAPSVPDWCSSLLSTASQATMNNDMPLGQLSLSTFLLSMTRCNESKFVIRQKGLHPLRSIAKKIENQNGQSSMKDQ

SEQ ID NO: 99564 - protein, 110 aa, Setaria italica
  Transcript Sequence Number=SeqID_33590
  Subcellular localization annotation: CTP_CleavageSite=66; ConfidenceScore=5.44e-01
IPASVYPSPSSSVAVSEPSVTIVSDFKQHRIPLTSGKVKVTIRSPPNKTSETDNTSIGSINKLAMRQNDESNKETGKDVPFRGNLEFSNPVNGNGTSQGTLVFSKELNPE

SEQ ID NO: 99565 - protein, 52 aa, Setaria italica
  Transcript Sequence Number=SeqID_33591
MSFLRTLADTFSSLLFSSGGGAPMDAAGAAPSPAAVVGERVALKLRGYFELA

SEQ ID NO: 99566 - protein, 61 aa, Setaria italica
  Transcript Sequence Number=SeqID_33592
RAGEREEMLLLAAPHHLAAAASSSAPERCQIPGIKRQIRRRRPQIRTRNRAKSARPPLPPA

SEQ ID NO: 99567 - protein, 147 aa, Setaria italica
  Transcript Sequence Number=SeqID_33593
  Gene Ontology: Mol. function=signal transducer activity; Biological process=response to light stimulus
  Homolog annotation: Hit_ID=Q9FJY3; Match level="QueryCoverage=96%, HitCoverage=19%, E-value=1e-18, Identity=40%"; Hit description =Photoreceptor-interacting protein-like
  Subcellular localization annotation: CTP_CleavageSite=31; ConfidenceScore=5.06e-01
LQVLFFEQLQLRRAITGTLLAPAGASAVPPRAMRQQRPVSGEWRGATVLAQESQVLRLDMDSVASRVQELERECSSMRRAIKKIDGSSGSGSGGRSPGGRSADGGDLSGPAVGGWRARHGCKFSTQVCDSHARNVVASRASRIGMSP

SEQ ID NO: 99568 - protein, 74 aa, Setaria italica
  Transcript Sequence Number=SeqID_33594
  Gene Ontology: Mol. function=signal transducer activity
CSTTVLAQESQVLRLDSGSGGRSPGGRSADGGDLSGPAVGGWRARHGCKFSTQVCDSHARNVVASRASRIGMSP

SEQ ID NO: 99569 - protein, 48 aa, Setaria italica
  Transcript Sequence Number=SeqID_33595
GKQLGQPYLACLVYSRINFIPYRYQSSLVESKYALAGILRLGTCICRR

SEQ ID NO: 99570 - protein, 49 aa, Setaria italica
  Transcript Sequence Number=SeqID_33596
LNTKIVKHGKLHIASNCILTPNTIKLLNMFLCDLSLEYSKNLHFLNLGI

SEQ ID NO: 99571 - protein, 205 aa, Setaria italica
  misc_feature (62)..(62): Xaa can be any naturally occurring amino acid
  Transcript Sequence Number=SeqID_33597
  Gene Ontology: Mol. function=nucleotide binding; Biological process =defense response
  Homolog annotation: Hit_ID=Q6WSR3; Match level="QueryCoverage=100%, HitCoverage=17%, E-value=1e-76, Identity=65%"; Hit description =Resistance protein T10rga2-1A
  Pfam annotation: Domain name=NB-ARC; Domain location=2-183; Score= -15.2; E_value=2.4e-08; Accession=PF00931.14; Description=NB-ARC domain
DLSSTTEWDMIVQSFPKMENTSRIIITTREENIAKYCSKKQENIYKLKILESTDALDTFTSXVFKETIDLEQRRPDLIEEAKLILKKCDGLPLAIVTIGGFLANQPKTAMEWRKLKEHISAELEINPELEAIRTILSKSYDGLPYHLKSCFLYLSIFPEDHKVSRRRLTRRWTAEGYSREIHEKFAEEIADGYFMELIGRSMILP

SEQ ID NO: 99572 - protein, 328 aa, Setaria italica
  Transcript Sequence Number=SeqID_33598
  Gene Ontology: Mol. function=ubiquitin thiolesterase activity; Cellular component=intracellular; Biological process=ubiquitin -dependent protein catabolic process
  Homolog annotation: Hit_ID=Q6K6Z5; Match level="QueryCoverage=99%, HitCoverage=99%, E-value=1e-161, Identity=83%"; Hit description=(RAP Annotation release2) Peptidase C12
  Pfam annotation: Domain name=Peptidase_C12; Domain location=2-207; Score=349.2; E_value=7.6e-102; Accession=PF01088.13; Description =Ubiquitin carboxyl-terminal hydrolase, family 1
MSWCTIESDPGVFTELIQQMQVKGVQVEELYSLDVDSLSELRPIYGLIFLFKWIPGEKDERPVVRDPNPNLFFAHQVINNACATQAILSVLMNRPEIDIGPELSQLKEFTGAFTPDLKGLAIGNSESIRTAHNSFARPEPFISDEQRAATKDDDVYHFISYLPFEGVLYELDGLKEGPVNLGQCGGLDDLDWLQMVQPVIQERIERYSQSEIRFNLMAIIKNRKEVYSAELEDLEKRREQILQEMNKTSATESLNNSLTEVISAIETVSEKIIMEEEKFKKWKTENIRRKHNYIPFLFNLLKMLAEKQQLKPLVEKAKQQKSSSPSTR

SEQ ID NO: 99573 - protein, 69 aa, Setaria italica
  Transcript Sequence Number=SeqID_33599
ALLGRNLHYWIWELTRFDGAAIMLSEVYTLGTCLLLGSDLSYRLYGRFDMALVSIRIYCCNMDLMRLTL

SEQ ID NO: 99574 - protein, 364 aa, Setaria italica
  misc_feature (282)..(282): Xaa can be any naturally occurring amino acid
  Transcript Sequence Number=SeqID_33600
  Gene Ontology: Mol. function=protein serine/threonine kinase activity; Cellular component=chloroplast; Biological process=protein amino acid phosphorylation
  Homolog annotation: Hit_ID=B6TTR7; Match level="QueryCoverage=100%, HitCoverage=89%, E-value=0.0, Identity=89%"; Hit description=Protein kinase APK1A
  Pfam annotation: Domain name=Pkinase; Domain location=38-321; Score =148.5; E_value=2e-41; Accession=PF00069.17; Description=Protein kinase domain
  Pfam annotation: Domain name=Pkinase_Tyr; Domain location=38-321; Score=94.3; E_value=4.2e-25; Accession=PF07714.9; Description =Protein tyrosine kinase
  Pfam module annotation: Pfam domain module=Pkinase::Pkinase_Tyr; Domain location=38-321::38-321
HASSASMLPTPRSEDEILESANVKAFTFNELRTATRNFRPDSVLGEGGFGSVFKGWIDEKTLAPTRPGTGMVIAVKRLNQEGYQGHKEWLAEVNYLGTLSDPYLVKLVGYCLEDEQRLLVYEFMPRGSLENHLFRRSSHFQPLSWNLRMKIALGAAKGLAFLHSDKAKVIYRDFKTSNILLDANFNAKLSDFGLAKDGPTGDKSHVSTRVMGTHGYAAPEYLATGHLTTKSDVYSFGVVLLEMLSGRRALDKNRPNGEHNLVEWARPYLRSKRRIFRILDPXRLGGQYSLARAQKAAALALQCLSVESRQRPSMDEVVTALEQLQDTKEGGHHHLQKRPSSRSLDSNGVKVAMKGKPAPSPKPV

SEQ ID NO: 99575 - protein, 64 aa, Setaria italica
  Transcript Sequence Number=SeqID_33601
AHHFLTDRLHTQTGFRYFWRCTVYSLFFGGEGQCKTHTNIKFRITLKRSSCNSARKPKPKHNKQ

SEQ ID NO: 99576 - protein, 62 aa, Setaria italica
  Transcript Sequence Number=SeqID_33602
  Gene Ontology: Mol. function=protein serine/threonine phosphatase activity; Cellular component=protein serine/threonine phosphatase complex; Biological process=protein amino acid dephosphorylation
  Homolog annotation: Hit_ID=Q7XUC5; Match level="QueryCoverage=100%, HitCoverage=15%, E-value=5e-24, Identity=83%"; Hit description =Probable protein phosphatase 2C 43
PSTARFHLSEPLRRPVLTSEPSICSRVLSSQDRFLIFASDGLWEHISNQQAVEIVHNSPREG

SEQ ID NO: 99577 - protein, 139 aa, Setaria italica
  Transcript Sequence Number=SeqID_33603
  Gene Ontology: Mol. function=oxidoreductase activity; Cellular component=extracellular region; Biological process=oxidation reduction
  Homolog annotation: Hit_ID=Q0IQU1; Match level="QueryCoverage=100%, HitCoverage=24%, E-value=3e-67, Identity=89%"; Hit description =Laccase-22
PPPQNATTIVSKFVESLRSLNSEEYPANVPLTVDHSLVFTVGVGVNPCAKCINATRLVGTINNVTFIMPSTPILQAHYYNIPGVFTDDFPATPPHKFNYTGSGPKNLQTMKGTRVYRLPYNASVQVVLQDTGIISPESH

SEQ ID NO: 99578 - protein, 139 aa, Setaria italica
  Transcript Sequence Number=SeqID_33604
  Gene Ontology: Mol. function=transferase activity, transferring glycosyl groups; Biological process=metabolic process
  Homolog annotation: Hit_ID=C4MF47; Match level="QueryCoverage=99%, HitCoverage=26%, E-value=3e-39, Identity=61%"; Hit description=UDP -glycosyltransferase UGT74H5
AVDVAYAHTFAGRIRPPLAGGEPVELPGLPAGLMPGDMPSFLAEPSDYPAYLDLLTNQFNGLDAADHVLINSFHELQPQESDYMASTWRAKTVGPTVPSAYLDNSLPDDTSYGFHLYTPLTATTRAWLDGRPPRSVVYA

SEQ ID NO: 99579 - protein, 85 aa, Setaria italica
  Transcript Sequence Number=SeqID_33605
  Gene Ontology: Mol. function=voltage-gated anion channel activity; Cellular component=mitochondrial outer membrane; Biological process =anion transport
  Homolog annotation: Hit_ID=Q6K548; Match level="QueryCoverage=74%, HitCoverage=22%, E-value=1e-18, Identity=73%"; Hit description =Mitochondrial outer membrane protein porin
FFLLPYYSVKKARDLLNKDFHTDQKFTLTTYTSNGAAITAASTKKNEAIFSEIQAQLKQKNVTVDVKATTDSLLLTTVTVEEFGV

SEQ ID NO: 99580 - protein, 234 aa, Setaria italica
  misc_feature (23)..(23): Xaa can be any naturally occurring amino acid
  misc_feature (206)..(206): Xaa can be any naturally occurring amino acid
  Transcript Sequence Number=SeqID_33606
  Gene Ontology: Mol. function=DNA binding; Cellular component =intracellular
  Homolog annotation: Hit_ID=Q2R9I2; Match level="QueryCoverage=86%, HitCoverage=41%, E-value=4e-87, Identity=71%"; Hit description=BRCA1 C Terminus domain containing protein, expressed
  Pfam annotation: Domain name=BRCT; Domain location=110-185; Score =38.5; E_value=2.6e-08; Accession=PF00533.18; Description=BRCA1 C Terminus (BRCT) domain
  Pfam annotation: Domain name=BRCT; Domain location=14-89; Score=17.9; E_value=0.042; Accession=PF00533.18; Description=BRCA1 C Terminus (BRCT) domain
  Pfam module annotation: Pfam domain module=BRCT::BRCT; Domain location=110-185::14-89
  Subcellular localization annotation: CTP_CleavageSite=54; ConfidenceScore=5.10e-01
PKSKGTSAVNSGSSRSNVFKGKXFGFSNSFSHDKRPEVVDWIREGGGVVVDDIQSAVVDYTIECHGRNGTPCDFSHSTVVSTQWIRTCLEEGCLQDVGSHPIFSPLRCRIPFPGFENFRFCISQYGERERFLLKNLCFALGAKFTEKAYKGVSHLICKFASGPKYEVYSKRGTPTITAEWLFECVKQDTTVPFDHFQPKPLTSQDXDSDLCTVSQYSTQATRFNCSELLSGCQV

SEQ ID NO: 99581 - protein, 99 aa, Setaria italica
  Transcript Sequence Number=SeqID_33607
  Gene Ontology: Mol. function=methyltransferase activity; Cellular component=plasma membrane; Biological process=metabolic process
  Homolog annotation: Hit_ID=B9R864; Match level="QueryCoverage=96%, HitCoverage=18%, E-value=2e-24, Identity=56%"; Hit description =ATRAD3, putative
VHVGTTALDEGGAPALGQAGTEEALEFFMFDVDRVLRVGGLLWVDSYMCHSEERMKVVVRLIGRFGYKKLKWVTGEKAGTGSTKTAMYLSAVLQKPARG

SEQ ID NO: 99582 - protein, 104 aa, Setaria italica
  Transcript Sequence Number=SeqID_33608
  Subcellular localization annotation: CTP_CleavageSite=72; ConfidenceScore=5.86e-01
QLISSQLQQTSFPTAATSPRSYPTLPLPSVLPPSHTQTSPAPLTTNPLSSPWPVLQFTPFGSFSTLELGSTQAASLLGIGTPFSATSLFPIPSGGMHHMLCATG

SEQ ID NO: 99583 - protein, 107 aa, Setaria italica
  Transcript Sequence Number=SeqID_33609
  Gene Ontology: Cellular component=plasma membrane
MVGIFSRFSSGAHRRSKSVAEVVETLAPNMSTGESDPAAVPAESPHGIEVGVEFKPVERPVEPVNLDQPVKCPLPEPSILHDGRIWKEKLSSVSVRVRTDLPIVQEG

SEQ ID NO: 99584 - protein, 123 aa, Setaria italica
  misc_feature (61)..(61): Xaa can be any naturally occurring amino acid
  Transcript Sequence Number=SeqID_33610
  Gene Ontology: Mol. function=oxidoreductase activity, acting on single donors with incorporation of molecular oxygen, incorporation of two atoms of oxygen; Cellular component=cytoplasm; Biological process=fatty acid biosynthetic process
  Homolog annotation: Hit_ID=A1XCH8; Match level="QueryCoverage=93%, HitCoverage=13%, E-value=8e-36, Identity=62%"; Hit description =Lipoxygenase
MFGGIIGGLTGNKNGRLNGSVVLMRKSVLGFDVTSMGATVIDNIGEFLGRGITCQLISSPXVDPNNGNRGKVCAEASLEQWLTSLPSLTSSESKFGVTFEWEVEKLGVPGAIIVRQPRLRVLL

SEQ ID NO: 99585 - protein, 73 aa, Setaria italica
  Transcript Sequence Number=SeqID_33611
  Subcellular localization annotation: CTP_CleavageSite=52; ConfidenceScore=5.68e-01
TDPQAVLTFSSLLQSHTSCPPSSLTPRALVPCSSGGRPAGRGAASGAEAGPAAAAAGGGSGDGNGTPTLRVAV

SEQ ID NO: 99586 - protein, 56 aa, Setaria italica
  Transcript Sequence Number=SeqID_33612
  Gene Ontology: Mol. function=transcription factor activity; Cellular component=nucleus; Biological process=regulation of transcription, DNA-dependent
  Homolog annotation: Hit_ID=Q3T5P2; Match level="QueryCoverage=69%, HitCoverage=17%, E-value=5e-12, Identity=79%"; Hit description=HvCBF7
NPDDALFDLPDLLLDLTRHGPSSCQLSCAASWDDDVCFPGAGAGVFRLEEPLLWEY

SEQ ID NO: 99587 - protein, 62 aa, Setaria italica
  Transcript Sequence Number=SeqID_33613
PSSRSVGYVGVGFGFMAGRGLHETCVVPFECTPPHFLTDIYAFLYGCNCGLQIFHRAELTMG

SEQ ID NO: 99588 - protein, 78 aa, Setaria italica
  Transcript Sequence Number=SeqID_33614
  Pfam annotation: Domain name=DUF679; Domain location=24-78; Score= -42.2; E_value=8.6e-08; Accession=PF05078.4; Description=Protein of unknown function (DUF679)
NGQGGGGARNDEATRLERAMAQAFQSTAELAKNLPTGAVLVFEVLSPVFTNGGKCQDVNRVMTAWLVGLCAAACFFLC

SEQ ID NO: 99589 - protein, 33 aa, Setaria italica
  Transcript Sequence Number=SeqID_33615
FDKNNKPSWPVAEYQKGTSIISADLKINVYALY

SEQ ID NO: 99590 - protein, 309 aa, Setaria italica
  Transcript Sequence Number=SeqID_33616
  Gene Ontology: Mol. function=sequence-specific DNA binding; Cellular component=nucleus; Biological process=regulation of transcription, DNA-dependent
  Homolog annotation: Hit_ID=Q8RUM5; Match level="QueryCoverage=100%, HitCoverage=50%, E-value=1e-103, Identity=64%"; Hit description=QSH-1
  Pfam annotation: Domain name=Homeobox; Domain location=94-152; Score =6.4; E_value=0.0028; Accession=PF00046.21; Description=Homeobox domain
  Pfam annotation: Domain name=POX; Domain location=1-45; Score=-13.7; E_value=9.7e-06; Accession=PF07526.3; Description=Associated with HOX
  Pfam module annotation: Pfam domain module=Homeobox::POX; Domain location=94-152::1-45
  Subcellular localization annotation: CTP_CleavageSite=30; ConfidenceScore=5.10e-01
YYQQVQTVINSFETVAGFSNAAPFAAMALRAMAKHFKCLKGMILSQLRNASKAAASKEGFSKDIAMFGLASGSAAALQRASSVAAFGQPHNIWRPQRGLPERAVSVLRAWLFEHFLHPYPTDGDKQMLAKQTGLTRNQVSNWFINARVRLWKPMVEEIHNLEMRQVHKHPALDKSQRAMHHQTQHSSESSGKPSDPSDSQLGQSSSITRNHAIPASQGFPDELSQMSHSIQQGQVTFAYNGLSTPQHQHSLASSQHHQQLGSMSGIGGAGNGGVSLTLGLHQNNRVCIAEPLPASLPPNLAHRFGLEEV

SEQ ID NO: 99591 - protein, 49 aa, Setaria italica
  Transcript Sequence Number=SeqID_33617
  Gene Ontology: Mol. function=RNA-directed RNA polymerase activity
  Homolog annotation: Hit_ID=Q19VG1; Match level="QueryCoverage=100%, HitCoverage=15%, E-value=3e-20, Identity=93%"; Hit description =Truncated MOP1 (Fragment)
GSTIKSRFTDEHFHACKEDAKFAWVRALDFTPNSSFGECSTLVLKLSKG

SEQ ID NO: 99592 - protein, 111 aa, Setaria italica
  Transcript Sequence Number=SeqID_33618
  Gene Ontology: Mol. function=structural constituent of ribosome; Cellular component=ribonucleoprotein complex; Biological process =translation
  Homolog annotation: Hit_ID=Q6L510; Match level="QueryCoverage=100%, HitCoverage=98%, E-value=1e-48, Identity=89%"; Hit description=60S ribosomal protein L36
  Pfam annotation: Domain name=Ribosomal_L36e; Domain location=5-103; Score=159.4; E_value=1.1e-44; Accession=PF01158.10; Description =Ribosomal protein L36e
  Subcellular localization annotation: CTP_CleavageSite=48; ConfidenceScore=5.03e-01
MAPTQAKSGLFVGINKGHIVTKRELPLRPSDRKGKATKRVTFVRSLIREVAGFAPYEKRITELLKVGKDKRALKVAKRKLGTHKRAKKKREEMANVVRKMRSGGGAADKKK

SEQ ID NO: 99593 - protein, 361 aa, Setaria italica
  Transcript Sequence Number=SeqID_33619
  Gene Ontology: Mol. function=metallopeptidase activity; Cellular component=signalosome; Biological process=red or far red light signaling pathway
  Homolog annotation: Hit_ID=Q7FAM4; Match level="QueryCoverage=97%, HitCoverage=100%, E-value=1e-168, Identity=78%"; Hit description =OSJNBa0071I13.2 protein
  Pfam annotation: Domain name=Mov34; Domain location=55-169; Score =170.9; E_value=3.7e-48; Accession=PF01398.13; Description =Mov34MPNPAD-1 family
MEPTSSASIARQTWELENNIPAAATDPDAMDAIYRYDDAAQARAQQEKPWANDPHHFRRAKISALALLKMVVHARAGGTIEVMGLMQGKCEGDAIIVMDAFALPVEGTETRVNAQADAYEYMVEYSTINKQAGRLENVVGWYHSHPGYGCWLSGIDVSTQMLNQQFTEPFLAVVIDPTRTVSAGKVEIGAFRTYPKDYKPPDEPVSEYQTIPLNKIEDFGVHCKQYYALDITYFKSSLDSHLLDLLWNKYWVNTLSSSPLLGNRDYVAGQIFDLADKLEQAEGQLAHSRFGGMLMPSQRKKEQDESPLAKVTRDSSKITAEQVHGLMSQVIKDILFNSVHPSSKASTSAPDSSGPEPMVEA

SEQ ID NO: 99594 - protein, 33 aa, Setaria italica
  Transcript Sequence Number=SeqID_33620
PMYSGEKMMIGCVGGDPWEYTSATTGILDVITR

SEQ ID NO: 99595 - protein, 28 aa, Setaria italica
  Transcript Sequence Number=SeqID_33621
MEMFFGSFLSESASSQNLFGHPDVERCP

SEQ ID NO: 99596 - protein, 70 aa, Setaria italica
  Transcript Sequence Number=SeqID_33622
HSTLKYKKITAYLSVPLLCEFNLQNSCCLNKCTGIYNYQYFSARHFQMKCNFLGTILSLIIHAFYFNLWP

SEQ ID NO: 99597 - protein, 75 aa, Setaria italica
  Transcript Sequence Number=SeqID_33623
  Subcellular localization annotation: CTP_CleavageSite=46; ConfidenceScore=5.46e-01
GRAGFCRAPPSSLSPPPRALSSPPIPMRNFNIWVPIRTPFDTQYVCFPKLREFFQFRCFLLLFSIFFLLLNFQPM

SEQ ID NO: 99598 - protein, 659 aa, Setaria italica
  misc_feature (43)..(43): Xaa can be any naturally occurring amino acid
  misc_feature (71)..(71): Xaa can be any naturally occurring amino acid
  misc_feature (219)..(219): Xaa can be any naturally occurring amino acid
  Transcript Sequence Number=SeqID_33624
  Gene Ontology: Mol. function=zinc ion binding
  Homolog annotation: Hit_ID=O22697; Match level="QueryCoverage=71%, HitCoverage=65%, E-value=4e-85, Identity=35%"; Hit description =F8A5.10 protein
  Pfam annotation: Domain name=SWIM; Domain location=394-429; Score =12.0; E_value=0.032; Accession=PF04434.9; Description=SWIM zinc finger
AKAMFAPYISDELRLQVMSLLYVGIPVETIMQRHTKMVEKQGXSYRDDLLTHRYVRRLERKFCVLRLSVSXSISISIWVENHQDCVFFYEDFSDTDTFVLGIQTDWQLQQMIQFGSHSLLASDSKFGTNKLKYPVHSILVFDQQKNAIPVAWIITPNFAHGEIYKWMGALYDRAHTKDPTWQLGGFIIDDPLADVRTIREVFQCPVLISLWRIRHAWHXNLVNKCSDNEKRSAMAKFLGDAISSICRGSGDVELFEAFLQDFVDCSGFLDYFKALWLPRLGAWTTILKATPLATAEVASAIESYHHLLKLRLLNEANENVYWRADWLVHKLGTKVHSYYWLDEYSGKDSFSRYWRSEWSSGPNPWRQGLQIPDSDVVIEGNCARVVSQKNKEKSHVVWNPGSEFALCDCSWSRNGNLCKHAIKSTKVCRDRGLAPPSLALFRYYQALANLVRCPPSDTVISDHAMAVAVSVRTQLDAVICATNGSSSNGPVFRDPQSASKPRESEIEETNTENGVCASQSKATSGDEEVPIDQDSPACQKRKSGNANGDNEDASTYQDSPACKKRKSGEASDNDGEASTEEDSQASESSKSGKAFADDEEVSTDQDSQDREKRKSEASDDEGTSATQIVQPSETESCQATDVPNESSVKVRLAEGASGT

SEQ ID NO: 99599 - protein, 169 aa, Setaria italica
  Transcript Sequence Number=SeqID_33625
MSEVNPTPATEDPPPLVNGEFAASDKNNNAEKFGPEESREVAVTSNNADEVKNGCENGTEGAADEVANIVEADDSNGGDSGCANVVVAEDVKMIDTQHEVNTEGADVKMVDTQHEANTEAEDVKMVDTQHEANIEAKDVKMDGTQDVKMVHTQHEANIEAEEDACQDKE

SEQ ID NO: 99600 - protein, 227 aa, Setaria italica
  Transcript Sequence Number=SeqID_33626
  Gene Ontology: Mol. function=binding; Cellular component=ubiquitin ligase complex
  Homolog annotation: Hit_ID=Q6H6D6; Match level="QueryCoverage=100%, HitCoverage=23%, E-value=1e-101, Identity=80%"; Hit description =Transducin-like
LDLLGDPLQYSVYREEAIDAMISALESSSRSKKVQEQCARALLILAGRFSSSGEPIAEAWLLKRAGLDDSLSESFRRTEIFKDKSVRAEEEKVVEERLKKLALMLLNSGGKRFLAALSNCISDGIPSLSRSCLITVTWMSSSLSPLGGCNDFQPLACSVLAPNLLDSLSYDRVLEERVLASLSLLNVVRHPECMEKVFPLKKDTIESLQDLAEVTWTAKELLFACCR

SEQ ID NO: 99601 - protein, 55 aa, Setaria italica
  Transcript Sequence Number=SeqID_33627
QQAFSQKQLRVTIYSFDTVPPTALCLYQYIEVYVASQDKSASSYHFLDIAAGCVF

SEQ ID NO: 99602 - protein, 87 aa, Setaria italica
  Transcript Sequence Number=SeqID_33628
  Subcellular localization annotation: CTP_CleavageSite=41; ConfidenceScore=5.74e-01
EKTNQNQQPPSRQTDSTTQKPPSSVQSTKSNFFTQPSTPTTAKMHQRTDAEKPIHKDASSPSKTSQISPKEAPDKPHLSGFLRSVAI

SEQ ID NO: 99603 - protein, 60 aa, Setaria italica
  Transcript Sequence Number=SeqID_33629
DARSREGSSTLSSGIFVSSGAQTRWLMQSRGCSSPGKLLIQLKIKSIILFLVNHMFIIFL

SEQ ID NO: 99604 - protein, 70 aa, Setaria italica
  Transcript Sequence Number=SeqID_33630
  Gene Ontology: Mol. function=DNA binding; Biological process =nucleotide-excision repair
  Homolog annotation: Hit_ID=B6SX64; Match level="QueryCoverage=100%, HitCoverage=100%, E-value=1e-32, Identity=94%"; Hit description=REX1 DNA Repair family protein
  Pfam annotation: Domain name=Tbf5; Domain location=1-70; Score=124.7; E_value=2.9e-34; Accession=PF06331.4; Description=Transcription factor TFIIH complex subunit T
MVNAIKGLFISCDIPMAQFIINLNASMPPSERFIVHMLDPTHMFVQPHVAEMIRSKIGEFRDQNSYEKPQ

SEQ ID NO: 99605 - protein, 132 aa, Setaria italica
  misc_feature (102)..(102): Xaa can be any naturally occurring amino acid
  Transcript Sequence Number=SeqID_33631
  Gene Ontology: Mol. function=protein serine/threonine kinase activity
IQTSRNQPSPDDPQTGRITATNGENASDKPKGNRKLDVPMQATQDHHGSSTGAVPESCSPSECTALDKLEKASQTVKGANNIVEDSEALSTVISPIKTWLTXPPSSPRELNIDGANQSLRIIKNLLMPVMSI

SEQ ID NO: 99606 - protein, 114 aa, Setaria italica
  misc_feature (54)..(54): Xaa can be any naturally occurring amino acid
  Transcript Sequence Number=SeqID_33632
  Gene Ontology: Mol. function=transferase activity; Biological process= biosynthetic process
  Homolog annotation: Hit_ID=B6T9J5; Match level="QueryCoverage=66%, HitCoverage=16%, E-value=1e-30, Identity=89%"; Hit description=Beta -1,4-mannosyltransferase
MYATILLDQLTQAIEGSPLLRATSSGRQHVATSTFLSDSFSCIEELVKVNKNGXLLFSTSSELADELMMLFKGFPEECVALKSLKEGAMDTASCSKWSTEWETSALPLVNQVCG

SEQ ID NO: 99607 - protein, 422 aa, Setaria italica
  Transcript Sequence Number=SeqID_33633
  Gene Ontology: Mol. function=transferase activity; Cellular component= endoplasmic reticulum membrane; Biological process=biosynthetic process
  Homolog annotation: Hit_ID=B6T9J5; Match level="QueryCoverage=100%, HitCoverage=90%, E-value=0.0, Identity=92%"; Hit description=Beta-1 ,4-mannosyltransferase
  Pfam annotation: Domain name=Glycos_transf_1; Domain location=223 -421; Score=15.0; E_value=4.8e-05; Accession=PF00534.12; Description =Glycosyl transferases group 1
MQYHSLSLANQAGMEVDIVANGGSDPHLSLRENPSIHIHEMKTVKLTGISKISGALALLLKAAVQFVLLVWFLCFKIPRPDVLLVQNPPSVPTLAAVKLASWLRGAKFIVDWHNFGYTLLGLSHGRSHIVVKIYFWFEKHFGQMADGALCVTKAMQHELAQNWGIRATVLYDQSPEFFHPASMMEKHGLFSRLGNAICSAMGNADCISVEKEVEDINTNVFISKIDGEIVLKPNRPALVVSSTSWTPDEDFSILLEAALMYDRRVAATLGEDDSMDEGQLWTDIKKGKQFVYPRLLFIITGKGPDRKKYENQIKRLKLRRVAFRTMWLAIEDYPLLLGSADLGVSLHTSSSGLDLPMKVVDMFGCGLPVCAASFSCIEELVKVNKNGLLFSTSSELADELMMLFKGFPEECVALKSLKEGAM

SEQ ID NO: 99608 - protein, 184 aa, Setaria italica
  Transcript Sequence Number=SeqID_33634
  Gene Ontology: Mol. function=protein tyrosine kinase activity; Cellular component=plasma membrane; Biological process=protein amino acid phosphorylation
  Homolog annotation: Hit_ID=B9R9P2; Match level="QueryCoverage=84%, HitCoverage=25%, E-value=3e-47, Identity=61%"; Hit description =Leucine rich repeat receptor kinase, putative
  Pfam annotation: Domain name=LRR_1; Domain location=31-53; Score =10.5; E_value=3; Accession=PF00560.25; Description=Leucine Rich Repeat
  Pfam annotation: Domain name=LRR_1; Domain location=55-77; Score =13.0; E_value=0.99; Accession=PF00560.25; Description=Leucine Rich Repeat
  Pfam annotation: Domain name=LRR_1; Domain location=7-29; Score=9.9; E_value=3.9; Accession=PF00560.25; Description=Leucine Rich Repeat
  Pfam annotation: Domain name=LRR_1; Domain location=79-101; Score =10.0; E_value=3.6; Accession=PF00560.25; Description=Leucine Rich Repeat
  Pfam module annotation: Pfam domain module=LRR_1::LRR_1::LRR_1::LRR _1; Domain location=31-53::55-77::7-29::79-101
  Subcellular localization annotation: CTP_CleavageSite=35; ConfidenceScore=5.17e-01
LTLLSYPFAVLQLGYNQLTGSIPPQLGNLNKLTVLAMQSNQLTGAIPATLGELTQLRRLDLSFNSLFGSIPSKIAEVPLLEVFDIRNNTLSGSVPVGLRRMNGGFQYMNNKGLCGVGFSLLELCPSSEDGLKPSKPEPFGPDGTVKTREVPQSVNPENCSGSRCSKSANGSEGVLIVAVVAVVI

SEQ ID NO: 99609 - protein, 63 aa, Setaria italica
  Transcript Sequence Number=SeqID_33635
DLRFLLRRGWPALAGVQAPRAIESPDPEVPPPGVKLTSEIPARGPVRAGDATAARMAAAGAQL

SEQ ID NO: 99610 - protein, 45 aa, Setaria italica
  Transcript Sequence Number=SeqID_33636
SKVISSAHRAHETITITISYLMISLPFRVRRDVAMRQHHPPRAPL

SEQ ID NO: 99611 - protein, 51 aa, Setaria italica
  Transcript Sequence Number=SeqID_33637
VCSASHTQHRNAPIKFCCSENLEAVQIIHQPSQTLQHPTSSALLSLLPHSL

SEQ ID NO: 99612 - protein, 168 aa, Setaria italica
  misc_feature (135)..(135): Xaa can be any naturally occurring amino acid
  Transcript Sequence Number=SeqID_33638
  Gene Ontology: Mol. function=oxidoreductase activity, acting on NADH or NADPH; Cellular component=membrane; Biological process=ATP synthesis coupled electron transport
  Homolog annotation: Hit_ID=Q8W317; Match level="QueryCoverage=85%, HitCoverage=19%, E-value=2e-73, Identity=91%"; Hit description=NADH -ubiquinone oxidoreductase 75 kDa subunit
  Pfam annotation: Domain name=Molybdopterin; Domain location=4-168; Score=-45.2; E_value=1.8e-06; Accession=PF00384.14; Description =Molybdopterin oxidoreductase
LDARPQQQQQEHHVKPEEITGVAGKLSDAESMMALKDFVNRMGSDKVLCEGNGPNPPADLRSNYLMNTGIAGLEKADVFLLVGTQPRVEAAMVNARIRKTVGATQAKVGYIGPPADLNYDHEHLGTGPQTLVEIXRGRHPFCSVLQSAKNPVIIAAQYCNLPKTLSSL

SEQ ID NO: 99613 - protein, 695 aa, Setaria italica
  Transcript Sequence Number=SeqID_33639
  Gene Ontology: Mol. function=oxidoreductase activity, acting on NADH or NADPH; Cellular component=membrane; Biological process=ATP synthesis coupled electron transport
  Homolog annotation: Hit_ID=Q8W317; Match level="QueryCoverage=100%, HitCoverage=93%, E-value=0.0, Identity=93%"; Hit description=NADH -ubiquinone oxidoreductase 75 kDa subunit
  Pfam annotation: Domain name=DUF1982; Domain location=641-688; Score =71.9; E_value=2.4e-18; Accession=PF09326.3; Description=Domain of unknown function (DUF1982)
  Pfam annotation: Domain name=Fer2; Domain location=26-89; Score=50.3; E_value=7.6e-12; Accession=PF00111.19; Description=2Fe-2S iron-sulfur cluster binding domain
  Pfam annotation: Domain name=Molybdopterin; Domain location=293-613; Score=456.1; E_value=5e-134; Accession=PF00384.14; Description =Molybdopterin oxidoreductase
  Pfam annotation: Domain name=NADH-G_4Fe-4S_3; Domain location=105 -145; Score=84.0; E_value=5.4e-22; Accession=PF10588.1; Description =NADH-ubiquinone oxidoreductase-G iron
  Pfam module annotation: Pfam domain module=DUF1982::Fer2::Molybdopteri n::NADH-G_4Fe-4S_3; Domain location=641-688::26-89::293-613::105-145
ELPPPREPVGGARVELPPNPEDALEVFVDGHAVRIPKGFTVLQACEVAGVDIPRFCYHSRLSIAGNCRMCLVEVEKSPKPVASCAMPALPGMKIKTNTPVAKKAREGVMEFLLMNHPLDCPICDQGGECDLQDQSMAFGADRGRFTEMKRSVVDKNLGPLVKTVMTRCIQCTRCVRFATEVAGVQDLGMLGRGSGEEIGTYVEKLMTSELSGNVIDICPVGALTSKPFAFKARNWELKGTETIDVTDAVGSNIRVDSRGPEVMRIVPRINEDINEEWISDKTRFCYDGLKRQRLNDPMIRGPDGRFKAVTWRDALAVVAEVLHQVKPEEITGVAGKLSDAESMMALKDFVNRMGSDKVLCEGNGPNPPADLRSNYLMNTGIAGLEKADVFLLVGTQPRVEAAMVNARIRKTVGATQAKVGYIGPPADLNYDHEHLGTGPQTLVEIAEGRHPFCSVLQSAKNPVIIAGAGLFEREDQDALFSTIETVAKKFNVTRPDWNGLNVLLLHAAQAAALDLGLVANPAESIKSAKFLYLMGADDISLDKLPEDAFVVYQGHHGDKAVYRANVILPSSAFSEKEGTYENTEGCTQWTIPAVPTVGDARDDWKIIRALSEVAGAQLPYDSLSAVRDRISTVAPNLIHVDEKEPCTISAEVKPPVKQQVSSTPFKTVIENFYMTDAITRASKIMAQCSATLLKK

SEQ ID NO: 99614 - protein, 631 aa, Setaria italica
  Transcript Sequence Number=SeqID_33640
  Gene Ontology: Mol. function=DNA binding; Cellular component =chromatin; Biological process=regulation of transcription
  Homolog annotation: Hit_ID=Q2HV80; Match level="QueryCoverage=10%, HitCoverage=7%, E-value=9e-17, Identity=61%"; Hit description =Homeodomain-like
DTDDKVAKVRSTGLSTQAESTHEQKSSQIIKSSVQHMVPRIAEGGNRNMTLEDDGTPVSKFTCVQEVREQDATVEDLSKTLPITIEVPKVIDVQGEGNGIAQTTLQSPRQSVNVSWLIPTNKSAAEDVPESQGSTKNVPVIVLDDDSDERGKELENSEALDQGLHKQNKKNCLGMIDLNCAELRQEGFLHLGDPSIQKLPDQDIIASAQKQMSQPIERMFFTKEKDTIHGKQQQHEESSTMHTSYSNFFDLAPPRNTGSLKRPRNLPSELKFRIMDKAPEFSLDLSLDSFQDSRVSALRSDKLFLGGTSSISHKLTERLGTYSYKRHSAPWSEEELDFLWIGVRRYGVNNWNAMMRDTRIRFSNSRMPEDLAKQWDKEQKKLLTSALGPAPPLHIAEDYLGRASCSGCSKSPFLGAQTDLSLGDVYLSNAHASERSRHHLSSLGLLNLHGTDGGPRNLSLGGFPGASSSHGRSGSRRKRASKLQKSYYDSKSPWFQEPSERASHLFPMNQQPINSLPQWLTKDAETGTSRIDREMWPSMALAPVHSAADPPRDSLRGNLFSDDVKPHVLPDASLKRAMRRNADWRSFSKRLFQSGDPLDLNRGTAAAAIAGANGVTPSDTGASSEETVSDS

SEQ ID NO: 99615 - protein, 99 aa, Setaria italica
  misc_feature (15)..(15): Xaa can be any naturally occurring amino acid
  Transcript Sequence Number=SeqID_33641
  Gene Ontology: Mol. function=oxidoreductase activity, acting on the CH-OH group of donors, NAD or NADP as acceptor; Cellular component =cytoplasm; Biological process=cellular carbohydrate metabolic process
  Homolog annotation: Hit_ID=Q7FAT9; Match level="QueryCoverage=100%, HitCoverage=28%, E-value=3e-42, Identity=78%"; Hit description =Malate dehydrogenase
NALMLKEFAPAVPAXNITCLTRLDHNRALGQIAERLGVHVADVRNVVVWGNHSSTQFPDASHATARTEHGEKPVTELVADEKWLREEFVSTVQQRGAAV

SEQ ID NO: 99616 - protein, 131 aa, Setaria italica
  Transcript Sequence Number=SeqID_33642
MVAVEVEIPKQDARVIDHRLQELVVAARLRIRASARSARRRRRYRLRGRGVPANVRGRKNSTACRRGATGGPHVVVVAASAGSSAGDITGRAWTVRISWEEWVENGCRMCPGALAAATATVARGGLFAPGR

SEQ ID NO: 99617 - protein, 340 aa, Setaria italica
  Transcript Sequence Number=SeqID_33643
  Gene Ontology: Mol. function=sulfotransferase activity
  Homolog annotation: Hit_ID=B6TEY8; Match level="QueryCoverage=99%, HitCoverage=99%, E-value=1e-126, Identity=66%"; Hit description =Flavonol sulfotransferase-like
  Pfam annotation: Domain name=Sulfotransfer_1; Domain location=74-337; Score=242.1; E_value=1.3e-69; Accession=PF00685.19; Description =Sulfotransferase domain
MSSSVQTVPQQEADAQAEETNQQLYQRFTDLVSSLPSSDGLSYLRLYLHGQGWRASQVPMVGAMVAGARFAARPTDVVLASLLKTGTTWTKALLYATVRRREHPPDAADHPFHSLGPHECVQILEYQIYAHGRVPDIGDLPDPRLFATHVPFAALPGSVAGGGCKVVYVCRDPKDTLVSLWHFINKFRAKEGMGLLSAEAAADMFCAGESPFGPYWEHVLGYWRAHLARPDRVLFFRYEEMMRDPAAHVRRLAEFVGLPFGVAGEDDTADAIVRLCAFERMCGLEATKSGRTELGIGAVENSFFFRRGVVGDWVNHLSPETARRIDDITRSKFEGSGLTV

SEQ ID NO: 99618 - protein, 95 aa, Setaria italica
  Transcript Sequence Number=SeqID_33644
KLSDFLPSCHNLLHLLIPLGVLLVSSSCVNEQNCDMLLRYASTGQVIKSNEVQMKTNDHVSNDGFMSSCSGTADRWALGGAYLIFGWLDVVEDMS

SEQ ID NO: 99619 - protein, 76 aa, Setaria italica
  Transcript Sequence Number=SeqID_33645
LDFRPCGLFKPCYFVILHDTLEFLKYQLVAWRVLGLIQPPCKTKLGCRSRNSLPQTSPCVGAFSIVYALFNSCVSM

SEQ ID NO: 99620 - protein, 46 aa, Setaria italica
  Transcript Sequence Number=SeqID_33646
IKMIGQLETFSTCYIISFDEYCILNLKVMMDTWPVSKLTGNQVDEV

SEQ ID NO: 99621 - protein, 217 aa, Setaria italica
  misc_feature (119)..(119): Xaa can be any naturally occurring amino acid
  Transcript Sequence Number=SeqID_33647
PEKKSEDGCRIESSQCNHKDNSSPDGSALMTGAQTKCTSANSKSSDAASASVEKSDADIDDEDDLPFDLSIDSGSLTCVACGILGYPFMAILQPSKEALEGISPVHRERSTLSFEKEKXSNVFPCCPAGGNFGSSFVPNRTSCSVEQSCLATPAEQTNIDPQNVNSHKDISLTENELAGPVQQHSDSSHSCRSENTLHSCSNREKSDNTIPKDSLGP

SEQ ID NO: 99622 - protein, 96 aa, Setaria italica
  Transcript Sequence Number=SeqID_33648
VSPLFPLLPPSPGEDFVDMAVQAQFGGLPGCLPPFGGAGLAEEQMLALLSAAAGNKAYQYNCPAGGVVSAAQSELTCNGGGGVVVLPSRKRAREDE

SEQ ID NO: 99623 - protein, 64 aa, Setaria italica
  Transcript Sequence Number=SeqID_33649
  Gene Ontology: Mol. function=DNA binding
  Homolog annotation: Hit_ID=B6THQ1; Match level="QueryCoverage=96%, HitCoverage=17%, E-value=4e-21, Identity=83%"; Hit description=DNA binding protein
  Pfam annotation: Domain name=Remorin_C; Domain location=2-57; Score= -0.6; E_value=0.0019; Accession=PF03763.5; Description=Remorin, C -terminal region
YSKARAQEKLANRLAATRRIAEEKRANAEAKLNESAARTSEKANYIRRTGHLPSSFFKMPCLCG

SEQ ID NO: 99624 - protein, 65 aa, Setaria italica
  Transcript Sequence Number=SeqID_33650
LVYCCRISGEKQSNNFASSSNFQAGLSTLVGTNQSPLILRNLCSHRYFVIWMIYALTKLGSGGII

SEQ ID NO: 99625 - protein, 88 aa, Setaria italica
  Transcript Sequence Number=SeqID_33651
  Gene Ontology: Mol. function=ATP binding; Cellular component =chloroplast
  Homolog annotation: Hit_ID=Q45YI8; Match level="QueryCoverage=96%, HitCoverage=18%, E-value=6e-41, Identity=90%"; Hit description =Rubisco activase 2
IPLILGIWGGKGQGKTFQTELIFRAMGVEPVIMSAGELESEKAGEPGRLIRDRYRTASQVIQNQGKLSCLMINDLDAGVGRFGKTTQD

SEQ ID NO: 99626 - protein, 91 aa, Setaria italica
  Transcript Sequence Number=SeqID_33652
RRLRLDGLAPPVVVTVARPRPEEAGVTVEQARKVARAAEMEVARARLRSNAQSVVSGSEFAALCADIAGGVEGGRRLARALDESGVVIVLG

SEQ ID NO: 99627 - protein, 83 aa, Setaria italica
  misc_feature (17)..(17): Xaa can be any naturally occurring amino acid
  Transcript Sequence Number=SeqID_33653
  Homolog annotation: Hit_ID=B6TNU5; Match level="QueryCoverage=100%, HitCoverage=53%, E-value=2e-41, Identity=97%"; Hit description=LITAF- domain-containing protein
HCQACGEAAVSTVRSKXSLASVVACMMPFMLGVCFLCPSMDCLWHKYHYCPSCGEKVGEFRKSDPCLVVDATRWSEPSFAVPA

SEQ ID NO: 99628 - protein, 82 aa, Setaria italica
  Transcript Sequence Number=SeqID_33654
  Gene Ontology: Mol. function=phosphoglycolate phosphatase activity; Biological process=metabolic process
  Homolog annotation: Hit_ID=B6TNH8; Match level="QueryCoverage=98%, HitCoverage=31%, E-value=1e-32, Identity=82%"; Hit description=HAD -superfamily hydrolase, subfamily IA, variant 1
NVSDMFDAIVVSSEVGYEKPAPEIFKIALDQIGVDASKAVHVGDDETADKAGANGIGLECWLWGADLKTFSEIRYRILTDDQ

SEQ ID NO: 99629 - protein, 148 aa, Setaria italica
  misc_feature (68)..(68): Xaa can be any naturally occurring amino acid
  Transcript Sequence Number=SeqID_33655
  Gene Ontology: Mol. function=phosphoglycolate phosphatase activity; Cellular component=mitochondrion; Biological process=metabolic process
  Homolog annotation: Hit_ID=B6TNH8; Match level="QueryCoverage=91%, HitCoverage=51%, E-value=3e-65, Identity=88%"; Hit description=HAD -superfamily hydrolase, subfamily IA, variant 1
  Pfam annotation: Domain name=Hydrolase; Domain location=8-146; Score =21.7; E_value=0.00062; Accession=PF00702.18; Description=haloacid dehalogenase-like hydrolase
DRKNAQGDGRPFWRIVVAEATNCTDDDYFEEVYQYYAHGDAWCLPDGADTILRELKDAGVKLAVVSNXFDTRLRKLLKDLNVSDMFDAIVVSSEVGYEKPAPEIFKIALDQIGVDASKAVHVGDDETADKAGANGIGLECWYAVSSPS

SEQ ID NO: 99630 - protein, 77 aa, Setaria italica
  Transcript Sequence Number=SeqID_33656
NVEEHVNVPNYSYNKTKQYKFCLGAIAPQLLNCTHTQQPAHDYRSALKNIYYTILHFCKLKLTREPQLMHQLMHGVN

SEQ ID NO: 99631 - protein, 97 aa, Setaria italica
  Transcript Sequence Number=SeqID_33657
LVTDHFVCLCARFGYLIKEASKVADGRPERLALAAGSGGGREEQEGGEELPAPDVEPGDDRPPPAPARLYSHVSAACAPGVRPVVSPCSSLSALASL

SEQ ID NO: 99632 - protein, 94 aa, Setaria italica
  misc_feature (5)..(5): Xaa can be any naturally occurring amino acid
  Transcript Sequence Number=SeqID_33658
  Gene Ontology: Cellular component=integral to membrane; Biological process=intracellular signaling cascade
  Homolog annotation: Hit_ID=B6TCG9; Match level="QueryCoverage=100%, HitCoverage=19%, E-value=2e-27, Identity=64%"; Hit description =Presenilin
WLSRXPEWTTWIMLVALALYDLVAVLAPRGPLRMLVELASSRDDELPALVYESRPTVGPATSSSSYASAMGSVEMQTMTDSGRAGGSRYDRVEQ

SEQ ID NO: 99633 - protein, 39 aa, Setaria italica
  Transcript Sequence Number=SeqID_33659
NFLSYASLKKMHTDLYAEVSAYGRHMVHYISRPACPMTD

SEQ ID NO: 99634 - protein, 107 aa, Setaria italica
  misc_feature (14)..(14): Xaa can be any naturally occurring amino acid
  Transcript Sequence Number=SeqID_33660
  Gene Ontology: Mol. function=zinc ion binding
  Homolog annotation: Hit_ID=Q53L33; Match level="QueryCoverage=98%, HitCoverage=11%, E-value=4e-31, Identity=61%"; Hit description =Transposon protein, putative, mutator sub-class
QIVTFNDYHTCPPXRRDNRLVTARRIAEKYEKFIMANPTWKFVSMKQTVQEEMFADVSISKLKKAKAMVMQKAFDATKGQYELLYDYQLELLRSNPGSTVIVTKEPG

SEQ ID NO: 99635 - protein, 77 aa, Setaria italica
  Transcript Sequence Number=SeqID_33661
  Subcellular localization annotation: CTP_CleavageSite=9; ConfidenceScore=5.07e-01
PQLLAVVVAATVASARLPVAVFLSIAPAFVIVPWCSAGSSLQNGVRLHQMPKQIHVQREPTQARHGNMEPDTIALFT

SEQ ID NO: 99636 - protein, 248 aa, Setaria italica
  misc_feature (9)..(9): Xaa can be any naturally occurring amino acid
  misc_feature (196)..(196): Xaa can be any naturally occurring amino acid
  Transcript Sequence Number=SeqID_33662
  Gene Ontology: Mol. function=electron carrier activity; Biological process=oxidation reduction
  Homolog annotation: Hit_ID=B6SXS5; Match level="QueryCoverage=100%, HitCoverage=47%, E-value=1e-117, Identity=86%"; Hit description =Cytochrome P450 CYP72A123
VAPFIHGAXEHGKMCFTWFGPMPRVTISDPDLARDVMSNKFGHFEKPKFPALSKLFAEGVANYEGEKWVKHRRILNPAFHLEKLKLMLPAFSACCEELVSRWAQSLGPDGSFELDVDPELQTLTGDVISRTAFGSSYLEGRKIFQLQAEQAERLMSIMQKFAIPGYMSLPTQNNRRMRQIKNEIETILRGLIGKRXMQAMKEGEATKDDLLGLLLESNTRDTYENGQSSLGMTMEDVMEECKLFYFAG

SEQ ID NO: 99637 - protein, 169 aa, Setaria italica
  Transcript Sequence Number=SeqID_33663
KNEKLHFFSLDAHHKGNADAKAHKLQPKSKNKKQVPPLSSSSSLDPKPFPRIRQGHDDVGQIHLQICMVGEGRERLGKQLTSNLARTGRSSPGPSLSSPGRAPSTMDPAGRVGEVAWTRSGLALYHGKRAGVGDGGVSCVARRHPPGATIAGRAARPLGFLLWHHLMTA

SEQ ID NO: 99638 - protein, 242 aa, Setaria italica
  misc_feature (96)..(96): Xaa can be any naturally occurring amino acid
  Transcript Sequence Number=SeqID_33664
  Homolog annotation: Hit_ID=Q25AI8; Match level="QueryCoverage=26%, HitCoverage=8%, E-value=2e-18, Identity=71%"; Hit description =H0702G05.5 protein
RMAAEAEAAAAVAAEEAGGGRPALPGRGFTDTQSHHVAARKEKQLEAMRAALGLNAEDVKKGDVESDVESGELVPGKYAEELDTAGQKDSKDMKDXRRAKKKKGSDKRSQSKSSRKSKYDSDSEQEHDMKTKKKKSSHRDSEDDSGTDYDEKKEKKHSKKTHLGSDDDSETDRKKARRGKNSHHDSDSDTYGDYGKKKTEHAKNNRDERKKIAVKSSRHDSESDTDNEYGKKKTEHDKRTIV

SEQ ID NO: 99639 - protein, 425 aa, Setaria italica
  Transcript Sequence Number=SeqID_33665
  Homolog annotation: Hit_ID=Q7XPE2; Match level="QueryCoverage=70%, HitCoverage=39%, E-value=4e-13, Identity=32%"; Hit description =OSJNBa0060N03.19 protein
AKNNRDERKKIPVKGSRHDSDSDTDSDYGKKKKTEHAKNNRDERKKIPVKSSHHDSDSDTDGDYGKKKTEVEKNNRNEKKKIPVKSSCQGFEDEKPGESRYKDSSHHYSEDGKPIKNKESSRHDSEDEKPRKYEESSRRDLEGEKPRLSKYKGGSHSDYDQKRQKSVKKSNYSSESESDSDSDQGERSKRGKISQQKSEHDRLKSGSRNVDYRTNKSVKNLSHDSDGEKLRSKVLRKDKYSGDSETDSDARVEAKKKLEKSYHHDPKKDKQAQKFKEKKDDYGKNIDKHKRHDSDSESDGYSRDRKRQLNAAVTKKDVPEKRRVASSSESSDYSSSSLSSSESDLSADSYKERKRGQGERRGDELNRQRQKEERKELEKQKQREEERKELEKQKQRDEERMEMEKKRQQEREEERPRDREQQEEA

SEQ ID NO: 99640 - protein, 123 aa, Setaria italica
  misc_feature (25)..(25): Xaa can be any naturally occurring amino acid
  misc_feature (94)..(94): Xaa can be any naturally occurring amino acid
  misc_feature (116)..(116): Xaa can be any naturally occurring amino acid
  misc_feature (122)..(122): Xaa can be any naturally occurring amino acid
  Transcript Sequence Number=SeqID_33666
  Gene Ontology: Mol. function=hydrolase activity; Cellular component =mitochondrion
  Homolog annotation: Hit_ID=B6T675; Match level="QueryCoverage=99%, HitCoverage=48%, E-value=9e-38, Identity=79%"; Hit description =Peroxisomal coenzyme A diphosphatase NUDT7
GALIRRLRLHQAGPSPYDPAPVITXAIDGGEQLFRPRRAAVLVCLFRAAAGELRVILTKRSSSLSTHSGEVSLPGGKAEEGDADDVATALRESXKEEIGLDPALVTVVASLEHFLXSKHLLXV

SEQ ID NO: 99641 - protein, 97 aa, Setaria italica
  Transcript Sequence Number=SeqID_33667
  Subcellular localization annotation: CTP_CleavageSite=74; ConfidenceScore=5.08e-01
TISALSKPNRRGQAQLAFCQLLPSAQQRTHAHRWSGNVSFQSHDTPMLLKPHPPPGLPLPANCWNLALPLRHRRRASRWPWRRGCNGGQHHGRPSCF

SEQ ID NO: 99642 - protein, 50 aa, Setaria italica
  Transcript Sequence Number=SeqID_33668
FFVVVLCAVFDVDSSCSICLMRVSPWWRMRSVSIYSTKLITFNGINISII

SEQ ID NO: 99643 - protein, 88 aa, Setaria italica
  Transcript Sequence Number=SeqID_33669
  Gene Ontology: Mol. function=protein tyrosine kinase activity; Cellular component=plasma membrane; Biological process=protein amino acid phosphorylation
  Homolog annotation: Hit_ID=C0LGI5; Match level="QueryCoverage=96%, HitCoverage=14%, E-value=5e-18, Identity=51%"; Hit description =Leucine-rich repeat receptor-like protein kinase (Fragment)
  Pfam annotation: Domain name=LRR_1; Domain location=21-43; Score =12.7; E_value=1.1; Accession=PF00560.25; Description=Leucine Rich Repeat
  Pfam annotation: Domain name=LRR_1; Domain location=45-67; Score =14.1; E_value=0.6; Accession=PF00560.25; Description=Leucine Rich Repeat
  Pfam module annotation: Pfam domain module=LRR_1::LRR_1; Domain location=21-43::45-67
LDLSSNKLTGPLPAELANCRFLNSLKLAGNQLSGQIPASLARLDRLKSLDLSGNRLDGQIPPQLGANFSKDAFSGNSGLCGRPVSSHC

SEQ ID NO: 99644 - protein, 127 aa, Setaria italica
  Transcript Sequence Number=SeqID_33670
  Gene Ontology: Mol. function=exonuclease activity; Cellular component= intracellular
  Homolog annotation: Hit_ID=B6THB1; Match level="QueryCoverage=91%, HitCoverage=26%, E-value=1e-61, Identity=93%"; Hit description =Histone mRNA exonuclease 1
VDRGVPLGEALLMHDKWLEDKGIKNTNFAIVTWSNWDCRTMLESECRFKRIRKPPYFNRWINLKVPFHEVYGDVRCNLKEAVQLAGLTWEGRAHCGLDDARNTARLLALYCIVYRGLFLSFLSLFNL

SEQ ID NO: 99645 - protein, 230 aa, Setaria italica
  Transcript Sequence Number=SeqID_33671
  Gene Ontology: Mol. function=exonuclease activity; Cellular component= intracellular
  Homolog annotation: Hit_ID=B6THB1; Match level="QueryCoverage=86%, HitCoverage=46%, E-value=1e-105, Identity=90%"; Hit description =Histone mRNA exonuclease 1
MIDRERAEEMQVNNEAPLGCLKPNIEQRGGIEGFPENNEKRNDVVAVEKVWEASPIPTQVLSRPFYRQEFYAWPYIYSDYQMVRQPLPYGFDSQFYQVNRDHGFPIENRVQYLPFKMLPQGHPHDAQLQEFQYFVVIDFEATCDKVNNPFPQEIIEFPSVLVNSATGKLEECFQTYVRPTYHQFLTDFCKELTGIQQIQVSGYSNVVIIIRSLIRNKLSMRWQGVNQFLC

SEQ ID NO: 99646 - protein, 367 aa, Setaria italica
  Transcript Sequence Number=SeqID_33672
  Gene Ontology: Mol. function=exonuclease activity; Cellular component= intracellular
  Homolog annotation: Hit_ID=B6THB1; Match level="QueryCoverage=99%, HitCoverage=86%, E-value=0.0, Identity=90%"; Hit description=Histone mRNA exonuclease 1
  Pfam annotation: Domain name=Exonuc_X-T; Domain location=81-253; Score=92.5; E_value=1.5e-24; Accession=PF00929.16; Description =Exonuclease
  Pfam annotation: Domain name=zf-GRF; Domain location=322-367; Score =17.0; E_value=0.0003; Accession=PF06839.4; Description=GRF zinc finger
  Pfam module annotation: Pfam domain module=Exonuc_X-T::zf-GRF; Domain location=81-253::322-367
SPIPTQVLSRPFYRQEFYAWPYIYSDYQMVRQPLPYGFDSQFYQVNRDHGFPIENRVQYLPFKMLPQGHPHDAQLQEFQYFVVIDFEATCDKVNNPFPQEIIEFPSVLVNSATGKLEECFQTYVRPTYHQFLTDFCKELTGIQQIQVDRGVPLGEALLMHDKWLEDKGIKNTNFAIVTWSNWDCRTMLESECRFKRIRKPPYFNRWINLKVPFHEVYGDVRCNLKEAVQLAGLTWEGRAHCGLDDARNTARLLALMMHRGFKFSITNSLVWQPQPAPQSTTCQLSPDRSPDPVQPQHKPNEMLGSPVQVNPYAASAGKDRAMYCYCGVLSRWSVVRKPGPMQGRFFYGCGNWTATRRAICPYFAWAS

SEQ ID NO: 99647 - protein, 109 aa, Setaria italica
  misc_feature (5)..(5): Xaa can be any naturally occurring amino acid
  Transcript Sequence Number=SeqID_33673
QRTHXFATSVTRPLPTSPPGGHAPKEKLTQRHRNFEKIRRRIQVFLGEFLGFYQSLFDGARKRGGCERAARCGGGSWGVAVVGGGGGRWRRSPRRSLHQPFFPIDSTPP

SEQ ID NO: 99648 - protein, 40 aa, Setaria italica
  Transcript Sequence Number=SeqID_33674
LHAIRVDINIVPKFTRKGHSLVHLFWLSGIAISLPTMLSQ

SEQ ID NO: 99649 - protein, 946 aa, Setaria italica
  Transcript Sequence Number=SeqID_33675
  Gene Ontology: Mol. function=protein kinase activity; Cellular component=plastoglobule; Biological process=protein amino acid phosphorylation
  Homolog annotation: Hit_ID=B9T4T1; Match level="QueryCoverage=75%, HitCoverage=90%, E-value=0.0, Identity=54%"; Hit description =Ubiquinone biosynthesis protein coq-8, putative
  Pfam annotation: Domain name=ABC1; Domain location=368-485; Score =125.1; E_value=2.2e-34; Accession=PF03109.8; Description=ABC1 family
  Pfam annotation: Domain name=APH; Domain location=382-608; Score= -16.0; E_value=0.031; Accession=PF01636.15; Description =Phosphotransferase enzyme family
  Pfam module annotation: Pfam domain module=ABC1::APH; Domain location= 368-485::382-608
KLDAMATLLRPPALHICAVSGAGGGKEKWAPQPQRSWWGGNKPSLPRQPRQSGGNGGRGGGGGGGALDQVLGVLRRDGEFFQATAGAPLRDVFWLRFLEKKQKQPKPVPKPAQQQQMLQEEEVEVEELPREAPAFPPPAYPPGLSCVELMAADFQALKVYAGSARHSLAQRFLRSKEQSKSQQQPKPKPQEQQKEQQQILQPPAFPPPSYPPGLSCMELMMADLEALKTYINYYSTILTTPLPQHYDPDLLAQYFASRPHVLAFRTIQILFAFVSAVVKMQISKRSQLTAEATYSSGNSSNGFDASQYMVGQLLKEMFLDLGPTFVKVGQSLSTRPDIIGSEFCEALAELHERVPPFPREDAMKIIEGEFECPVSHIFSYISDEPVAAASFGQVYQGRTVDGALVAIKVQRPNLLPSVLRDIYILRLGLAFIRKVANRRSNISLYADELGRGFVGELDYNIEAANATKFLEVHSRYPFMLVPKVLKQLTRKRVLTMEWVAGENPKELLSLTKGVSEKVPEASEKQKLEAKSRLLDLVNKGVEASLVQLLETGLLHADPHPGNLRYTPEGRVGFLDFGLLCMMERKHQRAMLASIIHIVNGDWSSLVYDLTEMDVVPPNTILRRVTMELEDALGEVTFEEGIPEIKFSKVLGKIWSVAFKYHFRMPPYYTLVLRSLASLEGLAVAADETFKTFQAAYPYVVRKLLSNNSLATRRLLNQAIFNKKKEFQWQKISAFLKSASARSNFKYIGGALPVPDTKDVNVDRLVEISGSFSLDRATATPERALHTANLCVRLLLSKDSAVIRRLIMTANAKSLARDLISRDALMFRVLLSKVIADVVCQWMLNVTGLKRVAENDGHLVLSEESSTMVALQAVVRDRRMQVIFSKFVRELREEPVLMVRVSWNMFVILVTSAAVGLHRFMVFLSEKYLPTPPTPVPPPRQVQIQTL

SEQ ID NO: 99650 - protein, 76 aa, Setaria italica
  misc_feature (52)..(52): Xaa can be any naturally occurring amino acid
  Transcript Sequence Number=SeqID_33676
WKNIHHSLFKFDQIMREIAMENRQNGADECKEPEESDEAWEARQIEDTFAIXAESLHELRILQMGGNSMMNKGVYA

SEQ ID NO: 99651 - protein, 149 aa, Setaria italica
  misc_feature (44)..(44): Xaa can be any naturally occurring amino acid
  misc_feature (55)..(55): Xaa can be any naturally occurring amino acid
  misc_feature (72)..(72): Xaa can be any naturally occurring amino acid
  misc_feature (100)..(100): Xaa can be any naturally occurring amino acid
  Transcript Sequence Number=SeqID_33677
  Gene Ontology: Mol. function=protein binding
  Homolog annotation: Hit_ID=Q6Z1B8; Match level="QueryCoverage=81%, HitCoverage=34%, E-value=7e-21, Identity=48%"; Hit description =Putative N7 protein
HFLWNSVFRHCKASFVFKCPLLEEIECSHHNMPAELFRYFSHVXPQLKCLRIHMXLFKFDQIMREIAMENRXNGADECKEPEESDEAWEARQIEDTFAIXAESLHELRILQMGGNSMMNKGVTKRSIPTKGLDPPRGWIPAVDLDIDMV

SEQ ID NO: 99652 - protein, 61 aa, Setaria italica
  Transcript Sequence Number=SeqID_33678
  Gene Ontology: Mol. function=receptor activity
  Homolog annotation: Hit_ID=Q6H663; Match level="QueryCoverage=100%, HitCoverage=20%, E-value=5e-11, Identity=55%"; Hit description =Receptor-like protein kinase-like
QLAGTCGAALAADLYLVQCSVRYWANSNYYRSSQDNSGDDFGRTLAIIIGIMAGLALLVVF

SEQ ID NO: 99653 - protein, 72 aa, Setaria italica
  Transcript Sequence Number=SeqID_33679
  Subcellular localization annotation: CTP_CleavageSite=64; ConfidenceScore=5.70e-01
ADQPISQHSYSLPVFPPLVSRATTTKQTSHFFVPSRRHPFLPAPKQLPLPLLLFHPSASRPSVPASPAPYRP

SEQ ID NO: 99654 - protein, 82 aa, Setaria italica
  Transcript Sequence Number=SeqID_33680
MEVREHSSALSSREDRAIIFDSPEDRSLRASCIVHRLGTPDVDAAGHRMVRRAPSMSPSSTPRWLVGVDVGRHKTYAICNSG

SEQ ID NO: 99655 - protein, 118 aa, Setaria italica
  misc_feature (71)..(71): Xaa can be any naturally occurring amino acid
  misc_feature (87)..(87): Xaa can be any naturally occurring amino acid
  Transcript Sequence Number=SeqID_33681
  Gene Ontology: Mol. function=nucleotide binding; Biological process =defense response
  Homolog annotation: Hit_ID=Q84KB9; Match level="QueryCoverage=80%, HitCoverage=9%, E-value=6e-10, Identity=35%"; Hit description=NBS -LRR disease resistance protein homologue (Fragment)
ASEVVEAAPILTDFEHSVKQIEGELSVMLAFIGQVRAQKAADRAFDAWLDQVRDVAHELEDIIDEYAYLTXQAANTGSFFKRKFHSXRNFAAWQKLPTRISQVEARIRRLAEMRNQYG

SEQ ID NO: 99656 - protein, 172 aa, Setaria italica
  misc_feature (77)..(77): Xaa can be any naturally occurring amino acid
  Transcript Sequence Number=SeqID_33682
  Homolog annotation: Hit_ID=Q7XPM1; Match level="QueryCoverage=93%, HitCoverage=14%, E-value=3e-09, Identity=31%"; Hit description =OSJNBa0085I10.5 protein
NFWCKEEDKVEALNHVTYQVHSQQSNYSVHAEHPEHTIHVREAHNESLNHAVCKFVGHVGLIKETTAVRHTNRGKRXAIDPESVTVEKRQAPASNQTTQDVQKYSSRSIICAEYATVPYQDQVIYLQESQIDPVNHGDNVHMQPSDRISARDGNCITGHSVSHEAIRSKEDR

SEQ ID NO: 99657 - protein, 89 aa, Setaria italica
  misc_feature (83)..(83): Xaa can be any naturally occurring amino acid
  Transcript Sequence Number=SeqID_33683
  Subcellular localization annotation: CTP_CleavageSite=58; ConfidenceScore=5.10e-01
SSSVLTICSGKLATDQHLTVDSNKIGFTTITKLKTIVPPRKTVTKGSKSGQILLVGCDASATRQSGIWTAPSFPEPFHFKKKXSCNFSF

SEQ ID NO: 99658 - protein, 80 aa, Setaria italica
  Transcript Sequence Number=SeqID_33684
  Gene Ontology: Mol. function=ATPase activity, coupled to transmembrane movement of substances; Cellular component=integral to membrane; Biological process=transport
  Homolog annotation: Hit_ID=Q7FMW1; Match level="QueryCoverage=92%, HitCoverage=5%, E-value=1e-24, Identity=77%"; Hit description=MRP -like ABC transporter
FRAPMNFFDSTPSSRILNRVSTDQSTVDIDIPYRVAGLIFALIQLLSIIFIMSQIAWPIFFLFIIIISLSTCYQVHLHIL

SEQ ID NO: 99659 - protein, 344 aa, Setaria italica
  misc_feature (21)..(21): Xaa can be any naturally occurring amino acid
  Transcript Sequence Number=SeqID_33685
  Homolog annotation: Hit_ID=B6UA78; Match level="QueryCoverage=95%, HitCoverage=67%, E-value=6e-15, Identity=26%"; Hit description=F-box domain containing protein
  Pfam annotation: Domain name=FBD; Domain location=235-286; Score =10.4; E_value=0.009; Accession=PF08387.2; Description=FBD
YVPTYPVREDRLLARLSVRGXLNLTAAANAMVATLEVIHLHSVFLTDAALRRVVAACPRLRELDLRYCRRLRRIDFSAVGVPNLRTFTLVDCSRTTEVRVPMAPRLRSFRLSGAFLSSNILTGAGGSLEHLYLCSGGPENGLPPTNLPISVPHLSNLSVLTLCSIALQYISAFTAKAVVESKLQSLRELNFLMFGMANSNLADIYSFLKTCSCPQLERLFVQLPTNVRDSFTENFLEVAEEEPPKGGLENLWLAKMTNFKGHRNEMQLVEFLLRKSSCLKKLFLIAPTEDHPQGLRKIQSDVLPSFLKTEIMHLERASANTQIIFSEPDGPQIQPLHSEVFVRF

SEQ ID NO: 99660 - protein, 82 aa, Setaria italica
  Transcript Sequence Number=SeqID_33686
  Subcellular localization annotation: CTP_CleavageSite=29; ConfidenceScore=5.03e-01
GCATFCPKVDDIGGVSMFTGLSTGKEVKRCSSASGDFTCCKKPLFRRSRPDGVVEAKWFNSGMDHNMELEGVVSVLVAEEGW

SEQ ID NO: 99661 - protein, 82 aa, Setaria italica
  Transcript Sequence Number=SeqID_33687
DHGGDERDSDEDCVLRPDPVIMADAPEFELNDHGGDERDSDEEGLHLAAAVGTADIEAPKMNSGDQNGGEDPRSQVGEKKKK

SEQ ID NO: 99662 - protein, 73 aa, Setaria italica
  Transcript Sequence Number=SeqID_33688
  Subcellular localization annotation: CTP_CleavageSite=33; ConfidenceScore=5.11e-01
LEYTSLVSFPAFVNSIPSWRVKRGMSLGFIFLSVNVVVDTSVMWRLTFPICYAILRDLYAGMGSLALAVQARI

SEQ ID NO: 99663 - protein, 51 aa, Setaria italica
  Transcript Sequence Number=SeqID_33689
MRLESSGSVNINLLSTASERIGQNPIFNWIKLGNMIISCMCPSQVGKRRRP

SEQ ID NO: 99664 - protein, 313 aa, Setaria italica
  Transcript Sequence Number=SeqID_33690
  Gene Ontology: Mol. function=nucleic acid binding
  Homolog annotation: Hit_ID=B6TKU0; Match level="QueryCoverage=100%, HitCoverage=86%, E-value=1e-123, Identity=72%"; Hit description =Growth inhibition and differentiation-related protein 88
  Pfam annotation: Domain name=RNA_bind; Domain location=167-247; Score= -10.5; E_value=0.075; Accession=PF08675.3; Description=RNA binding domain
ALGDLAGLHASRGDTLRADELRARAIALRSRAAAPGALGDQEPTEKCSSQEGAMGSKDSEVSANTEQNNEAEEDDWEAIADSGALDGTLVHSLEQEARVPSCSSSEKSSSTSSGPKRRGRGSFLYDKSVLYSDQCGSERDLDDKESSPQSGSKDHVNEQENSAVTAAAQLGTRHVLVLYDFSPSTRTIDLERIFEKFGDHGVAIRWVNDTSALAVFRTPSAATEAQSCIPPRYKVRSMKENDDLLTKIDGRDLEPPKPRPKTSARTAQRLIAHGMGLKQFTNFGSDELKKQEEERKNRIAARQAMRDEAWGSD

SEQ ID NO: 99665 - protein, 84 aa, Setaria italica
  Transcript Sequence Number=SeqID_33691
  Gene Ontology: Mol. function=cysteine-type peptidase activity; Biological process=ubiquitin-dependent protein catabolic process
  Homolog annotation: Hit_ID=Q0ILU8; Match level="QueryCoverage=100%, HitCoverage=9%, E-value=2e-33, Identity=83%"; Hit description =Ubiquitin carboxyl-terminal hydrolase
VAADLFTKARDWHIDSAKSAGNTSLTEDGGSVNIYPVMLRVSVTRDNALTVKIGKKDNSAENFKRANKILTADSEPVHIWDFSG

SEQ ID NO: 99666 - protein, 128 aa, Setaria italica
  Transcript Sequence Number=SeqID_33692
  Gene Ontology: Mol. function=ATPase activity, coupled to transmembrane movement of substances; Cellular component=integral to membrane; Biological process=transport
  Homolog annotation: Hit_ID=Q6YUU5; Match level="QueryCoverage=96%, HitCoverage=60%, E-value=2e-51, Identity=72%"; Hit description =Putative multidrug resistance protein
  Pfam annotation: Domain name=ABC_tran; Domain location=1-88; Score =4.3; E_value=1.9e-06; Accession=PF00005.19; Description=ABC transporter
KDGYNTSCGERGFQLSGGQKQRVAIARAILKNPAILLLDEATSALDSASEKVVQKALDRVMVGRTSVVVAHRLSTVQNCDKIAVLEGGRVVEDGTHASLMGKGRSGMYFGLVSLQQGATGTEIFASQE

SEQ ID NO: 99667 - protein, 204 aa, Setaria italica
  misc_feature (179)..(179): Xaa can be any naturally occurring amino acid
  Transcript Sequence Number=SeqID_33693
  Gene Ontology: Mol. function=ATP-dependent helicase activity; Cellular component=intracellular
  Homolog annotation: Hit_ID=B9S326; Match level="QueryCoverage=100%, HitCoverage=16%, E-value=7e-76, Identity=64%"; Hit description=ATP -dependent RNA helicase, putative
  Pfam annotation: Domain name=Ank; Domain location=21-53; Score=19.0; E_value=0.02; Accession=PF00023.22; Description=Ankyrin repeat
  Pfam annotation: Domain name=Helicase_C; Domain location=148-204; Score=-3.3; E_value=0.089; Accession=PF00271.23; Description =Helicase conserved C-terminal domain
  Pfam module annotation: Pfam domain module=Ank::Helicase_C; Domain location=21-53::148-204
LRSLISAEQNPEIYNYQHSETGVTPLMVFAAKGQLGDVCMLLSFGVDCSAQDHDGKSALDWAQQEKQQEVYEVIKKHMECSTAKSTEDNELLNKYLATINPEHIDTVLIERLLGKICVDSNEGAILVFLPGWEDINQTRERLLASPFLRDSSRFLVLSLHSMIPSLEQKKVFKRPPAGXRKIILSTNIAETAVTIDDVVFVIDS

SEQ ID NO: 99668 - protein, 188 aa, Setaria italica
  Transcript Sequence Number=SeqID_33694
MNLHQDMEREQMRMAILKQEQIFRQQVHELHRLYHVQKQLMQQMPTTALPNRAPVIADVKPKPQLDIWHSEKATNPQQFISFSSYKAHAPSPAPAPAPSEECNLELTLATGPSSSNSCNAERQQGKRLKSSSNSDSGTTAVSSTSTDSELAQFREVDVTAARFPGESRRMDQMGQGPWMYQCLSLKTA

SEQ ID NO: 99669 - protein, 47 aa, Setaria italica
  Transcript Sequence Number=SeqID_33695
RRRHMVRLNRLSLGGGSARPRHTARSRNRRPQQARAQPSGGDPPPAA

SEQ ID NO: 99670 - protein, 46 aa, Setaria italica
  Transcript Sequence Number=SeqID_33696
MGLQGDKATHDFLSLYSAAKDSALPLLPPESKPPPPSHQGFFLKTH

SEQ ID NO: 99671 - protein, 71 aa, Setaria italica
  Transcript Sequence Number=SeqID_33697
SNGLRASRDASAGTSHVEALDGDKNLISTKRSCCDANKFSTGADVGDGKCKLNLAASIQKGLQVIESQPKQ

SEQ ID NO: 99672 - protein, 145 aa, Setaria italica
  Transcript Sequence Number=SeqID_33698
  Gene Ontology: Cellular component=cytoskeleton; Biological process =phagocytosis
  Homolog annotation: Hit_ID=Q2R485; Match level="QueryCoverage=81%, HitCoverage=41%, E-value=1e-64, Identity=97%"; Hit description =Phagocytosis and cell motility protein ELMO1, putative, expressed
  Pfam annotation: Domain name=ELMO_CED12; Domain location=13-144; Score=143.5; E_value=6.6e-40; Accession=PF04727.5; Description =ELMOCED-12 family
CNRNLQQPSNKEERLQRLKHRMKVYFDPSRRDHQEALKALWHATYPDQELQGLISEQWKDMGWQGRDPSTDFRGAGFISLENLLFFAKTFSASFQRLLKKQCGNRATWEYPFAVAGVNITFMIMQMLEYYQVQNKKNQKKTNLSN

SEQ ID NO: 99673 - protein, 74 aa, Setaria italica
  misc_feature (69)..(69): Xaa can be any naturally occurring amino acid
  Transcript Sequence Number=SeqID_33699
  Gene Ontology: Cellular component=cytoskeleton; Biological process =phagocytosis
  Homolog annotation: Hit_ID=Q2R485; Match level="QueryCoverage=97%, HitCoverage=25%, E-value=2e-35, Identity=98%"; Hit description =Phagocytosis and cell motility protein ELMO1, putative, expressed
  Pfam annotation: Domain name=ELMO_CED12; Domain location=3-74; Score=- 18.1; E_value=0.0074; Accession=PF04727.5; Description=ELMOCED-12 family
LLQEALKALWHATYPDQELQGLISEQWKDMGWQGRDPSTDFRGAGFISLENLLFFAKTFSASFQRLLKXQCGNR

SEQ ID NO: 99674 - protein, 233 aa, Setaria italica
  Transcript Sequence Number=SeqID_33700
  Gene Ontology: Cellular component=cytoskeleton; Biological process =phagocytosis
  Homolog annotation: Hit_ID=Q2R485; Match level="QueryCoverage=100%, HitCoverage=81%, E-value=1e-135, Identity=97%"; Hit description =Phagocytosis and cell motility protein ELMO1, putative, expressed
  Pfam annotation: Domain name=ELMO_CED12; Domain location=35-205; Score=291.2; E_value=2.3e-84; Accession=PF04727.5; Description =ELMOCED-12 family
CGSPRWIGRSLSCVCIKRKGAYERICMNLTPVQEERLQRLKHRMKVYFDPSRRDHQEALKALWHATYPDQELQGLISEQWKDMGWQGRDPSTDFRGAGFISLENLLFFAKTFSASFQRLLKKQCGNRATWEYPFAVAGVNITFMIMQMLDLQSTKPRTFVRAIFIQMLSEDEWAFDLLYCVAFVVMDKQWLDKNASYMDFNEVLKSTRTQLERELMLDDVMRIEDMPSYSLLC

SEQ ID NO: 99675 - protein, 238 aa, Setaria italica
  misc_feature (14)..(14): Xaa can be any naturally occurring amino acid
  Transcript Sequence Number=SeqID_33701
  Gene Ontology: Mol. function=nucleotide binding; Biological process =defense response
  Homolog annotation: Hit_ID=B9V0H2; Match level="QueryCoverage=95%, HitCoverage=15%, E-value=1e-30, Identity=38%"; Hit description=NBS -LRR disease resistance protein family-1
  Pfam annotation: Domain name=LRR_1; Domain location=150-171; Score =14.2; E_value=0.57; Accession=PF00560.25; Description=Leucine Rich Repeat
  Pfam annotation: Domain name=LRR_1; Domain location=173-194; Score =5.6; E_value=25; Accession=PF00560.25; Description=Leucine Rich Repeat
  Pfam annotation: Domain name=LRR_1; Domain location=196-217; Score =12.0; E_value=1.5; Accession=PF00560.25; Description=Leucine Rich Repeat
  Pfam module annotation: Pfam domain module=LRR_1::LRR_1::LRR_1; Domain location=150-171::173-194::196-217
SIFPKNHDIDHDCXLIQQWIALGFIQDTNGQQPLQKIGREYVNEFLGMSFLTNLTPTVPASRSFEPTLRLRMHDMVHDLARHVAGDELSCTNGVANSTTKGGKLICHYQLLMNSNESPSSKSLPPKVRAMHFRECNKLHLPKQAFSHALFLRVLDLSGCHVSELPGSVCKLKLLRYLDASNLPIPNFPKSLNRLLNLQTLILSNTSLKALPTNVGCLQKLQYFDLSGCVNLHEPSHLP

SEQ ID NO: 99676 - protein, 185 aa, Setaria italica
  Transcript Sequence Number=SeqID_33702
  Gene Ontology: Cellular component=mitochondrion
  Homolog annotation: Hit_ID=B9T6B6; Match level="QueryCoverage=97%, HitCoverage=26%, E-value=1e-29, Identity=38%"; Hit description =Pentatricopeptide repeat-containing protein, putative
TGNEKLDPIKNNATLFNMVLESCVNFKCIIKAQKIMELMSLVGVVADVNTVVIASRVFEMVGQRDELIQMKRSIDSLTSLPFLQYYQHFYDSLLSLHFKYNDMDAAAKFLINLHQQRKPSVFFPNGLQKQGIIQIGSGNLKTGYRIMFDPGKVDRSFVLGTESQFGLVVLTNGNLLHTEKALAKL

SEQ ID NO: 99677 - protein, 55 aa, Setaria italica
  Transcript Sequence Number=SeqID_33703
PLMYFIMSMFYSKLIVGSSLTHLALVIEWLTGFLLFYLHQLRQTLFEKQDAYIYC

SEQ ID NO: 99678 - protein, 108 aa, Setaria italica
  Transcript Sequence Number=SeqID_33704
  Gene Ontology: Mol. function=zinc ion binding
  Homolog annotation: Hit_ID=B6SKV4; Match level="QueryCoverage=86%, HitCoverage=12%, E-value=3e-33, Identity=75%"; Hit description =CONSTANS interacting protein 6
MPNLALADIACQHIHQAKLFQKLADDARKEVDSYRHIVRAKTQKLEEEYATKLAKLGFQETEEKRRKKMEELKMLENSHYDYHKMKLRMQTEIQGLLERMEATKKMWV

SEQ ID NO: 99679 - protein, 573 aa, Setaria italica
  Transcript Sequence Number=SeqID_33705
  Gene Ontology: Mol. function=zinc ion binding
  Homolog annotation: Hit_ID=B6SKV4; Match level="QueryCoverage=95%, HitCoverage=74%, E-value=0.0, Identity=86%"; Hit description =CONSTANS interacting protein 6
  Pfam annotation: Domain name=DUF1423; Domain location=115-573; Score =824.2; E_value=8.3e-245; Accession=PF07227.3; Description=Protein of unknown function (DUF1423)
  Pfam annotation: Domain name=PHD; Domain location=266-328; Score =12.2; E_value=0.0012; Accession=PF00628.21; Description=PHD-finger
  Pfam module annotation: Pfam domain module=DUF1423::PHD; Domain location=115-573::266-328
  Subcellular localization annotation: CTP_CleavageSite=46; ConfidenceScore=5.01e-01
LRRHVVGVAAAAPPPRRTYSANTGRTRSINSDDMSYSYSVFSHNPSCSLTHNSTDIYAAGEGTNGSVHSRFNFRPMGDGSVAFATAPLKEGTSSFFPTELPARMVAPAAALSAGGSFDGSRGGMHSSRPDRILREIVSDSVASMAQVLQDFPSETLEVLRETVRNMIDAPERRDELSSLQRKLERRSDLTAETLGRANKTQLEILVAIKTGMAVFVTGKGRVSSSELVEMFLLTRCRNLNCKSALPVDDCECKICSTKKGFCSACMCPVCQKFDCAANTCSWVGCDVCSHWCHAACALERNLIRPGPTLKGTMGTTEMQFQCLGCNHASEMFGFVKEVFNCCAENWSPETQMKELDFVRKIFAASEDFEGKGLHAKAEEVLSMLAKKLITPSDATSSMLQFFKYGVTDYSVTGSKSKGILAAQTCKSTDMLHLQTPTITPPKSSFNFKPSTSILDTQLEALKASPKSLPIENHFSSASKDDDASSLETIVKCKEAEAKLFQKLADDARKEVDSYRHIVRAKTQKLEEEYATKLAKLGFQETEEKRRKKMEELKMLENSHYDYHRYQQEAADNC

SEQ ID NO: 99680 - protein, 81 aa, Setaria italica
  Transcript Sequence Number=SeqID_33706
  Gene Ontology: Mol. function=protein binding; Cellular component =nucleus; Biological process=regulation of transcription, DNA -dependent
  Homolog annotation: Hit_ID=Q8H2X8; Match level="QueryCoverage=100%, HitCoverage=13%, E-value=4e-26, Identity=76%"; Hit description =Protein SHORT-ROOT 1
LESFLEAAAASPEPQRFHILDLSNTFCTQWPTLLEALATRSADDTPHLSITTVVSAAPSAPTAAVQRVMREIGQRMEKFAR

SEQ ID NO: 99681 - protein, 120 aa, Setaria italica
  Transcript Sequence Number=SeqID_33707
  Gene Ontology: Mol. function=protein tyrosine kinase activity; Cellular component=plasma membrane; Biological process=protein amino acid phosphorylation
  Homolog annotation: Hit_ID=B9S8U2; Match level="QueryCoverage=85%, HitCoverage=15%, E-value=2e-32, Identity=66%"; Hit description =Leucine rich repeat receptor kinase, putative
NLPTFAFAGIEYLHSTRPGKPALVHQSISADKVLLDYTYRPLISGCGLHKLLVDDLVFSTLKASAAMGYLAPEYTTVGRLSEKSDVYAFGVIVLQVLTGRRKVATATAMQLPGDVGELAE

SEQ ID NO: 99682 - protein, 147 aa, Setaria italica
  Transcript Sequence Number=SeqID_33708
  Gene Ontology: Mol. function=nucleic acid binding
  Homolog annotation: Hit_ID=B9RQ14; Match level="QueryCoverage=65%, HitCoverage=44%, E-value=4e-25, Identity=58%"; Hit description =Nucleic acid binding protein, putative
  Pfam annotation: Domain name=RRM_1; Domain location=58-126; Score =34.0; E_value=5.8e-07; Accession=PF00076.14; Description=RNA recognition motif. (a.k.a. RRM, RBD, o
LVIPFPLVNYTIYSYAVNPSVLFFCVSSFIIEVIGPIDYFWSRGASMPSLPKDATSTIYVDGLPTNTTRREVAHIFRQYMGYREVRLVNKGSSRHLICFVDFATPAHAFLAMRTLQGYKFDEQDHHSRNLNLQFSHSPRMVGSHGRC

SEQ ID NO: 99683 - protein, 39 aa, Setaria italica
  Transcript Sequence Number=SeqID_33709
DKFKIFKVEVENHHSLRSDRGGVLRSTYPIWPSSWTFCK

SEQ ID NO: 99684 - protein, 65 aa, Setaria italica
  Transcript Sequence Number=SeqID_33710
SHLSISLEQPVWGRTPCMIAESGALYFKLLWQAKLEISTHCSPLNGLLHPNGHRITKNKSTCKRF

SEQ ID NO: 99685 - protein, 70 aa, Setaria italica
  Transcript Sequence Number=SeqID_33711
SIALFYHCLSTSLSYLGDLSASYRILWFSRFNLQIVSLLWEYCKWDMNARPKILTTNLCELRMSLNEVYS

SEQ ID NO: 99686 - protein, 75 aa, Setaria italica
  Transcript Sequence Number=SeqID_33712
WRLIEIRPLYGVPEAQSVVASLASDRNVWDAVLKNEKVMEFYKTHQTTLVQTFPEEAATDAIIPSMPGHVVQAFT

SEQ ID NO: 99687 - protein, 56 aa, Setaria italica
  Transcript Sequence Number=SeqID_33713
LVIFCDTALVQTFPEEAATVESPEKFEDATSENAPTGSPFADFVDKAKKTMMDVVD

SEQ ID NO: 99688 - protein, 93 aa, Setaria italica
  Transcript Sequence Number=SeqID_33714
TAPAAASGAEAAPLVSSASGAEVPPAAAQWAASWELDDWEFADWRDDAASVVVAEREAAAAAAKPRLVFAPPSREEAEEATTELRDAIERAYF

SEQ ID NO: 99689 - protein, 54 aa, Setaria italica
  Transcript Sequence Number=SeqID_33715
PGLVASPRGSPGWKKWVILSTTSIIVFFQDLLHPPGEAQAGAGSSAEKGPSLPK

SEQ ID NO: 99690 - protein, 104 aa, Setaria italica
  Transcript Sequence Number=SeqID_33716
PSPHKIYFSRAYFNESPVEVVKEQDKELNKLATDAIIPSMPGHVVQAFTLLKSSPEAQVCSCIIFLMLCLIFFSVVAMTPVNRLENQSFDTFIGITSNKVTCHQ

SEQ ID NO: 99691 - protein, 88 aa, Setaria italica
  Transcript Sequence Number=SeqID_33717
  Gene Ontology: Mol. function=transferase activity, transferring groups other than amino-acyl groups
  Homolog annotation: Hit_ID=B9R7Y9; Match level="QueryCoverage=85%, HitCoverage=15%, E-value=4e-15, Identity=56%"; Hit description =Taxadien-5-alpha-ol O-acetyltransferase, putative
MERESAPATAELEIPGECQYSGEPAVVRPCQPTPRHTLYLSNLDDQRFLRFSIKYLYVFAAPAAVPTDALRAALARVLVDYYPLAGRP

SEQ ID NO: 99692 - protein, 91 aa, Setaria italica
  Transcript Sequence Number=SeqID_33718
  Homolog annotation: Hit_ID=Q2RB97; Match level="QueryCoverage=72%, HitCoverage=28%, E-value=8e-12, Identity=56%"; Hit description =Harpin-induced protein 1 containing protein, expressed
  Subcellular localization annotation: CTP_CleavageSite=67; ConfidenceScore=5.51e-01
PVTELLSVNATGVLPGVVPLPTVSVQLNVTFLLVVRVRNPNPAAFRHGPATTSLYYRGAAVGYGEVPAGTVPSRGAATVRMNMTVQADRVV

SEQ ID NO: 99693 - protein, 108 aa, Setaria italica
  Transcript Sequence Number=SeqID_33719
DAACGRATGERAVAWHRKISAPRWSRRRQQDEERVERTNSSEVDGVLRFGGRRRVRRREADSGRRDTSFDTVTARAAEEVGRRRRTDGGVAAPPRREGEDDGCWMGQL

SEQ ID NO: 99694 - protein, 55 aa, Setaria italica
  Transcript Sequence Number=SeqID_33720
CPQLCCKSVSAAIRSRGCDLLKDLLQADADDVRSCAAKVIGTLSLVIIIFIVFIC

SEQ ID NO: 99695 - protein, 158 aa, Setaria italica
  Transcript Sequence Number=SeqID_33721
  Gene Ontology: Mol. function=binding; Cellular component=cytoplasm
  Homolog annotation: Hit_ID=Q53K35; Match level="QueryCoverage=89%, HitCoverage=5%, E-value=6e-75, Identity=95%"; Hit description=HEAT repeat, putative
  Pfam annotation: Domain name=HEAT; Domain location=104-140; Score =32.6; E_value=1.6e-06; Accession=PF02985.14; Description=HEAT repeat
  Pfam annotation: Domain name=HEAT; Domain location=24-61; Score=5.6; E_value=10; Accession=PF02985.14; Description=HEAT repeat
  Pfam annotation: Domain name=HEAT; Domain location=63-99; Score=4.3; E_value=14; Accession=PF02985.14; Description=HEAT repeat
  Pfam module annotation: Pfam domain module=HEAT::HEAT::HEAT; Domain location=104-140::24-61::63-99
VDPIPEVRAVASRALGSLISGMGEEIFPDLVPWLLDTLKSDSSNVERSGAAQGLSEVLAALGQDYFDRILPDIIRNCSHQKASVRDGHLTLFRYLPRSLGGVFQNYLQAVLPAILDGLADENESVRDAALSAGHVFVEHYAAFVPLPSCLSFLVLICR

SEQ ID NO: 99696 - protein, 1448 aa, Setaria italica
  misc_feature (78)..(78): Xaa can be any naturally occurring amino acid
  Transcript Sequence Number=SeqID_33722
  Gene Ontology: Mol. function=binding; Cellular component=cytoplasm; Biological process=regulation of translation
  Homolog annotation: Hit_ID=Q53K35; Match level="QueryCoverage=98%, HitCoverage=55%, E-value=0.0, Identity=83%"; Hit description=HEAT repeat, putative
  Pfam annotation: Domain name=Adaptin_N; Domain location=485-1166; Score=-153.9; E_value=0.0057; Accession=PF01602.12; Description =Adaptin N terminal region
  Pfam annotation: Domain name=Arm; Domain location=1126-1164; Score =4.9; E_value=2.9; Accession=PF00514.15; Description=Armadillobeta -catenin-like repeat
  Pfam annotation: Domain name=Arm; Domain location=115-151; Score=2.9; E_value=5.3; Accession=PF00514.15; Description=Armadillobeta-catenin -like repeat
  Pfam annotation: Domain name=Arm; Domain location=1202-1242; Score =5.8; E_value=2.3; Accession=PF00514.15; Description=Armadillobeta -catenin-like repeat
  Pfam annotation: Domain name=Arm; Domain location=1279-1323; Score =8.3; E_value=1.1; Accession=PF00514.15; Description=Armadillobeta -catenin-like repeat
  Pfam annotation: Domain name=Arm; Domain location=310-350; Score=0.6; E_value=10; Accession=PF00514.15; Description=Armadillobeta-catenin -like repeat
  Pfam annotation: Domain name=HEAT; Domain location=1046-1082; Score =16.9; E_value=0.083; Accession=PF02985.14; Description=HEAT repeat
  Pfam annotation: Domain name=HEAT; Domain location=1130-1166; Score =26.7; E_value=9.7e-05; Accession=PF02985.14; Description=HEAT repeat
  Pfam annotation: Domain name=HEAT; Domain location=1167-1202; Score =13.8; E_value=0.71; Accession=PF02985.14; Description=HEAT repeat
  Pfam annotation: Domain name=HEAT; Domain location=117-153; Score =1.8; E_value=29; Accession=PF02985.14; Description=HEAT repeat
  Pfam annotation: Domain name=HEAT; Domain location=1208-1244; Score =11.5; E_value=1.9; Accession=PF02985.14; Description=HEAT repeat
  Pfam annotation: Domain name=HEAT; Domain location=1246-1282; Score =13.0; E_value=1.3; Accession=PF02985.14; Description=HEAT repeat
  Pfam annotation: Domain name=HEAT; Domain location=1290-1325; Score =7.9; E_value=5.3; Accession=PF02985.14; Description=HEAT repeat
  Pfam annotation: Domain name=HEAT; Domain location=1330-1365; Score =20.1; E_value=0.0092; Accession=PF02985.14; Description=HEAT repeat
  Pfam annotation: Domain name=HEAT; Domain location=1370-1406; Score =5.6; E_value=10; Accession=PF02985.14; Description=HEAT repeat
  Pfam annotation: Domain name=HEAT; Domain location=238-273; Score =12.2; E_value=1.6; Accession=PF02985.14; Description=HEAT repeat
  Pfam annotation: Domain name=HEAT; Domain location=276-311; Score =20.6; E_value=0.0067; Accession=PF02985.14; Description=HEAT repeat
  Pfam annotation: Domain name=HEAT; Domain location=31-68; Score=3.8; E_value=17; Accession=PF02985.14; Description=HEAT repeat
  Pfam annotation: Domain name=HEAT; Domain location=316-352; Score =20.9; E_value=0.0053; Accession=PF02985.14; Description=HEAT repeat
  Pfam annotation: Domain name=HEAT; Domain location=354-390; Score =2.2; E_value=26; Accession=PF02985.14; Description=HEAT repeat
  Pfam annotation: Domain name=HEAT; Domain location=436-472; Score =24.2; E_value=0.00054; Accession=PF02985.14; Description=HEAT repeat
  Pfam annotation: Domain name=HEAT; Domain location=474-511; Score =5.6; E_value=10; Accession=PF02985.14; Description=HEAT repeat
  Pfam annotation: Domain name=HEAT; Domain location=513-549; Score =4.3; E_value=14; Accession=PF02985.14; Description=HEAT repeat
  Pfam annotation: Domain name=HEAT; Domain location=554-590; Score =32.6; E_value=1.6e-06; Accession=PF02985.14; Description=HEAT repeat
  Pfam annotation: Domain name=HEAT; Domain location=592-628; Score =22.5; E_value=0.0017; Accession=PF02985.14; Description=HEAT repeat
  Pfam annotation: Domain name=HEAT; Domain location=661-697; Score =4.3; E_value=15; Accession=PF02985.14; Description=HEAT repeat
  Pfam annotation: Domain name=HEAT; Domain location=702-738; Score =19.6; E_value=0.013; Accession=PF02985.14; Description=HEAT repeat
  Pfam annotation: Domain name=HEAT; Domain location=740-776; Score =21.0; E_value=0.0048; Accession=PF02985.14; Description=HEAT repeat
  Pfam annotation: Domain name=HEAT; Domain location=782-818; Score =27.0; E_value=7.5e-05; Accession=PF02985.14; Description=HEAT repeat
  Pfam annotation: Domain name=HEAT; Domain location=820-854; Score =9.0; E_value=3.9; Accession=PF02985.14; Description=HEAT repeat
  Pfam annotation: Domain name=HEAT; Domain location=891-927; Score =13.3; E_value=0.99; Accession=PF02985.14; Description=HEAT repeat
  Pfam annotation: Domain name=HEAT; Domain location=930-965; Score =16.3; E_value=0.13; Accession=PF02985.14; Description=HEAT repeat
  Pfam annotation: Domain name=HEAT; Domain location=971-1006; Score =11.3; E_value=2; Accession=PF02985.14; Description=HEAT repeat
  Pfam annotation: Domain name=HEAT_PBS; Domain location=1151-1182; Score=11.6; E_value=2.1; Accession=PF03130.8; Description=PBS lyase HEAT-like repeat
  Pfam annotation: Domain name=HEAT_PBS; Domain location=1310-1345; Score=1.6; E_value=67; Accession=PF03130.8; Description=PBS lyase HEAT-like repeat
  Pfam annotation: Domain name=HEAT_PBS; Domain location=457-486; Score= 3.3; E_value=37; Accession=PF03130.8; Description=PBS lyase HEAT-like repeat
  Pfam annotation: Domain name=HEAT_PBS; Domain location=500-529; Score= 0.0; E_value=1.2e+02; Accession=PF03130.8; Description=PBS lyase HEAT- like repeat
  Pfam annotation: Domain name=HEAT_PBS; Domain location=730-756; Score= 1.5; E_value=68; Accession=PF03130.8; Description=PBS lyase HEAT-like repeat
  Pfam annotation: Domain name=HEAT_PBS; Domain location=803-836; Score= 6.7; E_value=11; Accession=PF03130.8; Description=PBS lyase HEAT-like repeat
  Pfam module annotation: Pfam domain module=Adaptin_N::Arm::Arm::Arm::A rm::Arm::HEAT::HEAT::HEAT::HEAT::HEAT::HEAT::HEAT::HEAT::HEAT::HEAT::H EAT::HEAT::HEAT::HEAT::HEAT::HEAT::HEAT::HEAT::HEAT::HEAT::HEAT::HEAT: :HEAT::...
  Pfam module annotation: Pfam domain module=HEAT::HEAT::HEAT::HEAT::HEA T_PBS::HEAT_PBS::HEAT_PBS::HEAT_PBS::HEAT_PBS::HEAT_PBS; Domain location=485-1166::1126-1164::115-151::1202-1242::1279-1323::310 -350::1046-1082::...
  Pfam module annotation: Domain location=1130-1166::1167-1202::117 -153::1208-1244::1246-1282::1290-1325::1330-1365::1370-1406::238 -273::276-311::31-68::316-352::354-390::436-472::474-511::513 -549::554-590::592-628::...
  Pfam module annotation: Domain location=661-697::702-738::740 -776::782-818::820-854::891-927::930-965::971-1006::1151-1182::1310 -1345::457-486::500-529::730-756::803-836
LGPGVEFGDTHWLGRQGIALALHSIADVLASKDLPVVMTFLISRALADPNVDVRGRMINAGILIIDRHGKENVPLLIXLIFESYLNKKASDEETYDLVREGVVIFTGALAKHLSKDDPKVHSVIEKLLDVLNTPSEAVQRAVSDCLSPLMVSKQEEGQALVSRLLDRMMKCEKYGERRGAAFGLAGVVKGFGISSLKKYGIATTLRQSLEDRMSAKSREGALLGFECLCEKLGRLFEPYVIQMLPLLLVAFSDQVLAVREAAECAARAMMSQLTGPGVKLVLPSLLKGLEDKAWRTKQSSVQLLGAMAYCAPQQLSQCLPKIVPKLTEVLTDTHPKVQAAGQTALQEVGSVIKNPEISALVPILLSALMDPNDHTKHSLDILLQTTFINSIDAPSLALLVPIVHRGLRERGVETKKKAAQIVGNMSSLVTEPKDMIPYIGLLLPEVKKVLVDPIPEVRAVASRALGSLISGMGEEIFPDLVPWLLDTLKSDSSNVERSGAAQGLSEVLAALGQDYFDRILPDIIRNCSHQKASVRDGHLTLFRYLPRSLGGVFQNYLQAVLPAILDGLADENESVRDAALSAGHVFVEHYAASSLPLLLPAIEDGIFSDNWRIRQSSVELLGDLLFKVAGTSGKAILEGGSDDEGASTEAQGRAIIEVLGREKRNEVLAAIYMVRSDVSLTVRQAALHVWKTIVANTPRTLKEIMPVLMDTLISSLASSSSERRQVAGRSLGELVRKLGERVLPSIIPILSQGLKDPNASRRQGVCIGLSEVMGSAGKHQLLSFMDELIPTIRTALCDSTQEVRESAGLAFSTLYKSAGLQAIDEIVPTLLRALEDDDTSATALDGLKQILSVRTAAVLPHILPKLVQPPLSSFNAHALGALAEVAGPGLNSHIGTVLPALILAMDDEDADVQNSARKAAETVLLVIDEEGVETLIPELLRGINDSQASMRRGSAYLIGFLFKNTKLYLADEASDMMSTLIILLSDTDKATVSAALEAFSRVVGSIPKEQLPTHIKLVRDAVSTARDKERRRRKGAPVLVPGLCLPKALQPFLPIFQQGLISGTAETKEQAAEGLGELIDVTSEKTLKEVVVPITGPLIRILGDRFPWQVKSAILSTLTIIITKGGIALKPFLPQLQTTFVKCLHDTNRSVRTRAAAALGKLSALSTRVDPLVSDLLSMLQSGDESVKESVLSALKGVIKHAGKSVSAAIRSRGCDLLKDLLQADADDVRSCAAKVIGTLSLYMEETEISDLVQILLNMSTSPDWCTRHGALLGFSSISMHSPSKLCHLASFPSLVDLLKDSLKDDKFPVREVATRTLGRILCFQLQLEAGTLQLVQLLVLALRDDSSEVRRRSLSCIKAAAKINHSALATHHSILGSAIADALKDSSMPVRLAAERCALHVFQLTKGPDNVTAAQKYLGMTGLEVKKIAKLNEESDGSESSDDDKRA

SEQ ID NO: 99697 - protein, 159 aa, Setaria italica
  Transcript Sequence Number=SeqID_33723
  Homolog annotation: Hit_ID=B6T1R8; Match level="QueryCoverage=97%, HitCoverage=71%, E-value=4e-53, Identity=72%"; Hit description =Hsp20/alpha crystallin family protein
  Subcellular localization annotation: CTP_CleavageSite=53; ConfidenceScore=5.70e-01
MSTIMGSSYTAAASRSPVLPASPLVLARGSWRPAVAAFRPSAAVKCRRPLTVTCALPDKERPPAFSIPPTALLCPVPPPDGKERWDIKEEDDRVTLWLQVPGLSASDIEVTTGEDVLEIKRNVTSQQQAAAVDAHGVGAFHIRLLMTKEYDGSRATADL

SEQ ID NO: 99698 - protein, 46 aa, Setaria italica
  Transcript Sequence Number=SeqID_33724
  Pfam annotation: Domain name=DUF1674; Domain location=1-46; Score =70.3; E_value=6.9e-18; Accession=PF07896.4; Description=Protein of unknown function (DUF1674)
AAAAAEEEDNDSGMHVNKATGEIGGPRGPEPTRYGDWERGGRCSDF

SEQ ID NO: 99699 - protein, 129 aa, Setaria italica
  Transcript Sequence Number=SeqID_33725
  Homolog annotation: Hit_ID=B6U218; Match level="QueryCoverage=98%, HitCoverage=22%, E-value=8e-34, Identity=61%"; Hit description =HEC/Ndc80p family protein
ISTLQAKHDWMVARLNLLDGEITNDDSRCTAEARRMKDELEKKYNAMRSVEMEADEFLKNSEKRLQDAILKNDEETQAAATELLQLLESIAEHKEFMEATIAQRRKELYEAADYIASLASKTSSPSPHI

SEQ ID NO: 99700 - protein, 75 aa, Setaria italica
  Transcript Sequence Number=SeqID_33726
  Pfam annotation: Domain name=DUF1674; Domain location=19-75; Score =83.4; E_value=7.9e-22; Accession=PF07896.4; Description=Protein of unknown function (DUF1674)
DPPPPEAARKAEGEEAAGDKGAADAGEGKAAAAAEEEDNDSGMHVNKATGEIGGPRGPEPTRYGDWERGGRCSDF

SEQ ID NO: 99701 - protein, 539 aa, Setaria italica
  Transcript Sequence Number=SeqID_33727
  Gene Ontology: Mol. function=protein binding; Cellular component =condensed chromosome kinetochore; Biological process=cell division
  Homolog annotation: Hit_ID=B6U218; Match level="QueryCoverage=97%, HitCoverage=90%, E-value=0.0, Identity=68%"; Hit description =HEC/Ndc80p family protein
  Pfam annotation: Domain name=Ndc80_HEC; Domain location=1-217; Score=- 53.8; E_value=0.012; Accession=PF03801.5; Description=HECNdc80p family
  Subcellular localization annotation: CTP_CleavageSite=76; ConfidenceScore=5.02e-01
MRRGGGGGGGGRRLPKSSLAPSAIDATPALDSSAIPIRNLDSAFSRRDSDAASLCSSRPASSVGVGVGAGPNFSDRATQAAALRIVNGYLSPAVTLRGPLPAARDIQAALRLLLERIDFPPNEATFEDDLIQALRLLGCPHKITRSALKAPGTPHSWPPLLAVLHWLTLFAQYSDADASSAAEAPPNDLLLYTTQGYCHFLSGDDDAVEALDEEYLSKARMDGEAAVAKFRALEKDAQELEAEVNKLTSGPLRREALEAQKEALTADVHKFEAVVKTWKTKIDERDEALVDLEKELEAKVLDARRTAAENEELLKKVDGQAVNVRDMERMHREMLVIERDIANAENGKAALEDKAWELEAKLVTKLEELEGLAEQCNQALKRLKPVIDFQYMINSKGSSPAEMLGPGYKTVLKPALMAHAEENKRIIVSNLAESVDLQKQLQGSAKILEEEKSNISSLQTKHDKMVARLNLLDGEITNDDSRCTAEARRMKDELEKKYNAIRSVEKEADEFLKNSEKRLQDAILKNDEETQAAATELLV

SEQ ID NO: 99702 - protein, 166 aa, Setaria italica
  Transcript Sequence Number=SeqID_33728
  Gene Ontology: Cellular component=extracellular region
  Homolog annotation: Hit_ID=B9SQT8; Match level="QueryCoverage=100%, HitCoverage=59%, E-value=5e-37, Identity=46%"; Hit description=DUF26 domain-containing protein 2, putative
  Pfam annotation: Domain name=DUF26; Domain location=67-119; Score =68.6; E_value=2.4e-17; Accession=PF01657.9; Description=Domain of unknown function DUF26
QLTGCLALYEVSGFPQVSGVQMLFKTCGTGSGGGGDFEMRRDTAFAALEGGVATSNGGFIATSYQAVYAMAQCEGDLSTADCGQCVTQAVQHVEVECGGAPSGQVYLDKCYISYSYYPHGVPHGGGMGGQQTAKTVAIVLGGAVGVGFLVICLLFARSLVKKKDDY

SEQ ID NO: 99703 - protein, 117 aa, Setaria italica
  Transcript Sequence Number=SeqID_33729
  Subcellular localization annotation: CTP_CleavageSite=44; ConfidenceScore=5.18e-01
GRGSRAPPPTEAARGIDHAAAARFRAPTVSPALAAPPRCPFSRSAEMPSSAPAGEMVAYGADAGRPARTAGGGRATPQAPSSPSPAAAPARPDSPADGPWRRYPGNRGRERGEGRER

SEQ ID NO: 99704 - protein, 79 aa, Setaria italica
  Transcript Sequence Number=SeqID_33730
  Gene Ontology: Mol. function=protein serine/threonine kinase activity; Biological process=protein amino acid phosphorylation
  Homolog annotation: Hit_ID=B9S566; Match level="QueryCoverage=100%, HitCoverage=6%, E-value=7e-11, Identity=41%"; Hit description =Receptor protein kinase CLAVATA1, putative
  Subcellular localization annotation: CTP_CleavageSite=47; ConfidenceScore=5.17e-01
PCNWSHVSCDGGGGVVTSVSFQSVHLAVPVPAGLCAALPGLVSFVVSDANLTGGVPDDLWRCRRLAVLDISGNALTGPI

SEQ ID NO: 99705 - protein, 74 aa, Setaria italica
  Transcript Sequence Number=SeqID_33731
  Subcellular localization annotation: CTP_CleavageSite=25; ConfidenceScore=5.47e-01
SMITLSTPFVKFHSWSRSSSCRTVKWKHNRATKILNMVFTLSYACLMLLPFLLQNMHMLFLLFSCRNAMPYCTC

SEQ ID NO: 99706 - protein, 387 aa, Setaria italica
  misc_feature (255)..(255): Xaa can be any naturally occurring amino acid
  Transcript Sequence Number=SeqID_33732
  Gene Ontology: Mol. function=sequence-specific DNA binding; Cellular component=cytoplasm; Biological process=regulation of transcription, DNA-dependent
  Homolog annotation: Hit_ID=B6T7E4; Match level="QueryCoverage=88%, HitCoverage=80%, E-value=1e-149, Identity=77%"; Hit description=Heat shock factor protein HSF8
  Pfam annotation: Domain name=HSF_DNA-bind; Domain location=13-190; Score=225.2; E_value=1.7e-64; Accession=PF00447.9; Description=HSF -type DNA-binding
APVGVVPRPPDVAPFLTKVYDMVSDPATDAVISWAAGGGSFVIWDSHAFERDLLPRHFKHNHFTSFIRQLNTYGFHKVDPDRWEWANEGFVKGQKHLLKTIKRKKKSAQDAPSDLQPAPVKTAPGTENIEIGKYGGLEKEVETLKRDKALLMQQLVDLRQYQQSSSLEVQNLIQRLRVMEQNQQQMMALLAIVVQNPNFLNQLVQQQRRSNWWNDDGSRKRRFRALEQGPVADQETSGASAQIIQYNPPIPETPXRNLRVNGTFSSATAQPVSSPESAVPMDAETTSNSVDLLASSGHLFTNTSALSDWDDMLLGCEIEDILPSEQDFQMGEQQNGQVEAPLTVDDYTEYTVCQIPQLEQEQQLQDCQMEAQQSHKNPQYADIISKA

SEQ ID NO: 99707 - protein, 75 aa, Setaria italica
  Transcript Sequence Number=SeqID_33733
PPGKTRRFQDSHITNLQKLKPVIRTTLQQWQKKPLSSTRQPEHFQKRKEEKIIKMNEKTEDELGVLNAQFPGQFS

SEQ ID NO: 99708 - protein, 113 aa, Setaria italica
  misc_feature (29)..(29): Xaa can be any naturally occurring amino acid
  Transcript Sequence Number=SeqID_33734
  Gene Ontology: Mol. function=nucleoside-triphosphatase activity; Cellular component=membrane; Biological process=transport
  Homolog annotation: Hit_ID=Q2R1Y0; Match level="QueryCoverage=91%, HitCoverage=7%, E-value=8e-49, Identity=89%"; Hit description=ABC transporter, putative, expressed
FIAFFATHQMAMALFRFLGAILKTMVVAXTFGMFVLLMIFIFGGFVIRRNDIKPWWIWGYWASPMMYSQNAISINEFLASRWAIPNNDTTIDAPTVGKAILKSPFSGKQPFGF

SEQ ID NO: 99709 - protein, 92 aa, Setaria italica
  misc_feature (47)..(47): Xaa can be any naturally occurring amino acid
  Transcript Sequence Number=SeqID_33735
  Gene Ontology: Mol. function=nucleic acid binding; Cellular component= transcription elongation factor complex; Biological process=response to cadmium ion
  Homolog annotation: Hit_ID=B9H4B7; Match level="QueryCoverage=80%, HitCoverage=6%, E-value=4e-20, Identity=55%"; Hit description =Chromatin remodeling complex subunit
MEDFHLPYLVHDDLFLHQREGIRWLWSMHCKDSGVILADDMGLGKNXQVCAFLRGLFHFGLIKRAVIIALLSVIDPWGEEFKGVGITNSKKL

SEQ ID NO: 99710 - protein, 60 aa, Setaria italica
  misc_feature (31)..(31): Xaa can be any naturally occurring amino acid
  Transcript Sequence Number=SeqID_33736
INKMNLKQYEGTLCYPNEPIHHLSRNTSIKXQAELYHKNPRHNYSKLSNELEIIADWNAS

SEQ ID NO: 99711 - protein, 86 aa, Setaria italica
  misc_feature (81)..(81): Xaa can be any naturally occurring amino acid
  Transcript Sequence Number=SeqID_33737
  Subcellular localization annotation: CTP_CleavageSite=11; ConfidenceScore=5.07e-01
RYKNRGAAPCRVAEAWASQRHSRRAPSSKPLSPKEKSVRGKSHHSRSDSPFPSPTPTGHPHSPPSPPLIERAPFHQPAAVXPAQFD

SEQ ID NO: 99712 - protein, 42 aa, Setaria italica
  Transcript Sequence Number=SeqID_33738
WKAPARSERAITTEDNAREGVPVGGRPPPNFLPEFILARSYI

SEQ ID NO: 99713 - protein, 120 aa, Setaria italica
  Transcript Sequence Number=SeqID_33739
  Subcellular localization annotation: CTP_CleavageSite=30; ConfidenceScore=5.11e-01
RQCKGRSSCWWAPTAKLPARVHPCSLLYLTSSAFQQVMTSSDCRELASGCGGDPAEQEWRRLLTFGAKPDLAYGGWKPAEAEEKRRLGCRRCDRRRWRPVEGAATRTNDSASRGELGPRL

SEQ ID NO: 99714 - protein, 108 aa, Setaria italica
  Transcript Sequence Number=SeqID_33740
  Gene Ontology: Mol. function=magnesium ion binding; Cellular component=chloroplast; Biological process=metabolic process
  Homolog annotation: Hit_ID=Q0JA83; Match level="QueryCoverage=99%, HitCoverage=14%, E-value=2e-44, Identity=81%"; Hit description=Ent -kaurene synthase-like 3
SMMTEVEWRTSSYVPTAEEYITNAALTFALGPIVLPALYFFGPKIPESVVKDPEYNELFRLMSTCSRLLNDAQTYEREYKEGKVNIVSILVHQSGGSMSIADARREIQ

SEQ ID NO: 99715 - protein, 37 aa, Setaria italica
  Transcript Sequence Number=SeqID_33741
MKTRRGACYSCHAAAGDGPEALHRRKRRRTAAAEGSP

SEQ ID NO: 99716 - protein, 148 aa, Setaria italica
  misc_feature (82)..(82): Xaa can be any naturally occurring amino acid
  misc_feature (119)..(119): Xaa can be any naturally occurring amino acid
  Transcript Sequence Number=SeqID_33742
VSAAESGAVAEGTRVLVNAQGTAAAAPIGKPTVGAAATQMRKPAGGPAAAPELGSMGLAAPRPEQNGAGGSGCASPTSFADXSCFFNSSGNFFAGAGQSSMPQPWSFPQSSDPATIGYXNPTPPGGFTNFIQPHLSQNFHFVGVMLSF

SEQ ID NO: 99717 - protein, 54 aa, Setaria italica
  Transcript Sequence Number=SeqID_33743
ITKHQFQTYEDQNNVLGIKGIPWLYDSVTLIHRQIDQAIQKVLYSGFSNCVKLP

SEQ ID NO: 99718 - protein, 71 aa, Setaria italica
  Transcript Sequence Number=SeqID_33744
MGRGHEQEADAGKAGGYSSSGLPPSEPPHLQGQPPQQYGYGTFQGSRAGSGEFRQPPVGFPQPAPPPGFGG

SEQ ID NO: 99719 - protein, 170 aa, Setaria italica
  misc_feature (13)..(13): Xaa can be any naturally occurring amino acid
  Transcript Sequence Number=SeqID_33745
  Gene Ontology: Mol. function=nucleotide binding; Biological process =defense response
  Homolog annotation: Hit_ID=Q9ATQ8; Match level="QueryCoverage=98%, HitCoverage=18%, E-value=6e-48, Identity=56%"; Hit description=LRR19
  Pfam annotation: Domain name=NB-ARC; Domain location=2-170; Score= -33.1; E_value=3e-07; Accession=PF00931.14; Description=NB-ARC domain
AKLTQWLVGDLEXGRSRKIATVWGMGGTGKTTLVDHVYKIVKVDFDTAAWVTVSKSYKVQDLLTKIAREFGVSIDARNMEMRSLVEVIRFYLEGKRYILILDDVWEKDVWINIMDVFPSNGTSRIVLTSRKHEVASLATSDCAIKLEPLGEDHSWNLFCKLAFRNNDDKR

SEQ ID NO: 99720 - protein, 226 aa, Setaria italica
  Transcript Sequence Number=SeqID_33746
  Gene Ontology: Cellular component=nucleus
  Homolog annotation: Hit_ID=B9T718; Match level="QueryCoverage=30%, HitCoverage=9%, E-value=5e-12, Identity=47%"; Hit description=Pre -rRNA-processing protein ESF1, putative
MAPPASSDEPSRHKKAKKSKPDKEEKKHKKRSQERPATEDAPVPDATERKKRKHKEGREGKRDGKKSKKEGKHEGKAVGAEADEAGRDEKVRRAMEDERFAAARTDPRFRPMRRKEAKVALDSRFSSMMTDPRFASSAAPVDKRGRSRKKRENPLLNYYLNQEEEEEEEGKEKVKKEKAKLVKEDDEGDKSDEEQTDGQDMEITFNTELEDLSKRVLERKSNEEKT

SEQ ID NO: 99721 - protein, 698 aa, Setaria italica
  Transcript Sequence Number=SeqID_33747
  Gene Ontology: Mol. function=RNA binding; Cellular component=nucleus; Biological process=ribosome biogenesis
  Homolog annotation: Hit_ID=B9T718; Match level="QueryCoverage=92%, HitCoverage=82%, E-value=1e-60, Identity=45%"; Hit description=Pre -rRNA-processing protein ESF1, putative
  Pfam annotation: Domain name=NUC153; Domain location=603-632; Score =30.2; E_value=8.6e-06; Accession=PF08159.4; Description=NUC153 domain
MEDERFAAARTDPRFRPMRRKEAKVALDSRFSSMMTDPRFASSAAPVDKRGRSRKKRENPLLNYYLNQEEEEEEEGKEKVKKEKAKLVKEDDEEEEEDEEQDEDESSSSDDDEDEDVDDDDENSVGSDIAHYLLGRHDDTATIDKETHRLAVVNMDWDHIKAVDLYMVMNSCLPKGGRVLSVSIYPSEFGLKCMEIESTQGPAALVNANVDGKNSDADEDDKNDDEDNIDADDDDDEDDKNDDEDNTDADDDEDITDDDNDEEELDSDKENNKLRAYELKRLKYYYAVVVCDSSTTANHLYMTLDGTELLKTANVFDLQFIPDSREFKHPARDVATEVPPSYKEPDFETRALQHSRVKLTWDEDEPERKKVLRRKFTDDQLDELDMYLASDDSASEDDSVDNSDDESLPNGGSKRKLTKEERLALLLGGDKSDEEQTDGQDMEITFNTELEDLSKRVLERKSNEEKTVWEKHQEKMKEKKKAKKRGLKDEDDNDHYSSEDEPTEDDDFFAAELSDEEPKLSKSKKHKAKAKDKGKRKGKDDSTEEHYEPEATKEELELLVAGDQDTASGAKGYNLKRKKGKKGKKGKEESIEDKLPDIDLSKDDRFSAMFTSHLFALDPTDPQYKRSAPFMRKQTGKPGAHASKAEGSSLGGALPPDDAAAKNNDDQKPDGASKEKLQILSAVKSLKRNLGAFKSKNR

SEQ ID NO: 99722 - protein, 205 aa, Setaria italica
  misc_feature (172)..(172): Xaa can be any naturally occurring amino acid
  Transcript Sequence Number=SeqID_33748
  Gene Ontology: Mol. function=cysteine-type peptidase activity; Cellular component=nucleus; Biological process=proteolysis
  Homolog annotation: Hit_ID=Q6MWB8; Match level="QueryCoverage=97%, HitCoverage=27%, E-value=2e-55, Identity=56%"; Hit description =B1292H11.13 protein
MRNTMQMDRQWMYNADRRSKVFIDGLHYFLEVAKANKPENGFVCCPCFQCNNKKEYSKDSWGTIHSHLFKYGFMPNYLVWTKHGELGVVMEDGEEEEDDTISDWGAGQAFAGTTMGEADEDGFAENGPTDDLGQVIRDAYRDCETEKEAAKLQRMIDDHQKLLYPGCQQGHXKLGTTLEFVQWKAKNGVSDKAFQEMLNIVKKIL

SEQ ID NO: 99723 - protein, 404 aa, Setaria italica
  Transcript Sequence Number=SeqID_33749
  Gene Ontology: Mol. function=DNA binding; Biological process =regulation of transcription, DNA-dependent
  Pfam annotation: Domain name=B3; Domain location=305-401; Score=17.2; E_value=0.00094; Accession=PF02362.13; Description=B3 DNA binding domain
MRKQGINSIPSDSITAVGKHQNHSKTIVSQNIYRKYAAPGGFRCLEKWTKAIVNSPATLDGTVPIEPENTRKTGSILVDGYGSIGLNAGNEYFCSEDHHTLVLPVFTMPVKEPLSADRVSKFRHVGTDTDHSINEKGGGAAVQIQTQGEQLEPVGSIVISQSNNIPLSANTAVLGEYGALGRNPAGPEGTCAFVESMLTVPVEKPLSPDGISKCGSSRTEIDHNVNGKGTIVQLETNMDQVELVGSSVCSQSSNVAMHANHVVVHEPEHYFSRQEGRKSANCAMTESLLPMKDKILELDGHSLLKFSLQLCVPDTTRKWLELPKSLFDTVKQKRHDRNVIMLKDPTNRLWTVLYHENPVFVGLTAGWKHFVAGNNLQTGDLCKLTKEADGDELVFSVQITKRRL

SEQ ID NO: 99724 - protein, 66 aa, Setaria italica
  Transcript Sequence Number=SeqID_33750
  Gene Ontology: Mol. function=actin binding; Cellular component =integral to membrane; Biological process=actin cytoskeleton organization and biogenesis
  Homolog annotation: Hit_ID=Q0D519; Match level="QueryCoverage=95%, HitCoverage=8%, E-value=2e-21, Identity=79%"; Hit description=Formin- like protein 13
GNSDQAARKGGAGKQESRLLDPKRLQNVAIMLKALNVTSDDVIGALMHGSGDLGSEFYETLAKMAP

SEQ ID NO: 99725 - protein, 92 aa, Setaria italica
  Transcript Sequence Number=SeqID_33751
  Gene Ontology: Mol. function=transferase activity, transferring hexosyl groups; Biological process=metabolic process
  Homolog annotation: Hit_ID=B6SQA3; Match level="QueryCoverage=100%, HitCoverage=18%, E-value=1e-38, Identity=80%"; Hit description =Cytokinin-O-glucosyltransferase 2
STMTTCFPRFKDLVARLNDEAERDGRPAVTCVVADSTMTFALRAARELGLRCATLWTASACGFITYYHYRHLVDRGLVPLRDEAQLTDGYLD

SEQ ID NO: 99726 - protein, 79 aa, Setaria italica
  Transcript Sequence Number=SeqID_33752
DVLAAGESRAEGLTVGIAAALPRTIGGSATGINHAIAAPGRDPDHRFTTTGQRRVTLQYDYSTLPSSHSTLPETRTISG

SEQ ID NO: 99727 - protein, 157 aa, Setaria italica
  misc_feature (70)..(70): Xaa can be any naturally occurring amino acid
  misc_feature (141)..(141): Xaa can be any naturally occurring amino acid
  misc_feature (148)..(148): Xaa can be any naturally occurring amino acid
  Transcript Sequence Number=SeqID_33753
  Gene Ontology: Mol. function=microtubule motor activity; Cellular component=microtubule associated complex; Biological process =microtubule-based movement
  Homolog annotation: Hit_ID=Q93XF7; Match level="QueryCoverage=100%, HitCoverage=14%, E-value=1e-73, Identity=90%"; Hit description =Kinesin heavy chain (Fragment)
QHSADLSKKLEVTEKCLDHTSNLLSTTKEDLKQAQYNLREKDFIISEQKKAENALTHQACVLRSDLEKLXRDNASLYSKIARGDKLSATNRSVVNTFQTDLASKLDVLSSTLNASIDQQNKHLKSVEDLCQSCVDSHDKAXTSELKKXILASKSLYL

SEQ ID NO: 99728 - protein, 84 aa, Setaria italica
  Transcript Sequence Number=SeqID_33754
  Gene Ontology: Mol. function=nucleoside-triphosphatase activity; Cellular component=membrane
  Homolog annotation: Hit_ID=Q7XI02; Match level="QueryCoverage=98%, HitCoverage=22%, E-value=4e-30, Identity=78%"; Hit description=ABC transporter family protein-like
RRERLSYGTSAYVTQENTLMTTLTVKEAIHYAAQLQLPGSMPPAKKLARVDRIIREMGLGAVACSRIGGRVCKGISGGERKRVS

SEQ ID NO: 99729 - protein, 104 aa, Setaria italica
  misc_feature (67)..(67): Xaa can be any naturally occurring amino acid
  misc_feature (78)..(78): Xaa can be any naturally occurring amino acid
  Transcript Sequence Number=SeqID_33755
NNGFNISIFKLRFAQKHGYELDHHKLGYPDLASLLQIMPGARIKFPRVLPAENGNGLPGSKGSGNKXHGDDLTWEELXGPVSATTETAAAEVDKEMCYRPPTPS

SEQ ID NO: 99730 - protein, 261 aa, Setaria italica
  misc_feature (16)..(16): Xaa can be any naturally occurring amino acid
  Transcript Sequence Number=SeqID_33756
  Gene Ontology: Mol. function=receptor activity
  Homolog annotation: Hit_ID=Q6Z027; Match level="QueryCoverage=100%, HitCoverage=11%, E-value=1e-86, Identity=67%"; Hit description =Putative death receptor interacting protein
WEVRNAACLAYTALVXRRMVGFLNVQKNSRARRSLTGLEFFHRYPALHPFLSSELRIATELLAGGVSSDLESHIVKAIHPSLCPILILLSRLKPSPISCGTDDSLDPFLLLPFIQRCATQSNYRVRVLASRALIGLVSNERLQQVVSDILGNLPNVNHEVSPSVQLSDPPISANMENGNLLRFSKSFSFNSIHGLLLQLSSLLDNNFRGLTDSSKKDQIIGQLIEVLSRCSWLGSTKLCSCPVVSTSYLRVLDLVLDVART

SEQ ID NO: 99731 - protein, 89 aa, Setaria italica
  Transcript Sequence Number=SeqID_33757
  Subcellular localization annotation: CTP_CleavageSite=56; ConfidenceScore=5.75e-01
GRFFLASRSCSVLNSFSNYFFLSGISFSHTSTSAAHTWNSGPHSVTIFSSFCLLPSAASTSSHLAAFGHHSRAGAAVFAAFGGSKESSP

SEQ ID NO: 99732 - protein, 79 aa, Setaria italica
  Transcript Sequence Number=SeqID_33758
VARATTGRDGSFQMEADAVAGALGALVGACQLVVDTPLAKCNATLPAAGALVSSLQGPLPGMLGSVFRLAPAGFSFRMN

SEQ ID NO: 99733 - protein, 397 aa, Setaria italica
  Transcript Sequence Number=SeqID_33759
  Gene Ontology: Mol. function=nucleoside-triphosphatase activity; Cellular component=integral to membrane; Biological process=lipid transport
  Homolog annotation: Hit_ID=B5L018; Match level="QueryCoverage=98%, HitCoverage=56%, E-value=0.0, Identity=86%"; Hit description=CER5 -like protein
  Pfam annotation: Domain name=ABC_tran; Domain location=59-249; Score =131.0; E_value=3.8e-36; Accession=PF00005.19; Description=ABC transporter
  Pfam annotation: Domain name=MMR_HSR1; Domain location=60-161; Score=- 14.2; E_value=0.021; Accession=PF01926.15; Description=GTPase of unknown function
  Pfam annotation: Domain name=SMC_N; Domain location=43-247; Score= -120.9; E_value=0.011; Accession=PF02463.11; Description=RecFRecNSMC N terminal domain
  Pfam module annotation: Pfam domain module=ABC_tran::MMR_HSR1::SMC_N; Domain location=59-249::60-161::43-247
MDGGSNVEAWRGAVSPAARYAESGGASLTWENLTAVLPGGGGRATKKLVQGLYGYAVPGRVVAIMGPSGSGKSTLLDSLSGRLARNVVLTGKVLLNGKKRRLDYGVVAYVTQENILLGTLTVRETLTYSALLRLPSSMRKSEVRRIVDDTLDEMGLRECADRHIGTWHLRGISGGEKKRLSIALEILTRPRLLFLDEPTSGLDSAAAFSVVQTLRQLAVDGGRTIVSSVHQPSSEVFALFDDLCLLSSGECVYFGDAKLATQFFAETGFACPSRRNPSDHFLRCVNSDFDDVAATMKGSMKLRAEAELDPLLNYSTTEIRERLVEKYRISDYAMMVRNTIHEITKIEGVVEEVIRGSEASWFKQLRTLTSRSFTNMSRDLNYYWLRIIIYIVMAFCL

SEQ ID NO: 99734 - protein, 390 aa, Setaria italica
  Transcript Sequence Number=SeqID_33760
  Gene Ontology: Mol. function=nucleoside-triphosphatase activity; Cellular component=integral to membrane; Biological process=lipid transport
  Homolog annotation: Hit_ID=B5L018; Match level="QueryCoverage=99%, HitCoverage=56%, E-value=0.0, Identity=87%"; Hit description=CER5 -like protein
  Pfam annotation: Domain name=ABC2_membrane; Domain location=64-276; Score=133.4; E_value=7e-37; Accession=PF01061.16; Description=ABC-2 type transporter
MKLRAEAELDPLLNYSTTEIRERLVEKYRISDYAMMVRNTIHEITKIEGVVEEVIRGSEASWFKQLRTLTSRSFTNMSRDLNYYWLRIIIYIVMAFCLGTIYYDVGTSYTAIQARASCGGFVSGFMTFMSIGGFPSFIEEMKVFTLERQNGHYGVAAYIISNFLSSMPFLLTVSWASASITYWMVKFRPGFSYFAFFALNLYGGVSVIESLMMIISALVPNFLMGLILGAGVIGIMMLTSGFFRLLPELPKIFWRYPVSYIVYGSWGLKGGYKNDLIGLEFEPMMPGQPKLKGEYIITEMMGLSLNHSKWLDLAMIFVLLFAYRVTFFVVLKVKEAAAPYIRVAYTRFTVKRLERRASFRKTLAMTSLSKRHSQPHPMAIQEGLNSPMPY

SEQ ID NO: 99735 - protein, 203 aa, Setaria italica
  Transcript Sequence Number=SeqID_33761
  Gene Ontology: Mol. function=calcium ion binding
  Homolog annotation: Hit_ID=B6SSP2; Match level="QueryCoverage=54%, HitCoverage=54%, E-value=1e-20, Identity=54%"; Hit description=EF hand family protein
  Pfam annotation: Domain name=efhand; Domain location=138-166; Score =25.3; E_value=0.00025; Accession=PF00036.24; Description=EF hand
  Pfam annotation: Domain name=efhand; Domain location=174-202; Score =4.6; E_value=6.7; Accession=PF00036.24; Description=EF hand
  Pfam module annotation: Pfam domain module=efhand::efhand; Domain location=138-166::174-202
MAERNNAMRPLLRRMLSFREPLLIIPYLLTFLAAAASAFVRSHSSLLHALARALVPAAAAKCAHSASPVSADLPAPRCDGDEADAEAEDYAALSKEEVEAIMGAIGLAAAGRGEGLAAVMGRDEVSGLFEAEEPSFAEVRGAFAVFDADADGFIGAADLQGALARLGVREDAASCRAMIDAAGGDRDGRMSLFQFVGFLENGL

SEQ ID NO: 99736 - protein, 92 aa, Setaria italica
  Transcript Sequence Number=SeqID_33762
WGLSQVKGGAGGLEGFSSADPGTGDKESCSGAHSLDDSFWMLRGGKDDKCGISSPLLSVNACCVGDIKIWCHRRGWAMDPVAAKFQLCHVFQ

SEQ ID NO: 99737 - protein, 88 aa, Setaria italica
  Transcript Sequence Number=SeqID_33763
  Homolog annotation: Hit_ID=B6TDG3; Match level="QueryCoverage=100%, HitCoverage=29%, E-value=4e-33, Identity=78%"; Hit description =Werner syndrome ATP-dependent helicase
  Subcellular localization annotation: CTP_CleavageSite=38; ConfidenceScore=5.35e-01
QSPVSSGSTPSWAFTPPSFQGNVRARHQPISFSGKIVYCRTPSEVEKAAIDILGKIESIKAPGPVSLGFDLEWKPFPRRGEPCKVAVM

SEQ ID NO: 99738 - protein, 78 aa, Setaria italica
  Transcript Sequence Number=SeqID_33764
ARSTLSLDRSQPKTNSKQLLRLNSIIHHVDGQMFQVTLQRLNHHLSTRANAYAETAKKQQLGARRRGGRRAYVPGARS

SEQ ID NO: 99739 - protein, 64 aa, Setaria italica
  Transcript Sequence Number=SeqID_33765
VRKKHGKSNSALIGFCSKSKSLPSLLYQNADDCYSAKQTKHGCRVMIHQVHDIYTRPHAQENAM

SEQ ID NO: 99740 - protein, 127 aa, Setaria italica
  Transcript Sequence Number=SeqID_33766
  Gene Ontology: Mol. function=nucleotide binding; Cellular component =nucleus; Biological process=DNA replication initiation
  Homolog annotation: Hit_ID=P43299; Match level="QueryCoverage=100%, HitCoverage=17%, E-value=4e-57, Identity=81%"; Hit description =Protein PROLIFERA
ECPSQRCKLNRAKGNLILQLRASKFLKFQEVKLQELAEHVPKRHIPRSLTVHLRGELTRKVAPGDVVEMSGIFLPMPYYGFRAMRAGLVADTYLEAMSVTHFKKKYEEYELKGDEQEQIDRLAEDGD

SEQ ID NO: 99741 - protein, 203 aa, Setaria italica
  Transcript Sequence Number=SeqID_33767
PEVDTEVQDGDIGKLGDPASGCFGVSSSLLRSSKGRFRDDEDPLFGESLKSLGFSDACLATLSSEVTDNGENLKELYKDPESADEGKKIMKEAELIAPQSKRDNQGNSFKEMIRASKEEYEQLPPYMKSLASWEELQEGIVKLNSYFGSDEAKGSVSLNQDDVGAIGLGRKGRACLLMLLRLNQLTMEAVDGSTFYTLRKNNS

SEQ ID NO: 99742 - protein, 88 aa, Setaria italica
  Transcript Sequence Number=SeqID_33768
  Gene Ontology: Mol. function=galactosylgalactosylxylosylprotein 3 -beta-glucuronosyltransferase activity; Cellular component=membrane
  Homolog annotation: Hit_ID=Q50HW1; Match level="QueryCoverage=100%, HitCoverage=24%, E-value=5e-32, Identity=79%"; Hit description =Glycosyltransferase
  Subcellular localization annotation: CTP_CleavageSite=75; ConfidenceScore=5.15e-01
MGTGAVAVAAPDRAKQRRGGHLWKKALLHFSLCFVMGFFTGFAPSSSSSWKAATQHLPHRAGDQLAASRVAVDARVNMVPSPPDAAGE

SEQ ID NO: 99743 - protein, 265 aa, Setaria italica
  Transcript Sequence Number=SeqID_33769
  Subcellular localization annotation: CTP_CleavageSite=72; ConfidenceScore=5.20e-01
VNKISDTAIVTLALDASSIISRQGTPVSSAEPFTFLYDTHRPSVKLCTSTWRTSSRDIQVLVKFAEPMFNFSSSSVQVSGGNVLSFHEASKSMYALRVQAVDKLVSVQVAENAAQDVAGNPSLASDRLEVRHYSVPASSSSIAAITTIIFVATAVVATLLTVSTSSLLASGAIPRPCSYMISEPSRNLLRMACHIQIFALSRWLSVNLPIEYYEFAKGIEWSIPYMRLPWEGPGADPFLGYSTMPAIAFSELLDRSAVGAANISL

SEQ ID NO: 99744 - protein, 147 aa, Setaria italica
  misc_feature (121)..(121): Xaa can be any naturally occurring amino acid
  Transcript Sequence Number=SeqID_33770
  Gene Ontology: Cellular component=chloroplast envelope
LEQISLERNASDRESDEDEVFSTTPDEKAEAVTDDSMQNITAVRRHFSFRAPIDPIHEEAFSILKKLQIIEKDVSPSDFCTRREFARWFVKLCSKFERKRMQRIVPDKLTSGSVQSAFDDXLGESGIVLSKLSNSLETSTSGSPTVQ

SEQ ID NO: 99745 - protein, 58 aa, Setaria italica
  Transcript Sequence Number=SeqID_33771
ESITTAPSQQNIYIRLRKDKKNQAYRNRSALELHHQVSRNSKRNNDISSMSVGSTNER

SEQ ID NO: 99746 - protein, 565 aa, Setaria italica
  Transcript Sequence Number=SeqID_33772
  Gene Ontology: Cellular component=chloroplast envelope
  Homolog annotation: Hit_ID=B7K1E8; Match level="QueryCoverage=31%, HitCoverage=40%, E-value=4e-19, Identity=35%"; Hit description=S -layer domain protein
  Subcellular localization annotation: CTP_CleavageSite=31; ConfidenceScore=5.54e-01
GLDSSPPWPSPPTTLRLSPPPLDAPLLPQLRAQLRRRGSAKVAASGTSWAPAAGESSDGVGGWWLPEREKPVEQGRRKTGFGRALAVGLGASAAIALAGLAWQSPSSRNCFQQLIVAPLHYVQEKLSTESTETPNDNASDRESDEDEVFSTTPDEKAEAVTDDSMQNSTAVRRHFSFRAPIDPIHEEAFSILKKLQIIEKDVSPSDFCTRREFARWFVKLCSKFERKRMQRIVPDKLTSGSVQSAFDDVNIDDPDFLYIQSLGESGIVLSKLSNSLETSTSGSPTVQENSFFLPESYLSRFDLVNWKVLVEHPRALGADQKMLSQKVRILDLCACPDVSPSMLIELMAGENNIISRVFGNTRRLQPHKPVTKAQAAAALTSGRMEEAIRDELNRLEAENEAHLSAIAEIMEELISRGDIQQQWEDKMKKEQQRGFEVDKDLQHVLHELANERTDRERELEDLLKEKSALEIQNQDLINLRSEIDGMYDRLATENAEVMADQQNLENLLSDMTSKHQAVNEAKSYLEAEKEALTMLRTWVEEEAARVHERAETLKKAVRRWRVPVD

SEQ ID NO: 99747 - protein, 86 aa, Setaria italica
  Transcript Sequence Number=SeqID_33773
LLRGGRHRGQAVPAQPQGAARVGGALRRREVGAVRAAKGRVRPQGHPGHGAGHLSAARLAGARLRLVGRQAHGGDRAATDCLGACR

SEQ ID NO: 99748 - protein, 84 aa, Setaria italica
  Transcript Sequence Number=SeqID_33774
  Gene Ontology: Mol. function=peptidase activity; Cellular component =membrane; Biological process=signal peptide processing
  Homolog annotation: Hit_ID=Q9SSR2; Match level="QueryCoverage=100%, HitCoverage=46%, E-value=1e-25, Identity=69%"; Hit description =F6D8.18 protein
  Pfam annotation: Domain name=Peptidase_S24; Domain location=23-82; Score=32.5; E_value=1.7e-06; Accession=PF00717.15; Description =Peptidase family S24
LASALIIWKGLMVVTGSESPLVVVLSESMEPGFKRGDILFLHMNKDPVRAGEIVVFNVDGRPIPIVHRVIEVHERHDTAGFDIL

SEQ ID NO: 99749 - protein, 88 aa, Setaria italica
  Transcript Sequence Number=SeqID_33775
  Gene Ontology: Mol. function=peptidase activity; Cellular component =membrane; Biological process=signal peptide processing
  Homolog annotation: Hit_ID=Q9SSR2; Match level="QueryCoverage=82%, HitCoverage=40%, E-value=4e-10, Identity=49%"; Hit description =F6D8.18 protein
MDFLRRGVEPIRATQIRSVLAQTISLGMILASALIIWKGLMVVTGSESPLVVVLSESMEPGFKRVCSSFLHRSIAFLQCLIRFIYDLY

SEQ ID NO: 99750 - protein, 162 aa, Setaria italica
  misc_feature (7)..(7): Xaa can be any naturally occurring amino acid
  misc_feature (65)..(65): Xaa can be any naturally occurring amino acid
  Transcript Sequence Number=SeqID_33776
  Gene Ontology: Mol. function=nucleic acid binding; Cellular component= heterogeneous nuclear ribonucleoprotein complex; Biological process =regulation of transcription, DNA-dependent
  Homolog annotation: Hit_ID=B6UCI9; Match level="QueryCoverage=99%, HitCoverage=24%, E-value=2e-80, Identity=89%"; Hit description =Heterogeneous nuclear ribonucleoprotein U-like protein 1
MEQMKVXGLLRKNNYGERFDRLMECATWIFNKLLTRAANTPRNFILDQTNVYKNARIRKLRPFAXYRKTAVVVFPSPSELKSRAAKRFNEMGKEVPAEAVNEMTANFVLPLSKDMPDSKEPFDEVIFTELSRDEAQRNLDEMQRVLPRTGTPSYGNSSKQKC

SEQ ID NO: 99751 - protein, 68 aa, Setaria italica
  Transcript Sequence Number=SeqID_33777
NCMHYIGCAARICSFPSPAKGRRSSIHDRLWNLGGIRIPMFNFPFLDRVPGSISFLWPSFDEAVGSNN

SEQ ID NO: 99752 - protein, 60 aa, Setaria italica
  Transcript Sequence Number=SeqID_33778
GAAKAEMEMESFSSAEFPPIDESFWSSPDVVDMGLGAMDEELGLAGPPSLSTRDEDMEFW

SEQ ID NO: 99753 - protein, 39 aa, Setaria italica
  Transcript Sequence Number=SeqID_33779
  Gene Ontology: Mol. function=Rab GTPase activator activity; Cellular component=intracellular; Biological process=regulation of Rab GTPase activity
  Homolog annotation: Hit_ID=Q5QMF8; Match level="QueryCoverage=97%, HitCoverage=4%, E-value=1e-11, Identity=86%"; Hit description =RabGAP/TBC domain-containing protein-like
MKPKSLPFIAFEHKRDAYGFAVWPQHLQRYKEYAGIYKE

SEQ ID NO: 99754 - protein, 135 aa, Setaria italica
  Transcript Sequence Number=SeqID_33780
  Gene Ontology: Mol. function=protein serine/threonine kinase activity; Cellular component=integral to membrane; Biological process=protein amino acid phosphorylation
  Homolog annotation: Hit_ID=A8W3R2; Match level="QueryCoverage=100%, HitCoverage=69%, E-value=1e-25, Identity=35%"; Hit description =Flagellin-sensing 2-like protein (Fragment)
  Pfam annotation: Domain name=LRR_1; Domain location=116-135; Score =3.2; E_value=74; Accession=PF00560.25; Description=Leucine Rich Repeat
  Pfam annotation: Domain name=LRR_1; Domain location=20-42; Score =13.4; E_value=0.84; Accession=PF00560.25; Description=Leucine Rich Repeat
  Pfam annotation: Domain name=LRR_1; Domain location=44-66; Score=1.7; E_value=1.4e+02; Accession=PF00560.25; Description=Leucine Rich Repeat
  Pfam annotation: Domain name=LRR_1; Domain location=68-90; Score=7.3; E_value=12; Accession=PF00560.25; Description=Leucine Rich Repeat
  Pfam annotation: Domain name=LRR_1; Domain location=92-114; Score =12.3; E_value=1.3; Accession=PF00560.25; Description=Leucine Rich Repeat
  Pfam module annotation: Pfam domain module=LRR_1::LRR_1::LRR_1::LRR _1::LRR_1; Domain location=116-135::20-42::44-66::68-90::92-114
SLGDNKLSGDIPEDLFDCGNLRKLNLAGNSFTGGLSPRVGRLSELGLLQLQRNALSGAILEEIGNLTKLIGLELGENRFAGRVPASISNLSSLQQLDLQQNLLSGALPGGIFELRSLTILSAASNRFAGPIPDAV

SEQ ID NO: 99755 - protein, 221 aa, Setaria italica
  misc_feature (13)..(13): Xaa can be any naturally occurring amino acid
  misc_feature (203)..(203): Xaa can be any naturally occurring amino acid
  Transcript Sequence Number=SeqID_33781
  Gene Ontology: Mol. function=ATPase activity, coupled to transmembrane movement of substances; Cellular component=integral to membrane; Biological process=transport
  Homolog annotation: Hit_ID=Q5SMN1; Match level="QueryCoverage=99%, HitCoverage=16%, E-value=1e-82, Identity=67%"; Hit description =Putative multidrug resistance-associated protein 7
GLTMLVKKKFEGXDVEDHELFFMCSQFIAWMSVSIVCVTGAWFEILYNPIMCFCWILKILLEIPHLQYKLTVLKTMASFMEIISFCTATTFGLFVVVAAVVGQLGNKRKMNSIEAPLILNDEKAESEITNMVKKGHTLWELLTFKFVNPMMDIGVTRQLDFTDLLELPPELRATSCYDRLLSSWTVEYQNHHDNSSLLRAMFXSYGWTYLRLGLLKVLNDS

SEQ ID NO: 99756 - protein, 327 aa, Setaria italica
  Transcript Sequence Number=SeqID_33782
  Gene Ontology: Mol. function=RNA methyltransferase activity; Biological process=RNA processing
  Homolog annotation: Hit_ID=Q9LU28; Match level="QueryCoverage=99%, HitCoverage=58%, E-value=1e-139, Identity=74%"; Hit description=RNA methyltransferase-like protein
  Pfam annotation: Domain name=MTS; Domain location=137-275; Score= -73.9; E_value=0.0033; Accession=PF05175.6; Description =Methyltransferase small domain
  Pfam annotation: Domain name=Met_10; Domain location=77-277; Score= -115.0; E_value=0.023; Accession=PF02475.8; Description=Met-10+ like -protein
  Pfam annotation: Domain name=UPF0020; Domain location=163-303; Score=- 51.0; E_value=0.0091; Accession=PF01170.10; Description=Putative RNA methylase family UPF0020
  Pfam annotation: Domain name=tRNA_U5-meth_tr; Domain location=1-327; Score=-160.0; E_value=0.00013; Accession=PF05958.3; Description=tRNA (Uracil-5-)-methyltransferase
  Pfam module annotation: Pfam domain module=MTS::Met_10::UPF0020::tRNA_ U5-meth_tr; Domain location=137-275::77-277::163-303::1-327
YALGLHAPGFFDKVLHVEKCFLQSESADKVLAVVQETWMDPSLGLTPRDGPIQVGFLKHLMIRTGRNVRTGTPEVMVNFVTACYKPDLLMPLVDNITKIPEVVSVINNVNTSVGNTSVGEQEYTLYGKPNITEMLRGLTFQISANSFFQTNTKQADVLYELIEDSAGLKGDGSEIVLDLFCGTGTIGLTLARRAKHVYGYEVVPEAIADARKNAKLNGINNATFVQGDLNKINESFGKEFPKPDIIISDPNRPGMHMKLIKWLLEVKAPRIVYVSCNPATCARDLDYLCHGVEEKDLSGCYELKSVIPVDMFPHTPHIECVCLLELR

SEQ ID NO: 99757 - protein, 213 aa, Setaria italica
  Transcript Sequence Number=SeqID_33783
  Gene Ontology: Mol. function=zinc ion binding; Cellular component =intracellular
  Homolog annotation: Hit_ID=B6UAR7; Match level="QueryCoverage=100%, HitCoverage=62%, E-value=6e-85, Identity=72%"; Hit description =Prenyltransferase/ zinc ion binding protein
  Pfam annotation: Domain name=zf-TRAF; Domain location=91-146; Score =52.4; E_value=1.7e-12; Accession=PF02176.10; Description=TRAF-type zinc finger
SGWLLSDSREDKIDDFVQEMEMTRFWPLDRREAIAEVLLKNVDLKTKFHCPEKYENEERLADHKQQCSFRPVTCPNDGCRAKVSVRCMEDHDAACPFKVLQCEQNCEKRLLRRDMDRHCVTICSMRPMKCPFGCDSSFPERDLEKHCLEFLQEHLLKVLKVIHKKGHSEELKELAQKLEKYDEHGKLAKARDARPLTNVVKDLEAKMKGEPSS

SEQ ID NO: 99758 - protein, 71 aa, Setaria italica
  Transcript Sequence Number=SeqID_33784
DAFGGGKHAAAASLRKGGRLPVYVASIFFFLCVIVMYGEDIRSLTFEPLTTRVPAPTVVPGVASGGAGRRV

SEQ ID NO: 99759 - protein, 71 aa, Setaria italica
  Transcript Sequence Number=SeqID_33785
  Homolog annotation: Hit_ID=Q5Z7N7; Match level="QueryCoverage=100%, HitCoverage=17%, E-value=3e-27, Identity=78%"; Hit description =Storage protein-like
  Pfam annotation: Domain name=DUF707; Domain location=1-71; Score= -119.5; E_value=2e-06; Accession=PF05212.4; Description=Protein of unknown function (DUF707)
QTKWWYAKRFLHPSIVAPYDYIFLWDEDLGVEAFDAEEYVKIVRKQGLEISQPGLDSTRGPKPFFDITVRR

SEQ ID NO: 99760 - protein, 56 aa, Setaria italica
  misc_feature (14)..(14): Xaa can be any naturally occurring amino acid
  misc_feature (31)..(31): Xaa can be any naturally occurring amino acid
  Transcript Sequence Number=SeqID_33786
MYISRTMTPQFPTXLTPHTAGLHAPRAQLAXKAAAWWWVCESSPRAARRPAASPIC

SEQ ID NO: 99761 - protein, 638 aa, Setaria italica
  misc_feature (167)..(167): Xaa can be any naturally occurring amino acid
  Transcript Sequence Number=SeqID_33787
  Gene Ontology: Mol. function=protein transporter activity; Cellular component=cytoplasm; Biological process=vesicle fusion with Golgi apparatus
  Homolog annotation: Hit_ID=B9S666; Match level="QueryCoverage=94%, HitCoverage=65%, E-value=0.0, Identity=63%"; Hit description=Vesicle docking protein P115, putative
  Pfam annotation: Domain name=Proteasom_PSMB; Domain location=30-490; Score=-232.1; E_value=0.088; Accession=PF10508.1; Description =Proteasome non-ATPase 26S subunit
  Pfam annotation: Domain name=Uso1_p115_head; Domain location=361-638; Score=-23.6; E_value=1.6e-08; Accession=PF04869.6; Description=Uso1 p115 like vesicle tethering protein, head region
  Pfam module annotation: Pfam domain module=Proteasom_PSMB::Uso1_p115 _head; Domain location=30-490::361-638
YFRGIAGSAGNIMQGMGKFVFGNEGPESKEDSYVEKYLDRISNGTIPDDRRSAMTELQSLVAESRSAQMSFGAMGFPILLNVLKEGREDVELVRGALETFVSALTPIETSQGPKTEVQPASVNSDLLSRETENISLLLSLLSEEDFYVRYYTIQLLTALLTNSLKRXLQEAILLIPRGITVLMDMLMDREVIRNEALLLLTYLTRDAEEIQKIVVFEGVFEKIFSIIREEGYSDGGVVVQDCLELLNNLIRHSSSNQMLLKETMGFDPLISILKIRRGSAFNFTQQKTVNLLGALNTVELLLMGGPSGESGKDANKNANQAALAQKNILDHLLLLGVESQWAPVALRCMALRCIGNLVLRNPQNLDSLAKKQVGEEPHVQPALNAILSIVLRTSIAQEFVAADYVFKCFCEKNPNGQALLASTIVPHPNQGDTHGPASDMPFGSILLQALVSSDANGDMEACCRASSVLSHIIKENLQSKDRVLQIQLETPTPSLGRTEPLLHRIVTCLSIAASADGENDQSSHPEESYIQPVILRLLIVWLVDCSNAVNCLLESAVHLNYVLELASSKRYTACVRGLAAVVLGACILYNASREKGRDAFAVADAISQKIGLTTYFLRFDELRKSLAHPSSEQQHRKE

SEQ ID NO: 99762 - protein, 367 aa, Setaria italica
  Transcript Sequence Number=SeqID_33788
  Gene Ontology: Mol. function=protein transporter activity; Cellular component=cytoplasm; Biological process=intracellular protein transport
  Homolog annotation: Hit_ID=B9S666; Match level="QueryCoverage=97%, HitCoverage=39%, E-value=1e-109, Identity=55%"; Hit description =Vesicle docking protein P115, putative
  Pfam annotation: Domain name=Uso1_p115_C; Domain location=241-363; Score=133.5; E_value=6.9e-37; Accession=PF04871.5; Description=Uso1 p115 like vesicle tethering protein, C terminal region
ESAVHLNYVLELASSKRYTACVRGLAAVVLGACILYNASREKGRDAFAVADAISQKIGLTTYFLRFDELRKSLAHPSSEQQHRKELSRSSLNSMSDFQEIEEDETNKDDQHPVLSEIFDPQFVNFLSKLEADIRENIMDIFSRTKTATAVLPAELEQKNGEVDGEYIKRLKSFVEKQCNEMQELLARNAMLAEELVKTGGGNTADTAQKPSSGRERVQIEALRQELEGAKRQIEALKIEKSQIEAEANNQRNLAVKVESDLKSLSDAYNSLEQANYRLDAEVKTLRQGGSVPYPDVEAIKAQAKEEAEKDSEAELNDLLVCLGQEQTKVEKLSARLAELGEDADTLLQGIGDDTAIPDDDDEDEDDE

SEQ ID NO: 99763 - protein, 71 aa, Setaria italica
  misc_feature (44)..(44): Xaa can be any naturally occurring amino acid
  Transcript Sequence Number=SeqID_33789
  Gene Ontology: Mol. function=sequence-specific DNA binding; Cellular component=nucleus; Biological process=regulation of transcription, DNA-dependent
  Homolog annotation: Hit_ID=Q6VAM4; Match level="QueryCoverage=100%, HitCoverage=43%, E-value=3e-25, Identity=78%"; Hit description=MADS -box transcription factor 23
  Pfam annotation: Domain name=SRF-TF; Domain location=1-41; Score =64.0; E_value=5.7e-16; Accession=PF00319.10; Description=SRF-type transcription factor (DNA-binding and dimerisation domain)
VTFSKRRSGLFKKAKELAILCDAEVGLIVFSSTGRQYDFASTSXSMKSVIERYSEAKEDHHQTLSASAEAK

SEQ ID NO: 99764 - protein, 83 aa, Setaria italica
  Transcript Sequence Number=SeqID_33790
  Gene Ontology: Cellular component=integral to membrane
  Homolog annotation: Hit_ID=Q2RB03; Match level="QueryCoverage=100%, HitCoverage=42%, E-value=3e-31, Identity=64%"; Hit description =Mpv17/PMP22 family protein, expressed
  Pfam annotation: Domain name=Mpv17_PMP22; Domain location=12-78; Score=85.4; E_value=2.1e-22; Accession=PF04117.4; Description=Mpv17 PMP22 family
LVTISGASGAIARLLLDQPSLVVPQLKQEWLSSVLANWQLWIPFQFLNFYFVPQKFQVLAANFVALAWNVILSFKAHKEVIAK

SEQ ID NO: 99765 - protein, 161 aa, Setaria italica
  Transcript Sequence Number=SeqID_33791
  Homolog annotation: Hit_ID=Q7F2I6; Match level="QueryCoverage=94%, HitCoverage=10%, E-value=4e-22, Identity=38%"; Hit description =P0432B10.2 protein
KQDASCSIKKTLRCAVRTTWRCAFEYRALFSLLLLLYLLYKYSPGFFAFLLSNSPVIGCTAILLGVLISYGGAHLPEIDEDRKAPEGIAAPKFEISSRNVNIEADQRFSVPAMKENIIREASFGRRDGNKCIDLDESVPLLKGPDLQDERVDAEGTRSTTC

SEQ ID NO: 99766 - protein, 247 aa, Setaria italica
  Transcript Sequence Number=SeqID_33792
ESQSKAPVSPVPKSVEPSLPLVKIPAPEPSKENSGVMWISSPDRLEDPRRPFHYSNSSGSPSVSESGSDIYSKREVIQKLRQHLKKRDEMIMEMQAQIADLKNSLNIQVTQSTNLQSQLDAANRDLFESEREIQHLRKIIADHCVAEALAHEKPLQAGHWQSDATNGHSNGYADGSIDDADLHCVGMEKRKGEVERVEMLKKEVVELKEVIEGKDFVLQSYKEQKVELCSKIRELQEKLSAQVPNIL

SEQ ID NO: 99767 - protein, 157 aa, Setaria italica
  Transcript Sequence Number=SeqID_33793
MAFPAGTPARKLLLPGISAKAGSVAVGFDLDGAVDFFSGLWQLVKAKAAEILAYLATLFSALAKKVDELLPPDTRSETLRQWLHVAVTVVLPAALGALVLLCVARCCWRCCCARNRAPRGRLMVAPGRGGARMPRDVFEDDPRRYFRDLRARKPLVY

SEQ ID NO: 99768 - protein, 165 aa, Setaria italica
  Transcript Sequence Number=SeqID_33794
  Subcellular localization annotation: CTP_CleavageSite=18; ConfidenceScore=5.01e-01
GAWWPRRRRPRRQRLRVPAAASHSHSPSSAAASRRGAAVQDRLQVPIDPLIPRHPLLLALSSASTPLSQITTGALTQPPTPLSPSHFCVSREPFLAVAWFPPLVRQGESAPPGVATRGRGEMASVNRKRSRERMGVEGKRRARPAHRRTEGERDRGKARAVHAVA

SEQ ID NO: 99769 - protein, 202 aa, Setaria italica
  Transcript Sequence Number=SeqID_33795
  Gene Ontology: Cellular component=nucleolus
  Pfam annotation: Domain name=Rrp15p; Domain location=48-178; Score =106.4; E_value=9.4e-29; Accession=PF07890.4; Description=Rrp15p
RRRRRDEEEEEEEEEDEALSHSDQEEEDEEEEGVSTSATTRFEQGCRAFRVAFLKIMAKKLPDDPLGPILSAHKKLVATKLAEELEEHKPKGEARKEKRMAAEKGHVIPEDHLDSKEKELIKVATKGVVRLFNAVSKAQKPRKDLNPSRTKDAKVLAKERKNTFLAELEMPSHQDKKSQAPSNFSKRTGKDEDEPAWAPLRD

SEQ ID NO: 99770 - protein, 69 aa, Setaria italica
  Transcript Sequence Number=SeqID_33796
  Gene Ontology: Mol. function=methyltransferase activity
  Homolog annotation: Hit_ID=B6TUL7; Match level="QueryCoverage=66%, HitCoverage=12%, E-value=1e-16, Identity=93%"; Hit description=CMV 1a interacting protein 1
LPRSTGRRRRNAVVVAAATGTGPAVPQEGALERPAWSGETPLSRLVGALIAFKPLYSLMKLASREVIIR

SEQ ID NO: 99771 - protein, 84 aa, Setaria italica
  Transcript Sequence Number=SeqID_33797
  Gene Ontology: Mol. function=methyltransferase activity
  Homolog annotation: Hit_ID=B6TUL7; Match level="QueryCoverage=50%, HitCoverage=11%, E-value=1e-11, Identity=76%"; Hit description=CMV 1a interacting protein 1
GGFAGAAAGCGGGDEAEAAARVEEKRLGWAVEEERERGGEEEVLHGGAAEMVERIRDPNLVYPNYYLSPFHAYDEGNLSWLAAA

SEQ ID NO: 99772 - protein, 107 aa, Setaria italica
  Transcript Sequence Number=SeqID_33798
  Gene Ontology: Mol. function=methyltransferase activity; Biological process=metabolic process
  Homolog annotation: Hit_ID=B6TUL7; Match level="QueryCoverage=80%, HitCoverage=23%, E-value=6e-42, Identity=96%"; Hit description=CMV 1a interacting protein 1
EDEAMGLPSDSFDLVSLAYVCHECPARAITGLVKEAFRVLRPGGTIALTDNSPKSKVLQELSPVLFTLMKSTEPFLDEYYMLDLEETMSTSLVFYSKLVLVYLNLTF

SEQ ID NO: 99773 - protein, 78 aa, Setaria italica
  Transcript Sequence Number=SeqID_33799
  Gene Ontology: Mol. function=methyltransferase activity
  Homolog annotation: Hit_ID=B6TUL7; Match level="QueryCoverage=50%, HitCoverage=10%, E-value=1e-15, Identity=97%"; Hit description=CMV 1a interacting protein 1
IHAKKIIILIKLQCHECPARAITGLVKEAFRVLRPGGTIALTDNSPKSKVLQVSFITIFPPHLLLFYLHCDVISHSVM

SEQ ID NO: 99774 - protein, 201 aa, Setaria italica
  misc_feature (135)..(135): Xaa can be any naturally occurring amino acid
  Transcript Sequence Number=SeqID_33800
  Gene Ontology: Mol. function=methyltransferase activity; Biological process=metabolic process
  Homolog annotation: Hit_ID=B6TUL7; Match level="QueryCoverage=99%, HitCoverage=61%, E-value=1e-102, Identity=83%"; Hit description=CMV 1a interacting protein 1
  Pfam annotation: Domain name=Methyltransf_11; Domain location=57-155; Score=48.3; E_value=3.1e-11; Accession=PF08241.4; Description =Methyltransferase domain
  Pfam annotation: Domain name=Methyltransf_12; Domain location=57-153; Score=36.0; E_value=1.5e-07; Accession=PF08242.4; Description =Methyltransferase domain
  Pfam annotation: Domain name=Ubie_methyltran; Domain location=22-196; Score=-141.4; E_value=0.035; Accession=PF01209.10; Description =ubiECOQ5 methyltransferase family
  Pfam module annotation: Pfam domain module=Methyltransf _11::Methyltransf_12::Ubie_methyltran; Domain location=57-155::57 -153::22-196
RTAAAEAEPATMSIAKRAIPEATSIEEANQIVRGNWLNAIEEHHLKYSGNCQINDILDIGCSVGVSTRYLAEKFPSAQAVGLDLSPYFLAVAAQREEKLSRQNPIRWVHANGEATGLPSDSFDLVSLAYVEQSPXTDNSPKSKVLQELSPVLFTLMKSTEPFLDEYYMLDLEETMRQVGFINVCSILTDARHRTVTATVPY

SEQ ID NO: 99775 - protein, 374 aa, Setaria italica
  Transcript Sequence Number=SeqID_33801
  Gene Ontology: Mol. function=methyltransferase activity; Biological process=metabolic process
  Homolog annotation: Hit_ID=B6TUL7; Match level="QueryCoverage=86%, HitCoverage=89%, E-value=0.0, Identity=94%"; Hit description=CMV 1a interacting protein 1
  Pfam annotation: Domain name=Methyltransf_11; Domain location=207 -308; Score=105.2; E_value=2.2e-28; Accession=PF08241.4; Description =Methyltransferase domain
  Pfam annotation: Domain name=Methyltransf_12; Domain location=207 -306; Score=78.2; E_value=2.9e-20; Accession=PF08242.4; Description =Methyltransferase domain
  Pfam annotation: Domain name=Methyltransf_4; Domain location=182-363; Score=-70.1; E_value=0.031; Accession=PF02390.9; Description=Putative methyltransferase
  Pfam annotation: Domain name=Ubie_methyltran; Domain location=172 -369; Score=-108.5; E_value=0.00021; Accession=PF01209.10; Description=ubiECOQ5 methyltransferase family
  Pfam module annotation: Pfam domain module=Methyltransf _11::Methyltransf_12::Methyltransf_4::Ubie_methyltran; Domain location=207-308::207-306::182-363::172-369
  Subcellular localization annotation: CTP_CleavageSite=44; ConfidenceScore=5.64e-01
KRLPKKVTTEQAWRPSPPRAGATATASGSLPRSTGRRRRNAVVVAAATGTGPAVPQEGALERPAWSGETPLSRLVGALIAFKPLYSLMKLASREVIIRTAEKSNIPWREMTKKVLESDVYEVFERIRDPNLVYPNYYLSPFHAYDEGNLSWLAAAEAEPATMSIAKRAIPEATSIEEANQIVRGNWLNAIEEHHLKYSGNCQINDILDIGCSVGVSTRYLAEKFPSAQAVGLDLSPYFLAVAAQREEKLSRQNPIRWVHANGEATGLPSDSFDLVSLAYVCHECPARAITGLVKEAFRVLRPGGTIALTDNSPKSKVLQELSPVLFTLMKSTEPFLDEYYMLDLEETMRQVGFINVCSILTDARHRTVTATVPY

SEQ ID NO: 99776 - protein, 107 aa, Setaria italica
  Transcript Sequence Number=SeqID_33802
  Gene Ontology: Mol. function=hydrolase activity, hydrolyzing O -glycosyl compounds; Cellular component=cell wall; Biological process= carbohydrate metabolic process
  Homolog annotation: Hit_ID=B6T2W7; Match level="QueryCoverage=64%, HitCoverage=21%, E-value=3e-27, Identity=86%"; Hit description =Xyloglucan endotransglucosylase/hydrolase protein 32
MARPGDVPVRQATALLLACALAPLLTLPLQPCAAQQPPSPGYYPSATLRSLAFSEAYRTLWGPQHQTLSPDGRSLTLWMDRSSGSGFKSARAYRSGYFGASVRVQPG

SEQ ID NO: 99777 - protein, 300 aa, Setaria italica
  Transcript Sequence Number=SeqID_33803
  Gene Ontology: Mol. function=hydrolase activity, hydrolyzing O -glycosyl compounds; Cellular component=cell wall; Biological process= carbohydrate metabolic process
  Homolog annotation: Hit_ID=B6T9H5; Match level="QueryCoverage=90%, HitCoverage=91%, E-value=1e-130, Identity=82%"; Hit description =Xyloglucan endotransglucosylase/hydrolase protein 32
  Pfam annotation: Domain name=Glyco_hydro_16; Domain location=47-231; Score=305.4; E_value=1.2e-88; Accession=PF00722.13; Description =Glycosyl hydrolases family 16
  Pfam annotation: Domain name=XET_C; Domain location=254-300; Score =60.8; E_value=5.2e-15; Accession=PF06955.4; Description=Xyloglucan endo-transglycosylase (XET)
  Pfam module annotation: Pfam domain module=Glyco_hydro_16::XET_C; Domain location=47-231::254-300
MPDKKKNLLVAPCLLLLPAIVLLHPPAAQAQPSPGYYPSSMVRSMAFSEGYVNLWGPQHQTLSQDQKALTLLMDRSSGSGFKSKRSYRNGYFGASIKVQPGYTAGVNTAFYLSNNELYPGKHDEIDMELLGTVPGEPYTLQTNVYVRGTGDGARLVGREMRFHLWFDPAADFHHYAILWNPDEIVFLVDDVPVRRYAGDAFPDREMWAYGSIWDASDWATDGGRYRADYAYQPFVARFQGFKTAGCEVAAPSTCRPMPASPAGTGLSSQQQDAMRWAQHRSMVYYYCQDHTKDRALYPEC

SEQ ID NO: 99778 - protein, 111 aa, Setaria italica
  Transcript Sequence Number=SeqID_33804
  Homolog annotation: Hit_ID=B9R997; Match level="QueryCoverage=99%, HitCoverage=15%, E-value=5e-12, Identity=37%"; Hit description =Pentatricopeptide repeat-containing protein, putative
  Pfam annotation: Domain name=PPR; Domain location=29-63; Score=22.8; E_value=0.0014; Accession=PF01535.12; Description=PPR repeat
  Pfam annotation: Domain name=PPR; Domain location=64-97; Score=10.5; E_value=0.5; Accession=PF01535.12; Description=PPR repeat
  Pfam module annotation: Pfam domain module=PPR::PPR; Domain location =29-63::64-97
MGSCLLGEVGKALDLFDEAVRDGVALTNVTYGVLIKGCDAEGMTDKAYELCHQMIEQGLLSSTHGFNLVIKGLLRDKRWEDAIGLLEVVADTGVPDVFTYNCLIHWLCQRQ

SEQ ID NO: 99779 - protein, 84 aa, Setaria italica
  misc_feature (5)..(5): Xaa can be any naturally occurring amino acid
  Transcript Sequence Number=SeqID_33805
  Gene Ontology: Mol. function=calcium-dependent phospholipid binding; Cellular component=cytoplasm
  Homolog annotation: Hit_ID=Q8H5B8; Match level="QueryCoverage=100%, HitCoverage=28%, E-value=2e-32, Identity=76%"; Hit description =Annexin-like protein
  Pfam annotation: Domain name=Annexin; Domain location=1-55; Score =18.7; E_value=0.00022; Accession=PF00191.12; Description=Annexin
EKQLXGNEVVRIISTRSKSQLRATFQQYKEDQGRDIAEDINSRCSSQFGRMLKSAVWCLTSPEKHFAQVIRYSILGVGTYEDLL

SEQ ID NO: 99780 - protein, 593 aa, Setaria italica
  Transcript Sequence Number=SeqID_33806
  Gene Ontology: Mol. function=hydrolase activity; Cellular component =integral to membrane; Biological process=biological_process
  Homolog annotation: Hit_ID=B6U4K5; Match level="QueryCoverage=96%, HitCoverage=97%, E-value=0.0, Identity=70%"; Hit description =Embryogenesis-associated protein EMB8
  Pfam annotation: Domain name=Abhydrolase_1; Domain location=184-406; Score=23.9; E_value=6.6e-05; Accession=PF00561.12; Description =alphabeta hydrolase fold
MEAAASSDGESAGELLLRAAALVPWTHYALAALALATALLYRFLELHFIGDLLRGLRGGRVALTFHPESQVYHRVASKCRSLHGRYLATPWLASPHLQTLFLSISGRPPSFTYRRQLYTVHDGGTIALDWLLASDLEAADVDSCDESISKDDSTPLLLVIPGLTSDSSAAYVKHLVFSMASKGWNVVVSNHRGLGGISITSDCFYNAGWTEDMREVVNYLHQKYPEAPLFTVGTSIGANIVVKYLGEEGESTPVAGAASICSPWDLLVTNRFISRKLVQRCYDRALAIGLKGYAKLHQPVLARLANWEAITSSSSIREFDRHATCVVAKYETVDTFYRKCSSANYIGNVSVPLLCISALDDPLCTREAIPWDECRANKNIVLATTPNGGHLAFFEGLTAGRLWWVRPVTEFLCALHDSCYMHRQKAQEHGLHSSLESLIDKSPYVNFMEDGMVAAVTNDGPDNDDSLHNQIVDEIKLSDDMVAIEQNEQTGEIQNESDSGVGDKNNSEGNVTSFQGHEGNHEQREEPNANNIRDAIAPVRRSINQITRSQGKSVWLLAYIAVVTSWPLLGTLGFFLFRKRFSNSLLAKKMKKL

SEQ ID NO: 99781 - protein, 133 aa, Setaria italica
  misc_feature (7)..(7): Xaa can be any naturally occurring amino acid
  Transcript Sequence Number=SeqID_33807
  Gene Ontology: Mol. function=amino acid binding; Biological process =metabolic process
  Homolog annotation: Hit_ID=B6U9J2; Match level="QueryCoverage=97%, HitCoverage=28%, E-value=8e-61, Identity=88%"; Hit description=ACR4
  Pfam annotation: Domain name=ACT; Domain location=58-121; Score=39.1; E_value=1.8e-08; Accession=PF01842.17; Description=ACT domain
FSSDGSXFMDVFNVTDRDGNKVVDASTISYIQKTLESDDWYYPEARNSVGIVPSEEYTSIELTGTDRPGLLSEVCAVLAAMGCAVQSAELWTHNTRVAAVVHVTDAEAGGAIEDACRIAGISARLGNLLRGQT

SEQ ID NO: 99782 - protein, 88 aa, Setaria italica
  Transcript Sequence Number=SeqID_33808
  Gene Ontology: Mol. function=oxidoreductase activity, acting on the CH-OH group of donors, NAD or NADP as acceptor; Cellular component =cytoplasm; Biological process=cellular carbohydrate metabolic process
  Homolog annotation: Hit_ID=Q7F9T0; Match level="QueryCoverage=86%, HitCoverage=19%, E-value=2e-30, Identity=82%"; Hit description =Malate dehydrogenase
  Pfam annotation: Domain name=Ldh_1_N; Domain location=2-87; Score= -14.3; E_value=3.8e-05; Accession=PF00056.15; Description =lactatemalate dehydrogenase, NAD bin
PVVLHVLDIPRMADALNGVRMELVDAALPLLRGVVATSDEAEAFQGVNFAVLIGGWPRKDGMERKDLIAKNVAIYKSQASALQQQAAP

SEQ ID NO: 99783 - protein, 179 aa, Setaria italica
  Transcript Sequence Number=SeqID_33809
SEVSGEGKRYWGVLKTAGRERLELCSGRDWRGFEMRGHPSPLQTKGEGFCFWQDQELKLKKRAQHQTRRGKRKLRNTKDLTPLFFSLLSCGAARTMLEPPVKRNGVGCAGIVLEIYSYKQEKNRAKLDFQMGEDAQAQMQRAATPSLLSPNTLQVFSMPLNAVHHDEGELHSLPCKSYC

SEQ ID NO: 99784 - protein, 42 aa, Setaria italica
  Transcript Sequence Number=SeqID_33810
KAASTGQVETNLPAVGPASYQQHLSSTSMPGPSPAGKQHLSL

SEQ ID NO: 99785 - protein, 76 aa, Setaria italica
  Transcript Sequence Number=SeqID_33811
MQARMIIKLRTNATATGRSMNESCAQLLLLEVDGEDGAEVHGRDVVDGSGHELLHDEAVGALGGVEGVPEHEGVAV

SEQ ID NO: 99786 - protein, 61 aa, Setaria italica
  Transcript Sequence Number=SeqID_33812
  Gene Ontology: Mol. function=DNA binding
  Homolog annotation: Hit_ID=Q5QMQ4; Match level="QueryCoverage=78%, HitCoverage=12%, E-value=4e-14, Identity=78%"; Hit description =Homeobox transcription factor-like
YTEGDENSSGSQSEDNEENGQPMDDDYEEQVPDYSIGYSSGSRPHGMMSMMDPESDEGDEY

SEQ ID NO: 99787 - protein, 183 aa, Setaria italica
  Transcript Sequence Number=SeqID_33813
  Gene Ontology: Mol. function=hydrolase activity, acting on ester bonds; Biological process=lipid metabolic process
  Homolog annotation: Hit_ID=B6UBC0; Match level="QueryCoverage=70%, HitCoverage=32%, E-value=4e-66, Identity=93%"; Hit description =Anther-specific proline-rich protein APG
  Subcellular localization annotation: CTP_CleavageSite=43; ConfidenceScore=5.43e-01
MLYIITIEPQVSMCMRPRTNTWPTPRTHRPSPRSLPTMMRSLLAAALAVLGLLARPSECARAFFVFGDSLVDNGNNNYLMTTARADSPPYGIDFPTHRATGRFSNGKNIPDIISEHLGAETTLPYLSPELRGQKLLVGANFASAGVGILNDTGIQFVDILRMSRQLRYFGEYQAKLRALVGAA

SEQ ID NO: 99788 - protein, 120 aa, Setaria italica
  misc_feature (12)..(12): Xaa can be any naturally occurring amino acid
  Transcript Sequence Number=SeqID_33814
  Gene Ontology: Mol. function=hydrolase activity, acting on ester bonds; Cellular component=apoplast; Biological process=lipid metabolic process
  Homolog annotation: Hit_ID=B6U0K0; Match level="QueryCoverage=100%, HitCoverage=31%, E-value=3e-57, Identity=89%"; Hit description =Anther-specific proline-rich protein APG
FGDSLVDNGNNXNYLLTAARADSPPYGIDTPDHRATGRFSNGKNVPDIISEHLGAEPVLPYLSPELDGDKMLVGANFASAGVGILNDTGIQFANIIHISKQLLYFQQYQKRLSSLIGPEQ

SEQ ID NO: 99789 - protein, 87 aa, Setaria italica
  Transcript Sequence Number=SeqID_33815
PRHTGLTQQQEASSSTRHPRLLPRPRRTQHHPRHGPGGALDFFQRHQPAGHEFIYVHVTCRSRTLCPARWQHNLIGVVTQLSLTVFS

SEQ ID NO: 99790 - protein, 68 aa, Setaria italica
  Transcript Sequence Number=SeqID_33816
  Gene Ontology: Mol. function=transporter activity; Cellular component= mitochondrial inner membrane; Biological process=mitochondrial transport
  Homolog annotation: Hit_ID=Q66PX4; Match level="QueryCoverage=100%, HitCoverage=21%, E-value=5e-27, Identity=91%"; Hit description =Mitochondrial uncoupling protein 4
  Pfam annotation: Domain name=Mito_carr; Domain location=5-65; Score= -11.9; E_value=0.041; Accession=PF00153.19; Description=Mitochondrial carrier protein
MGVKGFVEGGIASIVAGCSTHPLDLIKVRMQLQGEAAAAVPPQPALRPALAFHAGGHTVALPHHHDIP

SEQ ID NO: 99791 - protein, 91 aa, Setaria italica
  misc_feature (49)..(49): Xaa can be any naturally occurring amino acid
  Transcript Sequence Number=SeqID_33817
  Gene Ontology: Mol. function=structural molecule activity; Cellular component=protein complex; Biological process=microtubule-based movement
  Homolog annotation: Hit_ID=Q646H4; Match level="QueryCoverage=79%, HitCoverage=65%, E-value=2e-23, Identity=77%"; Hit description=Alpha- tubulin (Fragment)
VVPGGDLAKVQRAVCMISNSTSVVEVFSRIDHKFDLMYAKRAFVHWYVXGEGMEEGEFSEAREDLAALEKDYEEVGAEFDEGEEGDEGDEY

SEQ ID NO: 99792 - protein, 363 aa, Setaria italica
  misc_feature (320)..(320): Xaa can be any naturally occurring amino acid
  Transcript Sequence Number=SeqID_33818
  Gene Ontology: Mol. function=hydrolase activity, acting on ester bonds; Biological process=lipid metabolic process
  Homolog annotation: Hit_ID=B6TE23; Match level="QueryCoverage=92%, HitCoverage=90%, E-value=1e-177, Identity=89%"; Hit description =Anther-specific proline-rich protein APG
  Pfam annotation: Domain name=Lipase_GDSL; Domain location=28-340; Score=143.6; E_value=6.2e-40; Accession=PF00657.14; Description=GDSL- like LipaseAcylhydrolase
MDALPVTFLLAAVAAALLGTASAAPRAFFVFGDSLVDNGNNNYLMTTARADAPPYGIDFPTHMPTGRFSNGLNIPDIISEHLGSEPALPYLSPDLRGDRLLVGANFASAGVGILNDTGIQFVNIIRIGQQLENFQEYQQKLAAFVGVDAAAQVVNNALVLITLGGNDFVNNYYLVPFSVRSRQFAIQDYVPYLISEYRKILVRLYELGARRVVVTGTGMIGCVPAELAMHSIDGECARELTEAADLFNPQLAQMLGELNAEIGRDVFISANTNRVSFDFMFNPQDYGFVTSKVACCGQGPYNGIGLCTPASNVCPNRDVXAYWDAFHPTERANRIIVGQFMHGSTDHISPMNISTILAMDNRD

SEQ ID NO: 99793 - protein, 593 aa, Setaria italica
  misc_feature (520)..(520): Xaa can be any naturally occurring amino acid
  Transcript Sequence Number=SeqID_33819
  Homolog annotation: Hit_ID=B6TKI3; Match level="QueryCoverage=99%, HitCoverage=95%, E-value=0.0, Identity=89%"; Hit description =Calmodulin binding protein
  Pfam annotation: Domain name=Calmodulin_bind; Domain location=64-367; Score=646.7; E_value=2.1e-191; Accession=PF07887.3; Description =Calmodulin binding protein-like
SLFLLCSVIVEALKMDSLQRLCSSLEPILRRVVSEEVERALVRLGPATISGRSSPKRIEGPDGRTLQLQFRTRLSLPLFTGGKVEGEQGAAIHVVLLDAGSGCVVSSGPESSAKLDIVVLEGDFNNEDEEGWTGEEFDSHVVKEREGKRPILTGDLQVTLKEGVGTIGELTFTDNSSWIRSRKFRLGLKIASGFCEGVRVREAKTEAFMVKDHRGELYKKHYPPTLKDEVWRLEKIGKDGSFHKRLNKSGISTVEDFLRLVVREPQKLRSILGSGMSNKMWETLVEHAKTCVLSGKYYIYYSDESRSIGAIFNNIYAFCGLISGEQFYSSESLDDSQKLFADALVKKAYDNWMYVIEYDGKGLFNPKPKKKAASTGQVETNLPAVGPASYQQHLSSTSMPGPSPAGRSDSVGYDGDQSATHPAQLQSSSSNVQSPFDDTFSFLPPNMLTGSANDAMGLELGQLQQVISQSQSIQPANVGYTDWPRNRESQYGDDFTEDIRIKSHQMLESEDMQQLLRVFXQMGGASGSLPDDTFNFQSYMPSPLPNLGFEGERSHSSGKAVVGWLKIKAAMRWGIFVRKKAAERRAQLVELED

SEQ ID NO: 99794 - protein, 369 aa, Setaria italica
  Transcript Sequence Number=SeqID_33820
  Gene Ontology: Mol. function=hydrolase activity, acting on ester bonds; Biological process=lipid metabolic process
  Homolog annotation: Hit_ID=B6U0K0; Match level="QueryCoverage=94%, HitCoverage=93%, E-value=1e-178, Identity=84%"; Hit description =Anther-specific proline-rich protein APG
  Pfam annotation: Domain name=Lipase_GDSL; Domain location=29-341; Score=162.6; E_value=1.1e-45; Accession=PF00657.14; Description=GDSL- like LipaseAcylhydrolase
MASSWLVLVLLPLLCLGTTLPGSDAARAFFVFGDSLVDNGNNNYLLTAARADSPPYGIDTPDHRATGRFSNGKNVPDIISEHLGAEPVLPYLSPELDGDKMLVGANFASAGVGILNDTGIQFANIIHISKQLLYFQQYQKRLSSLIGPEQTARLVSGSLVLITLGGNDFVNNYYLVPYSARSREFSLPDYINYILSEYRQILTKLYDLGARRVLVQGVGPIGCVPAELALHSLDGSCDRELQRAAEMYNPRLMALLADLNAGYGSDVFVGVNTQRIHNDFIDDPKAYGFETATQACCGQGRFNGMGLCTMVSSLCADRDAFVFWDAFHPTERANRLIVQQFMSGSVDYIAPMNLSTVLAIDLQKEQLRT

SEQ ID NO: 99795 - protein, 157 aa, Setaria italica
  misc_feature (14)..(14): Xaa can be any naturally occurring amino acid
  Transcript Sequence Number=SeqID_33821
  Gene Ontology: Mol. function=structural molecule activity; Cellular component=protein complex; Biological process=microtubule-based movement
  Homolog annotation: Hit_ID=Q39719; Match level="QueryCoverage=84%, HitCoverage=35%, E-value=2e-73, Identity=94%"; Hit description=Alpha- tubulin (Fragment)
  Pfam annotation: Domain name=Tubulin_C; Domain location=2-99; Score =96.9; E_value=7e-26; Accession=PF03953.9; Description=TubulinFtsZ family, C-terminal domai
LPNSVALVAKCDPXHGKYMACCLMYRGDVVPKDVNAAVATIKTKRTIQFVDWCPTGFKCGINYQPPSVVPGGDLAKVQRAVCMISNSTSVVEVFSRIDHKFDLMYAKRAFVHWYVGEGMEEGEFSEAREDLAALEKDYEEVGAEFDEGEEGDEGDEY

SEQ ID NO: 99796 - protein, 36 aa, Setaria italica
  Transcript Sequence Number=SeqID_33822
AITAASTRKNEAIFSEIQSQLKHENVTVDVKATSES

SEQ ID NO: 99797 - protein, 116 aa, Setaria italica
  Transcript Sequence Number=SeqID_33823
  Gene Ontology: Mol. function=voltage-gated anion channel activity; Cellular component=mitochondrial outer membrane; Biological process =anion transport
  Homolog annotation: Hit_ID=Q9SPD7; Match level="QueryCoverage=98%, HitCoverage=41%, E-value=1e-49, Identity=90%"; Hit description=Outer mitochondrial membrane protein porin
MAAAGPGLYTEIGKKARDLLYKDYHTDQKFTLTTYASNGAAITAASTRKNEAIFSEIQSQLKHENVTVDVKATSESNVTTTFTVHELGTPGLKAILCIPFPYQKSAKAELQLFQAI

SEQ ID NO: 99798 - protein, 124 aa, Setaria italica
  misc_feature (1)..(13): Xaa can be any naturally occurring amino acid
  Transcript Sequence Number=SeqID_33824
XXXXXXXXXXXXXTNPSLVTLNYHYTLISCLIKRMGQSINPPCVGIANSALAVVSCQPKAARSLNVWAAACIGPSANRRAERSRLLPYTDNPTFKVPPDMEMQQDCASPNSKGLTEPSNWITVP

SEQ ID NO: 99799 - protein, 155 aa, Setaria italica
  Transcript Sequence Number=SeqID_33825
AETHAGGARFNPAAAERGSRSQAQEPGARFPERSPTKRLRFQAQEPKIPPDPPAQSASPLCLVPAPPETASSRFAPAPSPRTGVRRSRSSRLLFCGRRHKPSLTVGDLAAVAFILSPGLCRCRTVLLFVVVREVNLGKGNPKVSDSSTEAPPPCG

SEQ ID NO: 99800 - protein, 157 aa, Setaria italica
  Transcript Sequence Number=SeqID_33826
GRGAWSPPPHHFGGCKLQDNSDISNDPSVHQHRQPALVFHALVWSDHSIRSDSRPVCAITAPGSQSPKTATTYTTQNVPPFVLLFLPLWIMQQVDDGDIGSAHTPKLRLSECGPHAVSMPQKKNLQCMYITRSATTPQVAHSSDQVFFSRTERAGAR

SEQ ID NO: 99801 - protein, 158 aa, Setaria italica
  Transcript Sequence Number=SeqID_33827
  Gene Ontology: Mol. function=transcription repressor activity; Biological process=regulation of nitrogen utilization
  Homolog annotation: Hit_ID=Q9FWQ6; Match level="QueryCoverage=58%, HitCoverage=15%, E-value=1e-30, Identity=73%"; Hit description =F17F16.7 protein
KKSATAMLEEKDGGRDKPAASASAADDEAKKRKKEAGAEDNARALVAGLDDVIVNPVGLGRRSRQVFDEVWRKFSRLGQMSSASSTALAEEEQAVLIRGGPMCEFTVPGAQDTTVLVVGATSRIGRIVVRKLMLRGYNVKLRLTTLEWIAQHETLLVA

SEQ ID NO: 99802 - protein, 146 aa, Setaria italica
  misc_feature (128)..(128): Xaa can be any naturally occurring amino acid
  Transcript Sequence Number=SeqID_33828
  Gene Ontology: Mol. function=transcription repressor activity; Biological process=regulation of nitrogen utilization
  Homolog annotation: Hit_ID=Q9FWQ6; Match level="QueryCoverage=99%, HitCoverage=24%, E-value=3e-56, Identity=72%"; Hit description =F17F16.7 protein
RIGRIVVRKLMLRGYNVKALVRRNDPEVIDMIPRSVEIVVGDVGDPSSVQAAVSGCNKVIYCATARSTITGDLNRVDNQGVRNVTKAFQDYYNQLAQSRAGKSSKSKLTIAKFKSAKSVKGWEVRQGXSYFQDIYPSRFDGGTDAS

SEQ ID NO: 99803 - protein, 596 aa, Setaria italica
  Transcript Sequence Number=SeqID_33829
  Gene Ontology: Mol. function=transcription repressor activity; Biological process=regulation of nitrogen utilization
  Homolog annotation: Hit_ID=Q9FWQ6; Match level="QueryCoverage=84%, HitCoverage=84%, E-value=0.0, Identity=76%"; Hit description =F17F16.7 protein
  Pfam annotation: Domain name=CIA30; Domain location=299-458; Score =119.4; E_value=1.2e-32; Accession=PF08547.4; Description=Complex I intermediate-associated prote
  Pfam annotation: Domain name=Epimerase; Domain location=164-471; Score=-60.3; E_value=0.013; Accession=PF01370.13; Description=NAD dependent epimerasedehydratase family
  Pfam annotation: Domain name=KR; Domain location=162-275; Score= -69.3; E_value=0.0051; Accession=PF08659.2; Description=KR domain
  Pfam annotation: Domain name=NmrA; Domain location=164-586; Score= -81.6; E_value=0.0015; Accession=PF05368.5; Description=NmrA-like family
  Pfam annotation: Domain name=adh_short; Domain location=162-275; Score=-32.3; E_value=0.0018; Accession=PF00106.17; Description=short chain dehydrogenase
  Pfam module annotation: Pfam domain module=CIA30::Epimerase::KR::NmrA: :adh_short; Domain location=299-458::164-471::162-275::164-586::162 -275
  Subcellular localization annotation: CTP_CleavageSite=84; ConfidenceScore=5.84e-01
MAAMAAPRCTSSSSAFLGLPHSNGRQRHGNSCRFVASANPAPVSATLDKETTAAAKPRRSRNRRSRKATKSGSMTVLAPDEPAEAANGSGGGRGMVALDDVIVNPVGLGRRSRQVFDEVWRKFSRLGQMSSASSAAVAEQDPAVLFRGGPMCEFTVPGAQDTTVLVVGATSRIGRIVVRKLMLRGYNVKALVRRNDPEVIDMLPRSVDVVVGDVGDPDTVKAAVSGCSKIIYCATARSTITGDLNRVDNQGVRNVTKAFQDYYNQLAQSRAGKSSKSKLTIAKFKSAKSVKGWEVRQGSYFQDIYPSRFDGGTDASFEFAEGGQAVFSGFVFTRGGYVEISKRLSLPLGSTLDRYDGLLLSVGGNGRSYVVILETGPLADTSQSKKYFARMTTKAGFCRVRVPFSSFRPVNPQDPPLDPFLVHTLTIRFEPKRQRPGDGSQNASDPRNFELILEYIKALPSGQETDIVLVSCTGSGIEANRREQVLKAKKAGEDALRRSGLGYTIVRPGLLQEEPGGQRALIFDQGSRISQGISCADVADICVKALHDSTARNKSFDVCYEYVADQGNELYELVAHLPDKANNYLAPALSVLEKNT

SEQ ID NO: 99804 - protein, 69 aa, Setaria italica
  Transcript Sequence Number=SeqID_33830
LGQPFISRKPHFEYKQAHCRFLTTIVFGNLGSYKLDLTNNYSLRPAKSVLLDSKFIPQRVFFYLLVNLI

SEQ ID NO: 99805 - protein, 104 aa, Setaria italica
  Transcript Sequence Number=SeqID_33831
  Subcellular localization annotation: CTP_CleavageSite=2; ConfidenceScore=5.30e-01
LVAGMPSTTYKPIFNTKPAVSSGTQPTRLPFTTSAAPAILPKHHQKAALCPPGHNLALIDLHAHQMNRWCNAKPHHHPDPITDRTYTYMSNITTSCSSHSICLF

SEQ ID NO: 99806 - protein, 68 aa, Setaria italica
  Transcript Sequence Number=SeqID_33832
  Gene Ontology: Mol. function=transferase activity, transferring groups other than amino-acyl groups
  Homolog annotation: Hit_ID=B6TXA0; Match level="QueryCoverage=100%, HitCoverage=16%, E-value=5e-13, Identity=61%"; Hit description =Anthranilate N-benzoyltransferase protein 1
MKVEVLETTLVTPSEATPRHALRLSNLDLAVPKTHTPLVYYYPKPPAGPDAGAEGGSPFFEPARLRDA

SEQ ID NO: 99807 - protein, 90 aa, Setaria italica
  Transcript Sequence Number=SeqID_33833
  Gene Ontology: Mol. function=electron carrier activity; Biological process=oxidation reduction
  Homolog annotation: Hit_ID=Q8LL74; Match level="QueryCoverage=54%, HitCoverage=9%, E-value=1e-19, Identity=93%"; Hit description =Cytochrome P450 monooxygenase CYP72A16
TRALLLLREAPPWAVAGAAAAVALLWLAAWTLEWAWWTPRRLDRALRAQGLKGTRYRLFTGDVRENARLNREARTKPLPLGCHDITPPRA

SEQ ID NO: 99808 - protein, 65 aa, Setaria italica
  Transcript Sequence Number=SeqID_33834
KIRVRTIRNKIMSYNHYTKANMHWHQVTLSHKLSILPLQVYHSHSNQSISYQFVYGANLMTTYLH

SEQ ID NO: 99809 - protein, 49 aa, Setaria italica
  Transcript Sequence Number=SeqID_33835
  Subcellular localization annotation: CTP_CleavageSite=31; ConfidenceScore=5.01e-01
CCCCPFCCFFICTAQYGSNFFTSVIGSSPARSFQEKRRLMFTTVLESSQ

SEQ ID NO: 99810 - protein, 68 aa, Setaria italica
  Transcript Sequence Number=SeqID_33836
  Subcellular localization annotation: CTP_CleavageSite=45; ConfidenceScore=5.12e-01
WIELKSMNITFTPLSPHFPLSLSPLGLFHKPSAPINVSYCIQEPRRESIRSCCIPLPVMELLRSLNGV

SEQ ID NO: 99811 - protein, 79 aa, Setaria italica
  Transcript Sequence Number=SeqID_33837
  Gene Ontology: Mol. function=protein serine/threonine kinase activity; Biological process=protein amino acid phosphorylation
  Homolog annotation: Hit_ID=B9SEU1; Match level="QueryCoverage=91%, HitCoverage=8%, E-value=3e-33, Identity=93%"; Hit description=Kinase, putative
  Pfam annotation: Domain name=Pkinase_Tyr; Domain location=1-78; Score= -172.8; E_value=0.031; Accession=PF07714.9; Description=Protein tyrosine kinase
YKGLLSDGTVIAVKQLSSRSKQGNREFVNEIGMISALQHPNLVKLYGCCTEGNQLLLVYEYMENNCLARALFVEQHRLR

SEQ ID NO: 99812 - protein, 67 aa, Setaria italica
  Transcript Sequence Number=SeqID_33838
FQRGANSINSDIISILQSVVLIIIRFHRSKLNSKGGNKVLMLVSKTFLSIKLHRVNHQMGDNENTVM

SEQ ID NO: 99813 - protein, 71 aa, Setaria italica
  Transcript Sequence Number=SeqID_33839
TIVEHFDATVSLIVLGQRGGLKDALASIICFNVSNFQGLDFIVDGGPRIADPSTVVDMTGTNPTIIRQGKV

SEQ ID NO: 99814 - protein, 124 aa, Setaria italica
  Transcript Sequence Number=SeqID_33840
  Homolog annotation: Hit_ID=B9RBH9; Match level="QueryCoverage=96%, HitCoverage=37%, E-value=2e-41, Identity=64%"; Hit description=Sua5, putative
  Pfam annotation: Domain name=Sua5_yciO_yrdC; Domain location=1-123; Score=-50.1; E_value=0.042; Accession=PF01300.10; Description=yrdC domain
MQPLSILCRSLRDIDTYTTGFPRGTNQGQANIFRAVKRVIPGPYTFILPATKQFPKQLIKHGSSTRYAKRRQVGVRIPDDPICQAILQNLDEPLICTSVKYLSEDGWILDPVIIADLYEPLVSS

SEQ ID NO: 99815 - protein, 307 aa, Setaria italica
  Transcript Sequence Number=SeqID_33841
  Homolog annotation: Hit_ID=B9RBH9; Match level="QueryCoverage=82%, HitCoverage=81%, E-value=2e-85, Identity=58%"; Hit description=Sua5, putative
  Pfam annotation: Domain name=Sua5_yciO_yrdC; Domain location=90-283; Score=122.9; E_value=1.1e-33; Accession=PF01300.10; Description=yrdC domain
  Subcellular localization annotation: CTP_CleavageSite=46; ConfidenceScore=5.78e-01
MAAADPATAASFSQLSFRRAVCPSPLRLPLSRASPPGRLRVSSTVVALHKRNPKQLKYAAERQFTRGDAGMLRVEVEPSGEDFWKLDPIIDLINRGAVGVIPTDTVYSIVCDLSNNESIERLRRVKGIGDSKPLSILCRSLRDIDTYTTGFPRGTNQGQANIFRAVKRVIPGPYTFILPATKQFPKQLIKHGSSTRYAKRRQVGVRIPDDPICQAILQNLDEPLICTSVKYLSEDGWILDPVIIADLYEPLGLDFIVDGGPRIADPSTVVDMTGTNPTIIRQGKGPKLDWMVAEDEEAQSMFAFKAA

SEQ ID NO: 99816 - protein, 54 aa, Setaria italica
  Transcript Sequence Number=SeqID_33842
NVPLWQAKVPRQQKTLPRFLRVPCRMPYVHMPCKMLSLCKPCYTISVLRCENYL

SEQ ID NO: 99817 - protein, 74 aa, Setaria italica
  Transcript Sequence Number=SeqID_33843
LLKEQLGWGLCLSCPFLWGNSFYFCCCFSSQVRLHDISAFLFLMAKINVCLDAFSAHNMAQEYSTSLKISASAN

SEQ ID NO: 99818 - protein, 118 aa, Setaria italica
  Transcript Sequence Number=SeqID_33844
  Gene Ontology: Mol. function=transition metal ion binding; Cellular component=endoplasmic reticulum membrane; Biological process=fatty acid biosynthetic process
  Homolog annotation: Hit_ID=B6T667; Match level="QueryCoverage=83%, HitCoverage=83%, E-value=1e-37, Identity=75%"; Hit description =Cytochrome b5
  Pfam annotation: Domain name=Cyt-b5; Domain location=44-117; Score =77.2; E_value=5.8e-20; Accession=PF00173.20; Description=Cytochrome b5-like HemeSteroid binding doma
MEILIYISLVVLLGLGALFVIPRSNCKGKGDAAHLAGSGKISRSYTKKEVSTHNTRKDCWIIIKDKVYNVTAYVEEHPGGDAILNNAGDDSTEGFFGPQHGTRVFDIIEDFCIGELRD

SEQ ID NO: 99819 - protein, 140 aa, Setaria italica
  Transcript Sequence Number=SeqID_33845
  Gene Ontology: Mol. function=transition metal ion binding; Cellular component=endoplasmic reticulum membrane; Biological process=fatty acid biosynthetic process
  Homolog annotation: Hit_ID=B6T667; Match level="QueryCoverage=86%, HitCoverage=83%, E-value=4e-35, Identity=62%"; Hit description =Cytochrome b5
  Pfam annotation: Domain name=Cyt-b5; Domain location=66-139; Score =77.2; E_value=5.8e-20; Accession=PF00173.20; Description=Cytochrome b5-like HemeSteroid binding doma
MEILIYISLVVLLGLGALFVIPRSNCKGKVRITCNLSLNPLPLSICYIAGKGDAAHLAGSGKISRSYTKKEVSTHNTRKDCWIIIKDKVYNVTAYVEEHPGGDAILNNAGDDSTEGFFGPQHGTRVFDIIEDFCIGELRD

SEQ ID NO: 99820 - protein, 78 aa, Setaria italica
  Transcript Sequence Number=SeqID_33846
MFTGAHPRIHKLNNKILTIDAAEPLKLKEQLGWGLCLSCPFLWGNSFYFCCCFSSQVRLHDISAFLFLMAKINVCLDA

SEQ ID NO: 99821 - protein, 54 aa, Setaria italica
  Transcript Sequence Number=SeqID_33847
KLKPVVSYNLLGVFPEAHLSVEYFDVWISLSFMCACMQVLKHIYVSSTCIHAHI

SEQ ID NO: 99822 - protein, 86 aa, Setaria italica
  Transcript Sequence Number=SeqID_33848
  Subcellular localization annotation: CTP_CleavageSite=64; ConfidenceScore=5.37e-01
GRCPDRRIPDASDPQSSKSRRRRRELSVASTAADSRTSKSVHVSSFNFKVILLVLERKVLQPARCHGRHESVVLELQRNRREPLQP

SEQ ID NO: 99823 - protein, 91 aa, Setaria italica
  Transcript Sequence Number=SeqID_33849
  Gene Ontology: Mol. function=protein serine/threonine kinase activity; Biological process=protein amino acid phosphorylation
  Homolog annotation: Hit_ID=Q8H4I0; Match level="QueryCoverage=100%, HitCoverage=13%, E-value=5e-40, Identity=81%"; Hit description =Putative receptor-type protein kinase LRK1
  Pfam annotation: Domain name=Pkinase_Tyr; Domain location=1-90; Score= -157.6; E_value=0.003; Accession=PF07714.9; Description=Protein tyrosine kinase
GKVYKGILSKSKSEVAVKRVSHDSSQGIKEFVSEVVSIGHLRHRNLVQLLGYCRRKGELLLVYDYMPNGSLDKYLYGEDNRPILEWAQRFQ

SEQ ID NO: 99824 - protein, 111 aa, Setaria italica
  Transcript Sequence Number=SeqID_33850
  Homolog annotation: Hit_ID=Q67UP0; Match level="QueryCoverage=100%, HitCoverage=36%, E-value=7e-29, Identity=56%"; Hit description =Hydroxyproline-rich glycoprotein-like
MKSPLRRFRGFGHHHRERKDHAPPPAKLDELVYAAQEMDEMRSCYDSLLSAAAATANSVYEFAEAMEEMGTCLLEKAALNYDDDESGRVLMMLGKAQFELQKFVDSYRTNI

SEQ ID NO: 99825 - protein, 63 aa, Setaria italica
  Transcript Sequence Number=SeqID_33851
QDQKIIQISVTKSLIMESKTPISTTEMQKRGGESREHRHIIWLPTHRRTWMSVGPIEIMHERL

SEQ ID NO: 99826 - protein, 57 aa, Setaria italica
  Transcript Sequence Number=SeqID_33852
  Gene Ontology: Mol. function=structural constituent of ribosome; Cellular component=ribonucleoprotein complex; Biological process =translation
  Homolog annotation: Hit_ID=Q9SIP7; Match level="QueryCoverage=63%, HitCoverage=14%, E-value=4e-13, Identity=100%"; Hit description=40S ribosomal protein S3-1
LLGGLAVRRACYGVLRFVMESGAKGCEVIVSGKLRAHVAILELHGLGSLGPELSTHN

SEQ ID NO: 99827 - protein, 114 aa, Setaria italica
  misc_feature (3)..(3): Xaa can be any naturally occurring amino acid
  Transcript Sequence Number=SeqID_33853
  Gene Ontology: Mol. function=oxidoreductase activity, acting on the CH-OH group of donors, NAD or NADP as acceptor; Cellular component =mitochondrion; Biological process=oxidation reduction
  Homolog annotation: Hit_ID=Q9SXP2; Match level="QueryCoverage=96%, HitCoverage=28%, E-value=5e-48, Identity=87%"; Hit description =Formate dehydrogenase 1, mitochondrial
  Pfam annotation: Domain name=2-Hacid_dh_C; Domain location=1-104; Score=-32.6; E_value=2.6e-07; Accession=PF02826.11; Description=D -isomer specific 2-hydroxyacid dehydr
LLXNFLPGYQQVVQGEWNVAGIAHRAYDLEGKKLVGTVGAGRIGRLLLQRLKPFNCNLLYHDRLKIDPELEKEIGAKFEEDLDAMLPKCDVIVINTPLFVKHASCFLGERCVDH

SEQ ID NO: 99828 - protein, 96 aa, Setaria italica
  misc_feature (47)..(47): Xaa can be any naturally occurring amino acid
  misc_feature (71)..(71): Xaa can be any naturally occurring amino acid
  misc_feature (82)..(82): Xaa can be any naturally occurring amino acid
  Transcript Sequence Number=SeqID_33854
  Gene Ontology: Mol. function=structural constituent of ribosome; Cellular component=intracellular; Biological process=translation
  Homolog annotation: Hit_ID=Q7X9L6; Match level="QueryCoverage=81%, HitCoverage=96%, E-value=4e-29, Identity=87%"; Hit description=40S ribosomal protein (Fragment)
GDCEWERLRAQRAKSMKFKDGYMISSGQPVNEYIDSAVRHVLLRQGXFLVIKVKIMLDWDPKGKLGPITPXLPDLVTIHAPXEEDELRPPVLVPEV

SEQ ID NO: 99829 - protein, 85 aa, Setaria italica
  Transcript Sequence Number=SeqID_33855
  Gene Ontology: Mol. function=calcium ion binding
  Homolog annotation: Hit_ID=B6TBW8; Match level="QueryCoverage=92%, HitCoverage=28%, E-value=8e-38, Identity=89%"; Hit description=EF hand family protein
  Pfam annotation: Domain name=efhand; Domain location=48-76; Score =34.3; E_value=5e-07; Accession=PF00036.24; Description=EF hand
LGKSRIQLTEDDVVAFFFSFDEVGKGYITPWDLERMATINDFIWTDSEISKMIRCFDSDGDGKINLEDFRSIIARCNMLQEEPEK

SEQ ID NO: 99830 - protein, 52 aa, Setaria italica
  Transcript Sequence Number=SeqID_33856
  Subcellular localization annotation: CTP_CleavageSite=20; ConfidenceScore=5.04e-01
ASHAAMVLTSAPRRRDNWGRARMSVSSAFRRARKVGRWLVGLALHLALHYSL

SEQ ID NO: 99831 - protein, 327 aa, Setaria italica
  Transcript Sequence Number=SeqID_33857
  Gene Ontology: Cellular component=endoplasmic reticulum membrane; Biological process=protein transport
  Homolog annotation: Hit_ID=B6SZ84; Match level="QueryCoverage=88%, HitCoverage=77%, E-value=1e-119, Identity=69%"; Hit description =Sec12-like protein 1
  Pfam annotation: Domain name=WD40; Domain location=178-216; Score =2.6; E_value=20; Accession=PF00400.24; Description=WD domain, G-beta repeat
  Pfam annotation: Domain name=WD40; Domain location=46-84; Score=8.3; E_value=4.1; Accession=PF00400.24; Description=WD domain, G-beta repeat
  Pfam annotation: Domain name=WD40; Domain location=89-126; Score =21.9; E_value=0.0026; Accession=PF00400.24; Description=WD domain, G- beta repeat
  Pfam module annotation: Pfam domain module=WD40::WD40::WD40; Domain location=178-216::46-84::89-126
VLGEGGAGDAPHGIAVHPAGDELVCATAKGCRLFKLIFEEFTVRIIPRDAQPLESVGPQKCLAFSTDGAKFAIGGEDGHLRIFHWPTMNVLLDEPKAHKSFRDMDISLDSEFLVSTSIDGSARIWKIDEGTPLVNLTRSSDEKIECCRFSRDGMKPFLFCTVAKGSKVVTVVWNISDWKRIGYKRLLGKPISTLSVSLDGKYLALGSHDGDFCAVDVKKMEVSHWSKKAHLGSPVTSIEFCPTERVVISTSNQWGAELTKLNVPADWKEWQVWLVLLALFLASAVLFYMFYERSDSFWKFPMGWHQPAKPWSVLKESPPVPEDQTPW

SEQ ID NO: 99832 - protein, 111 aa, Setaria italica
  Transcript Sequence Number=SeqID_33858
  Gene Ontology: Mol. function=nucleoside-triphosphatase activity; Cellular component=cytosolic ribosome; Biological process=regulation of ARF GTPase activity
  Homolog annotation: Hit_ID=B7GAG2; Match level="QueryCoverage=98%, HitCoverage=17%, E-value=6e-41, Identity=69%"; Hit description =Phosphatase (Fragment)
  Pfam annotation: Domain name=Fer4; Domain location=23-46; Score=41.6; E_value=3e-09; Accession=PF00037.19; Description=4Fe-4S binding domain
RRRCPVNATGRQCIQVTPSSTVSLISEDMCIGCGICVKVCPFNAIQIINLPRELEKETTHRYGPNSFKLHRLPVPRPGQVLGLVGTNGIGKSTALQILCLVKFVSPNFGLN

SEQ ID NO: 99833 - protein, 132 aa, Setaria italica
  Transcript Sequence Number=SeqID_33859
  Gene Ontology: Mol. function=nucleotide binding; Biological process =defense response
  Homolog annotation: Hit_ID=Q2QQK1; Match level="QueryCoverage=90%, HitCoverage=11%, E-value=2e-22, Identity=43%"; Hit description=NB -ARC domain containing protein
LVREVCGRVARFDHVLLVAASRDCTVAKLQREVVSVLGLRDAPTEQAQAAGILGFLRDKSFLLLLDGVCERLDLERVGIPQPLGMANGKVRKVIVASRSEAVCADMGCRNKIKMECLNEEDAWSLFQANVGG

SEQ ID NO: 99834 - protein, 179 aa, Setaria italica
  misc_feature (136)..(136): Xaa can be any naturally occurring amino acid
  misc_feature (168)..(168): Xaa can be any naturally occurring amino acid
  Transcript Sequence Number=SeqID_33860
TRPIVASRMQSIGSTSTNDLDQAMLGIKDDRLPAGTEEESSLYMKGKPSQRIVVEPPKASSGSLEKTLPTPNFLTRMAKKDKAKNREGDLITSGRKITGVHFSPSVPAESIHAAKREAGSDQAVSRHQPELERTAXNHNRKGHSSCRNSGKGSPRKELLIPPDNSNVXIKLLSNSNNNS

SEQ ID NO: 99835 - protein, 127 aa, Setaria italica
  Transcript Sequence Number=SeqID_33861
  Gene Ontology: Mol. function=protein serine/threonine kinase activity; Cellular component=integral to membrane; Biological process=protein amino acid phosphorylation
  Homolog annotation: Hit_ID=Q53ME4; Match level="QueryCoverage=97%, HitCoverage=43%, E-value=2e-51, Identity=51%"; Hit description =Leucine Rich Repeat family protein, expressed
  Pfam annotation: Domain name=LRR_1; Domain location=18-40; Score =11.6; E_value=1.8; Accession=PF00560.25; Description=Leucine Rich Repeat
  Pfam annotation: Domain name=LRR_1; Domain location=42-64; Score =15.4; E_value=0.24; Accession=PF00560.25; Description=Leucine Rich Repeat
  Pfam annotation: Domain name=LRR_1; Domain location=66-88; Score=7.8; E_value=9.8; Accession=PF00560.25; Description=Leucine Rich Repeat
  Pfam annotation: Domain name=LRR_1; Domain location=90-111; Score =4.0; E_value=52; Accession=PF00560.25; Description=Leucine Rich Repeat
  Pfam module annotation: Pfam domain module=LRR_1::LRR_1::LRR_1::LRR _1; Domain location=18-40::42-64::66-88::90-111
STTVVSGAVPPEVGELRRLVKLDLSSNELSGPVPAAVGRCGELTYLDLSRNNLSGPIPEAIAGVRVLNYLNLSRNALEGAIPAAVGAMSSLTAADFSYNDLSGRLPDTGQLGYLNATAFRGLTRGSC

SEQ ID NO: 99836 - protein, 171 aa, Setaria italica
  Transcript Sequence Number=SeqID_33862
MEAAYYLFRSGRPEAATACEEQEEDIGSPSESSESSSPSTSGESSELDDDASSSSSTGSDRFEMSGLMTELPFKRGLSRFFDGKSQSFASLAAVGSLEDLAKPPRKRLKPSRSCGGGLDAHRGRILSPRRHCTKAVARKAAVRTGALAVLAAAAPRRPPLVAAPRPDGVAG

SEQ ID NO: 99837 - protein, 85 aa, Setaria italica
  Transcript Sequence Number=SeqID_33863
  Gene Ontology: Mol. function=protein serine/threonine kinase activity; Cellular component=plasma membrane; Biological process =protein amino acid phosphorylation
  Homolog annotation: Hit_ID=B9RY42; Match level="QueryCoverage=96%, HitCoverage=8%, E-value=2e-29, Identity=70%"; Hit description =Phytosulfokine receptor, putative
EDVMKATRNFDESRIVGCGGFGMVYRATLPDGREAAVKRLSGEFWQVEREFRAEVETLSRVRHRNLVPLQGYCRAGKDRLLILPL

SEQ ID NO: 99838 - protein, 86 aa, Setaria italica
  Transcript Sequence Number=SeqID_33864
  Homolog annotation: Hit_ID=Q70KG3; Match level="QueryCoverage=68%, HitCoverage=15%, E-value=2e-09, Identity=57%"; Hit description =Protein RAFTIN 1B
MPSVSSILAAWAEPSASLGMCEDPGLEWEAKFCATSLEALVEGAQGVLGTRSITEMISRVPRAGSPPCLATFLISLMSFFSWVCRP

SEQ ID NO: 99839 - protein, 186 aa, Setaria italica
  Transcript Sequence Number=SeqID_33865
  Homolog annotation: Hit_ID=Q70KG5; Match level="QueryCoverage=95%, HitCoverage=46%, E-value=5e-54, Identity=60%"; Hit description =Protein RAFTIN 1A
  Pfam annotation: Domain name=BURP; Domain location=1-182; Score =170.2; E_value=6.1e-48; Accession=PF03181.7; Description=BURP domain
EEALRVRQSLPFRFPAAVTAPLGFLPRHIADAIPFSSSALPGVLAQFNVAEGSAQAAKMEETLGMCEDPGLEWEAKFCATSLEALVEGAQGVLGTRSITEMISRVPRAGSPLQPYTIRAVQPVRGSSFVGCHQKEYPYTVYMCHSTGPARAYMVEMEGAGGDKACLATFLISLMSFFSWVCRPCLS

SEQ ID NO: 99840 - protein, 225 aa, Setaria italica
  Transcript Sequence Number=SeqID_33866
  Gene Ontology: Mol. function=protein domain specific binding; Cellular component=endosome membrane; Biological process=protein transport
  Homolog annotation: Hit_ID=B3TM11; Match level="QueryCoverage=100%, HitCoverage=100%, E-value=1e-86, Identity=75%"; Hit description =Breast adenocarcinoma marker-like
  Pfam annotation: Domain name=Snf7; Domain location=17-187; Score =213.0; E_value=8e-61; Accession=PF03357.13; Description=Snf7
MSFIFGKKKTPAELLRENKRMLDKSIREIERERQGLQTQEKKLINEIKKVAKQGQMGAVKIMAKDLIRTRHQITKFYALKSQLQGVSLRIQTLKSTQAMGEAMKGVTKAMGQMNRQMNLPALQKIMQEFEMQNERMEMVSDVMNDAIDDALEGDEEEEETEELVNQVLDEIGIDVNSELVKAPATAVAKPVAAGKVPAAQAEAAGGPDGGIDDDLQARLDNLRKM

SEQ ID NO: 99841 - protein, 212 aa, Setaria italica
  Transcript Sequence Number=SeqID_33867
  Gene Ontology: Mol. function=metal ion binding
  Homolog annotation: Hit_ID=B3SGL6; Match level="QueryCoverage=57%, HitCoverage=14%, E-value=5e-27, Identity=52%"; Hit description =Putative Glu-rich protein
KLSAAAATGEWLGETERQRVRLVREWVQMASQPRDSRAASRRDEPPRLRGRQARLDVITRMARERQRELQGISGYHAVSEFPRRSRNRIQGLLRGRFLRNGALLVEEERPPSVAARELGQLRQSHRTPTLRSESVVSSQDVSQSDASVPESGRLLGNDESQRGAEARAFTDSEDSAQTVLENVDLQEADADRAEVHSPSIPLDGTAVMQESL

SEQ ID NO: 99842 - protein, 58 aa, Setaria italica
  Transcript Sequence Number=SeqID_33868
YFAAYVFLGCIVVLACFVGECQISLFWFMSRRNCNQQRLGTVLMLAVVHSFGVLYLSD

SEQ ID NO: 99843 - protein, 125 aa, Setaria italica
  Transcript Sequence Number=SeqID_33869
  Homolog annotation: Hit_ID=B4FRH4; Match level="QueryCoverage=100%, HitCoverage=49%, E-value=4e-37, Identity=64%"; Hit description=MTD1
PSPRKRKGLLPFSFKWGKPQNKEVFPEDDAVDSPTNCRRLTISPAAASSSGSNSGSDDEHYRSQKPSSRRPHRRPSNAMDVFASPPAPRPPQLFSAHMRSQSMLDLQDVTDSTATVTPRDKRMKN

SEQ ID NO: 99844 - protein, 50 aa, Setaria italica
  Transcript Sequence Number=SeqID_33870
FLDQVRLQVMKEMDLVVVLHRRGETRIGTKFTSIFPSYFVNCTTSDLFPY

SEQ ID NO: 99845 - protein, 135 aa, Setaria italica
  Transcript Sequence Number=SeqID_33871
  Gene Ontology: Mol. function=protoporphyrinogen oxidase activity; Cellular component=chloroplast; Biological process=porphyrin biosynthetic process
  Homolog annotation: Hit_ID=Q9AR38; Match level="QueryCoverage=100%, HitCoverage=25%, E-value=4e-69, Identity=95%"; Hit description =Protoporphyrinogen oxidase, chloroplastic
ASDILRPLSSDAADALSRFYYPPVAAVTISYPKEAIRKECLIDGELQGFGQLHPRSQGVETLGTIYSSSLFPNRAPAGRVLLLNYIGGATNTGIVSKSASELVEAVDRDLRKMLINPSAVDPLVLGVRVWPQAIP

SEQ ID NO: 99846 - protein, 480 aa, Setaria italica
  Transcript Sequence Number=SeqID_33872
  Gene Ontology: Mol. function=protoporphyrinogen oxidase activity; Cellular component=chloroplast; Biological process=porphyrin biosynthetic process
  Homolog annotation: Hit_ID=Q9M629; Match level="QueryCoverage=100%, HitCoverage=89%, E-value=0.0, Identity=90%"; Hit description =Protoporphyrinogen IX oxidase
  Pfam annotation: Domain name=Amino_oxidase; Domain location=7-471; Score=214.0; E_value=4e-61; Accession=PF01593.16; Description=Flavin containing amine oxidoreductase
VVVGGGISGLCTAQALATKHGVGDVLVTEARARPGGNITTVERPDEGYLWEEGPNSFQPSDPVLTMAVDSGLKDDLVFGDPNAPRFVLWEGKLRPVPSKPADLPFFDLMSIPGKLRAGFGALGIRPPPPGREESVEEFVRRNLGAEVFERLIEPFCSGVYAGDPSKLSMKAAFGKVWRLEEAGGSIIGGTIKTIQERGKNPKPPRDPRLPTPKGQTVASFRKGLAMLPNAITSSLGSKVKLSWKLTSITKSDGMGYVLVYETPEGVVSVQAKSVIMTIPSYVASDILRPLSSDAADALSRFYYPPVAAVTISYPKEAIRKECLIDGELQGFGQLHPRSQGGRYATLGTIYSSSLFPNRAPAGRVLLLNYIGGATNTGIVSKSASELVEAVDRDLRKMLINPSAVDPLVLGVRVWPQAIPQFLVGHLDLLEAAKSSLDRGGYDGLFLGGNYVAGVALGRCVEGAYESASQISDFLTKYAYK

SEQ ID NO: 99847 - protein, 284 aa, Setaria italica
  misc_feature (278)..(278): Xaa can be any naturally occurring amino acid
  Transcript Sequence Number=SeqID_33873
  Gene Ontology: Mol. function=transferase activity, transferring glycosyl groups; Biological process=glucan biosynthetic process
  Homolog annotation: Hit_ID=B2Z4A6; Match level="QueryCoverage=96%, HitCoverage=30%, E-value=1e-116, Identity=76%"; Hit description =Starch synthase IV
  Subcellular localization annotation: CTP_CleavageSite=52; ConfidenceScore=5.63e-01
GGSVAGAEATALLFRGPAPSSIAGRSRLAVSRRTRHRNLRTGAQPPQKSTPSANYRNRVNIQRDRAGASSDDEHQQNSDDENGLPNVQLEDLVGMIQNTEKNILLLNQARLQALERADKILKEKEALQRKMSILEIKLSETGAQSELSSEGKSDTEAQEFDVLKEENMLLKDDINFLKSKLIEITETEESLFKLEKERAILDASLRELECAFIAAQSDMLKLGPMQHDAWWEKVENLEELLESTANQVEHAALILDGYHDFQEKIDKLEASLGATKIXEFCLYL

SEQ ID NO: 99848 - protein, 117 aa, Setaria italica
  misc_feature (82)..(82): Xaa can be any naturally occurring amino acid
  misc_feature (104)..(104): Xaa can be any naturally occurring amino acid
  misc_feature (110)..(110): Xaa can be any naturally occurring amino acid
  Transcript Sequence Number=SeqID_33874
  Gene Ontology: Mol. function=aminoacyl-tRNA ligase activity
  Homolog annotation: Hit_ID=Q67WM1; Match level="QueryCoverage=98%, HitCoverage=49%, E-value=8e-31, Identity=58%"; Hit description =Isoleucyl-tRNA synthetase-like
SCDALGSPLVPKEMAPTDVVVLGEESHDVHDMSFVICIARSCPVLSPDLAHASVNNDHVEALRVYLSSRSLSRLKNQFQAGXGMITVDCIEGYPPITLQLGKHXFLSAGXFYLASRS

SEQ ID NO: 99849 - protein, 83 aa, Setaria italica
  Transcript Sequence Number=SeqID_33875
  Gene Ontology: Mol. function=aminoacyl-tRNA ligase activity; Cellular component=cytoplasm; Biological process=tRNA aminoacylation for protein translation
  Homolog annotation: Hit_ID=Q67WM1; Match level="QueryCoverage=69%, HitCoverage=24%, E-value=2e-20, Identity=86%"; Hit description =Isoleucyl-tRNA synthetase-like
DGDVLVILDLRADQSLFEAGVAREVVNRIQKLRKTAQLEPSDPVDVYYKSSGNDKNTLERDLDERYTLNASTWSLLTEARTFL

SEQ ID NO: 99850 - protein, 194 aa, Setaria italica
  misc_feature (66)..(66): Xaa can be any naturally occurring amino acid
  misc_feature (99)..(99): Xaa can be any naturally occurring amino acid
  Transcript Sequence Number=SeqID_33876
  Gene Ontology: Mol. function=aminoacyl-tRNA ligase activity; Cellular component=cytoplasm; Biological process=tRNA aminoacylation for protein translation
  Homolog annotation: Hit_ID=Q67WM1; Match level="QueryCoverage=97%, HitCoverage=81%, E-value=8e-68, Identity=67%"; Hit description =Isoleucyl-tRNA synthetase-like
KDFEESGEVTFFGHCLKLDDIKVVRQFKRPENVSEKEIDAAGDGDVLVILDLRADQSLFEAGVADXVVNRIQKLRKTAQLEPSDPVDVYYKSSGNDKNXLEQILKSQDQYIRDALGSPLVPKEMAPTDVVVLGEESHDVHDMSFVICIARSCPVLSPDLAHASVNNDHVEALRVYLSSRSLSRLKNQFQAGKRP

SEQ ID NO: 99851 - protein, 861 aa, Setaria italica
  misc_feature (10)..(10): Xaa can be any naturally occurring amino acid
  Transcript Sequence Number=SeqID_33877
  Gene Ontology: Mol. function=isoleucine-tRNA ligase activity; Cellular component=cytoplasm; Biological process=tRNA aminoacylation for protein translation
  Homolog annotation: Hit_ID=B9SUT5; Match level="QueryCoverage=99%, HitCoverage=73%, E-value=0.0, Identity=71%"; Hit description =Isoleucyl tRNA synthetase, putative
  Pfam annotation: Domain name=Anticodon_1; Domain location=410-562; Score=151.9; E_value=2e-42; Accession=PF08264.5; Description =Anticodon-binding domain
  Pfam annotation: Domain name=tRNA-synt_1; Domain location=1-355; Score=240.2; E_value=5e-69; Accession=PF00133.14; Description=tRNA synthetases class I (I, L, M and V)
  Pfam annotation: Domain name=tRNA-synt_1g; Domain location=56-379; Score=-263.4; E_value=0.001; Accession=PF09334.3; Description=tRNA synthetases class I (M)
  Pfam module annotation: Pfam domain module=Anticodon_1::tRNA-synt _1::tRNA-synt_1g; Domain location=410-562::1-355::56-379
LVAKYTPLFXFFLELRETAFRVIADNYVTDDSGTGVVHCAPAFGEDDHRVCLAAGIFETAGLVVAVDDDGCFIEKISEFKGRYVKEADKDIISAVKDKGRLVSKGSIEHSYPFCWRSGTPLIYRAVPSWFVKVEKIKDQLLECNKETYWVPDYVKEKRFHNWLEGARDWAVSRSRFWGTPLPLWMSQDGEEIVVMDSIEKLEKLSGVKVTDLHRHYVDDITIPSKRGPEFGVLKRVDDVFDCWFESGSMPYAYIHYPFENKELFEKNFPGNFVAEGLDQTRGWFYTLMVLSTALFGKPAFKNLICNGLVLAEDGKKMSKSKKNYPSPTDLIDEYGADALRLYLINSPVVRAESLRFKRSGVYGVVKDVFLPWYNAYRFFVQNAKRLEVEGLAVFSPIDQASLLKSSNVLDHWINSATESLVSFVRQEMDAYRLYTVVPYLVKYIDNLTNIYVRLNRKRLKGRTGEGDCRISLSTLYHALVTTCVAMAPFTPFFTEVLYQNLRKVSDKSEESIHFCKFPSTTGERDERVEQSVSRMMTIIDLARNIRERHNKALKTPLKEMVVVHPDNEFLEDITGKLKEYVMEEINVKTVTPCNDPLMYASLRAEPNFSVLGKRLGKDMGKVSNEVKKMTQEQILAFEESGEVTFFGHCLKLDDIKVVRQFKRPENVSEKEIDAAGDGDVLVILDLRADQSLFEAGVAREVVNRIQKLRKTAQLEPSDPVDVYYKSSGNDKNTLEQILKSQDQYIRDALGSPLVPKEMAPTDVVVLGEESHDVHDMSFVICIARSCPVLSPDLAHASVNNDHVEALRVYLSSRSLSRLKNQFQAGKGMITVDCIEGYPPITLQLGKHVFLSAGDFYLASRS

SEQ ID NO: 99852 - protein, 109 aa, Setaria italica
  Transcript Sequence Number=SeqID_33878
QKGYSFIMSAVLDEEAAERQRAKDAAAALAAAAAAKQEDEATVVEKPVAEVVVAKAAPVTVIPIPVPRNLVTAAATPMSPRFQGVFCRDMAVVGSLVSRGGFDRAIPVK

SEQ ID NO: 99853 - protein, 82 aa, Setaria italica
  Transcript Sequence Number=SeqID_33879
  Gene Ontology: Mol. function=RNA-directed DNA polymerase activity; Cellular component=chromatin; Biological process=RNA-dependent DNA replication
  Homolog annotation: Hit_ID=Q7XPS4; Match level="QueryCoverage=100%, HitCoverage=2%, E-value=3e-27, Identity=64%"; Hit description =OSJNBa0065O17.7 protein
YRPISLVHSFAKIVAKLLANRLGKELHNLVDVNQSAFVKGRSIHDNFKFVELAAKSLHRKRKPSLLIKIDISKAFDTVCWPF

SEQ ID NO: 99854 - protein, 124 aa, Setaria italica
  Transcript Sequence Number=SeqID_33880
  Gene Ontology: Mol. function=nucleotide binding; Biological process =defense response
  Homolog annotation: Hit_ID=B9GM23; Match level="QueryCoverage=93%, HitCoverage=9%, E-value=2e-09, Identity=40%"; Hit description=Cc-nbs- lrr resistance protein
EEEAEKLRRTEKRIRAVLTDAEQRRFIDDDFVKLWLQELRATAFDVDALLDRLTTMAAVSRMAAAETSRKRKRLWLNIDLGLRQRWELDAWIARINERLDEIEKGKRNLRLRPGDGRRTTPPLQ

SEQ ID NO: 99855 - protein, 79 aa, Setaria italica
  Transcript Sequence Number=SeqID_33881
RAIVGRKRDRSALPCSESAGQRAPALLVRVPPEGSLPTESRRPGNLPKEPETSVSLWRLVAELASALSTFIFFSPYNGQ

SEQ ID NO: 99856 - protein, 84 aa, Setaria italica
  Transcript Sequence Number=SeqID_33882
RLSSRTCRGRFRGRAREIFSLVYACERVLLVGLGVGKELLLGSFSHLPHVQAWICVTSFPFVRFPLFWFTLYKRVATRPVIRYS

SEQ ID NO: 99857 - protein, 80 aa, Setaria italica
  Transcript Sequence Number=SeqID_33883
FTRWWLWESTMYSLTPFPSYLKKKYYTAMRRHTRLLTCINIVCRYHVCVLATSSINKFKNVVEVCIKVNAIYLRFCSWQI

SEQ ID NO: 99858 - protein, 144 aa, Setaria italica
  misc_feature (43)..(43): Xaa can be any naturally occurring amino acid
  misc_feature (131)..(131): Xaa can be any naturally occurring amino acid
  Transcript Sequence Number=SeqID_33884
  Gene Ontology: Mol. function=DNA-directed RNA polymerase activity; Cellular component=nucleus; Biological process=transcription
  Homolog annotation: Hit_ID=B9FFW1; Match level="QueryCoverage=100%, HitCoverage=10%, E-value=6e-55, Identity=73%"; Hit description=DNA -directed RNA polymerase
  Pfam annotation: Domain name=RNA_pol_Rpb1_3; Domain location=5-119; Score=19.9; E_value=7.1e-06; Accession=PF04983.10; Description=RNA polymerase Rpb1, domain 3
QLFSVLVRPNARTKVFLNLAVISKRFEKKERKRGRGGKGNNVXRETMCPNDGYVYFRNSELLSGQVGKATLGNGNKDGIYSVLLRDYNSHAAASCMNRLAKFSARFIGNHGFSIGVDDVQPGEHLNRQKKXIDEGYKQCHDLIS

SEQ ID NO: 99859 - protein, 381 aa, Setaria italica
  misc_feature (52)..(52): Xaa can be any naturally occurring amino acid
  misc_feature (260)..(260): Xaa can be any naturally occurring amino acid
  misc_feature (368)..(368): Xaa can be any naturally occurring amino acid
  Transcript Sequence Number=SeqID_33885
  Gene Ontology: Mol. function=DNA-directed RNA polymerase activity; Cellular component=DNA-directed RNA polymerase III complex; Biological process=transcription
  Homolog annotation: Hit_ID=Q7X881; Match level="QueryCoverage=99%, HitCoverage=27%, E-value=0.0, Identity=81%"; Hit description=DNA -directed RNA polymerase
  Pfam annotation: Domain name=RNA_pol_Rpb1_4; Domain location=68-174; Score=145.0; E_value=2.3e-40; Accession=PF05000.9; Description=RNA polymerase Rpb1, domain 4
  Pfam annotation: Domain name=RNA_pol_Rpb1_5; Domain location=181-379; Score=-3.5; E_value=4.3e-10; Accession=PF04998.9; Description=RNA polymerase Rpb1, domain 5
  Pfam module annotation: Pfam domain module=RNA_pol_Rpb1_4::RNA_pol _Rpb1_5; Domain location=68-174::181-379
SGIYSVLLRDYNSHAAASCMNRLAKFSARFIGNHGFSIGVDDVQPGEHLNRXKKKKIDEGYKQCHDLISLFAKGALALHPGCNAAQTLEHKITGVLNEIRTAAGNVCMDTLHWRNSPLIMSQCGSKGSPINISQMVACVGQQSVGGRRAPDGFIDRTLPHFPINSKTPAAKGFVANSFYTGLTATEFFFHTMGGREGLVDTAVKTAETGYMSRRLMKGLEDLSVFYDQTVRNASGGIVQFLYGDDGMDPAKMEGKDGTPXNLDQLFMKVTATCPHRGLDTLSPDDIKQMLEDKLTQHKTSSDGGCSEEFKECLKKFLEERIQLLKCTRKALHLDEKHVGKNDSCIEEIIAANISGISAKQLQVFLDTXCFSRYNSKAIEAG

SEQ ID NO: 99860 - protein, 178 aa, Setaria italica
  misc_feature (10)..(10): Xaa can be any naturally occurring amino acid
  misc_feature (119)..(119): Xaa can be any naturally occurring amino acid
  Transcript Sequence Number=SeqID_33886
EDAWSRYIEXNKAAACYQHKVIKNWDAISLIFSRDHAATSEDVSAGAENGQEVAMKVAEDVRHHTPSPSSPSTSGPSCQYRPGLPMLTQSNKQGRMKRFRTKDALFCMSGNIKILSKYXMKSNETQEEPKSACPKEIFAALQAIPNLARDDLLRAYCILTSSDRKFECLMALPIGTIC

SEQ ID NO: 99861 - protein, 143 aa, Setaria italica
  misc_feature (18)..(18): Xaa can be any naturally occurring amino acid
  misc_feature (92)..(92): Xaa can be any naturally occurring amino acid
  Transcript Sequence Number=SeqID_33887
  Gene Ontology: Mol. function=nucleotide binding; Biological process =defense response
  Homolog annotation: Hit_ID=Q84KD2; Match level="QueryCoverage=99%, HitCoverage=92%, E-value=6e-35, Identity=53%"; Hit description=NBS -LRR disease resistance protein homologue (Fragment)
CVSLNFDANKLIEEIEKXIPGIDGESKGTAGQLIQQRLKKKRFLLILDDIWDCSNEDEWEQLLVPFKKSQVQGNIIIVTTRIPAQAQIMVRXLDHSVYLQGLDYKEFKDLFLDFVFGDDQSRKDHTFLLATGDKIVRRLKGSP

SEQ ID NO: 99862 - protein, 34 aa, Setaria italica
  Transcript Sequence Number=SeqID_33888
  Homolog annotation: Hit_ID=B6T754; Match level="QueryCoverage=100%, HitCoverage=10%, E-value=2e-10, Identity=94%"; Hit description=ATP12 ATPase
DRWGLVEGGHDVDIADLKVQMSSAVVFLGLSRAM

SEQ ID NO: 99863 - protein, 285 aa, Setaria italica
  Transcript Sequence Number=SeqID_33889
  Gene Ontology: Mol. function=protein binding; Cellular component =nuclear speck; Biological process=proton-transporting ATP synthase complex assembly
  Homolog annotation: Hit_ID=B6T754; Match level="QueryCoverage=95%, HitCoverage=85%, E-value=1e-131, Identity=84%"; Hit description =ATP12 ATPase
  Pfam annotation: Domain name=ATP12; Domain location=47-175; Score =199.1; E_value=1.2e-56; Accession=PF07542.3; Description=ATP12 chaperone protein
EEEGEDGGGSDGAIYVKKPAAAAAVTTRDETSVAMPTSFMTGSVVGKRFYRDATMRLADDGNGWTVMLDYRTLKSPTKRPLKLPSRALAMAIAAEWEYQESDGIRPFTMPLMKLACTALERVPLTRTKVIDNLMKKFHQDLVFCRSPADSELTIGVHQKQKEKIDPILEWVNTEFGFKPVVYTTFFGGKQDEGLTKAVESVLKKTTDCELASIDAMAAAAHSLVIPLAIFRERLGIEEAIELIRLEEDHQVDRWGLVEGGHDVDIADLKVQMSSAVVFLGLSRAM

SEQ ID NO: 99864 - protein, 75 aa, Setaria italica
  Transcript Sequence Number=SeqID_33890
RPQASAGGAAVAATAGFPSCPVVEGEHPQLNTVLGSNDNEMNYGGMFHVGGGGASGGGGEGSSDGTSSSLPFSWQ

SEQ ID NO: 99865 - protein, 88 aa, Setaria italica
  Transcript Sequence Number=SeqID_33891
  Gene Ontology: Mol. function=hydrolase activity, hydrolyzing O -glycosyl compounds; Cellular component=extracellular region; Biological process=carbohydrate metabolic process
  Homolog annotation: Hit_ID=Q56UD1; Match level="QueryCoverage=97%, HitCoverage=16%, E-value=3e-23, Identity=64%"; Hit description=Beta -fructofuranosidase, insoluble isoenzyme 5
  Pfam annotation: Domain name=Glyco_hydro_32C; Domain location=26-88; Score=1.3; E_value=0.0096; Accession=PF08244.4; Description=Glycosyl hydrolases family 32 C termi
GKEVGSGELHEIAGIETLQADVQVVFEIPNLEDAEQLDPKWLQDPQKLCAEKGATVEGGVGPFGLIVMASGDMKHETTGFQGTFKHDD

SEQ ID NO: 99866 - protein, 182 aa, Setaria italica
  Transcript Sequence Number=SeqID_33892
MEQDTPTLKPEWLQKDRAAGAANIWATASSRSDYQGTGGSARNHSSGHDCDRSSRQSSSRRSSGSNVSRRPDRDAMGKSRGYANFGKNRDKDRERDSDSRDRESRSTAADRHDFKSFGTCRSERDWMNRARSKADTWTKEVVNLNNGSASRNNGVSSSRSNDKSNTVASTGTAVVNSFNNAA

SEQ ID NO: 99867 - protein, 71 aa, Setaria italica
  Transcript Sequence Number=SeqID_33893
  Gene Ontology: Mol. function=DNA-directed RNA polymerase activity; Biological process=transcription
  Homolog annotation: Hit_ID=B2BXR4; Match level="QueryCoverage=95%, HitCoverage=62%, E-value=7e-21, Identity=67%"; Hit description =RNApol24
RVAFCGYSIPHPADKKVNIRVQTTGDPAKDVLKDALQDLMVMCQHVRGTFDNAVASHRAKEPAEQMDIDQK

SEQ ID NO: 99868 - protein, 156 aa, Setaria italica
  misc_feature (15)..(15): Xaa can be any naturally occurring amino acid
  Transcript Sequence Number=SeqID_33894
  Gene Ontology: Cellular component=integral to membrane; Biological process=Notch signaling pathway
  Homolog annotation: Hit_ID=B9SA23; Match level="QueryCoverage=73%, HitCoverage=22%, E-value=3e-37, Identity=62%"; Hit description=GDP -mannose transporter, putative
  Pfam annotation: Domain name=PEN-2; Domain location=51-150; Score =188.7; E_value=1.6e-53; Accession=PF10251.1; Description=Presenilin enhancer-2 subunit of gamma secre
MEARVAGVPEDEESXGLLPRPSAAGRRPSSRGPRLPPPPPAWATVDGPLGLPLEEAEGHARRFFLWGFACLPFLWAINCCYFWPLLRSPAASSPAAFGPIRPYVVRSAIGFTIFSVVLITWATTFIVGGERLFGPAWNDLVMYNVADKLGLSGFMG

SEQ ID NO: 99869 - protein, 62 aa, Setaria italica
  Transcript Sequence Number=SeqID_33895
  Subcellular localization annotation: CTP_CleavageSite=36; ConfidenceScore=5.31e-01
STQINASATFVAAFLVFSAHLYFPTTAHLFSPAMPLLGALSDLIEPSFPFCPLTFSSASTDH

SEQ ID NO: 99870 - protein, 44 aa, Setaria italica
  Transcript Sequence Number=SeqID_33896
LNQTNQVPFICQFPYIYFVATGGIIRSFRTLTLSLWNSWVAHVF

SEQ ID NO: 99871 - protein, 77 aa, Setaria italica
  Transcript Sequence Number=SeqID_33897
KQYFSLRLIFRSLSLKRIRNKVILRSPIFRREKNKSLLSISCGHVISYFRMLFQVMYSYFICHMDQLQNYFLCVPNE

SEQ ID NO: 99872 - protein, 323 aa, Setaria italica
  Transcript Sequence Number=SeqID_33898
  Gene Ontology: Mol. function=nucleic acid binding; Cellular component= spliceosome; Biological process=nuclear mRNA splicing, via spliceosome
  Homolog annotation: Hit_ID=B9RRM5; Match level="QueryCoverage=66%, HitCoverage=58%, E-value=1e-105, Identity=84%"; Hit description =Spliceosome associated protein, putative
  Pfam annotation: Domain name=RRM_1; Domain location=1-64; Score=60.6; E_value=6.1e-15; Accession=PF00076.14; Description=RNA recognition motif. (a.k.a. RRM, RBD, o
  Pfam annotation: Domain name=RRM_1; Domain location=81-152; Score =95.2; E_value=2.2e-25; Accession=PF00076.14; Description=RNA recognition motif. (a.k.a. RRM, RBD, o
  Pfam module annotation: Pfam domain module=RRM_1::RRM_1; Domain location=1-64::81-152
EQVSEELLWELFVQAGPVVNVYVPKDRVTNLHQGYGFVEFRSEEDADYAIKILNMIKLYGKPIRVNKASQDKKSLDVGANLFIGNLDPDVDEKLLYDTFSAFGVIVTNPKIMRDPETGNSRGFGFVSYESFESSDQAIEAMNNQHLCNRPITVSYAYKKDTKGERHGTPAERLLAANNPGSQRNRPHTMFASGPPTQGLPNGAPPVPRSYVNGTVPGQIQHIRPPPPVGQFPPPMQMHGQPAWPAPPHTAPPPMPQQLQYRLPMRPPPPNMMPPPVGMVRPPPPPAGMSAPPMWMPPPPPPQQGGGMPPPPMSMPPPPPPPSG

SEQ ID NO: 99873 - protein, 553 aa, Setaria italica
  Transcript Sequence Number=SeqID_33899
  Gene Ontology: Mol. function=binding; Cellular component=cytoplasm; Biological process=protein folding
  Homolog annotation: Hit_ID=B9RQ36; Match level="QueryCoverage=100%, HitCoverage=99%, E-value=1e-167, Identity=52%"; Hit description =Fk506 binding protein, putative
  Pfam annotation: Domain name=TPR_1; Domain location=176-209; Score =42.7; E_value=1.4e-09; Accession=PF00515.20; Description =Tetratricopeptide repeat
  Pfam annotation: Domain name=TPR_1; Domain location=99-132; Score =5.0; E_value=1.5; Accession=PF00515.20; Description=Tetratricopeptide repeat
  Pfam annotation: Domain name=TPR_2; Domain location=142-175; Score =0.1; E_value=33; Accession=PF07719.9; Description=Tetratricopeptide repeat
  Pfam annotation: Domain name=TPR_2; Domain location=176-209; Score =33.1; E_value=1.1e-06; Accession=PF07719.9; Description =Tetratricopeptide repeat
  Pfam annotation: Domain name=TPR_2; Domain location=99-132; Score =11.2; E_value=1.4; Accession=PF07719.9; Description=Tetratricopeptide repeat
  Pfam module annotation: Pfam domain module=TPR_1::TPR_1::TPR_2::TPR _2::TPR_2; Domain location=176-209::99-132::142-175::176-209::99-132
MMDPEMLRLAQEQMRRMSPDDLARMQQQLMSNPDLLKMASESMKNMKAEDLRRAAQQMNQARPEDMRDMTEKLANTTPEEFAAMKAQADAQMSYAISGAKMLKKQGNELHNQGQYSDAASKYKLAKDNLKNIPSSAAHTLQLQCTLNLMACYLKTGQFDECISEGSEVLTYDSSNVKAYYRRGQAYKELGKLEAAVADLSKAHEISPEDETIADVLRDTEEKLAREGGGVNMRKGVVIEEVVEEDTSKPSSSQRSSSGYTVSQPPEVAGSSERSRDDPASIRPSQNYVSKSNPEGLSKIGMEGMSPELIKTATDMIGTMKPEELQKMFEVASSMNGTSSVGPNLGSNMPEMSPDMIKMASDMIGKMPPDELQNMMNFASQMGGPGATPRRSENNFQPSSRATTSNSPLGSSSQTIRESPVELSNDQRMGQLSSSLPPSTADMQETMRNSMKDPATRQMMANMMKNMSPEMMANMSEQFGMKLSKEDAAKAQQAMSSLSPEDLDRMMRWMERAQKGVEVAKKTKNWLLGRRGLILAIVMLILAFIFHQLGFIGR

SEQ ID NO: 99874 - protein, 106 aa, Setaria italica
  Transcript Sequence Number=SeqID_33900
  Gene Ontology: Cellular component=nucleus
  Homolog annotation: Hit_ID=B9RYS2; Match level="QueryCoverage=100%, HitCoverage=100%, E-value=2e-51, Identity=86%"; Hit description=Fad NAD binding oxidoreductases, putative
  Pfam annotation: Domain name=Yippee; Domain location=1-104; Score =234.5; E_value=2.6e-67; Accession=PF03226.6; Description=Yippee putative zinc-binding protein
MAELVGPRVYSCCNCRNHVCLHDDIISKAFQGRNGRAFLFSHAMNVVVGAKEDRQLMTGLHTVADIYCNDCREVLGWKYERAYEESQKYKEGKFIFEKAKIVKENW

SEQ ID NO: 99875 - protein, 156 aa, Setaria italica
  misc_feature (148)..(148): Xaa can be any naturally occurring amino acid
  Transcript Sequence Number=SeqID_33901
  Gene Ontology: Mol. function=receptor activity; Cellular component =integral to membrane
  Homolog annotation: Hit_ID=Q53PX8; Match level="QueryCoverage=99%, HitCoverage=30%, E-value=4e-68, Identity=77%"; Hit description=PAN domain containing protein
  Pfam annotation: Domain name=S_locus_glycop; Domain location=45-141; Score=-23.2; E_value=0.0021; Accession=PF00954.12; Description=S -locus glycoprotein family
SNRRFAFRLGKTYMALHMEFNGGRTTPIYWQHTALEAQPQNATEPPVYGRLDGRGFFGLYLEGGGQKVDVLSFDTFVQNLTGVFRRMTLDDDGNLRAYYWTDGAKGWISDYRAIAERCELPASCGAYGLCVPGTAQCQCLDNTTTSTXPQCHAGET

SEQ ID NO: 99876 - protein, 65 aa, Setaria italica
  Transcript Sequence Number=SeqID_33902
  Gene Ontology: Mol. function=electron carrier activity; Biological process=oxidation reduction
  Homolog annotation: Hit_ID=B6SSX8; Match level="QueryCoverage=83%, HitCoverage=10%, E-value=4e-11, Identity=63%"; Hit description =Flavonoid 3-monooxygenase
LIPSPVPCPAPMELPPLLATFLAMVLAAVILRTLKPTSSRRVYNLPPGPRPWPVIGNFNLIGALP

SEQ ID NO: 99877 - protein, 60 aa, Setaria italica
  Transcript Sequence Number=SeqID_33903
SIVLLDWKRKAFAPSKHSANYSKHNRQITTKYKESRTKDFQKNKLYLITLSLPMGHCEQR

SEQ ID NO: 99878 - protein, 47 aa, Setaria italica
  Transcript Sequence Number=SeqID_33904
EYLNAYALEGRRLTIYTRTIIQTCKAHKEPPVQILNSDASVDEAKEN

SEQ ID NO: 99879 - protein, 248 aa, Setaria italica
  Transcript Sequence Number=SeqID_33905
  Homolog annotation: Hit_ID=Q9S7Y6; Match level="QueryCoverage=83%, HitCoverage=68%, E-value=1e-98, Identity=67%"; Hit description =F28J7.5 protein
KGCDNILAQLHTAHPEFCDKVGGILAMHIDDLRALAPLWLSKTEEVRQDKSHWSTNITGDIYGMGWISEMYGYSFGAAEVGLRHKINDDIMIYPGYTPRPGIEPLILHYGLPFKVGNWSFSKLEHHEDGIVYDCNRLFPPPPFPREVEMMEPDPNVKRGLFLSIECINTLNEGLLLHHASVGCPKAQWSKYLSFLKSRRFSELTKPKNWKGQKVDSTMIMQHAALSKANREYTKKSTPFSTTRMFIIF

SEQ ID NO: 99880 - protein, 83 aa, Setaria italica
  Transcript Sequence Number=SeqID_33906
  Gene Ontology: Mol. function=oxidoreductase activity, acting on single donors with incorporation of molecular oxygen, incorporation of two atoms of oxygen; Cellular component=chloroplast; Biological process=abscisic ...
  Gene Ontology: Biological process=acid biosynthetic process
  Homolog annotation: Hit_ID=O24592; Match level="QueryCoverage=100%, HitCoverage=13%, E-value=8e-40, Identity=95%"; Hit description=9-cis- epoxycarotenoid dioxygenase 1, chloroplastic
EYGDGRFGGEPCFVPMDPAAAHPRGEDDGYVLTFVHDERAGTSELLVVNAADMRLEATVQLPSRVPFGFHGTFITANELEAQA

SEQ ID NO: 99881 - protein, 72 aa, Setaria italica
  Transcript Sequence Number=SeqID_33907
  Gene Ontology: Mol. function=transferase activity, transferring phosphorus-containing groups; Cellular component=chloroplast; Biological process=sulfate assimilation
  Homolog annotation: Hit_ID=Q2R0R8; Match level="QueryCoverage=100%, HitCoverage=23%, E-value=2e-32, Identity=93%"; Hit description =Adenylyl-sulfate kinase
  Pfam annotation: Domain name=APS_kinase; Domain location=1-72; Score =39.0; E_value=2.1e-14; Accession=PF01583.12; Description =Adenylylsulphate kinase
LACALSRELHSRGHLAYVLDGDNLRHGLNRDLSFKAEDRAENIRRVGEVAKLFADAGLICIASLISPYRSDR

SEQ ID NO: 99882 - protein, 96 aa, Setaria italica
  Transcript Sequence Number=SeqID_33908
EEHVWEFRLDRTRRMHSTGDSSCSFSLPFSLHRELNNFTSWKLFVQVPRFLETLFLFSTRNPEILLFASFLHFLGFFCGSQILLASKTSIPSSFFP

SEQ ID NO: 99883 - protein, 118 aa, Setaria italica
  misc_feature (103)..(103): Xaa can be any naturally occurring amino acid
  Transcript Sequence Number=SeqID_33909
AEAPLLRDFDRLYAEAKRGRLAQLDVAVGFSRGAGKRLRKMERHVAAAARLYEEMDALRELEASERRMENWKQHSGPIIPSQAAPGKKPAAEPGEKLMHELRXQRHKVRRLMEGSLWS

SEQ ID NO: 99884 - protein, 134 aa, Setaria italica
  misc_feature (31)..(31): Xaa can be any naturally occurring amino acid
  Transcript Sequence Number=SeqID_33910
  Homolog annotation: Hit_ID=Q5N9N9; Match level="QueryCoverage=84%, HitCoverage=46%, E-value=3e-10, Identity=36%"; Hit description =Putative Avr9/Cf-9 rapidly elicited protein 137
QIPVRQGRTPGKKPAAEPGEKLMHELRAQRXKVRRLMEGSLWSVDAGRAAKLMAKSVLAVLARISIAFGPFVPGLPSLTVGRAPGHSSGPLHRSAMPGAALRHSVPIFGQKDAALSVLESTKPLASTIGGSGME

SEQ ID NO: 99885 - protein, 86 aa, Setaria italica
  Transcript Sequence Number=SeqID_33911
LVEYCFWIRKNSWGGAALLGGITGHTNTTCIMLLSRSYKGMIFPPSCMSLISLLCTLFISRARCSIASQINKFIHCVVDWHTRITK

SEQ ID NO: 99886 - protein, 45 aa, Setaria italica
  Transcript Sequence Number=SeqID_33912
MNLDGWYYNQIPSFRLTKEKGGKLRGFYELDPASIPDPYLSGGTH

SEQ ID NO: 99887 - protein, 148 aa, Setaria italica
  Transcript Sequence Number=SeqID_33913
  Gene Ontology: Mol. function=heat shock protein binding; Biological process=response to stress
  Homolog annotation: Hit_ID=Q2R254; Match level="QueryCoverage=96%, HitCoverage=15%, E-value=8e-28, Identity=45%"; Hit description=DnaJ domain containing protein, expressed
KTELLRFSHSIPFFRTKGNEKVGVPCGFLELDAVSLPSDLDAAFPPVTLDSCVPIDSTMNSGFVDLTGDATPDPGNEQSAQKGNQRNGGKRKNHSLETPVQEGCPSPTMYTYPETVFYNFEEGRSYNKFERGQIWALYSDLINFQVLW

SEQ ID NO: 99888 - protein, 701 aa, Setaria italica
  misc_feature (462)..(462): Xaa can be any naturally occurring amino acid
  Transcript Sequence Number=SeqID_33914
  Gene Ontology: Mol. function=heat shock protein binding; Biological process=response to stress
  Homolog annotation: Hit_ID=Q2R254; Match level="QueryCoverage=96%, HitCoverage=65%, E-value=0.0, Identity=51%"; Hit description=DnaJ domain containing protein, expressed
TNEEGVRKPSGEGMVNHTETSGKGVDFSARNPSKASAANGNDRADDRMASDAIGQGFGDGQNLGSGVDTSGEPGAAGTPNPRRSSRRKACDDGNNILNSPKKKSRTLKDWFSNAASSSNKVFDDKATHADGQASEPPVSSKTNNQEKGCTVNEGNQMNKEAHDTNAEKPCNAGSFTYPDPEFCNFDEFRDVNLFAVDQIWVLYDDLDAMPRYYARIRRLDTTNFRVQFTWLEHDAANDEEDKWTDNKLPVACGNFKLGDTEVSEDPLMFSHIVSSWSKGRKRGSYVIHPIKGQVWALYKGWSMQWTSDADNHRSYEYEVVEVLSNFTMEAGATVIPLVKVEGFVSLFAKAKDKSSFAIPSSELLRFSHNIPFFRTKGNEKVGVPCGFLELDAVSLPSDLDAAFPPVTLDSCVPIDSTMNSGFVDLTGDATPGPGNEQSAQKGNQRHAGRWKNHSLVTPTQQXSSYSTQQGCPSPTIYTYPETVFYNFEEGRSYNKFERGQIWALYSDFDKLPKYYGWVTKVDLDPFRVHLTWLEASPQSEQENLWLEHELPVSCGTFKIRNWRIKYDTNDAFSHVVETQVGSKRHFEIHPQVGEIWAIYYNWSPGWVPSSKDACEYAIVEITERSEASTKVLFLTQVNGYMTVFKPDNERSILDVPAKDDLKFSHQIPSFRLTKEKGGKLCGFYELDPASIPDPFLSRGTH

SEQ ID NO: 99889 - protein, 146 aa, Setaria italica
  Transcript Sequence Number=SeqID_33915
  Gene Ontology: Mol. function=catalytic activity; Biological process =nucleoside metabolic process
  Homolog annotation: Hit_ID=B6T4U2; Match level="QueryCoverage=96%, HitCoverage=38%, E-value=1e-60, Identity=79%"; Hit description =Vegetative storage protein PNI288
GTPEQRQHAFWVPVSKRYYDLAGKLEGLELPACVNATTCLPRPPKVTRVPRGCSANVYTDNASYRQFIRSRFGCTPVEMESAAVALVAHQLGVPFLTIRSLSDLAGGGSSLSNEAATFLAIAARNAVDVMFKFVPLLGAAGLAEDM

SEQ ID NO: 99890 - protein, 141 aa, Setaria italica
  Transcript Sequence Number=SeqID_33916
  Gene Ontology: Mol. function=protein dimerization activity
  Homolog annotation: Hit_ID=B6SWU7; Match level="QueryCoverage=96%, HitCoverage=18%, E-value=6e-13, Identity=33%"; Hit description =Transposon protein
DDTTTPSRCSNEMDHSDQMIHCNQMVIEGREMVQGIEATHGTYTVEAAPTSSRHGCKIVPGSRMDHGCSVIRCNQMAIHDRQMAQGIEMPHGNDTAEAAPDAPPTTARRRRKNSIIWEHFTTETDSDGCTRACCNYCKRIF

SEQ ID NO: 99891 - protein, 130 aa, Setaria italica
  misc_feature (61)..(61): Xaa can be any naturally occurring amino acid
  misc_feature (123)..(123): Xaa can be any naturally occurring amino acid
  Transcript Sequence Number=SeqID_33917
  Homolog annotation: Hit_ID=B7KIQ5; Match level="QueryCoverage=99%, HitCoverage=50%, E-value=6e-13, Identity=39%"; Hit description =Transcriptional activator, TenA family
QSAATTKYTDFLLATAAGKVDGAKGSDKMVTPFEKTKIAAYTVGAMTPCMRLYAYLGKELXGFLKQDENHPYKKWINTYASSDFEDNALQIEELLDKLSVSLTGEELEIIGKLYQQAMKLEVXFFSAQLV

SEQ ID NO: 99892 - protein, 107 aa, Setaria italica
  Transcript Sequence Number=SeqID_33918
  Gene Ontology: Mol. function=protein kinase activity; Cellular component=integral to membrane; Biological process=protein amino acid phosphorylation
  Homolog annotation: Hit_ID=B9SRM2; Match level="QueryCoverage=100%, HitCoverage=15%, E-value=6e-32, Identity=60%"; Hit description =Protein kinase APK1A, chloroplast, putative
LIYDYLPNGNLHDRLHGHKMTGESPLDWTTRVRLLLGAARGLACIHREYRTSGVPHGNIKSTNVLLDKGGAARVADFGLALLLSPAHAIARLGGYMAPEQADNKRLS

SEQ ID NO: 99893 - protein, 46 aa, Setaria italica
  Transcript Sequence Number=SeqID_33919
MAEETANDTQVPQDNEVAPNDEAVQGDELVQGDDELAQGDDELAQG

SEQ ID NO: 99894 - protein, 84 aa, Setaria italica
  Transcript Sequence Number=SeqID_33920
CRGGLNGYMDNIFGSNMHMLEGSRTSLPPTITRLYSESCSKFNSGIDVAKQCEKKMRYLHKAISDAVDHVMQMGPISEYNGRQV

SEQ ID NO: 99895 - protein, 102 aa, Setaria italica
  Transcript Sequence Number=SeqID_33921
  Subcellular localization annotation: CTP_CleavageSite=65; ConfidenceScore=5.55e-01
EPYQVTLSLPVKTHQLSTLVPLRSAPLGSSLLVEAMASAASSSFLRRRTHALLLLLVLALLSSARGSVAAGVSVASPSRRLMELYNPPPSDMLRYHDGAVLS

SEQ ID NO: 99896 - protein, 180 aa, Setaria italica
  Transcript Sequence Number=SeqID_33922
  Gene Ontology: Mol. function=metal ion binding; Biological process =metal ion transport
  Homolog annotation: Hit_ID=B9SKJ8; Match level="QueryCoverage=82%, HitCoverage=61%, E-value=8e-18, Identity=34%"; Hit description=Metal ion binding protein, putative
  Pfam annotation: Domain name=HMA; Domain location=109-170; Score=6.5; E_value=0.43; Accession=PF00403.18; Description=Heavy-metal -associated domain
  Pfam annotation: Domain name=HMA; Domain location=22-87; Score=26.8; E_value=8.6e-05; Accession=PF00403.18; Description=Heavy-metal -associated domain
  Pfam module annotation: Pfam domain module=HMA::HMA; Domain location =109-170::22-87
MGAPEADKKKVEEKKKVEVKTAMYKVYVHCGQCARDIQTQFTEFQGVEEVKLDAKAGKVTVKGVGFDVEKLRKKVEKGCRKKVELIVPPKKDDVVIEVKKKEEELKIITVKVPLHCPDCAVRVKEILLEHKSIYAAKTDHTKNTCTVEGVIDEKKLVEYIYQRTRKGAVVDKIEKKVIIK

SEQ ID NO: 99897 - protein, 241 aa, Setaria italica
  Transcript Sequence Number=SeqID_33923
  Gene Ontology: Mol. function=protein kinase activity; Cellular component=integral to membrane; Biological process=protein amino acid phosphorylation
  Homolog annotation: Hit_ID=Q84MU6; Match level="QueryCoverage=72%, HitCoverage=23%, E-value=1e-69, Identity=74%"; Hit description =Leucine-rich repeat transmembrane protein kinase 1, putative, expressed
  Pfam annotation: Domain name=LRRNT_2; Domain location=53-94; Score =38.0; E_value=3.7e-08; Accession=PF08263.4; Description=Leucine rich repeat N-terminal domain
  Pfam annotation: Domain name=LRR_1; Domain location=121-141; Score =8.6; E_value=6.9; Accession=PF00560.25; Description=Leucine Rich Repeat
  Pfam annotation: Domain name=LRR_1; Domain location=144-166; Score =12.6; E_value=1.2; Accession=PF00560.25; Description=Leucine Rich Repeat
  Pfam annotation: Domain name=LRR_1; Domain location=168-189; Score =11.7; E_value=1.8; Accession=PF00560.25; Description=Leucine Rich Repeat
  Pfam annotation: Domain name=LRR_1; Domain location=191-213; Score =18.7; E_value=0.024; Accession=PF00560.25; Description=Leucine Rich Repeat
  Pfam module annotation: Pfam domain module=LRRNT_2::LRR_1::LRR_1::LRR_ 1::LRR_1; Domain location=53-94::121-141::144-166::168-189::191-213
LHLLPWIPQEECLHGEGKKLSDCRAASGMALGAAGVAALLLATVFTGVTGDTNSDDVTALSTFYTALNSPSQLTNWVPQNGDPCGQSWLGVTCSGSRVITIKVPGMGLNGTLGYNMNLLTELSELDASNNNLGGSDIPYNLPPNLERLNLEKNNFIGTLPYSISKMATLNYLNLGHNQLSDINVVFNQLTNLTTLDFSYNSFSGTLPESFSNMTSLSTLYLQNNHPSLIIIIYTVKNPNKY

SEQ ID NO: 99898 - protein, 140 aa, Setaria italica
  Transcript Sequence Number=SeqID_33924
RDGEADGGCAGNFLLPLLLLAASLLDWNLISLINMIIFFAIRFVAPTRGFHTWRLYLLLWCTIIYSVLAILAQVTFHIIWCIEGMGWSVAHSWWVKLVGLARDQPSESLSVIYFLALQLSATFIALVEVLGSKDLTNKRK

SEQ ID NO: 99899 - protein, 228 aa, Setaria italica
  Transcript Sequence Number=SeqID_33925
  Gene Ontology: Mol. function=oxidoreductase activity, acting on paired donors, with incorporation or reduction of molecular oxygen, 2-oxoglutarate as one donor, and incorporation of one atom each of oxygen into both ...
  Gene Ontology: Mol. function=donors; Cellular component=plasma membrane; Biological process=protein metabolic process
  Homolog annotation: Hit_ID=B9IJQ5; Match level="QueryCoverage=100%, HitCoverage=73%, E-value=3e-90, Identity=71%"; Hit description =Oxidoreductase, 2OG-Fe(II) oxygenase family protein
  Pfam annotation: Domain name=2OG-FeII_Oxy; Domain location=48-170; Score=61.5; E_value=3.2e-15; Accession=PF03171.12; Description=2OG -Fe(II) oxygenase superfamily
  Pfam annotation: Domain name=ShK; Domain location=186-226; Score =26.8; E_value=8.5e-05; Accession=PF01549.16; Description=ShK domain -like
  Pfam module annotation: Pfam domain module=2OG-FeII_Oxy::ShK; Domain location=48-170::186-226
MVADNRSGKSVMSEVRTSSGTFLDKRQDPVVSRIEERIAAWTFLPEENAENIQILRYEHGQKYEPHFDYFQDKVNQARGGHRYATVLMYLSTVEKGGETVFPNAKGWESQPKDDTFSECAKKGLAVKPVKGDAVLFFSLHVNGVPDLLSLHGSCPVIEGEKWSAPKWIHVKSYENSPDLKEEAGGCTDKSEYCAQWAAAGECGKNPVYMVGTEGSPGECRKSCRVCDS

SEQ ID NO: 99900 - protein, 91 aa, Setaria italica
  Transcript Sequence Number=SeqID_33926
  Gene Ontology: Mol. function=triacylglycerol lipase activity; Biological process=lipid metabolic process
  Homolog annotation: Hit_ID=B4FGY5; Match level="QueryCoverage=75%, HitCoverage=19%, E-value=6e-31, Identity=88%"; Hit description=Lipase
VRLWIGFLTTALCKPSVLIITEPDIRNSGQSFVFNYTLAKAIVEYASAVYMTDLTALYTWTCSRCNDLTRGFEVTCIIVDVQNCLQAFVGR

SEQ ID NO: 99901 - protein, 194 aa, Setaria italica
  misc_feature (11)..(11): Xaa can be any naturally occurring amino acid
  misc_feature (181)..(181): Xaa can be any naturally occurring amino acid
  Transcript Sequence Number=SeqID_33927
  Gene Ontology: Mol. function=microtubule motor activity; Cellular component=nuclear chromosome, telomeric region; Biological process =telomere maintenance
  Homolog annotation: Hit_ID=Q7XJW0; Match level="QueryCoverage=99%, HitCoverage=13%, E-value=9e-84, Identity=74%"; Hit description =OSJNBa0016O02.10 protein
LHLEGTPLPRXLCTMPCVGTVLRIFANRFLKELFHLQKNIYWARFCNITCKQEFGIWKGILAPSSRIRLLSHEDGSVVDRLKMYDRRIANQVHRQPMASLPEASNVADVEYETAGYSTLMESLTHEQVTHKFKTLVRVVAAYPCRASELRLLLTGSYFLRLTLEDPTARIHAYVHTSATEXFFGGFLTAVGVLY

SEQ ID NO: 99902 - protein, 151 aa, Setaria italica
  Transcript Sequence Number=SeqID_33928
  Gene Ontology: Mol. function=microtubule motor activity; Cellular component=nuclear chromosome, telomeric region; Biological process =telomere maintenance
  Homolog annotation: Hit_ID=Q7XJW0; Match level="QueryCoverage=94%, HitCoverage=9%, E-value=1e-66, Identity=83%"; Hit description =OSJNBa0016O02.10 protein
MTILFSILSDVEYETAGYSTLMESLTHEQVTHKFKTLVRVVAAYPCRASELRLLLTGSYFLRLTLEDPTARIHAYVHKDDGAKFFGGFLTAEALIKKMNKLLGIPEEDEEGAPLTRNPPWIWCCLKSYRLDKNDPWGSRRYRVFGTENIRH

SEQ ID NO: 99903 - protein, 176 aa, Setaria italica
  Transcript Sequence Number=SeqID_33929
  Gene Ontology: Cellular component=plasma membrane
  Homolog annotation: Hit_ID=Q9SRX5; Match level="QueryCoverage=73%, HitCoverage=72%, E-value=1e-34, Identity=55%"; Hit description =F22D16.19 protein
  Pfam annotation: Domain name=DUF538; Domain location=27-145; Score =158.3; E_value=2.4e-44; Accession=PF04398.4; Description=Protein of unknown function, DUF538
MLPHRRLLLLAVAAAAAAGAAASAKPTAYEALAGFDFPPGILPKGVVAYTLNNATGAFTATLDASASGAGSSVCEFSIQGSYSLRYQTKITGKIKPDHLTDLQGVSVKVLFFWLNIIEVTRHGDNLEFSVGIASADFGIENFLECPTCGCGFNCNDLLMLQKQGATTAKLRLRGAF

SEQ ID NO: 99904 - protein, 126 aa, Setaria italica
  misc_feature (99)..(99): Xaa can be any naturally occurring amino acid
  Transcript Sequence Number=SeqID_33930
LSAKISEAISIKQNMLIEYALRPGMSNSENSDDMIRVFSSTVNDGVNGAESCDSRLKSVEKESFELRNEAHASMTGYHEQSAFRMADGFSFLNDPDPAXNSIKNTSSYDGFLEHIDLQMKSLEYEN

SEQ ID NO: 99905 - protein, 109 aa, Setaria italica
  Transcript Sequence Number=SeqID_33931
  Gene Ontology: Mol. function=transferase activity, transferring nitrogenous groups; Biological process=biosynthetic process
  Homolog annotation: Hit_ID=B6TFA9; Match level="QueryCoverage=98%, HitCoverage=23%, E-value=1e-47, Identity=85%"; Hit description=8 -amino-7-oxononanoate synthase
LRKERWRRSAVWRHVQYFASLTKVDITSPIISIVVGSEEAALRAGRHLLRSGFHVTPIRPPTVPPNSCRLRVTLSASHSSDDIKRLVDALTPWLPDKYAEQTYATLSKL

SEQ ID NO: 99906 - protein, 234 aa, Setaria italica
  misc_feature (15)..(15): Xaa can be any naturally occurring amino acid
  misc_feature (29)..(29): Xaa can be any naturally occurring amino acid
  Transcript Sequence Number=SeqID_33932
DRPDHSLQHIRSVIXPAKRRKVATIKKRXKVSAESILSSVVDIVAEGRTAPLAPAASQIEAQKIEVEVIDEADEALVAQETVYESSILNLAPVGRDVLSRIRCRDFYSACHLSAETGALIVWQPPPIPEEMVDHDQLAPRQDPQTFGPPAYFDTEYQRQVPAVQITDTSVVAGSSFHARMTVQDDDNLRGDILAFFNESTARIMGRYDAHISQLKAENSKLLEQLANERAAALE

SEQ ID NO: 99907 - protein, 161 aa, Setaria italica
  Transcript Sequence Number=SeqID_33933
  Gene Ontology: Mol. function=DNA binding; Cellular component=nucleus; Biological process=regulation of transcription
  Homolog annotation: Hit_ID=Q9ZRZ2; Match level="QueryCoverage=80%, HitCoverage=40%, E-value=7e-36, Identity=57%"; Hit description=GRAB2 protein
  Pfam annotation: Domain name=NAM; Domain location=1-63; Score=47.8; E_ value=6.7e-12; Accession=PF02365.7; Description=No apical meristem (NAM) protein
RKYPRGRAPTRATPSGYWKATGKDKEIYRGRDLVGMRKTLVFYTGRAPRGGKTPWVMHEYRLEGKLPPNLPRAAKDEWAVCRVFNKDLAAKAGQMAPAAAVMEPTMDFEDIFGAELPPLMDSPFAVDDLLDLKGGAGAGSSGSGAAAGTGSGGGYQVKAEQ

SEQ ID NO: 99908 - protein, 268 aa, Setaria italica
  Transcript Sequence Number=SeqID_33934
  Gene Ontology: Mol. function=protein serine/threonine kinase activity; Cellular component=plasma membrane; Biological process =protein amino acid phosphorylation
  Homolog annotation: Hit_ID=Q30KI3; Match level="QueryCoverage=92%, HitCoverage=30%, E-value=1e-121, Identity=84%"; Hit description=RLK1 (Fragment)
  Pfam annotation: Domain name=Pkinase; Domain location=1-206; Score= -13.7; E_value=1.1e-07; Accession=PF00069.17; Description=Protein kinase domain
  Pfam annotation: Domain name=Pkinase_Tyr; Domain location=1-206; Score=-32.6; E_value=1.5e-11; Accession=PF07714.9; Description =Protein tyrosine kinase
  Pfam module annotation: Pfam domain module=Pkinase::Pkinase_Tyr; Domain location=1-206::1-206
SNNETNLLVYEYMPNGSLGEMLHGKKGGHLHWDTRYNIAIEAAKGLCYLHHDCSPLILHRDVKSNNILLDSNFEAHVADFGLAKFLQDSGASECMSAIAGSYGYIAPEYAYTLKVDEKSDVYSFGVVLLELVTGRKPVGEFGDGVDIVQWAKMMTDSSKEQVMKILDPRLSTVPLHEIMHVFYVALLCTEEQSVQRPTMREVVQILSELPKPSTKQGEEVPNACDGSASGPLHPAPAGSNEAPTGEARDQQQQQTSSPSSPPPDLISI

SEQ ID NO: 99909 - protein, 270 aa, Setaria italica
  misc_feature (15)..(15): Xaa can be any naturally occurring amino acid
  misc_feature (23)..(23): Xaa can be any naturally occurring amino acid
  Transcript Sequence Number=SeqID_33935
CPSCATSSVLCSAAXTVMWPWDXLVKGEDFLPKRFLNHPPDGLHGSWYGHYKGALDDPFLEKESKEPIKVPSDSEHCSVRSDTKHGSIPKYVTNAILEALHPYPQGTSLSHLRDLLLRNSILTGTDFFGHKKFSYLLQSMPDIVELVDPPPGENQPRVILVNKRVLKPGDGSCKTLSSAQCNVRDNNLTRTPQNDKKHPSLMSTPEVNSKPLSSSQSIDRTRSFTENVNENPPTFSVSSSPLVVLSEDKKKYQTADASAQTESPTKHTEV

SEQ ID NO: 99910 - protein, 83 aa, Setaria italica
  Transcript Sequence Number=SeqID_33936
  Subcellular localization annotation: CTP_CleavageSite=24; ConfidenceScore=5.25e-01
HHGPTGRNSTVSRSRRKPVWPCPQASVISLLQCPTRQPHTRSDRRLGVPERATLFYLDWIFGDPSPSAPLARQAQQLAVHARN

SEQ ID NO: 99911 - protein, 68 aa, Setaria italica
  Transcript Sequence Number=SeqID_33937
SPSSKQITMPSSSKWSLVSKSFQKKRVVCEEEQLQGLELDIVDLESGVGALFRTLIQSRVSLLNTLSL

SEQ ID NO: 99912 - protein, 90 aa, Setaria italica
  Transcript Sequence Number=SeqID_33938
  Subcellular localization annotation: CTP_CleavageSite=78; ConfidenceScore=5.26e-01
RAASRRLAGECRLLQFIPPPRAHAPPRRYLPSTATPPRARAKTGNGIPIRMRACSGRRPPPAFPVPLNPSRLRRVDPSVATLSGPEQRWP

SEQ ID NO: 99913 - protein, 57 aa, Setaria italica
  Transcript Sequence Number=SeqID_33939
  Gene Ontology: Mol. function=phosphatase activity; Biological process= metabolic process
  Homolog annotation: Hit_ID=B6TXH8; Match level="QueryCoverage=100%, HitCoverage=20%, E-value=5e-23, Identity=84%"; Hit description =Phosphatase phospho1
MAGIIVVFDFDKTIIDVNSDNWVVDSLGFTEEFERLLPTMPWNDLMDAMMGKIHAGG

SEQ ID NO: 99914 - protein, 177 aa, Setaria italica
  Transcript Sequence Number=SeqID_33940
  Gene Ontology: Mol. function=aspartyl esterase activity; Cellular component=cell wall; Biological process=cell wall modification
  Pfam annotation: Domain name=Pectinesterase; Domain location=3-177; Score=-28.2; E_value=1.8e-19; Accession=PF01095.11; Description =Pectinesterase
LINLARVVIKVNAGTYTEKVNISPMRAFVTVEGAGADKTVVQWGDTADTVGSWGRAMGTFGSATFAVNSMFFVAKNITAQNTAPMPKPGALGKQGVALRISADNAAFVGCNFLGAQDTLYDHLGRHYYRDCYIEGSIDFIFGNALSLYEGCHVHAIARNYGALTAQNRQSLLEDTGS

SEQ ID NO: 99915 - protein, 84 aa, Setaria italica
  misc_feature (43)..(43): Xaa can be any naturally occurring amino acid
  misc_feature (76)..(76): Xaa can be any naturally occurring amino acid
  Transcript Sequence Number=SeqID_33941
MVPTGLFGWASPHVQPLTPVSEVSEPPESPSPYGDGPAGDAGXVGAREGEAAGAGEEEVEEDEVEPPPAAVSFWRXLFEFADGF

SEQ ID NO: 99916 - protein, 84 aa, Setaria italica
  Transcript Sequence Number=SeqID_33942
  Subcellular localization annotation: CTP_CleavageSite=35; ConfidenceScore=5.65e-01
SSSPPPTTQLGRWAPPPPPPWARRPVWPPRAPWCSASRLMTPHPPWSEQETSPSPPPRVTSLPSPPRPPYLPPPPAPPRPWWTP

SEQ ID NO: 99917 - protein, 71 aa, Setaria italica
  Transcript Sequence Number=SeqID_33943
ILATYIDQLSLGLYKNEYTISSSPFFLCRRDVMLFQYLNQGVLHGFHQSKMYFLVLPCPMLIDRYMTKCLY

SEQ ID NO: 99918 - protein, 198 aa, Setaria italica
  misc_feature (9)..(9): Xaa can be any naturally occurring amino acid
  Transcript Sequence Number=SeqID_33944
  Gene Ontology: Mol. function=deaminase activity; Cellular component =cellular_component; Biological process=purine ribonucleoside monophosphate biosynthetic process
  Homolog annotation: Hit_ID=B6TRX4; Match level="QueryCoverage=98%, HitCoverage=50%, E-value=1e-95, Identity=87%"; Hit description =Deaminase
AENVVYLEXRTTPKNNEAKGMTKRSYMDAVIKGLKAVEAVDVVLFDSNSRTNDTLACTPTIEFDGDTMKKRIYVRLLLSIDRRETTSAALDTVNLALELKDQGVIGIDLSGNPVVGEWETYLPALQHAKELGIPITIHCGEVANRKEIQAVLDFCPQRLGHVCCLNDAEWKKLKSLMIPVEICLTSNVMTGGASFLLS

SEQ ID NO: 99919 - protein, 371 aa, Setaria italica
  misc_feature (9)..(9): Xaa can be any naturally occurring amino acid
  Transcript Sequence Number=SeqID_33945
  Gene Ontology: Mol. function=two-component response regulator activity; Biological process=two-component signal transduction system (phosphorelay)
  Subcellular localization annotation: CTP_CleavageSite=71; ConfidenceScore=5.25e-01
APLSSFSPXGVVNRNNPTSFGIQGMCASRPIQIATGNSTISHSVGDANKYHLSFPGTSNRPGNLAQGLATSVGQVQVPQKWIQEETHDLSTIISGNGLVNGVPGTLRSATNSPLLQQDLVECRHAKIVIQPSSSVNSEHLECTAGVSSSLMDSHVSQQSGVSLSAFSASALPMNGSFGSTNVAKLGATSSGGTNICSSNGLRVARDNEVGATSLGSVILLPPDTAQNQKYLNFGGGSSLGHNMDGGNRDSVLDSKLVWSSLPTSQPPSTIRSHHPLNQRSNNGTLGVKMIEQTSASASTAAPQTKFDMFTSGDILTAKNALDSSFPRLNSELSSSSCSFDGLLNSIIKVEKDDTSFNDDLGCDFYSLGACI

SEQ ID NO: 99920 - protein, 79 aa, Setaria italica
  Transcript Sequence Number=SeqID_33946
MVSHEQVHARSHQGEHDEATKQAAQMGYESYLVNAEAAYGGGRMPSWTPASAPAAASSNDNMAGVGHGGAQLFSVWNDT

SEQ ID NO: 99921 - protein, 62 aa, Setaria italica
  Transcript Sequence Number=SeqID_33947
  Gene Ontology: Mol. function=catalytic activity
FNHTFLFQWEEILLGIGGEHLEKSNDLSLKADVEVEVFHVRKGIRRIIHLTVELSDGNEVFS

SEQ ID NO: 99922 - protein, 83 aa, Setaria italica
  Transcript Sequence Number=SeqID_33948
  Subcellular localization annotation: CTP_CleavageSite=15; ConfidenceScore=5.19e-01
GRRAPAIARRSTTCIAMPRRSTAHCRLRLRGQPTPRVWAVTTEATRHLGFSQSQAAGQDDPLARGSREVQGGGRRQRRRAARR

SEQ ID NO: 99923 - protein, 334 aa, Setaria italica
  Transcript Sequence Number=SeqID_33949
  Gene Ontology: Mol. function=transcription regulator activity; Cellular component=nucleus; Biological process=regulation of transcription
  Homolog annotation: Hit_ID=Q5ZAK6; Match level="QueryCoverage=94%, HitCoverage=82%, E-value=3e-84, Identity=59%"; Hit description=BHLH transcription factor-like protein
  Pfam annotation: Domain name=HLH; Domain location=243-281; Score=6.9; E_value=0.032; Accession=PF00010.18; Description=Helix-loop-helix DNA- binding domain
  Subcellular localization annotation: CTP_CleavageSite=8; ConfidenceScore=5.08e-01
GATTSSPTAAAESTSSITFQDPYRSSTHQPMSDAASSLGDPHVDWTQAFLNGRSDTSFQAVLQDDDMVRAQPAAGGEAPAMNNPLIRDMDSGFLVDQAQLAPSPYGTAPSQAIFNSTAGHGISVYGDSQSSISYDDAASMQFSQLLKPSVPASAPMQGGGGAPMLQYCLSGGYLPFGGPLPPSQLLLQALQTTKPSSRSSNANSLTVKDASSPATRKSVSESAAAVKRPRIEAPSPLPTFKVRKEKLGDRITALQQLVSPFGKTDTASVLHEAIEYIKFLHDQVSSLSSPYLKNVIPLQQFQQKGSEKAKDNGETKQDLRSRGLCLVPVASTYT

SEQ ID NO: 99924 - protein, 79 aa, Setaria italica
  Transcript Sequence Number=SeqID_33950
  Gene Ontology: Cellular component=plasma membrane
  Homolog annotation: Hit_ID=Q10JU9; Match level="QueryCoverage=78%, HitCoverage=8%, E-value=6e-21, Identity=72%"; Hit description=Von Willebrand factor type A domain containing protein, expressed
VKYPLCVSGKYHGKFPDTVIAKGYLADMKEISIELKVQHLKEIPLDKVLATQQISLLTSKAWYVLRVHFEFIKMCYSIN

SEQ ID NO: 99925 - protein, 132 aa, Setaria italica
  Transcript Sequence Number=SeqID_33951
  Gene Ontology: Cellular component=plasma membrane
  Homolog annotation: Hit_ID=Q10JU8; Match level="QueryCoverage=96%, HitCoverage=26%, E-value=1e-40, Identity=62%"; Hit description=Von Willebrand factor type A domain containing protein, expressed
RCLPHLDEFEVDSEYIPDLSVKYPLCVSGKYHGKFPDTVIAKGYLADMKEISIELKVQHLKEIPLDKVLATQQISLLTSKAWLSADKQLERKVIKLSIQNSIPSEYTEMVLLQTNLDKVDATQKVKQKLKGQ

SEQ ID NO: 99926 - protein, 312 aa, Setaria italica
  Transcript Sequence Number=SeqID_33952
  Gene Ontology: Cellular component=plasma membrane
  Homolog annotation: Hit_ID=Q10JU8; Match level="QueryCoverage=99%, HitCoverage=64%, E-value=1e-102, Identity=58%"; Hit description=Von Willebrand factor type A domain containing protein, expressed
MHNICQTMKTEIINRGSKSPRISTFGLGSHCNHYFLRMLASIGKGHYDAALETASIESRILKWFAGASNTIVANISIDAITHLDEFEVDSEYIPDLSVKYPLCVSGKYHGKFPDTVIAKGYLADMKEISIELKVQHLKEIPLDKVLATQQISLLTSKAWLSADKQLERKVIKLSIQNSIPSEYTEMVLLQTNLDKVDATQKVKQKLKGQKGPDEIRIPLDGLKLGFGDKGATRENLITGYGDVRPPEKSVIMQKASGCCSRLADCICCMCCIKACNRMNDQCAIVMAQICAALSCLGCYECCAEVCCGGSES

SEQ ID NO: 99927 - protein, 488 aa, Setaria italica
  Transcript Sequence Number=SeqID_33953
  Gene Ontology: Cellular component=plasma membrane
  Homolog annotation: Hit_ID=Q10JU9; Match level="QueryCoverage=98%, HitCoverage=64%, E-value=0.0, Identity=73%"; Hit description=Von Willebrand factor type A domain containing protein, expressed
  Pfam annotation: Domain name=VWA; Domain location=262-432; Score =51.8; E_value=2.7e-12; Accession=PF00092.20; Description=von Willebrand factor type A domain
TNVDPSYQPYVYGRLEPPALIPLQMKEVDLAVDCALDAAHVTLRARWWLHCITRSRECDVRIVVPMGEQGSILGAEVTIGRRSYNTQVIDVEDHTVHHGQIQSGGLLKPQLFFLTIPQVEGGADIYATFRWSQKLLYDNGCFSVDIPFRFPYFVNPLPKVFMKREKIQLTVNSGFSKEVLLQGTSHPLKEKSRQGDKLSFLHEGVVENWSSKDFNFSYSVYSADLSGGVLVQPATLRDYDDRDSFCIFLLPGSGSRKVFRKAVVFIVDTSGSMQGKPLENVKNAVSTALSELVQGDYFNIITFNDELHSFSSCLEQVNEKTIASATDWMNSNFVAEGGTDIMHPLSEAMALLSSVHDALPQIYLMTDGSVEDEHNICQTMKTEIINRGSKSPRISTFGLGSHCNHYFLRMLASIGKGHYDAALETASIESRILKWFAGASNTIVANISIDAITHLDEFEVDSEYIPDLSVKYPLCVSGKYHGQIPRHS

SEQ ID NO: 99928 - protein, 38 aa, Setaria italica
  Transcript Sequence Number=SeqID_33954
GKSCFALKYCILQGEEANFALCSPFLKNKCVAHHSEKT

SEQ ID NO: 99929 - protein, 179 aa, Setaria italica
  misc_feature (118)..(118): Xaa can be any naturally occurring amino acid
  Transcript Sequence Number=SeqID_33955
  Gene Ontology: Mol. function=protein binding; Biological process =defense response
  Homolog annotation: Hit_ID=B9V0H5; Match level="QueryCoverage=98%, HitCoverage=21%, E-value=2e-47, Identity=50%"; Hit description=NBS -LRR disease resistance protein family-3
  Pfam annotation: Domain name=LRR_1; Domain location=133-154; Score =8.4; E_value=7.6; Accession=PF00560.25; Description=Leucine Rich Repeat
  Pfam annotation: Domain name=LRR_1; Domain location=156-178; Score =12.8; E_value=1.1; Accession=PF00560.25; Description=Leucine Rich Repeat
  Pfam annotation: Domain name=LRR_1; Domain location=87-108; Score =9.7; E_value=4.3; Accession=PF00560.25; Description=Leucine Rich Repeat
  Pfam module annotation: Pfam domain module=LRR_1::LRR_1::LRR_1; Domain location=133-154::156-178::87-108
FTLYKGVTVFTMHDLVHDMARLDMADEILDGSKQGITVESTGRYVLLTDCSKPLKSSTRFTDKIRALRFLDCRRIKLHGDAFSSATSLQVLDLSECRIYQLPACISELVKLRYLSAPXIQCQTIPYCITKLSKLIYLNLSWSTILALPESIGDLRCLMHLDISNCHFIDNLPKSFVNLK

SEQ ID NO: 99930 - protein, 103 aa, Setaria italica
  Transcript Sequence Number=SeqID_33956
  Gene Ontology: Mol. function=protein binding; Cellular component =nucleus; Biological process=regulation of transcription, DNA -dependent
  Homolog annotation: Hit_ID=Q8H2X8; Match level="QueryCoverage=100%, HitCoverage=17%, E-value=2e-36, Identity=76%"; Hit description =Protein SHORT-ROOT 1
LEPRVVTVVEEDADLVEPDPDASSSEEAASTEAAFIKVFTEGLRFFSAYMDSLEESFPKTSNERLVLERAAGRAIVDLVSCPASESAERRETGASWARRMRSA

SEQ ID NO: 99931 - protein, 62 aa, Setaria italica
  Transcript Sequence Number=SeqID_33957
LVFHSIRSIISICFFLSLIGCLATSKCVDSYNHHFDQYNGHHDSAARVPLPPHRRRARRILP

SEQ ID NO: 99932 - protein, 74 aa, Setaria italica
  Transcript Sequence Number=SeqID_33958
YKRRLRTLSSIFHYSIIKSKRYVCLLKPHRQTSYRFRSSNAHAQQYRALVSIVSPCWHAILAKRPCLVMTSHLS

SEQ ID NO: 99933 - protein, 119 aa, Setaria italica
  misc_feature (73)..(73): Xaa can be any naturally occurring amino acid
  misc_feature (90)..(90): Xaa can be any naturally occurring amino acid
  Transcript Sequence Number=SeqID_33959
VGFDSGSASSTGVPDMMVADKMNSSLVIDNCDLSAEQHGLHARKRVLSPLTNVLPAGQFHGDALSIGSGNVKXQHTDCVRQLSSSGFHDXQKANTGTLDAFHSPTEPILRYSNWSTEQG

SEQ ID NO: 99934 - protein, 53 aa, Setaria italica
  Transcript Sequence Number=SeqID_33960
MEPHHEGNYVLASNLYAADEDWRRVVDIRLDMGARKGTSRGAIAASYVEVNGD

SEQ ID NO: 99935 - protein, 93 aa, Setaria italica
  Transcript Sequence Number=SeqID_33961
  Gene Ontology: Mol. function=protein tyrosine kinase activity; Cellular component=plasma membrane; Biological process=protein amino acid phosphorylation
  Homolog annotation: Hit_ID=B9SUE1; Match level="QueryCoverage=84%, HitCoverage=11%, E-value=2e-33, Identity=79%"; Hit description=ATP binding protein, putative
FSLFSFCYLFPKSCPVEEEFGEGVDLVKWVHTAPARGETPEQIMDPRLSTVSFAWRRQMLAVLKVAMLCTEHAPAKRPRMKKVVEMLQEAKNS

SEQ ID NO: 99936 - protein, 299 aa, Setaria italica
  misc_feature (98)..(98): Xaa can be any naturally occurring amino acid
  Transcript Sequence Number=SeqID_33962
  Gene Ontology: Mol. function=protein tyrosine kinase activity; Cellular component=plasma membrane; Biological process=protein amino acid phosphorylation
  Homolog annotation: Hit_ID=B9SUE1; Match level="QueryCoverage=95%, HitCoverage=39%, E-value=1e-121, Identity=72%"; Hit description=ATP binding protein, putative
  Pfam annotation: Domain name=Pkinase; Domain location=37-298; Score= -1.1; E_value=2e-08; Accession=PF00069.17; Description=Protein kinase domain
  Pfam annotation: Domain name=Pkinase_Tyr; Domain location=37-287; Score=-47.4; E_value=1.4e-10; Accession=PF07714.9; Description =Protein tyrosine kinase
  Pfam module annotation: Pfam domain module=Pkinase::Pkinase_Tyr; Domain location=37-298::37-287
KGQGKVVVAAPQVVASTVFIESLQQAIDFQSCVKATYKDANELGNGTFSTTYKAVMPSGMVVCVKKLKSVDRAVIDHQTKMIRELERLAHINHKNLVXPIGYVIYDDCALLLHHHMPNGTLLQLIHNDWNSDGEKQKPDWPRLLSIAIDVAEGLAFLHQVATIHLDISSGNIYLDSHYNALLGEVEISKLLDPSKGTASISAVAGSFGYIPPEYAYTMQVTVPGNVYSYGVVLLEILTSKLPVEEEFGEGVDLVKWVHTAPARGETPEQIMDPRLSTVSFAWRRQMLAVLKVAMSCCLR

SEQ ID NO: 99937 - protein, 50 aa, Setaria italica
  Transcript Sequence Number=SeqID_33963
CLVVVISIPLGSLCAIDFPLLLPTLLINATCCWNSAYSRPFTSHTLCNYC

SEQ ID NO: 99938 - protein, 80 aa, Setaria italica
  Transcript Sequence Number=SeqID_33964
  Gene Ontology: Mol. function=protein dimerization activity; Cellular component=nucleus; Biological process=regulation of transcription, DNA-dependent
  Homolog annotation: Hit_ID=B6SVI4; Match level="QueryCoverage=57%, HitCoverage=43%, E-value=6e-11, Identity=82%"; Hit description=Light- inducible protein CPRF-2
  Pfam annotation: Domain name=bZIP_1; Domain location=34-78; Score =11.0; E_value=0.023; Accession=PF00170.13; Description=bZIP transcription factor
LGYLFLSWVVGTSSGSSHGTRSFGSEGDMELQARMELKRKRRMESNRESAKRSRQRKQQHLDDLNSQVCVSYICLHNLQN

SEQ ID NO: 99939 - protein, 123 aa, Setaria italica
  Transcript Sequence Number=SeqID_33965
  Gene Ontology: Mol. function=protein dimerization activity; Cellular component=nucleus; Biological process=regulation of transcription, DNA-dependent
  Homolog annotation: Hit_ID=B6SU78; Match level="QueryCoverage=77%, HitCoverage=57%, E-value=1e-22, Identity=61%"; Hit description=Ocs element-binding factor 1
  Pfam annotation: Domain name=bZIP_1; Domain location=35-98; Score =47.2; E_value=6.3e-11; Accession=PF00170.13; Description=bZIP transcription factor
  Pfam annotation: Domain name=bZIP_2; Domain location=35-89; Score =30.4; E_value=7.4e-06; Accession=PF07716.7; Description=Basic region leucine zipper
  Pfam module annotation: Pfam domain module=bZIP_1::bZIP_2; Domain location=35-98::35-89
  Subcellular localization annotation: CTP_CleavageSite=48; ConfidenceScore=5.31e-01
TLLGGTFSSGSGTSSGSSHGTRSFGSEGDMELQARMELKRKRRMESNRESAKRSRQRKQQHLDDLNSQVDQLRTTKQQLLTALNNTTQNYAAAEAQNSVLRTQMIELESRLSALRDIICYMNA

SEQ ID NO: 99940 - protein, 80 aa, Setaria italica
  Transcript Sequence Number=SeqID_33966
PHLVKKRKILDGKKKEDYVRHGGVKRHRKENCTKNVKSRDVLTSPYILGEQSITIEGKASASSSGISSRSTMFSCISEAT

SEQ ID NO: 99941 - protein, 81 aa, Setaria italica
  Transcript Sequence Number=SeqID_33967
MLHQIGEWQVVPWTGVGWWLHVLVGEGLQGDDGHGVKENLIRTPRVHLHQQHLRHLQLLLHLRRLQLLIQLGQSLEPVREN

SEQ ID NO: 99942 - protein, 186 aa, Setaria italica
  Transcript Sequence Number=SeqID_33968
  Gene Ontology: Mol. function=protein serine/threonine kinase activity; Cellular component=polytene chromosome band; Biological process=protein modification process
  Homolog annotation: Hit_ID=B6TMW2; Match level="QueryCoverage=74%, HitCoverage=44%, E-value=3e-58, Identity=79%"; Hit description =Polyubiquitin containing 7 ubiquitin monomers
  Pfam annotation: Domain name=ubiquitin; Domain location=83-150; Score= 24.4; E_value=0.00048; Accession=PF00240.15; Description=Ubiquitin family
  Pfam annotation: Domain name=ubiquitin; Domain location=9-75; Score =51.3; E_value=3.9e-12; Accession=PF00240.15; Description=Ubiquitin family
  Pfam module annotation: Pfam domain module=ubiquitin::ubiquitin; Domain location=83-150::9-75
PPHYKIYVKMVKEVALDVKCTDTVDQIKSKISSIEGIDKNHQALFFGGNHLENNNRLADYNIMTNSSVDLYVTDGMQISVSIPSVGKIIKLNLKKSQSVADVKAEIEQKGGIPLDEQILMCGCQQLEDNKVLSQCGLSNGDEDTTSTSTPAAPQAPPVAHPVGPITRARARELNFIMLLRNEGPSE

SEQ ID NO: 99943 - protein, 161 aa, Setaria italica
  Transcript Sequence Number=SeqID_33969
  Gene Ontology: Mol. function=RNA-directed DNA polymerase activity; Cellular component=chromatin; Biological process=RNA-dependent DNA replication
  Homolog annotation: Hit_ID=Q8L7J3; Match level="QueryCoverage=99%, HitCoverage=9%, E-value=2e-72, Identity=76%"; Hit description=Gag -pol polyprotein
  Pfam annotation: Domain name=rve; Domain location=1-127; Score=59.8; E_value=1e-14; Accession=PF00665.18; Description=Integrase core domain
VVDRFSKMAHFIPCHKTDDASNVAELFFREIIRLHGIPNTIVSDRDAKFLSHFWRSLWNKMGTKLLFSTTCHPQTDGQTEVVNRTLSTMLRAVLDKHLKRWEDCLPHVEFAYNHATHSSTKMCPFQVVYGYIPRAPIDLFALDAEDTPHIDAAAHVDQMIS

SEQ ID NO: 99944 - protein, 662 aa, Setaria italica
  misc_feature (648)..(648): Xaa can be any naturally occurring amino acid
  Transcript Sequence Number=SeqID_33970
  Gene Ontology: Mol. function=methyltransferase activity; Cellular component=nucleolus; Biological process=positive regulation of cell proliferation
  Homolog annotation: Hit_ID=B9S9W8; Match level="QueryCoverage=62%, HitCoverage=66%, E-value=1e-166, Identity=69%"; Hit description =Proliferating-cell nucleolar antigen p120, putative
  Pfam annotation: Domain name=Nol1_Nop2_Fmu; Domain location=258-545; Score=412.8; E_value=5.6e-121; Accession=PF01189.9; Description =NOL1NOP2sun family
  Subcellular localization annotation: CTP_CleavageSite=16; ConfidenceScore=5.21e-01
MAKKGPKSKQPPPPVTAAKKGSKAAPPPKAAKRVPKKQELLESSDDSDTEPQQLQEEDSDLDVPSDSDAEELSGSDAEADELSGSDADADGGSSSGDEVEENEEEEGDDESDDDPLADDFLADSDEGSEGGDSGVESDDSDDLEAKSRAIDERKRKVEEEADDELTTNIRSESDEFRLPTAEELEEEAHLPPNLPNLKRRISEIVRVLSNFTKLRQKDVPRKDYVNQLKTDIISYYGYNDFLVEALIEMFPAVELVELLEAFEKRPPECLRTNTLKTRRRDLAAALIPRGFNLDPIGKWSKVGLVVYDSTISAGATTEYMAGHYMKQGASSFLPVMALAPQEKERIVDMAAAPGGKTTYIGALMKNTGIIYANEFNEKRLHGLLGNIHRMGVTNTIVCNYDGKELPKVLGMNSVDRVLLDAPCTGTGTIWKDPQIKTSKDIDDIRNCAFVQKQLLLAAIDLVDANSKTGGYIVYSTCSIMIPENEAVIDYALKKRNVKLVPCGLDFGRPGFIRFREHRFHTSLDKTRRFYPHVNNMDGFFVAKLKKLSNTIPVTSESSKASEVAAEKADPSGDDEDKEAVPEEQEQEKGVPDKDEKAVRMKNHKETKKSNKERSVPKETTHVPDRPAKHLKKQKKDAMETDGPESTEXNGDGKEVYLGAFVP

SEQ ID NO: 99945 - protein, 162 aa, Setaria italica
  Transcript Sequence Number=SeqID_33971
  Gene Ontology: Mol. function=protein serine/threonine kinase activity; Biological process=protein amino acid phosphorylation
  Homolog annotation: Hit_ID=B6SVE4; Match level="QueryCoverage=100%, HitCoverage=21%, E-value=6e-95, Identity=96%"; Hit description =MAPKKK5
  Pfam annotation: Domain name=Pkinase; Domain location=1-162; Score =47.4; E_value=2.6e-11; Accession=PF00069.17; Description=Protein kinase domain
  Pfam annotation: Domain name=Pkinase_Tyr; Domain location=1-159; Score=-90.8; E_value=1.1e-07; Accession=PF07714.9; Description =Protein tyrosine kinase
  Pfam module annotation: Pfam domain module=Pkinase::Pkinase_Tyr; Domain location=1-162::1-159
KTIVQYYGSDIIEERFYIYLEYVHPGSINKYVKQHYGAMTESVVRNFTRHILRGLAFLHGQKIMHRDIKGANLLVDVQGVVKLADFGMAKHLSTAAPNLSLKGTPYWMAPEMVQATLMKDVGYDVAVDIWSLGCTIIEMFDGKPPWSDLEGPAAMFKVLHKD

SEQ ID NO: 99946 - protein, 66 aa, Setaria italica
  Transcript Sequence Number=SeqID_33972
HPTNQDPLNHKENIENSGLLPKSSRLYTKDTLELNVCPRDPETIKPISNVQMTNQKHFQLTAKAEI

SEQ ID NO: 99947 - protein, 401 aa, Setaria italica
  Transcript Sequence Number=SeqID_33973
  Gene Ontology: Mol. function=protein binding; Cellular component =integral to membrane; Biological process=protein amino acid phosphorylation
  Homolog annotation: Hit_ID=Q0WR58; Match level="QueryCoverage=93%, HitCoverage=94%, E-value=1e-133, Identity=61%"; Hit description =Protein kinase (F21B7.6) like protein
  Pfam annotation: Domain name=LRRNT_2; Domain location=31-72; Score =37.1; E_value=7.3e-08; Accession=PF08263.4; Description=Leucine rich repeat N-terminal domain
  Pfam annotation: Domain name=LRR_1; Domain location=128-150; Score =12.9; E_value=1; Accession=PF00560.25; Description=Leucine Rich Repeat
  Pfam annotation: Domain name=LRR_1; Domain location=152-174; Score =17.4; E_value=0.058; Accession=PF00560.25; Description=Leucine Rich Repeat
  Pfam annotation: Domain name=LRR_1; Domain location=176-197; Score =9.9; E_value=3.8; Accession=PF00560.25; Description=Leucine Rich Repeat
  Pfam annotation: Domain name=LRR_1; Domain location=199-218; Score =0.0; E_value=3e+02; Accession=PF00560.25; Description=Leucine Rich Repeat
  Pfam annotation: Domain name=LRR_1; Domain location=220-242; Score =10.3; E_value=3.2; Accession=PF00560.25; Description=Leucine Rich Repeat
  Pfam annotation: Domain name=LRR_1; Domain location=244-267; Score =5.5; E_value=27; Accession=PF00560.25; Description=Leucine Rich Repeat
  Pfam annotation: Domain name=LRR_1; Domain location=310-333; Score =6.5; E_value=18; Accession=PF00560.25; Description=Leucine Rich Repeat
  Pfam annotation: Domain name=LRR_1; Domain location=338-360; Score =10.9; E_value=2.5; Accession=PF00560.25; Description=Leucine Rich Repeat
  Pfam module annotation: Pfam domain module=LRRNT_2::LRR_1::LRR_1::LRR_ 1::LRR_1::LRR_1::LRR_1::LRR_1::LRR_1; Domain location=31-72::128 -150::152-174::176-197::199-218::220-242::244-267::310-333::338-360
MAVTARLRAVVACVVLAAVATAPLPAAGILDPVDFLALQAVRRSLDDMPGSAFFDGWDFTADPCGFPGVFCDGDRVASLALGDPRAGSPGLTGRLDPALGRLSALTELSLVPGRVEGQLPASLASCSNLRFLAVSKNLLSGSIPDGFGALTNLRTLDVSFNQISGAIPPSIAALPSITNLILCHNQLTGGVPAFQDSSPLLRLDLKHNALTGGVPTLPAGLQYLSLSANKLSGTVDQVLPRLTRLNFLDLSMNQLDGPIPPAVFALPLSVLQLQRNFFAGPVQPANDVTIPVVDLSYNRFWGQLSPLLAGVGQLYLNNNRFTGEVPSRLVQELVGSGGLQVLYLQHNFLTGIEISPSSSLPSTVSLCLMYNCMVPPVYAPCPIKAGSQNTRPADQCPEWRG

SEQ ID NO: 99948 - protein, 66 aa, Setaria italica
  Transcript Sequence Number=SeqID_33974
MGNILKCFTGGDKDNGDDDYYPYYRPTSRPRPRYEHGLQAGDDEPAASSSQPLDFTFTGEDDDDDD

SEQ ID NO: 99949 - protein, 62 aa, Setaria italica
  Transcript Sequence Number=SeqID_33975
ERDRVEIILPKTARPRKEDQKLKNSHEKDGDATAPGKPEFTNPKAPLERAPDHFSSIPAWKI

SEQ ID NO: 99950 - protein, 130 aa, Setaria italica
  Transcript Sequence Number=SeqID_33976
KFSFSWWPRGSVHNSTDLNLSLFYLKNNSRDHFPILVVGLGEILEPSEPSNNPDFRRMELVHDVPSPRFPKVSPNGEWRQLWRLLTFLSYFFKEKLDSPFFQKYFCIQRNIKDNLTIICMLVLEIYSNYH

SEQ ID NO: 99951 - protein, 47 aa, Setaria italica
  Transcript Sequence Number=SeqID_33977
FLQHIILSTKHRWQGMLLHRMLLLFPSFDALVTHKAWCSAGKPTKCF

SEQ ID NO: 99952 - protein, 168 aa, Setaria italica
  Transcript Sequence Number=SeqID_33978
  Gene Ontology: Mol. function=oxidoreductase activity, acting on paired donors, with incorporation or reduction of molecular oxygen, 2-oxoglutarate as one donor, and incorporation of one atom each of oxygen into both ...
  Gene Ontology: Mol. function=donors; Cellular component=plasma membrane; Biological process=protein metabolic process
  Homolog annotation: Hit_ID=Q338D2; Match level="QueryCoverage=98%, HitCoverage=56%, E-value=3e-32, Identity=42%"; Hit description =Prolyl 4-hydroxylase, putative, expressed
MYMADSKDTIVSKIEDRISIWSFLPKDFGESMQILKYEVNKSGYNNYGSQSSSGNDRLVTVLIYLSDVKRGGETVFPRSEVQGTQVEQGAASECVGYAVQPVKGNAILLFNLKPDGVIDKDSQYEVCSVLEGEEWLAVKHIHLRKTDTPKSLFASEDECTDEDARCVG

SEQ ID NO: 99953 - protein, 153 aa, Setaria italica
  Transcript Sequence Number=SeqID_33979
KLACTYKFSGLEAKSRHSITILTTSFPSDVCTQRQLLENKIAFNQGPYTPIQITTTRGNGDDHQPSSFDEDLSTWKAFQSVRSVLYITDIQISAQQQICMFLSRKEGNPASCRVESCIICHCLKSSGSPQGRKPTCKVRLLISHCQLGYPSKR

SEQ ID NO: 99954 - protein, 62 aa, Setaria italica
  Transcript Sequence Number=SeqID_33980
MVLPAPPHLKLWGGSDTATLPSMGIIGGVLAGAGAPPPVVPPQLYAELLPVPGAPSSQQLDA

SEQ ID NO: 99955 - protein, 63 aa, Setaria italica
  Transcript Sequence Number=SeqID_33981
  Subcellular localization annotation: CTP_CleavageSite=34; ConfidenceScore=5.38e-01
TKMQKSLFAVVTKSSFCFVLKRNGSPVAKKTMVLVARVQPIQRMKLNVCYHKENRIVACSKLA

SEQ ID NO: 99956 - protein, 58 aa, Setaria italica
  Transcript Sequence Number=SeqID_33982
PWMIPVTWMAQPKRKRKLHIIYYTTKLQVTDHPLILLYLLSPYNHTLHLHILSILTSH

SEQ ID NO: 99957 - protein, 122 aa, Setaria italica
  Transcript Sequence Number=SeqID_33983
  Gene Ontology: Mol. function=ubiquitin thiolesterase activity; Cellular component=integral to membrane; Biological process =ubiquitin-dependent protein catabolic process
CFPFSDFLVIVRNAEWLLRNSIFFPSLITANPHLSYCILQVVTCGNLPLESSFQRVPRCVYTSTCLYEYRGWDSKAANTTHRRFTWGLRSMERHAVDFYISDFQSGLRALGCKTRYFGCLRC

SEQ ID NO: 99958 - protein, 485 aa, Setaria italica
  Transcript Sequence Number=SeqID_33984
  Gene Ontology: Mol. function=ubiquitin thiolesterase activity; Cellular component=integral to membrane; Biological process =ubiquitin-dependent protein catabolic process
  Homolog annotation: Hit_ID=Q01IJ9; Match level="QueryCoverage=17%, HitCoverage=25%, E-value=1e-09, Identity=40%"; Hit description =H0501D11.5 protein
LDWPFQNMGSRFPSHQLSNGLYVSGRPEQPKEKAPVICSSAMPYTGGDIKKSGELGKMFDLHRKSGPLGNQPSRNTSFGGAASNSGPVSNAVGRSNYSGSISSAVPGTGGSSRTKSNSGPLNKHGEPTKRSSGPQSGGVTPMARQNSGPLPPVLPTTGLITSGPITSGQMNSSGAQRKVSGPLDSSVSMKMRTASFAHNPAVTNLNAEDGYSIKGSIPAAIMWLVALLFVVGFVAGGFILAAIHNPILLIVVVVIFGFVAALVTWNICWGTKGVTGFVSHYPDADLRTAKDGEYVKVTGVVTCGNLPLESSFQRVPRCVYTSTCLYEYRGWDSKAANTTHRRFTWGLRSMERHAVDFYISDFQSGLRALVKTGFGARVTPYVDESVVIDINPDNKDMSPEFLRWLRGRNLSSDDRIMRLKEGYIKEGSTVSVMGVVQRNENVLMIVPPAEPISTGCQWAKCMLPTSLDGLVLRCEDTSDMDVIPV

SEQ ID NO: 99959 - protein, 50 aa, Setaria italica
  Transcript Sequence Number=SeqID_33985
TLFFSSYPYENPGICISYFGWIFLTPLMYLSCCLYTLGLSFLMTVMYLLC

SEQ ID NO: 99960 - protein, 236 aa, Setaria italica
  Transcript Sequence Number=SeqID_33986
  Gene Ontology: Mol. function=catalytic activity; Biological process =trehalose biosynthetic process
  Homolog annotation: Hit_ID=B6SH67; Match level="QueryCoverage=100%, HitCoverage=27%, E-value=1e-113, Identity=85%"; Hit description =Trehalose 6-phosphate synthase
  Pfam annotation: Domain name=Glyco_transf_20; Domain location=1-236; Score=86.9; E_value=7.3e-23; Accession=PF00982.13; Description =Glycosyltransferase family 20
HDKGELFDRSLFQAYVRANQIFADKVMEAVNSDDDCVWVHDYHLMLVPTFLRKKLHRIKVGFFLHSPFPSSEIYKTLPVRDEILKSLLNADLIGFQTFDYARHFLSCCSRLLGLNYESKRGHIGIEYFGRTVNLKILAAGVHVGRLESMLKLPVTISKVQEIENRYRGKLVILGVDDMDIFKGISLKLLGLELLLERTPKLRGKVVLVQIVNPARSIGKDVEEAKNEAVSVAQRIN

SEQ ID NO: 99961 - protein, 87 aa, Setaria italica
  Transcript Sequence Number=SeqID_33987
  Gene Ontology: Mol. function=protein serine/threonine kinase activity; Cellular component=plasma membrane; Biological process =protein amino acid phosphorylation
  Homolog annotation: Hit_ID=C4P7S5; Match level="QueryCoverage=100%, HitCoverage=19%, E-value=5e-42, Identity=95%"; Hit description=CBL -interacting protein kinase 17
MRMGKYEMGRTLGEGHFGKVRLARHAETGRAFAIKILDRQRILAMKIDEQIKREIATLKLLKHPNVVRLYEVSASKTKIYMVLEYVN

SEQ ID NO: 99962 - protein, 65 aa, Setaria italica
  Transcript Sequence Number=SeqID_33988
FKSIYDVLLVQLDLSPCLPLEIYRHRLSCFVLYLLFSSPLTAIIVKLNLVKFCFVFCLVLFKKKN

SEQ ID NO: 99963 - protein, 100 aa, Setaria italica
  Transcript Sequence Number=SeqID_33989
  Gene Ontology: Mol. function=DNA binding
  Homolog annotation: Hit_ID=B6STR4; Match level="QueryCoverage=66%, HitCoverage=24%, E-value=2e-27, Identity=87%"; Hit description=DNA binding protein
GETNDQIKSIMPDFAQVYSFLGSVFDPSTSGHLQKLKEMNPIDVETALLLMRNLSINLTSPDFEDQRKLLSSYSTSGGLELGSSRSSALATSAPFMIKGE

SEQ ID NO: 99964 - protein, 154 aa, Setaria italica
  Transcript Sequence Number=SeqID_33990
  Gene Ontology: Mol. function=3'-5' exonuclease activity; Cellular component=intracellular; Biological process=nucleobase, nucleoside, nucleotide and nucleic acid metabolic process
  Homolog annotation: Hit_ID=Q7XE52; Match level="QueryCoverage=99%, HitCoverage=13%, E-value=6e-45, Identity=58%"; Hit description =Nucleolar protein, putative, expressed
RVLQMERNSLEYLLLRFCGVTAKKEYQNADWRSRPLPDEMIKYAREDTHYLLYIYDLMKQRLQRESTPENDLLLEVHKRSNEICLQFYEKELLTDTSYLHIYGFECCFLGLSTRSKVHRSIFCVPIWLIEVYYYRLQEHELNSKQLAVVAALHG

SEQ ID NO: 99965 - protein, 289 aa, Setaria italica
  misc_feature (47)..(47): Xaa can be any naturally occurring amino acid
  misc_feature (58)..(58): Xaa can be any naturally occurring amino acid
  misc_feature (101)..(101): Xaa can be any naturally occurring amino acid
  misc_feature (108)..(108): Xaa can be any naturally occurring amino acid
  Transcript Sequence Number=SeqID_33991
  Gene Ontology: Mol. function=3'-5' exonuclease activity; Cellular component=intracellular; Biological process=nucleobase, nucleoside, nucleotide and nucleic acid metabolic process
  Homolog annotation: Hit_ID=Q7XE52; Match level="QueryCoverage=98%, HitCoverage=31%, E-value=1e-122, Identity=73%"; Hit description =Nucleolar protein, putative, expressed
  Pfam annotation: Domain name=3_5_exonuc; Domain location=1-157; Score= 151.2; E_value=3.2e-42; Accession=PF01612.12; Description=3'-5' exonuclease
  Pfam annotation: Domain name=HRDC; Domain location=207-276; Score =72.8; E_value=1.3e-18; Accession=PF00570.15; Description=HRDC domain
  Pfam module annotation: Pfam domain module=3_5_exonuc::HRDC; Domain location=1-157::207-276
KRLERSVTEFAVDLEHNQYRSFQGLTCLMQISTRTEDFIVDTLKLRXYIGLYLQEPFXDPTKRKVMHGADRDIMWLQRDFHIYICNLFDTGQASRVLQMEXNSLEYLXLGFCGVTAKKEYQNADWRSRPLPDEMIKYAREDTHYLLYIYDLMKQRLQRESTPENDLLLEVHKRSNEICLQFYEKELLTDTSYLHIYGLQEHELNSKQLAVVAALHGWRDRLARQEDESTGYVLPNKALIEIAKQMPTDTGHLKRIVKSKYPFVERSLDEIAYTVWNALEYSYAFEGIAE

SEQ ID NO: 99966 - protein, 112 aa, Setaria italica
  Transcript Sequence Number=SeqID_33992
PHIWFECCFLGLSTRSKVHRSIFCVPIWLIEVYYYRLQEHELNSKQLAVVAVRTKSILYTLSHDYSALNKPSMQHGFSLEMDLWLLESKSCYGLLIILFRIFFARFDNFWMF

SEQ ID NO: 99967 - protein, 681 aa, Setaria italica
  misc_feature (16)..(16): Xaa can be any naturally occurring amino acid
  misc_feature (346)..(346): Xaa can be any naturally occurring amino acid
  Transcript Sequence Number=SeqID_33993
  Gene Ontology: Mol. function=3'-5' exonuclease activity; Cellular component=intracellular; Biological process=nucleobase, nucleoside, nucleotide and nucleic acid metabolic process
  Homolog annotation: Hit_ID=Q7XE52; Match level="QueryCoverage=89%, HitCoverage=67%, E-value=1e-177, Identity=56%"; Hit description =Nucleolar protein, putative, expressed
  Pfam annotation: Domain name=3_5_exonuc; Domain location=142-311; Score=196.4; E_value=8e-56; Accession=PF01612.12; Description=3'-5' exonuclease
  Pfam annotation: Domain name=HRDC; Domain location=362-431; Score =72.8; E_value=1.3e-18; Accession=PF00570.15; Description=HRDC domain
  Pfam module annotation: Pfam domain module=3_5_exonuc::HRDC; Domain location=142-311::362-431
REDAAPGREAGDPEEXGDGSQLVSHDKKKKRASGQEGGGSAGSGAFLGAGSVRALTQDKGGAPAPGTKAKVPFHDPTIPRPQEVYKIIVDNYKPFEHVWLERSEDGTRCVHPLEKLPVEQFVDRNVPESEPLKPADLEDTPFTLVEDHKGLMELAKKLKSVTEFAVDLEHNQYRSFQGLTCLMQISTRTEDFIVDTLKLRIYIGLYLQEPFKDPTKRKVMHGADRDIMWLQRDFHIYICNLFDTGQASRVLQMERNSLEYLLLRFCGVTAKKEYQNADWRSRPLPDEMIKYAREDTHYLLYIYDLMKQRLQRESTPAYEPLEEDHKRSNEICLQFYEKELLTDTSXQPIYNCKQEHELNSKQLAVVAALHGWRDRLARQEDESTGYVLPNKALIEIAKQMPTDTGHLKRIVKSKYPFVERSLDEIAYTVWNALEYSYAFEGIAEQLKKERSEQLALKSVQASDETTLLDVDSDKSNIGTADQSSVAPSSTANVSVASGSGAGFMNETAMIDSIHLDDNTRTTSTKNFKTLSGLTRPINKDVLSNNRYQQATQELKRPTLGALGNSEPGRQTEIFGGFSKEQFQGGSNVENFRSSVLPFQQFSDGVKHSAAIGPTESFYPNTGMHSDNVWIQSTQMNEAMQLSNATYYPQLPGYSTEEGNFQNPMRRQSYPPSSNRYDRPYQ

SEQ ID NO: 99968 - protein, 38 aa, Setaria italica
  Transcript Sequence Number=SeqID_33994
NLPNVLMSLFCQRMTTFDNDSSLWSYFRRCQQDNRAAG

SEQ ID NO: 99969 - protein, 92 aa, Setaria italica
  misc_feature (52)..(52): Xaa can be any naturally occurring amino acid
  Transcript Sequence Number=SeqID_33995
  Gene Ontology: Mol. function=peptidyl-prolyl cis-trans isomerase activity; Cellular component=endoplasmic reticulum; Biological process=protein folding
  Homolog annotation: Hit_ID=B4FJW5; Match level="QueryCoverage=95%, HitCoverage=40%, E-value=1e-38, Identity=88%"; Hit description =Peptidyl-prolyl cis-trans isomerase
  Pfam annotation: Domain name=Pro_isomerase; Domain location=1-82; Score=12.1; E_value=1.6e-09; Accession=PF00160.13; Description =Cyclophilin type peptidyl-prolyl cis-tr
EVFRISLPHGVAGVVAMANSGLDSNGSQFYITTIKTSWLDGEHVVFGRVIQXMDTVYAIEGGAGTYNGKPRKKVVITDSGEIPKEKWGDQEA

SEQ ID NO: 99970 - protein, 64 aa, Setaria italica
  Transcript Sequence Number=SeqID_33996
SHHIKESATSKNKEVNDILDLQQGLKEWFDSLCSYNVAQKDCIAASSELFVSTKCYHSSVFPVV

SEQ ID NO: 99971 - protein, 128 aa, Setaria italica
  misc_feature (110)..(110): Xaa can be any naturally occurring amino acid
  Transcript Sequence Number=SeqID_33997
  Gene Ontology: Mol. function=peptidyl-prolyl cis-trans isomerase activity; Cellular component=endoplasmic reticulum; Biological process=protein folding
  Homolog annotation: Hit_ID=B4FJW5; Match level="QueryCoverage=90%, HitCoverage=53%, E-value=1e-56, Identity=92%"; Hit description =Peptidyl-prolyl cis-trans isomerase
  Pfam annotation: Domain name=Pro_isomerase; Domain location=2-128; Score=150.9; E_value=3.9e-42; Accession=PF00160.13; Description =Cyclophilin type peptidyl-prolyl cis-tr
VIVWQLIFFILHSAENFRALCTGEKGVGSNGKPLHYKGTPFHRIIPGFMIQGGDIVRGDGKGSESIYGGIFPDENFTVKHTHPGVVAMANSGLDSNGSQFYITTIKTSWXDIEQSCCLRVIQGMDTVY

SEQ ID NO: 99972 - protein, 216 aa, Setaria italica
  Transcript Sequence Number=SeqID_33998
  Gene Ontology: Mol. function=peptidyl-prolyl cis-trans isomerase activity; Cellular component=endoplasmic reticulum; Biological process=protein folding
  Homolog annotation: Hit_ID=B4FJW5; Match level="QueryCoverage=100%, HitCoverage=100%, E-value=1e-117, Identity=94%"; Hit description =Peptidyl-prolyl cis-trans isomerase
  Pfam annotation: Domain name=Pro_isomerase; Domain location=39-206; Score=353.0; E_value=5.4e-103; Accession=PF00160.13; Description =Cyclophilin type peptidyl-prolyl cis-tr
MLRKVVVAFLACAAIYFSFSAYFRRQSIAEVQLPAVTHRVYLDVEIDGQHIGRIVIGLYGEVVPKTVENFRALCTGEKGVGSNGKPLHYKGTPFHRIIPGFMIQGGDIVRGDGKGSESIYGGIFPDENFTVKHTHPGVVAMANSGLDSNGSQFYITTIKTSWLDGEHVVFGRVIQGMDTVYAIEGGAGTYNGKPRKKVVITDSGEIPKEKWGDQEA

SEQ ID NO: 99973 - protein, 137 aa, Setaria italica
  misc_feature (69)..(69): Xaa can be any naturally occurring amino acid
  Transcript Sequence Number=SeqID_33999
  Gene Ontology: Mol. function=cysteine-type endopeptidase activity; Cellular component=plasma membrane; Biological process=proteolysis
  Homolog annotation: Hit_ID=B9RKZ4; Match level="QueryCoverage=73%, HitCoverage=31%, E-value=3e-36, Identity=68%"; Hit description =Cysteine protease, putative
  Pfam annotation: Domain name=Peptidase_C1; Domain location=1-100; Score=-49.5; E_value=4.8e-08; Accession=PF00112.15; Description =Papain family cysteine protease
ENSEISLLKALAHQPVSVGIAAGSRDFQFYERGVFDGACSDELDHALTAVGYGSSYGQDYIVMKNSWGXNWGEQGYVRIKRGTGKPEGVCAIYTMASYPVKNATRWGWGPNFVTNLVICTKATRYSNNMLINRWLNP

SEQ ID NO: 99974 - protein, 120 aa, Setaria italica
  Transcript Sequence Number=SeqID_34000
NEPLALHNPMLSLKLKHRLIKILLWMVSPVLPFFLFLLLLCFYYCSGASLLRRPVILMLHSWMHVLPIHIDTTCSTSAYYLAFPISYSHSVGPHTFHAYFLFSKLYSLILVLHSSSLEQK

SEQ ID NO: 99975 - protein, 87 aa, Setaria italica
  Transcript Sequence Number=SeqID_34001
IGCVCVYQLVILASCGNNSNVVIVAARSSNVVIVVVVLGFHCVHKLMLNCDSSGTSCNKLANKILVLHTVSAFLGSRQHTLCSIVLF

SEQ ID NO: 99976 - protein, 76 aa, Setaria italica
  misc_feature (10)..(10): Xaa can be any naturally occurring amino acid
  Transcript Sequence Number=SeqID_34002
  Subcellular localization annotation: CTP_CleavageSite=43; ConfidenceScore=5.08e-01
PADELLEGAXFPPPLGKTGPCRAPTDSLSDRVSSPSKPSTDSVASVAVGLSPPLDSIHEPTDEKSRFSQNFSSHHT

SEQ ID NO: 99977 - protein, 72 aa, Setaria italica
  misc_feature (14)..(14): Xaa can be any naturally occurring amino acid
  Transcript Sequence Number=SeqID_34003
  Gene Ontology: Mol. function=peptide-N4-(N-acetyl-beta-glucosaminyl)as paragine amidase activity
  Homolog annotation: Hit_ID=B6UCE2; Match level="QueryCoverage=100%, HitCoverage=11%, E-value=4e-16, Identity=61%"; Hit description =Peptide-N4-asparagine amidase A
  Subcellular localization annotation: CTP_CleavageSite=23; ConfidenceScore=5.32e-01
LSHSFAYTYNKPPXTAAYTPPPCLSAAGSRASAISLAVLEWRATCRGVQFDRIFGVWLGGAELLRGCTAEPR

SEQ ID NO: 99978 - protein, 85 aa, Setaria italica
  Transcript Sequence Number=SeqID_34004
AERVVASLSQWLHAAGLFGSSSTPKDHGVIHVHRRKLAGPAASRGGGDEYETELLEPLAAADDNEAAATREFFARLDAQLNKVNR

SEQ ID NO: 99979 - protein, 98 aa, Setaria italica
  Transcript Sequence Number=SeqID_34005
EQGYGCVAGVEIYSSETGAWSYSESEWEEETHLLEGSPSVFFDGLLHFITIDFTVVAVNVKGESWWEKAVPEDSYDLQNWDFYEAWEPCFIGRYKGNF

SEQ ID NO: 99980 - protein, 94 aa, Setaria italica
  Transcript Sequence Number=SeqID_34006
EGELNQQQRETDLEKKTLQLVSQSIRRKVFQQVKAEFVGLLIRRKILSGQVVAITHQDLKLEERGTAIIHHSLYLELGVLNSENSFCSSSMFRD

SEQ ID NO: 99981 - protein, 199 aa, Setaria italica
  misc_feature (15)..(15): Xaa can be any naturally occurring amino acid
  Transcript Sequence Number=SeqID_34007
  Gene Ontology: Mol. function=structural molecule activity; Cellular component=plastoglobule
  Homolog annotation: Hit_ID=B6SSG5; Match level="QueryCoverage=91%, HitCoverage=69%, E-value=4e-97, Identity=95%"; Hit description =Structural molecule
  Pfam annotation: Domain name=PAP_fibrillin; Domain location=28-189; Score=176.9; E_value=5.8e-50; Accession=PF04755.4; Description=PAP _fibrillin
SRAWSSFSFLPSFFXGNNRGEKDAEKAMRLKEELLTAIAPLERGAEATPEDKERVEQIVQQLEAVNQVKEPLKSDLLNGKWELLYTTSTSILQPQRPKYLRPFGKIYQAINADTLRAQNMETWPYFNQVTANLVPLNPRRVAVKFDYFKIFSLIPIKSPGSGKGELEITYLDEELRVSRGDKGNLFVLKMVDPAYRVPL

SEQ ID NO: 99982 - protein, 229 aa, Setaria italica
  misc_feature (20)..(20): Xaa can be any naturally occurring amino acid
  Transcript Sequence Number=SeqID_34008
  Gene Ontology: Mol. function=sequence-specific DNA binding; Cellular component=nucleus; Biological process=regulation of transcription, DNA-dependent
  Homolog annotation: Hit_ID=B9T724; Match level="QueryCoverage=32%, HitCoverage=20%, E-value=3e-33, Identity=85%"; Hit description=GATA transcription factor, putative
  Pfam annotation: Domain name=GATA; Domain location=146-181; Score =65.6; E_value=1.9e-16; Accession=PF00320.19; Description=GATA zinc finger
  Subcellular localization annotation: CTP_CleavageSite=63; ConfidenceScore=5.83e-01
TTNVGSASSSSSSASSSSEXFSGSGGHAWSAPVSPRPEPPVLVIPARARSKRSRPSAFTGAARAAEAPTILVPTPMYSSTSSHSDPESIAESNPHQAPPMKKKKKAKKPAPPAPAASDAEGDNDGDADYEEGGERSQPQGGAVRRCTHCQIEKTPQWRAGPLGPKTLCNACGVRYKSGRLFPEYRPAASPTFVPSIHSNSHKKVVEMRQKAVRTGDPSCDLLQFIRRRD

SEQ ID NO: 99983 - protein, 189 aa, Setaria italica
  misc_feature (4)..(4): Xaa can be any naturally occurring amino acid
  misc_feature (183)..(183): Xaa can be any naturally occurring amino acid
  Transcript Sequence Number=SeqID_34009
  Gene Ontology: Mol. function=ATPase activity, coupled to transmembrane movement of substances; Cellular component=integral to membrane; Biological process=transport
  Homolog annotation: Hit_ID=Q8GU74; Match level="QueryCoverage=99%, HitCoverage=13%, E-value=3e-88, Identity=85%"; Hit description=MDR -like ABC transporter
SIIXARRLSLIRNADYIAVMEEGQLVEMGTHEELLNLDGLYAELLRCEEAAKLPKRTPIRNYKEPTSFQIERDSSASHSFQESSSPNMSKSPSLQKTHGFLTFRNSDANHNSHESPNIQSPPSEQMAEARLPMVASERAPSIKRQDSFEMKLPDLPKIDVPLHRQSSNTSDPESPISPLLTSXPKNERP

SEQ ID NO: 99984 - protein, 88 aa, Setaria italica
  Transcript Sequence Number=SeqID_34010
  Gene Ontology: Cellular component=membrane
  Homolog annotation: Hit_ID=B6U3D7; Match level="QueryCoverage=100%, HitCoverage=24%, E-value=2e-11, Identity=57%"; Hit description =Nodulin protein
  Subcellular localization annotation: CTP_CleavageSite=75; ConfidenceScore=5.33e-01
KAGSAKIIGTLMSFGGVLLLSLYKGVAVTQQSTAAALSSSHHAASSQVGIDKKSWMLGTVSLLANCLFFSFGLLLQSRLTKKYPALYS

SEQ ID NO: 99985 - protein, 86 aa, Setaria italica
  Transcript Sequence Number=SeqID_34011
  Gene Ontology: Mol. function=protein serine/threonine kinase activity; Cellular component=integral to membrane; Biological process=protein amino acid phosphorylation
  Homolog annotation: Hit_ID=B9S707; Match level="QueryCoverage=98%, HitCoverage=12%, E-value=5e-24, Identity=60%"; Hit description =Kinase, putative
YIDPEYYRLQELTERSDVYSFGVVLLELVTGRKAIHRTSQDGSGSPRNVIEFAVPAVETGSIARILDDRVPPPRGHEVEAVARVAK

SEQ ID NO: 99986 - protein, 157 aa, Setaria italica
  Transcript Sequence Number=SeqID_34012
  Gene Ontology: Mol. function=sequence-specific DNA binding; Cellular component=nucleus; Biological process=regulation of transcription, DNA-dependent
  Homolog annotation: Hit_ID=B6SWE5; Match level="QueryCoverage=92%, HitCoverage=23%, E-value=6e-23, Identity=53%"; Hit description=Bell -like homeodomain protein 3
  Pfam annotation: Domain name=POX; Domain location=59-157; Score=64.6; E_value=3.7e-16; Accession=PF07526.3; Description=Associated with HOX
SEHHHHRLGGHGQAPLTSLSLHEPAEAASMALHHHQLGGALRQQHQAAAWPPSQQQGAWHLRGSRFLRPTQQLLQEFCGLPVETAGTATAPKPPTTKPASEDGAGEGSSAPAPSAQIQAKDAAEMQRLKAKLYAMLQEVERRYRRYREQMRAVAGSL

SEQ ID NO: 99987 - protein, 110 aa, Setaria italica
  misc_feature (71)..(71): Xaa can be any naturally occurring amino acid
  Transcript Sequence Number=SeqID_34013
  Gene Ontology: Mol. function=binding
  Homolog annotation: Hit_ID=B9SQW7; Match level="QueryCoverage=99%, HitCoverage=5%, E-value=5e-36, Identity=64%"; Hit description =Eukaryotic translation initiation factor 3 subunit, putative
VNDVADSVASCLNILLGPFPEENNDGNCGEDHNLRKRWLEVFLFKRFGWKWKDEYSLDLRKYAILRGLCHXGLELLTKDYDMDMPHPFRKSDIISVVPIYKHVACSSADG

SEQ ID NO: 99988 - protein, 1372 aa, Setaria italica
  Transcript Sequence Number=SeqID_34014
  Gene Ontology: Mol. function=binding
  Homolog annotation: Hit_ID=UPI0001A7B125; Match level="QueryCoverage =100%, HitCoverage=77%, E-value=0.0, Identity=50%"; Hit description =binding
  Pfam annotation: Domain name=PAM2; Domain location=1124-1141; Score =6.6; E_value=0.98; Accession=PF07145.7; Description=Ataxin-2 C -terminal region
  Pfam annotation: Domain name=PAM2; Domain location=1221-1238; Score =18.6; E_value=0.013; Accession=PF07145.7; Description=Ataxin-2 C -terminal region
  Pfam annotation: Domain name=TPR_1; Domain location=515-548; Score =17.7; E_value=0.044; Accession=PF00515.20; Description =Tetratricopeptide repeat
  Pfam annotation: Domain name=TPR_1; Domain location=557-590; Score =3.2; E_value=2.4; Accession=PF00515.20; Description=Tetratricopeptide repeat
  Pfam annotation: Domain name=TPR_1; Domain location=599-632; Score =6.8; E_value=0.89; Accession=PF00515.20; Description=Tetratricopeptid e repeat
  Pfam annotation: Domain name=TPR_2; Domain location=515-548; Score =23.9; E_value=0.00065; Accession=PF07719.9; Description =Tetratricopeptide repeat
  Pfam annotation: Domain name=TPR_2; Domain location=557-590; Score =8.6; E_value=2.8; Accession=PF07719.9; Description=Tetratricopeptide repeat
  Pfam annotation: Domain name=TPR_2; Domain location=599-632; Score =14.8; E_value=0.37; Accession=PF07719.9; Description=Tetratricopeptid e repeat
  Pfam module annotation: Pfam domain module=PAM2::PAM2::TPR_1::TPR _1::TPR_1::TPR_2::TPR_2::TPR_2; Domain location=1124-1141::1221 -1238::515-548::557-590::599-632::515-548::557-590::599-632
MKIMITKDKADASFKLDVKLDGSQAPGMSPDELARRNLLKGITADESATVHDTATLGVVIVKHCGYTAVVQVPVDPDLTTTSLAQQDIHIEDQPEGGSDALNVNSLRMLLHKSCAPSYGGVQRLQGCDPQDNETTQSFVRKILTDSLEKLESEAPMVTRPIRWELGACWVQHLQNPTSEKTETKKSEETKDVPTVKGLGKQFGQLKEIKKKTDDKSGKGAYAKENTSPNTDNASTDNTTSAKEDKETVLQRLLSEAAFERLKESETGLHAKSLDELIEMAHKYYDDTALPKLVADFGSLELSPVDGRTLTDFMHTRGLQMRSLGRVVELSDKLPHIQSLCIHEMVVRAFKHILRAVIAAVDDVNDVADSVASCLNILLGPFPEENNDGNCGEDHNLRKRWLEVFLFKRFGWKWKDEYSLDLRKYAILRGLCHKVGLELLTKDYDMDMPHPFRKSDIISVVPIYKHVACSSADGRTLLESSKTFLDKGKLEDAVNYGAKALAKLVAVCGPYHRMTAGAYSLLAVVLYHTGDFNQATIYQQKALDINERELGLDHPDTMKSYGDLAVFYYRLQHTELALKYVNRALYLLHLTCGPSHPNTAATYINVAMMEEGLGNVHVALRYLHEALKCNQRLLGADHIQTAASYHAIAIALSLMEAYSLSVQHEKTTLRILQAKLGSEDLRTQDATAWLEYFESKALEQQEAARNGTPKPDASIASRGHLSVSDLLDYINPDDELKVKEMQKKQARAKIKGRTGQNPSDLVDDEDQRSPPPNNDNLLTEKEDSGIKENGTFVEHVKVKDEIPSDTANHIPQDDFTEEYASDEGWQAAVPKGRSTGSRKTGPGTRKQNLAKINTNVFHSENGRYKGRGPSNFSSPRVSPNETAAPVASGPLAKKLAKNSSFNSKAVSPAVSSSSGENSSNPNSKPASPAITAAAAKVIPSTAPAASQTVRKSLSYKEVAIAAPGTLVKALSEVHTEEKDTIDKGASVESAKPPKESNDNPSGEKDGATEVSKKGDTSQVSKSTDGGKSEPTDVLLGSNQPETEHKKTSDAAETSVVKKNTDLAASVTSSATQTEADVPNAGAPTVIEANDSSSNDERDVGEDTPEQLSSGGENEKSSASESEKKETTSKLSAAAAPFNPSTVPAFGSMAVPGFREHGGLLPSPANVPPMLSIPLRKHPHQSATARVPYGPRLAGGYNRSGHRGPRNKPMLPSGEAPTETNTSAPRVMNPNAPEFVPGQSRSPNGQPASPNGPLTSPGGITSSPQGLPSSPDSTVESPVTASPQVSECSQTSPEGNDASCGVNVEAGGEKQNTDDTNHTESKDGKVEPEQTTAPEVAEEAVTAKDVTEEPIATEQPKSWADYSDGEVEAVEVAS

SEQ ID NO: 99989 - protein, 501 aa, Setaria italica
  misc_feature (14)..(14): Xaa can be any naturally occurring amino acid
  misc_feature (40)..(40): Xaa can be any naturally occurring amino acid
  misc_feature (478)..(478): Xaa can be any naturally occurring amino acid
  Transcript Sequence Number=SeqID_34015
  Gene Ontology: Mol. function=histone-lysine N-methyltransferase activity; Cellular component=nucleus; Biological process=chromatin modification
  Homolog annotation: Hit_ID=B9MXU6; Match level="QueryCoverage=29%, HitCoverage=6%, E-value=2e-38, Identity=50%"; Hit description=SET domain protein
PLKKARRNGEVEKXGELVPERQRKEKSSGNSARKSSKDEXEPGEIALPEKRRDGKSQRGDDNGRRPSSSVQKGSLRDSDEEPGEIKPESSNTGSVRKSRPAEPQSINHKHQADGSDQSGSKSRRKGEGRSSSAGRHLSGRNREVSPPARDRHDRHERSPGILGRFPHDRFRHDRYDRSPSRLERSPHRERVRHYDSRDRSPYISPRHRARQPHFRDNTPSRVENSPRGRTQHEDFRDRSPFRHDRSPSERSRATDNHEAIKKNRNGSNSEKLQHKSKSVKQSSKTKSGSNGKTEEKISKEKAIESAQYTELPPPPPLPPPPPPPPPPPPPLPPVVPPPLPPPPEPEPNGVLAEDMIEDMDICDTPPHTSAAPEPLEQICDMGRWFYLDHFGIEQGPSKLVDLKKLVEDGYLLSDHLIKHADSDRWVTVENAASPRVPSDIPSLYSDASTQLVSPPEAPGNLLDEALEAASNLASGAEXKQMEEASAEDSEDFYIDDRVEAL

SEQ ID NO: 99990 - protein, 44 aa, Setaria italica
  Transcript Sequence Number=SeqID_34016
VPSPNCKFVQPLAPTTPRGAMPQPPAHRRLHAAVKPLETLSLLH

SEQ ID NO: 99991 - protein, 49 aa, Setaria italica
  Transcript Sequence Number=SeqID_34017
IVNMHQNLTYQGIDTAGMQSKGTLVFHCYQILEGRVCHRSDCHTETDQA

SEQ ID NO: 99992 - protein, 42 aa, Setaria italica
  Transcript Sequence Number=SeqID_34018
SSRKQGRPFSDIAGGSLHQNYLQRVSPVSSKSTNRLPDSCNH

SEQ ID NO: 99993 - protein, 71 aa, Setaria italica
  Transcript Sequence Number=SeqID_34019
  Gene Ontology: Mol. function=hydrolase activity, acting on glycosyl bonds; Cellular component=beta-galactosidase complex; Biological process=carbohydrate metabolic process
  Homolog annotation: Hit_ID=Q0INM3; Match level="QueryCoverage=54%, HitCoverage=4%, E-value=1e-14, Identity=89%"; Hit description=Beta -galactosidase 15
LDIRKNYGAFLEKDGAGFRGQVKLTGLSNGDIDLTNSLWTYQVKVTSVIDFFNSYDMMKLEFQPLLHFFLL

SEQ ID NO: 99994 - protein, 622 aa, Setaria italica
  Transcript Sequence Number=SeqID_34020
  Gene Ontology: Mol. function=hydrolase activity, acting on glycosyl bonds; Cellular component=beta-galactosidase complex; Biological process=carbohydrate metabolic process
  Homolog annotation: Hit_ID=Q0INM3; Match level="QueryCoverage=91%, HitCoverage=62%, E-value=0.0, Identity=86%"; Hit description=Beta -galactosidase 15
  Pfam annotation: Domain name=Glyco_hydro_35; Domain location=66-372; Score=572.6; E_value=4.5e-169; Accession=PF01301.11; Description =Glycosyl hydrolases family 35
  Subcellular localization annotation: CTP_CleavageSite=27; ConfidenceScore=5.17e-01
VAFSPSPPSRWPLPPRFLALPILLCLGCLAAPASVRAAGVLRQVVVGGGGGGTFFEPFNVTYDHRAVILGGERRMLVSAGLHYPRATPEMWPSLIAKCKEGGADVIETYIFWNGHEPVKGQYYFEGRFDIVKFAKLVAAEGLFLFLRIGPYACAEWNFGGFPVWLRDIPGIEFRTDNEPYKAEMQTFVTKIVNIMKEEKLYSWQGGPIILQQIENEYGNIQGRYGQAGKRYMLWAAQMALALDTGVPWVMCRQTDAPEQILDTCNAFYCDGFKPNSYNKPTIWTEDWDGWYADWGEPLPHRPVQDSAFAVARFYQRGGSLQNYYMYFGGTNFERTAGGPRQITSYDYDAPIDEYGILRQPKWGHLKDLHAAIKLCEPALTAVDGSPQYVKLGPMQEAHVYSSAKVHTNGSISGNGQICSAFLANIDEHKYVSVWIFGKSYSLPPWSVSILPDCENVAFNTARVGTQTSIFTVESGSPSYSSRHKRRSLPLIGGPYLSSTWWTSKEPIGKWGEGSFAAQGILEHLNVTKDISDYLSYTTSVNISDEDVAYWNSKGVLPSITIDQIRDVARVFVNGKLAGSKVGHWVSLNQPVQLVQGPNELTLLSEIVGLQVIYGPLSFELNV

SEQ ID NO: 99995 - protein, 415 aa, Setaria italica
  Transcript Sequence Number=SeqID_34021
  Gene Ontology: Mol. function=hydrolase activity, acting on glycosyl bonds; Cellular component=beta-galactosidase complex; Biological process=carbohydrate metabolic process
  Homolog annotation: Hit_ID=Q0INM3; Match level="QueryCoverage=99%, HitCoverage=44%, E-value=0.0, Identity=79%"; Hit description=Beta -galactosidase 15
  Pfam annotation: Domain name=Gal_Lectin; Domain location=326-402; Score=134.3; E_value=3.8e-37; Accession=PF02140.10; Description =Galactose binding lectin domain
GPSKEPIGKWGEGSFAAQGILEHLNVTKDISDYLSYTTSVNISDEDVAYWNSKGVLPSITIDQIRDVARVFVNGKLAGSKVGHWVSLNQPVQLVQGPNELTLLSEIVGLQNYGAFLEKDGAGFRGQVKLTGLSNGDIDLTNSLWTYQIGLKGEFSRIYSSENQGYAKWSSMQNDDKQTPFTWFKTMFDAPEGNDPVAIGLGSMGKGQAWVNGHLIGRYWSIVAPESGCPSSCNYAGAYSDSKCRSNCGMASQSWYHIPREWLQESGNLLVLFEETGGDPFQISLEAHYTKTICSKISETYYPPLYSWSRAANGRASVNTAAPELHLQCDEGHVISKITFASYGTPSGSCQNFSVGNCHASTTLDLVTEACVGQNKCSISVTNDVFGDPCRKVVKDLAVEAECSPPLATKESRDDM

SEQ ID NO: 99996 - protein, 46 aa, Setaria italica
  misc_feature (8)..(8): Xaa can be any naturally occurring amino acid
  Transcript Sequence Number=SeqID_34022
  Gene Ontology: Mol. function=kinase activity
  Homolog annotation: Hit_ID=B6UA54; Match level="QueryCoverage=97%, HitCoverage=11%, E-value=4e-15, Identity=84%"; Hit description =Ubiquitin-protein ligase
WIEWAGIXVTRAEEGRLRGKVVSRDTVLFPDVPKGSTITHCIALEL

SEQ ID NO: 99997 - protein, 108 aa, Setaria italica
  Transcript Sequence Number=SeqID_34023
  Gene Ontology: Mol. function=kinase activity
  Homolog annotation: Hit_ID=B6UA54; Match level="QueryCoverage=100%, HitCoverage=28%, E-value=8e-39, Identity=74%"; Hit description =Ubiquitin-protein ligase
LGQVKGYDPDSDSWSAVEGLERELPKFLCGATLANVGGLLYLVWEGKWKGKGKGKGEVRSMVVIEWAGIEVTRAEEGRLRGKVVSRDTVLFPDVPKGSTITHCIALEL

SEQ ID NO: 99998 - protein, 96 aa, Setaria italica
  Transcript Sequence Number=SeqID_34024
HVLHAFLSQPKSCHSVAVISTDPPGLHPQHQEVVPKSTLLHQVPPPPVIQAIWYILLLAFQTCWVVLLQELLLRQEHNYKCDLFMRTGLLQCSYGI

SEQ ID NO: 99999 - protein, 119 aa, Setaria italica
  misc_feature (85)..(85): Xaa can be any naturally occurring amino acid
  Transcript Sequence Number=SeqID_34025
GLLLIDFIWLETDLKIKGERGQDKILSKGLPEIDGRLSSILENIKVRDITCDSRLSTVEVKYAVVKSAVEATVEIQVIHGTFYGXITAHTTSILHRIVLYDSKAGGVATSDGSGRLIPN

SEQ ID NO: 100000 - protein, 135 aa, Setaria italica
  Transcript Sequence Number=SeqID_34026
CCLQGGNGTHRRHRLGLRFDPTRPPWVRQPLGQARYRRHPTELLVAVLAHGSHPSTDSPGPAARGHQRQANQPVHSLMHSDGTIAVRFWLPMMGDGGGGRWALTSRLGPDGGRAGQSWCCSTRFPWLWRRMVVGA

SEQ ID NO: 100001 - protein, 91 aa, Setaria italica
  Transcript Sequence Number=SeqID_34027
  Gene Ontology: Mol. function=protein serine/threonine kinase activity; Biological process=protein amino acid phosphorylation
  Homolog annotation: Hit_ID=B9S5P9; Match level="QueryCoverage=98%, HitCoverage=19%, E-value=2e-21, Identity=57%"; Hit description =Protein kinase APK1B, chloroplast, putative
SSVVVLLELLTGRKAVDKNRPPREQNLVEWARPCLNDSRRLNRVMDKRLNGQYPTRAAQKAAAIAHKCLHVSPKSRPQMSAVVEALESLLA

SEQ ID NO: 100002 - protein, 60 aa, Setaria italica
  Transcript Sequence Number=SeqID_34028
MATWLSSCTISLLLLLISLQQSPLHASDTLTSNQQLSGNQKLISRDGNFALGFFQPAGES

SEQ ID NO: 100003 - protein, 434 aa, Setaria italica
  Transcript Sequence Number=SeqID_34029
  Gene Ontology: Cellular component=chloroplast; Biological process =transport
  Homolog annotation: Hit_ID=B6SPS8; Match level="QueryCoverage=95%, HitCoverage=57%, E-value=0.0, Identity=92%"; Hit description=Salt -inducible protein
  Pfam annotation: Domain name=PPR; Domain location=100-134; Score =37.0; E_value=7.5e-08; Accession=PF01535.12; Description=PPR repeat
  Pfam annotation: Domain name=PPR; Domain location=135-169; Score =23.3; E_value=0.00097; Accession=PF01535.12; Description=PPR repeat
  Pfam annotation: Domain name=PPR; Domain location=170-203; Score =19.0; E_value=0.02; Accession=PF01535.12; Description=PPR repeat
  Pfam annotation: Domain name=PPR; Domain location=209-243; Score =46.2; E_value=1.3e-10; Accession=PF01535.12; Description=PPR repeat
  Pfam annotation: Domain name=PPR; Domain location=244-278; Score =27.0; E_value=7.8e-05; Accession=PF01535.12; Description=PPR repeat
  Pfam annotation: Domain name=PPR; Domain location=30-64; Score=33.4; E_value=9e-07; Accession=PF01535.12; Description=PPR repeat
  Pfam annotation: Domain name=PPR; Domain location=65-99; Score=24.4; E_value=0.00048; Accession=PF01535.12; Description=PPR repeat
  Pfam module annotation: Pfam domain module=PPR::PPR::PPR::PPR::PPR::PP R::PPR; Domain location=100-134::135-169::170-203::209-243::244 -278::30-64::65-99
TAARRCRHFAKAVEWFERMYAADGVLPDEVTYSAVLDVYAQLGMKEEVLALFDRARGSGWKPDHVAFAVLAKMFGEAGDYEGIQFVFKEMQEVGIKPNIFVYNALLEALGKTGKPGLARNLFDEMTAQGVEPNARTLTALAKIYGRARWGRDALQLWEQMREMKLPADNILCNTLLSMCADVGLVAEAEQLFNEMKDPECRDVPKPDKWSYTAMINIYGSNGDTDQALQLFTEMLKGGIEPNIMSYTIVIQCLGKAQRIRQAVEVLEAGLEKGLKPDDRLCGCLLSVVALSSGEETEVVLSSLEKVNQNLVKLIRMLGEDQVGVDDLTKELKGVLNAAAPEVRRPYCNCLIDICQNHGFPPQRAREVFQLAHTYGLYSKLHSRKDGEWSLDLRSLSVGAAKTAFDDWMQTISELLVLDPVYTLKDSGKAFCCTK

SEQ ID NO: 100004 - protein, 176 aa, Setaria italica
  Transcript Sequence Number=SeqID_34030
  Gene Ontology: Cellular component=chloroplast; Biological process =transport
  Homolog annotation: Hit_ID=B6SPS8; Match level="QueryCoverage=98%, HitCoverage=24%, E-value=1e-80, Identity=83%"; Hit description=Salt -inducible protein
EYKKLLGEDQVGVDDLTKELKGVLNAAAPEVRRPYCNCLIDICQNHGFPPQRAREVFQLAHTYGLYSKLHSRKDGEWSLDLRSLSVGAAKTAFDDWMQTISELLVQQKALPESFSVYTGSSTHKFAQGLASAFATHLEQMAAPFRPSESHVGSFISSRDDLVSWLQMSSSSAVVAG

SEQ ID NO: 100005 - protein, 65 aa, Setaria italica
  Transcript Sequence Number=SeqID_34031
MIVTSRCKPGGGTFQYCIIINTVAGVLPANVIQRVKNACGSIVRMITFFLRTHYNPDVTCLMLLS

SEQ ID NO: 100006 - protein, 128 aa, Setaria italica
  Transcript Sequence Number=SeqID_34032
  Gene Ontology: Mol. function=peptidase activity; Cellular component =membrane
  Homolog annotation: Hit_ID=Q6Z539; Match level="QueryCoverage=100%, HitCoverage=39%, E-value=2e-56, Identity=89%"; Hit description=CAAX amino terminal protease family-like protein
  Pfam annotation: Domain name=Abi; Domain location=22-111; Score=73.3; E_value=8.9e-19; Accession=PF02517.8; Description=CAAX amino terminal protease family
ETDSLVILLPLIGSSGISTACLLGITGILAPILEETVFRGFLMVSLTMWFSTPYAVLITAAVFAFAHLTPGEFPQLFVLGVVLGFSYAQTRNLLTPITIHAVWNSGVILLLTFLQLQGYDIKELLQAS

SEQ ID NO: 100007 - protein, 117 aa, Setaria italica
  Transcript Sequence Number=SeqID_34033
TKFCMYTTPLVQIAIKTLQADRAYPASTRLIVYSCLQTPLPLVLLFLPVQRKIQILQPNKLWNRANPNEVATIYTSLIGRRNGNDFLLFFFFFFFSSTNRILLVHVDSVADNIRSST

SEQ ID NO: 100008 - protein, 84 aa, Setaria italica
  Transcript Sequence Number=SeqID_34034
VRRMSPVPDSPARIHARNLVPPPLVSTGSLACAKDEHDYVFLRKGYSTFGGCILFFSCLCAVPVVLLPRCYPQNFLLSVAICDS

SEQ ID NO: 100009 - protein, 225 aa, Setaria italica
  Transcript Sequence Number=SeqID_34035
  Gene Ontology: Mol. function=hydrolase activity; Cellular component =chloroplast; Biological process=meiosis
  Homolog annotation: Hit_ID=Q7XS73; Match level="QueryCoverage=99%, HitCoverage=19%, E-value=1e-64, Identity=66%"; Hit description =OSJNBa0020I02.9 protein
MVAELVLSGETIVSFLLVSLLNQIVKEGTEDEVFSVISVIAEILMISPCSSDQFISCGIVDSFRRIYCLPYSSRIKTVCSYLIFNILCSASASTFSEEDEWLPLTVKLLEFINSGIDYTSSNQERKILIGILCFVLHHSVNKVLVEPAKAIILNSSLVSLTDVIVHTACAKGPSLFQHDQETDFGEFMILVLLMVFFSLRSLHTILEASIDWQDFLQHPDDAQSF

SEQ ID NO: 100010 - protein, 86 aa, Setaria italica
  Transcript Sequence Number=SeqID_34036
NPRHNHVCRRFLTEKSTSKGIDLRLRHLGFVTNRRIVLLGLAFLHANFLADLYWVQNGLFCWVRECASLRGLIKGARVVSLYRVNT

SEQ ID NO: 100011 - protein, 85 aa, Setaria italica
  Transcript Sequence Number=SeqID_34037
  Gene Ontology: Mol. function=protein kinase activity; Cellular component=integral to membrane; Biological process=protein amino acid phosphorylation
  Homolog annotation: Hit_ID=B9SG04; Match level="QueryCoverage=96%, HitCoverage=10%, E-value=3e-24, Identity=60%"; Hit description=LIM domain kinase, putative
GGADKLKDFESQVRAVARFRHPNILRLRGFYWGADEKLLIHDYAPNGSLANIAFSRRFGSSSPLHLSLEARLRIARGVARGLAYI

SEQ ID NO: 100012 - protein, 526 aa, Setaria italica
  Transcript Sequence Number=SeqID_34038
  Pfam annotation: Domain name=PMD; Domain location=2-198; Score=29.3; E_value=3.5e-10; Accession=PF10536.1; Description=Plant mobile domain
RDLRDIKSFLVAAGAASTTGNADMLSSLSLYSPLYLLHLWIWERFPALRPGRENLLGDGEPMAARWHDLSRKANPTLIREVLNSRDNFLWQLPYATALKKYSGWVCSSDLTGNDQLRLLAHCLRPCELVGMDCIEQYLPHRVARQFGLDQDVPMDVRRANQDWAVAWQTYELEGKNVSLFIPQSEPGITARYAQWWKQQVQPSDLRAGAPSIPLESKTSKRRVKKTPAAMEAEAEKERRMKKARVSPSDKKRKLEELYDPKFSGWLAAGRSGISDAAGSSYKKGSLPKYDMGSDEALLPNVGATNDDVVLLLPRLQTASPAVVVPKKDDIMNPVIGDGGNSIVDISPEISTNELEGGATAMQKEETLNNPVVRSLDITDKPEGDTAVMKSEEEAMEISVARSLDIKDRPEEGTTLVMELEKEAMETHNIPEDNTMKVPQLGYEKLRDTAPAPIEEDTKEKPCADDKDLAEKDVDESMEVYKVKQAEGEGCDLLMEKYGDNVADALGEGCDLLIEKDGANITDALGG

SEQ ID NO: 100013 - protein, 98 aa, Setaria italica
  Transcript Sequence Number=SeqID_34039
  Gene Ontology: Mol. function=UDP-glucose 4-epimerase activity; Cellular component=cytoplasm; Biological process=galactose metabolic process
  Homolog annotation: Hit_ID=B6TQ45; Match level="QueryCoverage=100%, HitCoverage=23%, E-value=3e-43, Identity=83%"; Hit description=UDP -glucose 4-epimerase GEPI48
RRVRALAGDHARNLVFHKVDIREKDGLEKVFASARFDAVIHFAGLKAVGESVQKPLLYYDHNVVGTINLLEIMAAHGCKKLVFSSSAAVYGSPKNSPC

SEQ ID NO: 100014 - protein, 138 aa, Setaria italica
  Transcript Sequence Number=SeqID_34040
  Gene Ontology: Mol. function=drug transporter activity; Cellular component=membrane; Biological process=multidrug transport
  Homolog annotation: Hit_ID=Q10A00; Match level="QueryCoverage=100%, HitCoverage=28%, E-value=8e-58, Identity=78%"; Hit description=MATE efflux family protein, expressed
  Pfam annotation: Domain name=MatE; Domain location=1-120; Score=51.3; E_value=3.8e-12; Accession=PF01554.10; Description=MatE
MLPMGLGAAVSIRVSNELGAGRPEAARLATRVVMLIAFSLGISEGLVMVLARNLLGYAYSNEKEVAMYTARLMPILAVSTLFDCLQCVLSGVVRGCGRQKIGAIINLSAFYIVGIPAASIFAFVCHLRGMGLWFGILC

SEQ ID NO: 100015 - protein, 104 aa, Setaria italica
  Transcript Sequence Number=SeqID_34041
RKERPTTRLGRDLPDRLKLEAVGGSGEQEEVLSSLTPAGSSAVAEAMRNAAATPGPDQGDVTSGLQHCYGDGFADMAPFNYDDDGTFDLDDLVVFGFDQGQADY

SEQ ID NO: 100016 - protein, 75 aa, Setaria italica
  Transcript Sequence Number=SeqID_34042
  Subcellular localization annotation: CTP_CleavageSite=36; ConfidenceScore=5.07e-01
KRNSQWKPPCRGGREATNSAAAAAAQRNAARSGGAAAATVASCWARLGAREGSNEGVEGGCGVVLLLRRRRRTGA

SEQ ID NO: 100017 - protein, 163 aa, Setaria italica
  misc_feature (76)..(76): Xaa can be any naturally occurring amino acid
  Transcript Sequence Number=SeqID_34043
KIAKDSASHQFKTCARRSKSTDRECLNTDIDRRKKPTLRSCTRNSQKSNTVDSKGTCSKFLEGATFWSKRNWNLAXKNKASASFIKDVVLLDDDDDAEPARSNDAEISNKWDESKIYYPSRTDPEAVELTYSDMKCLEPEEYLNHLYKFFLLVPQESRPRRDL

SEQ ID NO: 100018 - protein, 96 aa, Setaria italica
  misc_feature (31)..(31): Xaa can be any naturally occurring amino acid
  Transcript Sequence Number=SeqID_34044
  Gene Ontology: Mol. function=translation initiation factor activity; Biological process=translational initiation
  Homolog annotation: Hit_ID=B6U4Q2; Match level="QueryCoverage=100%, HitCoverage=16%, E-value=5e-27, Identity=69%"; Hit description =Eukaryotic translation initiation factor 3 subunit 7
MGFDVGFVPYNPDGWGPPEAAAAPASLGGGXSVSVPFAPFSRSDKLGRIADWTRNPPGPGAFAAARDTVFDFAGLEDSVGLASADDASFRLVDGKP

SEQ ID NO: 100019 - protein, 41 aa, Setaria italica
  Transcript Sequence Number=SeqID_34045
IPNEFSFLIAFFPLLPFMCSESVNLYVMHINNLPKSTVAQI

SEQ ID NO: 100020 - protein, 75 aa, Setaria italica
  Transcript Sequence Number=SeqID_34046
  Gene Ontology: Mol. function=galacturonate binding; Cellular component=plasma membrane; Biological process=cell-cell signaling
  Homolog annotation: Hit_ID=B6SMZ7; Match level="QueryCoverage=62%, HitCoverage=23%, E-value=5e-15, Identity=85%"; Hit description =Remorin
  Pfam annotation: Domain name=Remorin_C; Domain location=1-70; Score =43.8; E_value=6.9e-10; Accession=PF03763.5; Description=Remorin, C -terminal region
VEAQLKKKEEELEKKKAEYAEKMKNKKAIIHRRAEEKRAMVMAQRGEEVLKAEEMAAKYRATGLAPKKFLGCFGA

SEQ ID NO: 100021 - protein, 73 aa, Setaria italica
  Transcript Sequence Number=SeqID_34047
HVNPLLRLGRRLAAKGLLVTFTTALRAGIRLGPGDGDDGDAEADASRGRLRVERLRGGGIWAPDDPGSGSRAT

SEQ ID NO: 100022 - protein, 92 aa, Setaria italica
  Transcript Sequence Number=SeqID_34048
SKVLIWFVFGWRMLLLPPSYFVLFLRLYSSVPVLACAAKAALISNNCSIVLKLPEYYALECIALDYLLVFLTSQRIGSSFLLLPSLLSIALR

SEQ ID NO: 100023 - protein, 148 aa, Setaria italica
  Transcript Sequence Number=SeqID_34049
  Gene Ontology: Mol. function=metal ion binding; Cellular component =nucleus
  Homolog annotation: Hit_ID=Q8W342; Match level="QueryCoverage=97%, HitCoverage=20%, E-value=5e-66, Identity=82%"; Hit description=PHD -finger family protein, expressed
  Pfam annotation: Domain name=PHD; Domain location=90-138; Score=36.5; E_value=1e-07; Accession=PF00628.21; Description=PHD-finger
RPMPPGDIVVVPLHASIGELLVEAEHALRDTYCFFDGFKAESLDGIAGEKWDPVMLGGAESGDTISVHGHGVDMETGLRCQGGVDAWEVQCVCGAQDDDGERMVACDACNVWHHTRCVGIADGVPVPPLFLCMSCGGALMAAGPILGL

SEQ ID NO: 100024 - protein, 167 aa, Setaria italica
  misc_feature (145)..(167): Xaa can be any naturally occurring amino acid
  Transcript Sequence Number=SeqID_34050
  Subcellular localization annotation: CTP_CleavageSite=60; ConfidenceScore=5.80e-01
GCAGAGGSARTARGGRRGACWTRRRWSSATTPTRGSSPSTCPCRRRRCTGGRWRSWCRPRRDAGRSSDRSPRLSHSQRAETIIAIGDVRESCIISVGRRESGVCFAMLVSVCCVLVPCDMNVVLLYYWVIKDGAPSNKKKKTKEXXXXXXXXXXXXXXXXXXXXXXX

SEQ ID NO: 100025 - protein, 68 aa, Setaria italica
  Transcript Sequence Number=SeqID_34051
  Gene Ontology: Mol. function=heat shock protein binding
LSVFLNTIAVESSCLIESLITLYSSVLLSGAAFLDGSILEIWNMNNSGKSFEDVIESIEKAKKDAERR

SEQ ID NO: 100026 - protein, 95 aa, Setaria italica
  Transcript Sequence Number=SeqID_34052
  Gene Ontology: Mol. function=structural constituent of ribosome; Cellular component=intracellular; Biological process=translation
  Homolog annotation: Hit_ID=O22386; Match level="QueryCoverage=50%, HitCoverage=27%, E-value=5e-12, Identity=76%"; Hit description=50S ribosomal protein L12, chloroplastic
  Subcellular localization annotation: CTP_CleavageSite=38; ConfidenceScore=5.75e-01
ALSSASFPRLTVSTASSSSLPKAVAFPARGRGGRFAVACTSTASPKVLELGDAIAGLTLEEARGLVDHLQERLGVTAAAFAPAAVVPAPGAGAAG

SEQ ID NO: 100027 - protein, 110 aa, Setaria italica
  Transcript Sequence Number=SeqID_34053
FEQKTTRHTLQASKSRRPRKLNESHRRGISEDEASILQSKVRLQLENLATACPRKRPRSTGDADVPIITWIISNRILSSQMYVNLYLSLLLTWEGENNNQPMGSKLLTSA

SEQ ID NO: 100028 - protein, 90 aa, Setaria italica
  misc_feature (2)..(2): Xaa can be any naturally occurring amino acid
  Transcript Sequence Number=SeqID_34054
QXVSADPGDDLTASTMKLLSMGSGILEKPSSKCAVGAVKDSSVEIAKRITPCVSRPMRTISHAIDVIEAPMKPQANTASRFPTNAVVSHG

SEQ ID NO: 100029 - protein, 194 aa, Setaria italica
  misc_feature (149)..(149): Xaa can be any naturally occurring amino acid
  Transcript Sequence Number=SeqID_34055
  Gene Ontology: Mol. function=protein tyrosine kinase activity; Cellular component=integral to membrane; Biological process=protein amino acid phosphorylation
  Homolog annotation: Hit_ID=Q9LDG0; Match level="QueryCoverage=85%, HitCoverage=25%, E-value=9e-60, Identity=75%"; Hit description =Putative receptor-like kinase
  Pfam annotation: Domain name=LRR_1; Domain location=113-134; Score =10.3; E_value=3.2; Accession=PF00560.25; Description=Leucine Rich Repeat
  Pfam annotation: Domain name=LRR_1; Domain location=135-157; Score =10.7; E_value=2.8; Accession=PF00560.25; Description=Leucine Rich Repeat
  Pfam annotation: Domain name=LRR_1; Domain location=16-39; Score=2.4; E_value=1e+02; Accession=PF00560.25; Description=Leucine Rich Repeat
  Pfam annotation: Domain name=LRR_1; Domain location=41-63; Score=9.1; E_value=5.5; Accession=PF00560.25; Description=Leucine Rich Repeat
  Pfam annotation: Domain name=LRR_1; Domain location=65-87; Score=6.8; E_value=15; Accession=PF00560.25; Description=Leucine Rich Repeat
  Pfam annotation: Domain name=LRR_1; Domain location=89-111; Score =19.3; E_value=0.016; Accession=PF00560.25; Description=Leucine Rich Repeat
  Pfam module annotation: Pfam domain module=LRR_1::LRR_1::LRR_1::LRR _1::LRR_1::LRR_1; Domain location=113-134::135-157::16-39::41-63::65 -87::89-111
  Subcellular localization annotation: CTP_CleavageSite=77; ConfidenceScore=5.09e-01
AGPGWTGVTCSADATRVVALHLPGLGLSGAVPSGTLGRLDALQLLSLRANNLSGRFPTDLLSLPALTGLHLQRNAFSGALPAGLAALQNLQVLDLSYNRFEGGLPGALSNLTHLVALNLSNNSLAGRVPDLGLPALQFLNLSNNHLDGXLPGSLLRFADAAFAGNNVTRPAAPVPPPALLPPSTLAPPSTKRRV

SEQ ID NO: 100030 - protein, 740 aa, Setaria italica
  misc_feature (48)..(48): Xaa can be any naturally occurring amino acid
  Transcript Sequence Number=SeqID_34056
  Gene Ontology: Mol. function=nucleic acid binding; Cellular component= nucleus; Biological process=response to DNA damage stimulus
  Homolog annotation: Hit_ID=B9GWX1; Match level="QueryCoverage=98%, HitCoverage=55%, E-value=0.0, Identity=52%"; Hit description =Chromatin remodeling complex subunit
  Pfam annotation: Domain name=F-box; Domain location=73-120; Score =24.7; E_value=0.00037; Accession=PF00646.25; Description=F-box domain
  Pfam annotation: Domain name=SNF2_N; Domain location=123-740; Score= -28.5; E_value=4.3e-07; Accession=PF00176.15; Description=SNF2 family N-terminal domain
  Pfam annotation: Domain name=zf-CW; Domain location=352-398; Score =57.3; E_value=5.8e-14; Accession=PF07496.7; Description=CW-type Zinc Finger
  Pfam module annotation: Pfam domain module=F-box::SNF2_N::zf-CW; Domain location=73-120::123-740::352-398
WAAHDGPHCDDHCIWSCTDCHVLGCEDHQIASISNKEKSFDLHEIFKXTLPGVRMEKGMQTERIIPDAETLELGIWSVPDDVLNKVLILLKPRDLIRVAATCHHLRSLAASIMPCMKLKLFPHQEAAVEWMLRREQNTQVLAHPLYKDFCTEDGFPFYINVTSGEVSTGNSPTINDFRGGMFCDEPGLGKTVTTLSLILKTHGTLAYPPQGVDVSWCMHKPDKKYGYYELSPSCSSNRNSSSSVSKKLLREDVTTDDPCSSGLSHDDDPVCSTRSSRKRGRLLSPDPTKVMFHATSEKSPSSSHSKVHPTPATHVLKFTKNSRQVRKNLMDAYSNGSVGNKRKRGTTSETNETWVQCDACRKWRRLSDATVLDSTTAWFCTMNTDPTRQKCTAPEESWDFVKKITNLPGFYKKNSLPGNEENVSFFTNILKDNVAMINSETKKALIWLAKLSPSKLVEMELVGLTRPVLDTRATTGKGARPYYKIFQAFGLVRKIEKGVTRWYYPPMLDDLAFDSAALGVALEKPLDSTRFYLSRATLIVVPANLIDHWTTQIQRHVSSDTLNVFVWGDHKKPSAHNLAWDYDIVITTFSRLSAEWGPQKRSALKHVHWFRVILDEGHTLGSSLALTNKLQMAVALVASNRWILTGTPTPNTPTSQVAHLHPMLKFLHDEVYGQNYQSWDSGIHRPFEAQMEEGRVRLVQLLQRTMISARKADLKNIPPCIKKITFLDFNEGHAKSYNEL

SEQ ID NO: 100031 - protein, 172 aa, Setaria italica
  Transcript Sequence Number=SeqID_34057
  Gene Ontology: Biological process=protein modification process
  Homolog annotation: Hit_ID=B6U0P5; Match level="QueryCoverage=97%, HitCoverage=18%, E-value=2e-72, Identity=79%"; Hit description =Ubiquitin family protein
QYKIILVTQLQPGGIPRNMVIPDSLTTLSEYMERVDRVLQNNGTPPSRDSEGQQQPMADDANVNPRFPSPEVLASVIERAQQLLSGSAASSLSHIAQRIRQDGGTGDASIRREIQTESVQLGIAMQHLGAMFFELGRTMMMLRTGQSPSQAFVNSGPAVYINSTGPNPIMVQ

SEQ ID NO: 100032 - protein, 79 aa, Setaria italica
  Transcript Sequence Number=SeqID_34058
  Gene Ontology: Mol. function=aspartic-type endopeptidase activity; Cellular component=chromatin; Biological process=chromatin assembly or disassembly
  Homolog annotation: Hit_ID=Q7XM33; Match level="QueryCoverage=100%, HitCoverage=6%, E-value=2e-36, Identity=94%"; Hit description =OSJNBa0083I11.5 protein
LGIEVHQDDSRITLRQIAYAKRVVELAGLTDCNPALTPMEERLKLSRDSTTEEVDATQYRRLVGSLRYLAHTRPDLAFS

SEQ ID NO: 100033 - protein, 60 aa, Setaria italica
  Transcript Sequence Number=SeqID_34059
HQLIRCEQIAAEACQVDYDGGGAPLLESKKKGSRRRNLSDSGRWNDDDEEDSGNFVVHVV

SEQ ID NO: 100034 - protein, 456 aa, Setaria italica
  misc_feature (88)..(88): Xaa can be any naturally occurring amino acid
  misc_feature (232)..(232): Xaa can be any naturally occurring amino acid
  Transcript Sequence Number=SeqID_34060
  Homolog annotation: Hit_ID=Q6AV56; Match level="QueryCoverage=99%, HitCoverage=34%, E-value=1e-129, Identity=51%"; Hit description=BHLH family protein, putative, expressed
RNCTIVQSQAERKQQSEVIAKLQGRIEELERTEQEHEKMQRQLDTYKEMLEDTSRDVHCIKDEASEKENNLQEKLREALGALDESKTXLADRNNELSQLEINLHQQKQATEHLEKLKVDMQSELKGYMDSNHTLKRDLDAALVAKMEAEEVLIQEKVKLLGALNEANYVLSERSSELSQIENNFHQQKQALEHLEKLKVDMETELKTYMDENCVLKRDLDVALIAKMEYERXHTKEKEKLCGIISEKGKVIDELQQYIAVLEEENLGQKLDLGGLIKMQYEKSIQEVNNNYSEIVEVYDIKLLELEERVSFFEQKFTSREQEIMDMFDQEEAYWYTLIAEKEIAISDIQRTVESVKVDIEKLLETAAAKVTEVQLEVNQLYRFAETLNSLNIIQEHDRVFKDMLIAECDRELESLRVALVLEKEQSGNLKNLTEQLKAQATAEMLEKSKEHLEVAN

SEQ ID NO: 100035 - protein, 82 aa, Setaria italica
  Transcript Sequence Number=SeqID_34061
FCLPSRVSCSVLGPGLFLPTSFHGHGRHLHLQHQERSLQGRGQPQLGCGCPCPGHSHLWPGHDRPRPGHGRSWPGHGRTQPG

SEQ ID NO: 100036 - protein, 231 aa, Setaria italica
  Transcript Sequence Number=SeqID_34062
  Gene Ontology: Mol. function=sodium ion transmembrane transporter activity; Cellular component=integral to membrane; Biological process=vesicle-mediated transport
  Homolog annotation: Hit_ID=Q556Z3; Match level="QueryCoverage=92%, HitCoverage=16%, E-value=2e-24, Identity=27%"; Hit description =Trafficking protein particle complex subunit 10
MANYLAQFQTIKSSCDRIVIAVEDVSDLWLNVKESFEQRVPVKKACLNNKARNPVFVDNLPAEFIQTTDSRLRSRFPQEQYLFWFREPYATVVLVTCEDLDEFKTILKPRLKLIVQNDEREWFIVFVSKAHPSNDQATKMAKKVYARLEADFNTKKRERCCKFDLHGPDAEFWDDFDSKMVDCIRNTLDRRVQFYEEEIRRLSEQRFTPIWNFCNFFILKESLAFMFEMSN

SEQ ID NO: 100037 - protein, 59 aa, Setaria italica
  misc_feature (44)..(44): Xaa can be any naturally occurring amino acid
  Transcript Sequence Number=SeqID_34063
  Subcellular localization annotation: CTP_CleavageSite=28; ConfidenceScore=5.54e-01
MAAASFTAAKFLAPVAARSGGERAPPLPAGASSSSFARALRRGXAHHPRLRTALAVSSD

SEQ ID NO: 100038 - protein, 50 aa, Setaria italica
  Transcript Sequence Number=SeqID_34064
SPASPAKLTDGSEANSSDSNHAPTEQKMNGTNGLAADIELSRTIDELSIS

SEQ ID NO: 100039 - protein, 65 aa, Setaria italica
  Transcript Sequence Number=SeqID_34065
  Homolog annotation: Hit_ID=Q6AVK1; Match level="QueryCoverage=93%, HitCoverage=70%, E-value=3e-24, Identity=86%"; Hit description =UPF0727 protein
TYYALQVKFGVLFNDDRCANIFEALVGTLRAAKKRKILTYDGELLLQGVHDNVEITLLPPPAVAL

SEQ ID NO: 100040 - protein, 87 aa, Setaria italica
  Transcript Sequence Number=SeqID_34066
  Homolog annotation: Hit_ID=Q6AVK1; Match level="QueryCoverage=100%, HitCoverage=100%, E-value=7e-41, Identity=93%"; Hit description =UPF0727 protein
MNVEEEVGKLKEEIQRLGQQQPDGSYKVKFGVLFNDDRCANIFEALVGTLRAAKKRKILTYDGELLLQGVHDNVEITLLPPPAVAAA

SEQ ID NO: 100041 - protein, 77 aa, Setaria italica
  Transcript Sequence Number=SeqID_34067
  Gene Ontology: Mol. function=thiamin diphosphokinase activity; Biological process=thiamin diphosphate biosynthetic process
  Homolog annotation: Hit_ID=B6U8T8; Match level="QueryCoverage=100%, HitCoverage=28%, E-value=2e-32, Identity=79%"; Hit description =Thiamin pyrophosphokinase 1
MLWRTIRTMDVMMHSSCFLLPKLHQPANKPVMNYALVVLNQQLPRFMPRLWAQANLRICADGGANRIFDEMFHMTND

SEQ ID NO: 100042 - protein, 189 aa, Setaria italica
  misc_feature (9)..(9): Xaa can be any naturally occurring amino acid
  misc_feature (49)..(49): Xaa can be any naturally occurring amino acid
  misc_feature (123)..(123): Xaa can be any naturally occurring amino acid
  Transcript Sequence Number=SeqID_34068
  Homolog annotation: Hit_ID=B9S8Z8; Match level="QueryCoverage=40%, HitCoverage=6%, E-value=6e-11, Identity=57%"; Hit description=P30 dbc protein, putative
DPEAEIQPXKKIDSSTDAGNSQTKLQEGSKTSMEDISNLKKEEKPEERXTDLRSPNGDKVNHKEAIEQKDTKKDGKKEKTKDDKEKNRDLKMDPKQKPLNEMKEKKKSDGTTKYPGFIFRQKXNNESKLRSTSLSLDGLLDYTAKDIEESVFELSLFAESFSEMLQHRMGCVILSLDLPLFGAYVGSSS

SEQ ID NO: 100043 - protein, 141 aa, Setaria italica
  Transcript Sequence Number=SeqID_34069
HKDKEAKPEVAAEDSGNNKTTKKDGKKEKTKDDKEKNRDLKMDPKQKPLNEIKEKKKSDDPPKYPGFILQAKRSNNESKVWVTCYIIFLFVPYNASIQTCSYELPWRSLSKLSVLQLRSTSLSLDGLLDYTAKDIEESVFE

SEQ ID NO: 100044 - protein, 1391 aa, Setaria italica
  misc_feature (141)..(141): Xaa can be any naturally occurring amino acid
  misc_feature (168)..(168): Xaa can be any naturally occurring amino acid
  misc_feature (733)..(733): Xaa can be any naturally occurring amino acid
  Transcript Sequence Number=SeqID_34070
  Gene Ontology: Mol. function=calcium ion binding; Cellular component =Golgi apparatus; Biological process=nuclear mRNA splicing, via spliceosome
  Homolog annotation: Hit_ID=B9S8Z8; Match level="QueryCoverage=96%, HitCoverage=94%, E-value=9e-90, Identity=46%"; Hit description=P30 dbc protein, putative
  Pfam annotation: Domain name=DUF1777; Domain location=327-447; Score=- 78.7; E_value=0.041; Accession=PF08648.4; Description=Protein of unknown function (DUF1777)
  Pfam annotation: Domain name=efhand; Domain location=1324-1352; Score= 20.5; E_value=0.0069; Accession=PF00036.24; Description=EF hand
  Pfam module annotation: Pfam domain module=DUF1777::efhand; Domain location=327-447::1324-1352
MFPSKGPNHYGQQPPYGGQQPYGQIPGSTGFTAPAAAGGADGGRFGARPGQGTAAQYSGPYASVYGAQQVGGLGGKGPASSSLPSLTTRPTSLSESSKFSSAPVGSSLARPNDDYMAVRGYAQKLDQYGTDYTLERRMYGXILLILVGEMVSVIWIEGILIIYQLVIXVHDHMEQGSSMRHQQLLKGQLQPGSDTRQADYFAGRSAPIHQSSQEIGAYGRVEAESRNVSILGTAPYGRQQAGSLLEGAPRTNIDSLYGQGSSSTGYGAGLPPGRDYSSGKGLLHPSSDPDYRDSILPRVHPGISMVDERRVDRIGYRRELDIRDEERRRDLMLEREKELEWERERELRDLRDRERERERERERDRERLLRERERERERERERERERERLRERREKERERDRKHAADPRREHTPPRSLSRNDHAAMNVSVLGFIITVCTLEVPGDRRRSSSVRSEKPVRRISPRREAVHRHRSPVKEIKREYICKVLPFRFVDDERDYLSLTKRYPRLAITPEFSKIVLNWAKENLNLSLHTPVSLEHDIHDADDSADEGAISSEKSSSSNTPATIWNAKVLLMSGMSKGAYADITSLRSNEERVVNLNNILKFAVFKKDRSLFAIGGPWNAAIDGGDPSVDCSCLIRTAIRCVKELVQVDLSNCTHWNRFVEVHYNRIGKDGLLSHKEITVLFVPNLSECVPSVDIWKNNWIAYRKSKAEREQLTMKKEKSPVELKEQKRKFXGEVNKGKSIDADLLKEGDVGSSDMKNEKVDADTDRQDKDGEGKVDKVEEPVEKMGGDVEGKTTGGSSVDHAAGDKKPIKKKVIKKVMKVVRKKPAAGASTSADKSSIEDKNVVAESASKTAEVGPNEQKSEDAGKEQEGTGINQQPEAKKTGKKKIIRRVVKRKVSASGSQLTASATPAETSKQEAEIQPEKKIDSSTDAGNSQTKLQEGSKTSMEDISNLKKEEKPEEKETDLRSPNGDKVNHKEAIEQKDTKKDGKKEKTKDDKEKNRDLKMDPKQKPLNEMKEKKKSDDPPKYPGFILQAKRSNNESKLRSTSLSLDGLLDYTAKDIEESVFELSLFAESFSEMLQHRMGCVILSFLEKLYKRHIVKRNQRKRQREEDLKKEEKKSSEKRPKTTQETVTESADNPAGDVKMTKEGDEKMSPDHSASVHDEQLKEGQVKVGADHPMANHDEPAKKGEEKMSTSEAAPNEPEADTKMDEEDPEYEEDPEEIEIYEDDEDMDDAHAEAPIAEQNEDNTKDKEAKPEVAAEDSGNNKTTKEPESENITNIHEKTASVEEKQTTAEKGDSVEGGEKVVSKEVKPAKDEVVDKDLLQAFRYFDQNRAGYIKVDDLKCILHNLGKFLSSRDVKDLVQIALIESNSSRDNRIIYPKLVKIVDL

SEQ ID NO: 100045 - protein, 69 aa, Setaria italica
  Transcript Sequence Number=SeqID_34071
FFFFFFQSTAFALSNQGWRVHIHRSFDSESLKKRKCCTPNYLVQSLCTHKYYTHRRDTSTTVEHDTNLA

SEQ ID NO: 100046 - protein, 55 aa, Setaria italica
  Transcript Sequence Number=SeqID_34072
PGRLTFPDVAKLVTSVCSVQLSYFVRTWFCMPLLFQFCFNVQDLVLLLVNPEGFS

SEQ ID NO: 100047 - protein, 141 aa, Setaria italica
  misc_feature (38)..(38): Xaa can be any naturally occurring amino acid
  Transcript Sequence Number=SeqID_34073
DRRGRRPPSYAQVAGCAESLEAFRWVSGVRILLDLVEXGGAATARARENAAAALLNLVVAGGDPAVEEVVAVGGAEETVRELAEDTTASPRGKAKAEALLRALEGAGAAARRREHRLADFLNGLVQSDPYISSPASASTHG

SEQ ID NO: 100048 - protein, 202 aa, Setaria italica
  misc_feature (36)..(36): Xaa can be any naturally occurring amino acid
  misc_feature (109)..(109): Xaa can be any naturally occurring amino acid
  misc_feature (155)..(155): Xaa can be any naturally occurring amino acid
  Transcript Sequence Number=SeqID_34074
  Gene Ontology: Mol. function=structural constituent of ribosome; Cellular component=ribosome; Biological process=metabolic process
  Homolog annotation: Hit_ID=Q8GVY1; Match level="QueryCoverage=88%, HitCoverage=45%, E-value=2e-51, Identity=52%"; Hit description =Ribosomal protein-like
MSGEAGMSHQSDTSSCSDDSEDRNTVNPTGIHTMEXIAEHCVLHNLLERISVKIHAKIKARQAGKTGTSRRRTGFHRRVIERDHGEGHQRLVTDFFSEDPVYDEKVFRXAIRMLARGCAADAVDEYVQIGTSTAMECLEWFAEGVIDKFGGEYLXGPTSADMQHLLQIGEGLGFPGMLGSIGCMHWEWENCPPKWMRRLNHS

SEQ ID NO: 100049 - protein, 106 aa, Setaria italica
  Transcript Sequence Number=SeqID_34075
  Gene Ontology: Mol. function=structural constituent of ribosome; Cellular component=ribosome; Biological process=metabolic process
  Homolog annotation: Hit_ID=Q8GVY1; Match level="QueryCoverage=100%, HitCoverage=24%, E-value=1e-34, Identity=62%"; Hit description =Ribosomal protein-like
  Pfam annotation: Domain name=Plant_tran; Domain location=1-41; Score=- 42.8; E_value=0.0058; Accession=PF04827.6; Description=Plant transposon protein
QSRFPIVRGPIRFFQRATLGKILQACVILHNMAVQDEKDMASTCSEPNEASGIAAVLPSNIKTGPANCLTNVLQRSAPVCSQATHGQLRRDLTEHIWQQFGPFGDK

SEQ ID NO: 100050 - protein, 335 aa, Setaria italica
  misc_feature (70)..(70): Xaa can be any naturally occurring amino acid
  Transcript Sequence Number=SeqID_34076
  Gene Ontology: Mol. function=structural constituent of ribosome; Cellular component=ribosome; Biological process=metabolic process
  Homolog annotation: Hit_ID=Q8GVY1; Match level="QueryCoverage=99%, HitCoverage=77%, E-value=1e-127, Identity=63%"; Hit description =Ribosomal protein-like
  Pfam annotation: Domain name=Plant_tran; Domain location=160-270; Score=180.4; E_value=5.2e-51; Accession=PF04827.6; Description=Plant transposon protein
SPYFTKRTDICYRQGLSPLQKCTAAIRMLARGCAADAVDEYVQIGTSTAMECLEWFAEGVIDKFGGEYLXDPTSADMQHLLQIGEGLGFPGMLGSIGCMHWEWENCPPKWMRRLNHSDHGFATFILEAVASQDLWIWHASFNAVGSINDISVLNQSPSFTQVLKGQAPPVQFSINKSQYNMGYYLADEIYPECTVFVKTIPFPRTEKERLFAKHQEEATKDVQRAFGVLQSRFPIVRGPIRFFQRATLGKILQACVILHNMAVQDEKDMASTCSEPNEASGIAAVLPSNIKTGPANCLTNVLQRSAPVCSQATHGQLRRDLTEHIWQQFGPFGDK

SEQ ID NO: 100051 - protein, 117 aa, Setaria italica
  misc_feature (66)..(66): Xaa can be any naturally occurring amino acid
  Transcript Sequence Number=SeqID_34077
  Homolog annotation: Hit_ID=B9RHU2; Match level="QueryCoverage=52%, HitCoverage=2%, E-value=6e-12, Identity=53%"; Hit description =Splicing endonuclease positive effector sen1, putative
MIQLKEYDPSCHGEEVVSIMFEVLMYPVLLDDQSLANQFQMFIETIDESYELTLSTNQQYPGVYAXLLYFQPLMQKYINFLEAEVLPSTSEHSRPRVQLKRADIWLGFKSLLGFLEA

SEQ ID NO: 100052 - protein, 56 aa, Setaria italica
  Transcript Sequence Number=SeqID_34078
LELCADCFFLLFNTNLPIILSSLNCIAKLFAVSYHYFWPFFLEHAGVLCIIIYEET

SEQ ID NO: 100053 - protein, 85 aa, Setaria italica
  Transcript Sequence Number=SeqID_34079
TSVNLAWLGFWVSVEGIGPYSLIGELHAVGKARWWRQEQGWSNEVAGPPLAVGWYWMASGPVPGGGTGSGGQRPLFWWQDLWSTV

SEQ ID NO: 100054 - protein, 230 aa, Setaria italica
  misc_feature (34)..(34): Xaa can be any naturally occurring amino acid
  Transcript Sequence Number=SeqID_34080
  Gene Ontology: Mol. function=sequence-specific DNA binding; Cellular component=nucleus; Biological process=regulation of transcription, DNA-dependent
  Homolog annotation: Hit_ID=Q8H6W1; Match level="QueryCoverage=98%, HitCoverage=56%, E-value=2e-67, Identity=54%"; Hit description=WRKY transcription factor
GQQLPFLMATNDKSTVPPAAIITEDSTFDNDVFXSFQPHLGSKQQSFCTAEKDYGAHFQNQSLSNIHRQESSLQSSFTAVKDNTNATIVKAKASDSMFGNSHYSAGQQQDDETNQNAQSEGVDIRAAACVPVSTHCDASLMESQDAVDVSSTLSNEEDERATHGTASIECEGDEDETESKRRKLDALGTSTITTAVATPTSTIDMGTAASRAVREPRVVVQTTSEVDILT

SEQ ID NO: 100055 - protein, 120 aa, Setaria italica
  Transcript Sequence Number=SeqID_34081
NNHPRLLKSSRGCSSYVNGTSFRFSLILITLTFYRNGAEKLDLPCLAGHVHVCRFCSKLTSFLGLMATILFSSPGWPAPSSLASSSVSPYASGEAELPSRPPRQAPPQQQTDQLFIPSEA

SEQ ID NO: 100056 - protein, 172 aa, Setaria italica
  Transcript Sequence Number=SeqID_34082
  Gene Ontology: Mol. function=sequence-specific DNA binding; Cellular component=nucleus; Biological process=regulation of transcription, DNA-dependent
  Homolog annotation: Hit_ID=Q6IEQ1; Match level="QueryCoverage=48%, HitCoverage=39%, E-value=6e-39, Identity=86%"; Hit description=WRKY transcription factor 30
  Pfam annotation: Domain name=WRKY; Domain location=107-160; Score =119.4; E_value=1.2e-32; Accession=PF03106.7; Description=WRKY DNA -binding domain
YGGAGQGAWRRPAWAGEQDGGHQVLSSVICTFVVFCRSPRKLVSLLQNLQTWTCPARHGRKLDALGTSTITTAVATPTSTIDIGAAASRAFQEPRVVVQTTSEVDILNDGYRWRKYGQKVIKGNPNPRSYYKCTHPGCSVRKHDLKSVITTYEEKHNHEVPAARIHSPPLFT

SEQ ID NO: 100057 - protein, 154 aa, Setaria italica
  misc_feature (128)..(128): Xaa can be any naturally occurring amino acid
  Transcript Sequence Number=SeqID_34083
  Gene Ontology: Mol. function=RNA-directed DNA polymerase activity; Cellular component=mitochondrion
  Homolog annotation: Hit_ID=B9S2U8; Match level="QueryCoverage=92%, HitCoverage=32%, E-value=1e-56, Identity=70%"; Hit description =Pentatricopeptide repeat-containing protein, putative
  Pfam annotation: Domain name=PPR; Domain location=13-46; Score=25.6; E_value=0.0002; Accession=PF01535.12; Description=PPR repeat
  Pfam annotation: Domain name=PPR; Domain location=47-81; Score=29.9; E_value=1e-05; Accession=PF01535.12; Description=PPR repeat
  Pfam annotation: Domain name=PPR; Domain location=82-116; Score=36.8; E_value=8.4e-08; Accession=PF01535.12; Description=PPR repeat
  Pfam module annotation: Pfam domain module=PPR::PPR::PPR; Domain location=13-46::47-81::82-116
RTGVSHGITPNSRTWNIILNTLISHGKDDEAYRVFRSMIKRCQPDSDTYTMMIKMFCENDKIEMALKVWKYMRLKQFLPSMHTFSVLINGLCDKGEVSQACVLLEDMIEKGIRPPGSTFGKLRQLLLXEEKDVLDFLVEKMKILIQEPLLIDRS

SEQ ID NO: 100058 - protein, 95 aa, Setaria italica
  Transcript Sequence Number=SeqID_34084
  Gene Ontology: Mol. function=nutrient reservoir activity; Cellular component=extracellular region; Biological process=auxin mediated signaling pathway
  Homolog annotation: Hit_ID=B6U6C5; Match level="QueryCoverage=100%, HitCoverage=42%, E-value=1e-31, Identity=69%"; Hit description=Auxin- binding protein ABP20
AMAAGFITSLTNQVYTKTLYKGDLMVFPQGLLHFQYNLGNDTAVALSSYSSANPGLMILDFALFANNLPSDIVSKVTVLDELEVKKLKALFGGSG

SEQ ID NO: 100059 - protein, 115 aa, Setaria italica
  misc_feature (26)..(26): Xaa can be any naturally occurring amino acid
  Transcript Sequence Number=SeqID_34085
  Gene Ontology: Cellular component=integral to membrane
  Homolog annotation: Hit_ID=B6TXA3; Match level="QueryCoverage=99%, HitCoverage=28%, E-value=2e-29, Identity=57%"; Hit description=Wax synthase isoform 1
PVHQFLFIAALPVKLQMAAAITVTAXRSSIAQAQIGVPCSCAVKVAVLAAVLHAYQFIDRLHLYMRLALYGVHIYCFFDLLLPCIAAIGGALGMEMEPQFDRPYLASSLRDFWGA

SEQ ID NO: 100060 - protein, 63 aa, Setaria italica
  Transcript Sequence Number=SeqID_34086
  Gene Ontology: Mol. function=triacylglycerol lipase activity; Biological process=lipid metabolic process
  Homolog annotation: Hit_ID=B6TYC3; Match level="QueryCoverage=100%, HitCoverage=15%, E-value=5e-22, Identity=85%"; Hit description =Triacylglycerol lipase
  Pfam annotation: Domain name=Lipase_3; Domain location=1-62; Score= -25.6; E_value=0.062; Accession=PF01764.17; Description=Lipase (class 3)
  Subcellular localization annotation: CTP_CleavageSite=45; ConfidenceScore=5.04e-01
TSITVTGHSLGASLATLNAVDLAANGLNAPADSSQPPCPVTAFVYASPRVGDANFKNAFASFP

SEQ ID NO: 100061 - protein, 123 aa, Setaria italica
  Transcript Sequence Number=SeqID_34087
NVNILMLNMFMVSFNLTRIKCTVCSNVAPVFEFSEHVDRLLVDSLYVTVARCIGIQHVWSNNLNFLSAFETCFSMMCLSIIRKTGSTREDCVEDHGCWFVLLPGQCFSQIQDSVRKDCNIFLF

SEQ ID NO: 100062 - protein, 423 aa, Setaria italica
  Transcript Sequence Number=SeqID_34088
  Gene Ontology: Mol. function=DNA binding; Cellular component =intracellular
  Homolog annotation: Hit_ID=B9RKY3; Match level="QueryCoverage=76%, HitCoverage=63%, E-value=1e-117, Identity=65%"; Hit description =Transcription factor, putative
  Pfam annotation: Domain name=ARID; Domain location=123-235; Score =36.3; E_value=4.7e-08; Accession=PF01764.17; Description=ARIDBRIGHT DNA binding domain
  Pfam annotation: Domain name=HSP20; Domain location=338-423; Score= -11.7; E_value=0.026; Accession=PF00011.13; Description=Hsp20alpha crystallin family
  Pfam module annotation: Pfam domain module=ARID::HSP20; Domain location=123-235::338-423
TIGGRAAQNGAAGTFDSVEVSVKPEAAGAEDGDGEELNGDAAADSVGEAEKLENGDELVTVGGEKEGSPEGGAAEGGDDKGVDGQNQPGENQLVLVSAEEDPVMAKLSKNSFMFDYSTGGDDSGTEEEQAAFMKELERFYREKMMEFKPPKFYGEGLNCLKLWRQVTGLGGYDQVTSCKLWRQVGESFKPPKTCTTVSWTFRNFYEKALLEYEKHKIETGQFQVASSTLADRIGSESQVGGSHVSGSGRARRESATRAMQGWHSQRLLGNGEIADPIIKDKGTIVLKKDKTPKSSGSAKRKRMPSLEDDRVMPYKSDKLQNDSMVIDMGPPADWVKINVRRTKDCYEVYALVPGLLREEVHVQSDPAGRLIVTGEPEQLDNPWGVTPFKKVISLPSRIDPHQTSAVVTLHGQLFVRAPFEQSK

SEQ ID NO: 100063 - protein, 83 aa, Setaria italica
  Transcript Sequence Number=SeqID_34089
  Gene Ontology: Mol. function=molecular_function; Cellular component =cellular_component; Biological process=cell proliferation
  Homolog annotation: Hit_ID=A4QP78; Match level="QueryCoverage=100%, HitCoverage=18%, E-value=9e-35, Identity=83%"; Hit description =Zgc:163002 protein
  Pfam annotation: Domain name=DUF2363; Domain location=1-81; Score =115.5; E_value=1.8e-31; Accession=PF10155.1; Description =Uncharacterized conserved protein (DUF2363)
TAVEFPTEFVHEYITNCIQSCQSIKDKYMQNRLVRLVCVFLQSLIRNKIINVQDLFIEVQAFCIEFSRIREAAGLFRLPQSLE

SEQ ID NO: 100064 - protein, 116 aa, Setaria italica
  Transcript Sequence Number=SeqID_34090
  Gene Ontology: Mol. function=molecular_function; Cellular component =cellular_component; Biological process=cell proliferation
  Homolog annotation: Hit_ID=A4QP78; Match level="QueryCoverage=99%, HitCoverage=25%, E-value=7e-50, Identity=82%"; Hit description =Zgc:163002 protein
  Pfam annotation: Domain name=DUF2363; Domain location=1-114; Score =247.6; E_value=3e-71; Accession=PF10155.1; Description =Uncharacterized conserved protein (DUF2363)
SKLINSPDIAGYFEGLVHMDMSLHSMEVVNRLTTAVELPTEFVHEYITNCIQSCQSIKDKYMQNRLVRLVCVFLQSLIRNKIINVQDLFIEVQAFCIEFSRIREAAGLFRLLKSLE

SEQ ID NO: 100065 - protein, 124 aa, Setaria italica
  Transcript Sequence Number=SeqID_34091
  Gene Ontology: Mol. function=molecular_function; Cellular component =cellular_component; Biological process=cell proliferation
  Homolog annotation: Hit_ID=A4QP78; Match level="QueryCoverage=100%, HitCoverage=27%, E-value=6e-53, Identity=80%"; Hit description =Zgc:163002 protein
  Pfam annotation: Domain name=DUF2363; Domain location=1-122; Score =273.0; E_value=7e-79; Accession=PF10155.1; Description =Uncharacterized conserved protein (DUF2363)
PLIAVEVLSKLINSPDIAGYFEGLVHMDMSLHSMEVVNRLTTAVELPTEFVHEYITNCIQSCQSIKDKYMQNRLVRLVCVFLQSLIRNKIINVQDLFIEVQAFCIEFSRIREAAGLFRLLKSLE

SEQ ID NO: 100066 - protein, 395 aa, Setaria italica
  Transcript Sequence Number=SeqID_34092
  Gene Ontology: Mol. function=molecular_function; Cellular component =cellular_component; Biological process=cell proliferation
  Homolog annotation: Hit_ID=A4QP78; Match level="QueryCoverage=99%, HitCoverage=87%, E-value=6e-84, Identity=47%"; Hit description =Zgc:163002 protein
  Pfam annotation: Domain name=DUF2363; Domain location=268-393; Score =293.3; E_value=5.4e-85; Accession=PF10155.1; Description =Uncharacterized conserved protein (DUF2363)
RLRVGGALCFLLEDKKMLHPTGRLIAFAILHQSYSPQTTNPYVPILLNAACDETSEKSERAFVQLLLTSSSGNNNNEVLNQSAVDYINGSVSASQALLPREQLEKQYCSNGVQSQHQISSFRAAAVRSAIPDPDVPQSCANSSESAISLPGSKQKSASDDRDSALAGLLHEKSGGRLGPQWIRPTPPRLPVLDGELQWLNPDNNHELLWDYSMCADTSRGAAIRDLIARALKGPLAPAQQEQVIVELAKDPKLVYYCGMTPQKLPDLVEHNPLIAVEVLSKLINSPDIAGYFEGLVHMDMSLHSMEVVNRLTTAVELPTEFVHEYITNCIQSCQSIKDKYMQNRLVRLVCVFLQSLIRNKIINVQDLFIEVQAFCIEFSRIREAAGLFRLLKSLE

SEQ ID NO: 100067 - protein, 88 aa, Setaria italica
  misc_feature (2)..(2): Xaa can be any naturally occurring amino acid
  misc_feature (8)..(8): Xaa can be any naturally occurring amino acid
  Transcript Sequence Number=SeqID_34093
  Gene Ontology: Mol. function=hydrolase activity; Cellular component =anchored to membrane; Biological process=carbohydrate metabolic process
  Homolog annotation: Hit_ID=B9SKT7; Match level="QueryCoverage=88%, HitCoverage=68%, E-value=2e-23, Identity=65%"; Hit description =Hydrolase, hydrolyzing O-glycosyl compounds, putative
  Pfam annotation: Domain name=X8; Domain location=40-88; Score=43.0; E_ value=1.2e-09; Accession=PF07983.5; Description=X8 domain
GXFIASAXGRITPQEKAESVTPIPTLSPPEGNMTFINGVTWCVARPGASQEDLQNALDWACGPGGADCSQLQPGGRCYQPNTLLTHAS

SEQ ID NO: 100068 - protein, 264 aa, Setaria italica
  misc_feature (166)..(166): Xaa can be any naturally occurring amino acid
  Transcript Sequence Number=SeqID_34094
  Gene Ontology: Mol. function=adenyl-nucleotide exchange factor activity; Cellular component=cytoplasm; Biological process=protein folding
  Homolog annotation: Hit_ID=B4FPZ7; Match level="QueryCoverage=89%, HitCoverage=67%, E-value=8e-69, Identity=88%"; Hit description=GrpE protein homolog
  Pfam annotation: Domain name=GrpE; Domain location=65-233; Score =146.5; E_value=8.3e-41; Accession=PF01025.11; Description=GrpE
PQQDDKEANKHADDGVNKTAGASTEASGEANNVPGTEKNQQAGSQDSVSQSSRRRATKRTAFSDSDSEDLDLSKEDLVKLLLEKDESLKSKDQEVKDMKDKVLRSYAEMENVLARTKRESENTKKYAIQNFSKSLLDVADNLSRASSVVKESFSKIDTSNNSDEAXTTLKTLLEGVEMTEKQLGEVFKKFGVEKFDPLNEKFDPNRHYALFQIPDPSKPSGTVAAVVKVWISYWLLLLLVYFNNVIIACWDSVVGVAIVCIKFV

SEQ ID NO: 100069 - protein, 273 aa, Setaria italica
  Transcript Sequence Number=SeqID_34095
  Gene Ontology: Mol. function=adenyl-nucleotide exchange factor activity; Cellular component=cytoplasm; Biological process=protein folding
  Homolog annotation: Hit_ID=B4FPZ7; Match level="QueryCoverage=82%, HitCoverage=77%, E-value=3e-96, Identity=75%"; Hit description=GrpE protein homolog
  Pfam annotation: Domain name=GrpE; Domain location=75-257; Score =221.6; E_value=2.1e-63; Accession=PF01025.11; Description=GrpE
  Subcellular localization annotation: CTP_CleavageSite=37; ConfidenceScore=5.00e-01
TAAVASSGRSALAAAAEPSRFDQGHPLLNQPARYSTSAFQRFGFSTSAPQQDDKEANKHADDGVNKTAGASTEASDSEDLDLSKEDLVKLLLEKDESLKSKDQEVKDMKDKVLRSYAEMENVLARTKRESENTKKYAIQNFSKSLLDVADNLSRASSVVKESFSKIDTSNNSDEAVPLLKTLLEGVEMTEKQLGEVFKKFGVEKFDPLNEKFDPNRHYALFQIPDPSKPSGTVAAVVKVGYMLHDRVLRPAEVGVTEGGPVEEEPEEKSSKSE

SEQ ID NO: 100070 - protein, 67 aa, Setaria italica
  Transcript Sequence Number=SeqID_34096
DFQANLTKFARMRRASTEGNCQYLFIAFVNLCGITIHHLEGLRVCTELGALGLMKYFRDRMFFRARG

SEQ ID NO: 100071 - protein, 130 aa, Setaria italica
  Transcript Sequence Number=SeqID_34097
  Gene Ontology: Mol. function=protein kinase activity; Cellular component=nuclear speck; Biological process=protein amino acid phosphorylation
  Homolog annotation: Hit_ID=Q9T014; Match level="QueryCoverage=100%, HitCoverage=12%, E-value=7e-49, Identity=64%"; Hit description =Protein SPA1-RELATED 2
  Pfam annotation: Domain name=WD40; Domain location=52-90; Score=20.8; E_value=0.0058; Accession=PF00400.24; Description=WD domain, G-beta repeat
  Pfam annotation: Domain name=WD40; Domain location=9-48; Score=33.9; E_value=6.4e-07; Accession=PF00400.24; Description=WD domain, G-beta repeat
  Pfam module annotation: Pfam domain module=WD40::WD40; Domain location=52-90::9-48
MQLWNASSGQGFTQFTEHRKRAWSVSFSEVDPTKLASGSDDCCVKVWSINQKNCIDTIRNVANVCCVQFSPYSSHMLAFGSADYKIYCYDLRNTRIPWCTISRHGKAVSYVRFLDPETLISASIGTNVYL

SEQ ID NO: 100072 - protein, 813 aa, Setaria italica
  misc_feature (14)..(14): Xaa can be any naturally occurring amino acid
  Transcript Sequence Number=SeqID_34098
  Gene Ontology: Mol. function=protein kinase activity; Cellular component=cytoplasm; Biological process=protein amino acid phosphorylation
  Homolog annotation: Hit_ID=B9RCP1; Match level="QueryCoverage=97%, HitCoverage=72%, E-value=0.0, Identity=52%"; Hit description =Ubiquitin ligase protein cop1, putative
  Pfam annotation: Domain name=Pkinase; Domain location=1-300; Score= -105.7; E_value=0.034; Accession=PF00069.17; Description=Protein kinase domain
  Pfam annotation: Domain name=WD40; Domain location=491-528; Score =13.2; E_value=1.1; Accession=PF00400.24; Description=WD domain, G -beta repeat
  Pfam annotation: Domain name=WD40; Domain location=540-578; Score =18.9; E_value=0.021; Accession=PF00400.24; Description=WD domain, G -beta repeat
  Pfam annotation: Domain name=WD40; Domain location=582-621; Score =33.9; E_value=6.4e-07; Accession=PF00400.24; Description=WD domain, G-beta repeat
  Pfam annotation: Domain name=WD40; Domain location=625-663; Score =20.8; E_value=0.0058; Accession=PF00400.24; Description=WD domain, G- beta repeat
  Pfam annotation: Domain name=WD40; Domain location=668-705; Score =30.8; E_value=5.4e-06; Accession=PF00400.24; Description=WD domain, G-beta repeat
  Pfam annotation: Domain name=WD40; Domain location=773-811; Score =12.0; E_value=1.5; Accession=PF00400.24; Description=WD domain, G -beta repeat
  Pfam module annotation: Pfam domain module=Pkinase::WD40::WD40::WD40:: WD40::WD40::WD40; Domain location=1-300::491-528::540-578::582 -621::625-663::668-705::773-811
MARVDPLLNGAGGXVSKSHCEGDSVRELIKPGRQTLSKFEKMNLFKQILDLVDKCHAQGYTLQHLRPSYFTIPSSNQVKYIGSYTAQDLPTSIKQDVTREDLGNRKRCLGQKIDHQESNGHRNSMLKYQKVGDQGSVAVRRPTHTFWTDQRGDNQNEDVNPGVLRPENYSYTVRERFKFVEPYGSNTSCAQHVSSSGNQQPAFELRNLEESWYMSPEELSQFKGTFPSNIYSLGVLLFELLCCSETWEVHCAAMSNLRQRILPPNFLSESPKEAGFCLWLLHPDPCSRPKARDILGCDLINEGRDLSLLEQTPVSISEDDTESSLLLNFLSQLKEEKEMQAAKLSADLGSLQTDITEVERRHSARMGFSLVDTDVLASSSALSGASVSASQDALLSGLVPSLCKSSIYEERVMRNLEQLENAYYSMRSTVDTCETNAIKRPDKEALRVRENFYQVCSDSDAMGEQTDRLGSFFDGLCKYARHSRFEVRGIMKNADILNSPNVICSLSFDRDEEYFAAAGVSKKIKIFEFDALLNDRVDIHYPLIEMPSKSKLSCVCWNNYIKNYLASTDYDGTVQLWDASSGQGFTQFTEHRKRAWSVSFSEVDPTKLASGSDDCCVKVWSINQKNCIDTIRNVANVCCVQFSPYSSHMLAFGSADYKIYCYDLRNTRIPWCTISGHGKAVSYVRFLDPETLISASTDNTLKIWDLNRTNCSGLSTDSCSLTLNGHTNEKNFVGLSVHDGYITCGSETNEVFSYYKSFPMPITSHKFGSIDPITGQVTNEDSQQFVSSVCWRGKSNMVVAASSSGSIKVLELV

SEQ ID NO: 100073 - protein, 96 aa, Setaria italica
  Transcript Sequence Number=SeqID_34099
  Gene Ontology: Mol. function=heat shock protein binding; Biological process=protein folding
  Homolog annotation: Hit_ID=Q10MW6; Match level="QueryCoverage=97%, HitCoverage=14%, E-value=3e-23, Identity=57%"; Hit description=DnaJ domain containing protein, expressed
  Subcellular localization annotation: CTP_CleavageSite=29; ConfidenceScore=5.39e-01
FDFSDVFSNLFGGGSMGASQHGGSAGSTRANTGTSGQHSGAVKIQDVTTQIFSKEISDQGITWLLLFYTPQSKGQFVLENVMQDVVHSLDGALRVR

SEQ ID NO: 100074 - protein, 67 aa, Setaria italica
  Transcript Sequence Number=SeqID_34100
IEMVTAKFKQMGIDHFPTFMSKQIAPPILPSLQMEIDLEGEKRQGESNEWTNQHGQIIQIKPKLRYL

SEQ ID NO: 100075 - protein, 65 aa, Setaria italica
  Transcript Sequence Number=SeqID_34101
PSGRRHQRRRWEVPVDADAGGAPALLGSGAPFPPSSCVCFPRRLGHVKSLIFYLPPVALTPPFLD

SEQ ID NO: 100076 - protein, 64 aa, Setaria italica
  Transcript Sequence Number=SeqID_34102
  Gene Ontology: Mol. function=catalytic activity; Cellular component =membrane; Biological process=plant-type hypersensitive response
  Homolog annotation: Hit_ID=Q5ZDH1; Match level="QueryCoverage=100%, HitCoverage=25%, E-value=5e-31, Identity=98%"; Hit description =Phosphatidic acid phosphata-like
GRPRPDFFWRCFPDGKQLYDQVTGDVICHGEKSFLTDGRKSFPSGHTSWSFAGLGFLSLYLSGK

SEQ ID NO: 100077 - protein, 49 aa, Setaria italica
  Transcript Sequence Number=SeqID_34103
QGSLFIYLFTFHVQAACYFIRPRGRLATTRILVLRLPTIVGDWRAMYQT

SEQ ID NO: 100078 - protein, 88 aa, Setaria italica
  Transcript Sequence Number=SeqID_34104
  Pfam annotation: Domain name=DUF947; Domain location=4-88; Score= -9.9; E_value=4.6e-05; Accession=PF06102.4; Description=Domain of unknown function (DUF947)
KKARRASKKRPMEISTKMRPPKLREVIQVPKKVVRDPRFEPIYGSVDKEGFRKRYNFLFDEDFPAEKQRLQEMIKKSKDPNAIEEMKS

SEQ ID NO: 100079 - protein, 112 aa, Setaria italica
  misc_feature (95)..(95): Xaa can be any naturally occurring amino acid
  Transcript Sequence Number=SeqID_34105
  Pfam annotation: Domain name=DUF947; Domain location=2-111; Score =23.4; E_value=4.9e-07; Accession=PF06102.4; Description=Domain of unknown function (DUF947)
WFLQHLLILLACRFRKRYNFLFDEDFPAEKQRLQEMIKKSKDPNAIEEMKSRVTWIDKQLKSHPRKNVESEILREHIKKEREAAKAGKRPYYLKXSELRERKLINKYEELKE

SEQ ID NO: 100080 - protein, 282 aa, Setaria italica
  misc_feature (162)..(162): Xaa can be any naturally occurring amino acid
  Transcript Sequence Number=SeqID_34106
  Gene Ontology: Mol. function=GTP binding; Cellular component=nucleolus
  Homolog annotation: Hit_ID=A5PL45; Match level="QueryCoverage=59%, HitCoverage=50%, E-value=1e-13, Identity=35%"; Hit description =Si:dkey-236e20.6
  Pfam annotation: Domain name=DUF947; Domain location=101-271; Score =202.8; E_value=9.5e-58; Accession=PF06102.4; Description=Domain of unknown function (DUF947)
RHERPQTAAPPGASASTSSKREPEEDLPSASEESDEDEEVSSSSVSESESGSDDEDVARERELERALADVPFGELQRARADGSLALRTASAAKAAAEKKARRASKKRPMEISTKMRPPKLREVIQVPKKVVRDPRFEPIYGSVDKEGFRKRYGKSSSNKKLXSFPAEKQRLQEMIKKSKDPNAIEEMKSRVTWIDKQLKSHPRKNVESEILREHIKKEREAAKAGKRPYYLKRSELRERKLINKYEELKEAGKLDAFMEKRRRKNASKDHRYMPYRRNGDSA

SEQ ID NO: 100081 - protein, 63 aa, Setaria italica
  Transcript Sequence Number=SeqID_34107
LILQKFFPFLQIHSRWSLRTTSSSTCQVNIKIGVNMKKWCILQSRIKSGATDEVCNNIFDMVS

SEQ ID NO: 100082 - protein, 114 aa, Setaria italica
  misc_feature (31)..(31): Xaa can be any naturally occurring amino acid
  Transcript Sequence Number=SeqID_34108
HMGPSEKPISKFFTKKSTAHDQSVKPEKTNXEFAETHSSRASKVECDESVQNQPEDVNQQHGEKRTTSSTVKDEPVSLGPQVFGKPQSIKDEDTMTSTGITIEETRCILGSRER

SEQ ID NO: 100083 - protein, 680 aa, Setaria italica
  Transcript Sequence Number=SeqID_34109
  Gene Ontology: Mol. function=cation:chloride symporter activity; Cellular component=integral to membrane; Biological process=sodium ion transport
  Homolog annotation: Hit_ID=B9SKU4; Match level="QueryCoverage=100%, HitCoverage=69%, E-value=0.0, Identity=79%"; Hit description =Cation:chloride symporter, putative
  Pfam annotation: Domain name=AA_permease; Domain location=3-329; Score=-97.8; E_value=0.0045; Accession=PF00324.13; Description=Amino acid permease
LPVLFSLLCIYLGVFIAPRHNAPKGITGLSITTFKDNWGSDYQRTNNAGVPDPSGSIYWDFNALVGLFFPAVTGIMAGSNRSASLKDTQRSIPIGTLSATLTTTAMYLFSVLLFGALATREELLTDRLLTATVAWPAPAVIYIGIILSTLGAALQSLTGAPRLLAAIANDDILPVLNYFKVSEGSEPHAATLFTAFICICCVVIGNLDLITPTITMFFLLCYAGVNLSCFLLDLLDAPSWRPRWKFHHWSLSLVGALLCVVIMFLISWSFTVVSLALASLIYYYVSIKGKAGDWGDGFKSAYFQLALRSLRSLGANQVHPKNWYPIPLVFCRPWGKLPENVPCHPKLADFANCMKKKGRGMSIFVSIIDGDYHELAEDAKTACRQLDAYIDYKRCEGVAEIIVAPTMSDGFRSIVQTMGLGNLKPNIVVMRYPEIWRRENLTQIPSTFVSIINDCIIANKAVVIVKGLDEWPNEYQRQYGTIDLYWIVRDGGLMLLLSQLLLTKESFESCKIQVFCISEEDTDAEELKADVKKFLYDLRMQAEVIVVTMKSWESHMESSSTVAQQDDSHEAYTSAQQRIRMYLDEMKETAQRERHPLMENGRQVVVNEQKVDKFLYTMLKLNSTILRYSRMAAVVLVSLPPPPLNHPSYFYMEYMDLLVENVPRMLIVRGYTRDVVTFFT

SEQ ID NO: 100084 - protein, 175 aa, Setaria italica
  Transcript Sequence Number=SeqID_34110
  Gene Ontology: Mol. function=protein serine/threonine kinase activity; Biological process=protein amino acid phosphorylation
  Homolog annotation: Hit_ID=B6SW37; Match level="QueryCoverage=99%, HitCoverage=24%, E-value=1e-91, Identity=90%"; Hit description =Protein kinase
  Pfam annotation: Domain name=Pkinase; Domain location=1-170; Score =21.6; E_value=8.9e-10; Accession=PF00069.17; Description=Protein kinase domain
  Pfam annotation: Domain name=Pkinase_Tyr; Domain location=3-167; Score=-42.9; E_value=7.1e-11; Accession=PF07714.9; Description =Protein tyrosine kinase
  Pfam module annotation: Pfam domain module=Pkinase::Pkinase_Tyr; Domain location=1-170::3-167
AGRKEYAAEVRIISQLRHRHLVRLVGWCHEHRGDFLLVYELMPNGSVDHHLYGKGAPLAWPARYDVALGLTSAVLYLHEECAQCVVHRDIKPSNVMLDATFSAKLGDFGLAKLVEHGSQPYTTALAGTLGYLAPECVMTGKASRESDVYSFGVVALEIACGRRPAELSEEPSKAR

SEQ ID NO: 100085 - protein, 38 aa, Setaria italica
  Transcript Sequence Number=SeqID_34111
MASSSASPAPAPAGESLRQKRILSSKLYLEVPSSKAPV

SEQ ID NO: 100086 - protein, 47 aa, Setaria italica
  Transcript Sequence Number=SeqID_34112
LLPLPRRSGGTKHARVRSNPNRMNNQSDLCRHQSYCGAHQTAIKYAR

SEQ ID NO: 100087 - protein, 42 aa, Setaria italica
  Transcript Sequence Number=SeqID_34113
GWNRSRYVRRQPDRSRRPPPLPPPDYGTDECLFSSDLGYIIP

SEQ ID NO: 100088 - protein, 330 aa, Setaria italica
  Transcript Sequence Number=SeqID_34114
  Gene Ontology: Mol. function=nucleic acid binding; Cellular component= nucleus; Biological process=jasmonic acid mediated signaling pathway
  Homolog annotation: Hit_ID=Q84SL2; Match level="QueryCoverage=93%, HitCoverage=47%, E-value=1e-153, Identity=87%"; Hit description=Zinc finger CCCH domain-containing protein 50
  Pfam annotation: Domain name=Ank; Domain location=30-63; Score=22.4; E_value=0.0019; Accession=PF00023.22; Description=Ankyrin repeat
  Pfam annotation: Domain name=Ank; Domain location=65-100; Score=33.2; E_value=1e-06; Accession=PF00023.22; Description=Ankyrin repeat
  Pfam annotation: Domain name=zf-CCCH; Domain location=236-262; Score =33.3; E_value=9.7e-07; Accession=PF00642.16; Description=Zinc finger C-x8-C-x5-C-x3-H type (and similar)
  Pfam annotation: Domain name=zf-CCCH; Domain location=272-294; Score =1.8; E_value=0.89; Accession=PF00642.16; Description=Zinc finger C -x8-C-x5-C-x3-H type (and similar)
  Pfam module annotation: Pfam domain module=Ank::Ank::zf-CCCH::zf -CCCH; Domain location=30-63::65-100::236-262::272-294
EKLAGAGGDGDAAELADGVGLWYGRSKAYEPRTPLMVAATYGSAEVVSLLLGLGCVDVNRRPGVDGATPLHCAASGGSRNAVAIVKLLLAAGADPVTPDSAGRFPADVILAPPASPDALGDLEMLLGRRRGLAVTTSVPSGSSSPPLSSSPDEGNRSPSSRSSSLSPITVDRAKKEYPVDPTLPDIKSSVYASDEFRMFAFKVRPCSRAYSHDWTECPFVHPGENARRRDPRKHPYTAVPCPNFRRPGGCPSGDSCEFSHGVFESWLHPSQYRTRLCKEGAACARRICFFAHDEDELRHVPHNSGAGLLSPRASSSIDMTAAAALGLLPG

SEQ ID NO: 100089 - protein, 210 aa, Setaria italica
  Transcript Sequence Number=SeqID_34115
  Gene Ontology: Mol. function=oxidoreductase activity; Biological process=oxidation reduction
  Homolog annotation: Hit_ID=B3TM13; Match level="QueryCoverage=93%, HitCoverage=62%, E-value=2e-69, Identity=60%"; Hit description=Short- chain dehydrogenase Tic32
DSLNLPLNILINNAGVMTRNCTRSRDGLELHFATNHIGHFLLTNLLLENMKSACRDSGVEGRIINLTSSGHMLTYPEGICFSKIHDPSGFNDFIAYGQSKLANILHSNELSRILKEEGVNISANAVHPGVITTNLFRNRTIVSVLLNSIGRIMCRDVEQGAATTCYVAMHPQVKGISGKYFANCNIASPTSQASDAELAKKLWQFSLQTV

SEQ ID NO: 100090 - protein, 113 aa, Setaria italica
  Transcript Sequence Number=SeqID_34116
PPPSPYLALDRSHTSMDLMRSTHVISDLHGSSSTYRRRGDPVSRMGGWSGWVAEPVIHSLVREERERDRRTPPPQSTGRARMDFGLPFMAARGEVGGAHLCAPPAAIEIPRDG

SEQ ID NO: 100091 - protein, 61 aa, Setaria italica
  Transcript Sequence Number=SeqID_34117
VYILELRISYMGRNFCSSIARIILVETFSQDYPSPLRFSMHLFFLIYRLALELPKMVAFAV

SEQ ID NO: 100092 - protein, 108 aa, Setaria italica
  misc_feature (91)..(91): Xaa can be any naturally occurring amino acid
  Transcript Sequence Number=SeqID_34118
  Subcellular localization annotation: CTP_CleavageSite=51; ConfidenceScore=5.65e-01
PRAPPRHHFFPPWLPPNPSPFTSETDGTTRNSSSSPVVFSPAFPDRAKKIRAHTNTAYYSVAIIKRSRLCFAASWLVTQQSAGGVGEEKKXSGELRTLTAAAAAVLAA

SEQ ID NO: 100093 - protein, 185 aa, Setaria italica
  misc_feature (180)..(180): Xaa can be any naturally occurring amino acid
  Transcript Sequence Number=SeqID_34119
MADEWWSSVRAGDGASACSTDQDAAEPGATSATSTDYFRSGLHVDAAASPPSSFLADPPHMADWTQAYVGGGRAAAEATASFNALLRLHGDDAGRHFLLDQQPDVVDGAAPLAPEAAASRSASLCAENQYSGYGDVPAAPMTTTKPFSQQHFVSGFFASSTRNFSDVASEPRPMTTKPLXLQALE

SEQ ID NO: 100094 - protein, 81 aa, Setaria italica
  misc_feature (1)..(33): Xaa can be any naturally occurring amino acid
  Transcript Sequence Number=SeqID_34120
XXXXXXXXXXXXXXXXXXXXXXXXXXXXXXXXXRFFKKAWNSIANCQCATHVCNLYRVTSILVDGNIFTGIGASCQAKARD

SEQ ID NO: 100095 - protein, 107 aa, Setaria italica
  Transcript Sequence Number=SeqID_34121
  Gene Ontology: Mol. function=transferase activity, transferring glycosyl groups; Cellular component=integral to membrane; Biological process=cell wall organization and biogenesis
  Homolog annotation: Hit_ID=Q8W3F9; Match level="QueryCoverage=100%, HitCoverage=9%, E-value=1e-39, Identity=79%"; Hit description =Cellulose synthase-like protein D1
SDAYHAREEIQAMNLQREKMKAGGDEPFEPVKIPKATWMADGTHWPGTWLQPSQDHARGDHAGIIQVMLKPPSDMPMYGNINEKSPLDFAGVDTRLPMLVYVSREKR

SEQ ID NO: 100096 - protein, 65 aa, Setaria italica
  Transcript Sequence Number=SeqID_34122
VVLHCMEVFLFYTGPSTGQDMDRHCQVGRMWEVYVPVGGTGIGREGLGFRLWPSVSYLHSPFTGH

SEQ ID NO: 100097 - protein, 79 aa, Setaria italica
  Transcript Sequence Number=SeqID_34123
  Subcellular localization annotation: CTP_CleavageSite=37; ConfidenceScore=5.27e-01
DKGAAISSESSLSSSNLLLSQSKTIGRSAERSIESVLSSSKEKVSAIESLVKGVSMSDRHNFSAIRSTSLDHGVDHTSS

SEQ ID NO: 100098 - protein, 362 aa, Setaria italica
  Transcript Sequence Number=SeqID_34124
  Gene Ontology: Mol. function=nucleic acid binding
  Homolog annotation: Hit_ID=Q9SFY4; Match level="QueryCoverage=36%, HitCoverage=7%, E-value=3e-16, Identity=40%"; Hit description =T22C5.20
  Subcellular localization annotation: CTP_CleavageSite=51; ConfidenceScore=5.71e-01
AKPYKVAEACYVVQDGPSSATSSASQGPSSAISSASQGPSSAVSSEFQGSSTSSVSSVPQGRFTRKANDDLPDTAILDSKNAKEAVRSVILDSQYEYEDEYDDSFDDLGFSVVESSYEETDGANDTDASSHGPRWSSQKKPQFYVKDGKNYSYKVAGSVAVSSAREAAVMRQTQKDTIYGLGRGGNVPFGAPSRQHIDVEEEEVDAANNYSGGISNPRGRGRRGVAGVKATLRENENPSGRGYGRGGRRGGWNQGYLAEENGNPNGQQGFGRGGRRGGSNQGNPAEEDANSNGRQEGFGRGARRGGRNHDRSSEDNEDHDPAQGFARGGPAPRGGGPGRGGGRNHHRRDRAMKKHMQGLTGL

SEQ ID NO: 100099 - protein, 138 aa, Setaria italica
  Transcript Sequence Number=SeqID_34125
MEIFKSELGSAIEESSKQKMIKEICSLLQFIDINLQGDSFQSDSILEYAEKTIKSRYISSMEDVIKKIYTQMEFDLFDDDDEIDCSDSLPSSSNQEDARFDRGRSHWNSAGASTSASAHHLLQGTRRSSRQRDDDRHD

SEQ ID NO: 100100 - protein, 281 aa, Setaria italica
  Transcript Sequence Number=SeqID_34126
  Gene Ontology: Cellular component=anchored to membrane
  Homolog annotation: Hit_ID=Q06I84; Match level="QueryCoverage=98%, HitCoverage=66%, E-value=1e-102, Identity=71%"; Hit description =Fasciclin-like protein FLA22
  Pfam annotation: Domain name=Fasciclin; Domain location=68-203; Score= 84.0; E_value=5.2e-22; Accession=PF02469.14; Description=Fasciclin domain
  Subcellular localization annotation: CTP_CleavageSite=72; ConfidenceScore=5.62e-01
NSTVVVRSPAPSPGSNATVLGAVTAVPYNLSVLAVGGLIVPSGFDLAASESRPPPPVNITRVLTDARGFNVAASMLQASGVVSEFEGDEHGAGITVFVPTDDAFAGLPATDHLQSLPAERKAVVLRFHALHSYYPLGSLESIVNPVQPTLATEYTEAGRFTLNITRVNGSIAIDTGVVQASITRTVFDQNPVSVFAVSKVLLPKEMFSRGDSESTAMAPPSATMAPGDAGNERTPPTRLSSPPDLHGEDSESSAALATANGISWCCIGFMYLQLHLLLSLV

SEQ ID NO: 100101 - protein, 55 aa, Setaria italica
  Transcript Sequence Number=SeqID_34127
KEPAFSGLLISQENERKRLVYSYYYLNYQRLFNWFNLLMQLIILNSQLDSVSYRS

SEQ ID NO: 100102 - protein, 59 aa, Setaria italica
  Transcript Sequence Number=SeqID_34128
LASETTHYNKMSPYITVKDRIPDPRADCYFPVQISPHCSLGKGTALTPSGKLNASTREK

SEQ ID NO: 100103 - protein, 116 aa, Setaria italica
  Transcript Sequence Number=SeqID_34129
AAHPPLQPPPPPPSPPPPEREIVFPAEALEFASWVAKGRALEVIHEEFEAEWGRPEEMGLSWASDSDLDSDSDSDSVGGDSDDDGVIGGGGEGEDGMIEILLEEDSLIEIDISRCR

SEQ ID NO: 100104 - protein, 247 aa, Setaria italica
  Transcript Sequence Number=SeqID_34130
  Homolog annotation: Hit_ID=A4GX19; Match level="QueryCoverage=74%, HitCoverage=99%, E-value=5e-68, Identity=64%"; Hit description =Putative ureidoglycolate hydrolase
  Subcellular localization annotation: CTP_CleavageSite=47; ConfidenceScore=5.24e-01
MQALGLGRGCTLLHHACRCRRTAASPSPPAPRPHNAPRLKTRITAVRASAAQPAQMERKHGEEPVRVVKLRAVEATPESFAPFGQVIAASPDGDEFGPHDAQLDLSRGIPRFYIMRLQDRPLEFSNITHHASVTQCLGSIGGHDWYLGVAKPSILDGPAEQSGQEGWKPLQSSAGHYYLPPDPAEVCVFRVSGPKFLKLNKGTWHAGPLFKADAVDFYNLELGNTNVVDHTTHRFKEHDGITFVVED

SEQ ID NO: 100105 - protein, 204 aa, Setaria italica
  Transcript Sequence Number=SeqID_34131
  Homolog annotation: Hit_ID=B9R7H5; Match level="QueryCoverage=50%, HitCoverage=19%, E-value=5e-23, Identity=55%"; Hit description =Transcription factor, putative
  Subcellular localization annotation: CTP_CleavageSite=10; ConfidenceScore=5.10e-01
SGRARRPAAAAAARGANTRATPRNEKGMEKDQRRPPSTKTAPVVMKASATNATAQGIRNRNQARRDRKIALQQDVDKLRKKLRHEENVHRALERAFTRPLGALPRLPPYLPSQTLELLAEVAVLEEEVVRLEEQVVNFRQGLYQEAIITSMAKSAYFPDGDRCTPARQNKSPAQVQQSSKVSTSTRQASDQDAADWSSLKRATN

SEQ ID NO: 100106 - protein, 287 aa, Setaria italica
  Transcript Sequence Number=SeqID_34132
  Gene Ontology: Cellular component=plasma membrane
  Homolog annotation: Hit_ID=Q9LPM5; Match level="QueryCoverage=77%, HitCoverage=43%, E-value=4e-50, Identity=48%"; Hit description =F2J10.8 protein
  Pfam annotation: Domain name=DUF1005; Domain location=1-287; Score =355.5; E_value=9.7e-104; Accession=PF06219.4; Description=Protein of unknown function (DUF1005)
GVSSGRLLGKVVVPLDLRAAAAKPVVFHSGWVAIGKRRAGRKPAAAGAAFGGAAAGHAQLNLTVRAEPDPRFVFEFDGEPECSPQVLQVQGRMRQPMFTCKFSCRSNSDLRSRSVQSDPGNGGRNWLAKFGSERERAGKERKGWSVTVHDLSGSPVALASMVTPFVASPGTDRVSRSNPGGWLILRPVDGTWTPWGRLECWRERGGAGAGGDSLGYRFELVPDHTNSGVGVCVAESGVPVSKGGRFAIDLTAAQPFGRSGSPGCSPRGSGDFGHGLWPFGSFRGFVM

SEQ ID NO: 100107 - protein, 84 aa, Setaria italica
  Transcript Sequence Number=SeqID_34133
  Homolog annotation: Hit_ID=B6UQE3; Match level="QueryCoverage=96%, HitCoverage=20%, E-value=9e-22, Identity=61%"; Hit description=ALMT2 (Fragment)
EGCVEDYFSEADASNGEIPVRRAPSERSQGYRAVLNAKASEDSLANLARWEPAHGDFRFRHPYPLYQKIGAAMRCCAYCIDGAL

SEQ ID NO: 100108 - protein, 218 aa, Setaria italica
  misc_feature (208)..(208): Xaa can be any naturally occurring amino acid
  Transcript Sequence Number=SeqID_34134
  Gene Ontology: Mol. function=nucleic acid binding; Cellular component= ribonucleoprotein complex
  Homolog annotation: Hit_ID=P93396; Match level="QueryCoverage=43%, HitCoverage=40%, E-value=4e-26, Identity=60%"; Hit description =Transformer-SR ribonucleoprotein (Fragment)
  Pfam annotation: Domain name=RRM_1; Domain location=41-111; Score =80.9; E_value=4.7e-21; Accession=PF00076.14; Description=RNA recognition motif. (a.k.a. RRM, RBD, o
RSRSPARSQSRSPVPDPNYQARSRSRSHEREEEAVNRGNTLYVTGLSSRVTEREIKDYFSKEGRVVGCHVVLEPHTRVSRGFAFVTMDTVEEAERCIKYLNNSVMEGRNITVEKSRRGRPRTPTPGSYLGHRYERRDRGRGYRRGYGGGRDEDYRNGYGYRRSPPPMYSYRESRDYPSYRDTRDYPPYRDYSPHRGDPRDYYESRGGXGYSPPPYGGG

SEQ ID NO: 100109 - protein, 213 aa, Setaria italica
  Transcript Sequence Number=SeqID_34135
  Gene Ontology: Mol. function=nucleic acid binding; Cellular component= ribonucleoprotein complex
  Homolog annotation: Hit_ID=B9RCF0; Match level="QueryCoverage=38%, HitCoverage=39%, E-value=1e-25, Identity=67%"; Hit description =Arginine/serine-rich-splicing factor, putative
  Pfam annotation: Domain name=RRM_1; Domain location=66-136; Score =80.9; E_value=4.7e-21; Accession=PF00076.14; Description=RNA recognition motif. (a.k.a. RRM, RBD, o
  Subcellular localization annotation: CTP_CleavageSite=43; ConfidenceScore=5.80e-01
MADSPRRRYSRSPSPYSRGHPKARSRSRSPARSQSRSPVPDPRSQARSRSRSHEREEEAVNRGNTLYVTGLSSRVTEREIKDYFSKEGRVVGCHVVLEPHTRVSRGFAFVTMDTVEEAERCIKYLNNSVMEGRNITVEKKILCKLCAAIKILSSSISTLANTAPSVDSPKSYYAPQDSQQLNVAIFQLNLSVHLQLINGHCQLISQACAVPCA

SEQ ID NO: 100110 - protein, 42 aa, Setaria italica
  Transcript Sequence Number=SeqID_34136
LVTPAAGDGEEVVFRVQVLRGDLPEEITSKGATSDEPLVIVD

SEQ ID NO: 100111 - protein, 327 aa, Setaria italica
  misc_feature (224)..(224): Xaa can be any naturally occurring amino acid
  misc_feature (320)..(320): Xaa can be any naturally occurring amino acid
  Transcript Sequence Number=SeqID_34137
  Gene Ontology: Mol. function=ubiquitin-protein ligase activity; Cellular component=ubiquitin ligase complex; Biological process =ubiquitin-dependent protein catabolic process
  Homolog annotation: Hit_ID=Q7F1X9; Match level="QueryCoverage=99%, HitCoverage=39%, E-value=1e-159, Identity=83%"; Hit description =B1065G12.5 protein
  Pfam annotation: Domain name=Arm; Domain location=112-156; Score =13.5; E_value=0.24; Accession=PF00514.15; Description=Armadillobeta -catenin-like repeat
  Pfam annotation: Domain name=Arm; Domain location=158-196; Score=2.1; E_value=6.6; Accession=PF00514.15; Description=Armadillobeta-catenin -like repeat
  Pfam annotation: Domain name=Arm; Domain location=197-244; Score=9.3; E_value=0.81; Accession=PF00514.15; Description=Armadillobeta-catenin- like repeat
  Pfam module annotation: Pfam domain module=Arm::Arm::Arm; Domain location=112-156::158-196::197-244
WCEQNDFPVPDGPPGSFDVNWRLAYSDTEATGCVPVESFDSTNVKSVKVVPMESMRQEEPANSESGTLDDSSCNDFDLNEGYGNLLLLLHERSNMNKQCRLVEQIRYLLKDDEEARIQLGSNGFAEALVEFLRNAVNDGNEKAQEVGAMALFNLAVNNNRNKGLLLSAGVVDLLEQMISNPRLSGPSTALYLNLSCLPDAKAVIGSSQAVSFLVDCLYSQEGRXDTKSSSCKHDALYTLYNLSIHQASVPALLTAGIVDALHCLLTESPASEGLGWTEKALAVLISLAATQAGRKEIMSTPGLVSTLATLLDTGELTEQXQAVSCLW

SEQ ID NO: 100112 - protein, 446 aa, Setaria italica
  Transcript Sequence Number=SeqID_34138
  Gene Ontology: Mol. function=protein serine/threonine kinase activity; Cellular component=plasma membrane; Biological process =protein amino acid phosphorylation
  Homolog annotation: Hit_ID=B9SVV1; Match level="QueryCoverage=97%, HitCoverage=34%, E-value=1e-131, Identity=55%"; Hit description =Leucine-rich repeat receptor protein kinase EXS, putative
  Pfam annotation: Domain name=APH; Domain location=141-326; Score= -15.3; E_value=0.028; Accession=PF01636.15; Description =Phosphotransferase enzyme family
  Pfam annotation: Domain name=Pkinase; Domain location=138-432; Score =169.8; E_value=7.7e-48; Accession=PF00069.17; Description=Protein kinase domain
  Pfam annotation: Domain name=Pkinase_Tyr; Domain location=138-432; Score=84.1; E_value=5.1e-22; Accession=PF07714.9; Description =Protein tyrosine kinase
  Pfam annotation: Domain name=SKG6; Domain location=58-95; Score=10.8; E_value=0.043; Accession=PF08693.2; Description=Transmembrane alpha -helix domain
  Pfam module annotation: Pfam domain module=APH::Pkinase::Pkinase _Tyr::SKG6; Domain location=141-326::138-432::138-432::58-95
GAVPSQLAGMSSLVQLDLSSNQLEGRLGAEFGRWPQGAFADNVGLCGSPLRACSSGGGPSTLSSVTIALVSAAVTLSVVLLIIVLALMVVRRRGRRSREVNCTAFSSSSANTNRQLVVKGSARREFRWEAIMEATANLSDQFAIGSGGSGTVYRAELSTGETVAVKRIAHMDSDMLLHDKSFTREIKILGRVRHRHLVKLLGFITSHDAGAGGSMLVYEYMENGSLYDWLHGGVGGDGSRKKRVLGWDARLKVAAGLAQGVEYLHHDCVPRIVHRDIKSSNVLLDGDMEAHLGDFGLAKAVAENRQAAFGKDCTESASCFAGSYGYIAPECAYSLKATERSDVYSMGIVLMELVTGLLPTDKTFGGDMDMVRWVQSRMGAPLPAREQVFDPALKPLAPREESSMAEVLEVALRCTRTAPGERPTARQVSDLLLHVSLDYYRAGEKR

SEQ ID NO: 100113 - protein, 100 aa, Setaria italica
  Transcript Sequence Number=SeqID_34139
KSLTRLIPLLQYRQAKGAIRRRTGFPTAISPVPFLSGGRSGAGEGEEQGNRRAGVYRVDSLESMPRVSSPSPAMVEIGLPGAAAELLRGRIIFFSDLEDE

SEQ ID NO: 100114 - protein, 70 aa, Setaria italica
  Transcript Sequence Number=SeqID_34140
  Gene Ontology: Mol. function=protein serine/threonine kinase activity; Biological process=protein amino acid phosphorylation
  Homolog annotation: Hit_ID=Q5N8C4; Match level="QueryCoverage=100%, HitCoverage=6%, E-value=1e-29, Identity=90%"; Hit description =Putative receptor-like protein kinase 2
KNSTNNFSEINEIGSGGYGKVYKGTLANGQIAAIKRAQQGSMQGAAEFKNEIELLSRVHHKNLVTLVGFC

SEQ ID NO: 100115 - protein, 80 aa, Setaria italica
  Transcript Sequence Number=SeqID_34141
  Gene Ontology: Mol. function=nucleoside-triphosphatase activity; Cellular component=integral to membrane; Biological process=transport
  Homolog annotation: Hit_ID=Q8GU86; Match level="QueryCoverage=100%, HitCoverage=5%, E-value=9e-25, Identity=61%"; Hit description =Pleiotropic drug resistance protein 5
ASILVSFTLTSWNIFAGFLIPRPALPIWWRWYYWCDPVAWTIYGVIASQFGDIGRSVEVPGNLAGKAVKEVLKETLGMKH

SEQ ID NO: 100116 - protein, 39 aa, Setaria italica
  Transcript Sequence Number=SeqID_34142
IFDVTGLNFSLVEPNRPNTCPTSVLPTNDRVYINASREP

SEQ ID NO: 100117 - protein, 127 aa, Setaria italica
  misc_feature (28)..(28): Xaa can be any naturally occurring amino acid
  Transcript Sequence Number=SeqID_34143
  Gene Ontology: Mol. function=cyclopropane-fatty-acyl-phospholipid synthase activity; Biological process=lipid biosynthetic process
  Homolog annotation: Hit_ID=B6SV21; Match level="QueryCoverage=98%, HitCoverage=14%, E-value=3e-59, Identity=86%"; Hit description =Cyclopropane fatty acid synthase
EATHEELRILGAFQYVYSDIYLHCDKSXMPRSSSAWSSWNFLGTTSKGVCVTYWLNLLQNIESTDRPFLVTLNPPHVPDHVLLKWYTSHPVPSVAAAKASLELHHIQGNRGIWFCGAYQGYCFHQFI

SEQ ID NO: 100118 - protein, 114 aa, Setaria italica
  Transcript Sequence Number=SeqID_34144
MFIHMPKDRRRAALLERNSKMLMKNGVEVKELQSLELPLTPTLLSERITGLDRVLSEKIWTAFREEGFVDDEGYMKEDGRATPWKDALVKRGFWKEVSPLADHIQEELNLAYGY

SEQ ID NO: 100119 - protein, 170 aa, Setaria italica
  misc_feature (90)..(90): Xaa can be any naturally occurring amino acid
  Transcript Sequence Number=SeqID_34145
  Gene Ontology: Mol. function=binding
  Subcellular localization annotation: CTP_CleavageSite=43; ConfidenceScore=5.44e-01
AHRREDLGLGLDGALPRPLRSSSSSSRPTTTSFDSYQFDFGVNASRSSGSRPLRDQRPGAAANTSTRPATGASWTHQPASAKPAWTHQPXPAAASAAAGPGSGSTSMVGDIFGRSWSSAAPSSGLGIPQANNPALFSDLLGSALGGSGSSRTQSNAPLRSAAAPQASRPT

SEQ ID NO: 100120 - protein, 67 aa, Setaria italica
  misc_feature (53)..(53): Xaa can be any naturally occurring amino acid
  misc_feature (61)..(61): Xaa can be any naturally occurring amino acid
  Transcript Sequence Number=SeqID_34146
  Gene Ontology: Mol. function=hydrolase activity, acting on carbon -nitrogen (but not peptide) bonds, in linear amides; Cellular component=endoplasmic reticulum membrane; Biological process =ceramide metabolic process
  Homolog annotation: Hit_ID=B9RXD0; Match level="QueryCoverage=100%, HitCoverage=25%, E-value=7e-25, Identity=80%"; Hit description =Alkaline phytoceramidase, putative
MADSMVASFWGPVTSTTELCEENYAHSSYIAEFYNTISNVPCVLLALIGLVNXFRQGFEKXFSVLHI

SEQ ID NO: 100121 - protein, 75 aa, Setaria italica
  Transcript Sequence Number=SeqID_34147
  Gene Ontology: Mol. function=hydrolase activity, acting on carbon -nitrogen (but not peptide) bonds, in linear amides; Cellular component=endoplasmic reticulum membrane; Biological process =ceramide metabolic process
  Homolog annotation: Hit_ID=B9RXD0; Match level="QueryCoverage=92%, HitCoverage=26%, E-value=2e-27, Identity=84%"; Hit description =Alkaline phytoceramidase, putative
MADSMVASFWGPVTSTTELCEENYAHSSYIAEFYNTISNVPCVLLALIGLVNAFRQGFEKRFSVLHISNYCITLS

SEQ ID NO: 100122 - protein, 263 aa, Setaria italica
  misc_feature (17)..(17): Xaa can be any naturally occurring amino acid
  Transcript Sequence Number=SeqID_34148
  Gene Ontology: Mol. function=hydrolase activity, acting on carbon -nitrogen (but not peptide) bonds, in linear amides; Cellular component=endoplasmic reticulum membrane; Biological process =ceramide metabolic process
  Homolog annotation: Hit_ID=B9RXD0; Match level="QueryCoverage=94%, HitCoverage=97%, E-value=1e-110, Identity=74%"; Hit description =Alkaline phytoceramidase, putative
  Pfam annotation: Domain name=aPHC; Domain location=13-262; Score =357.5; E_value=2.6e-104; Accession=PF05875.4; Description=Alkaline phytoceramidase (aPHC)
VEIDFTDHDSMVASFWXPVTSTTELCEENYAHSSYIAEFYNTISNVPCVLLALIGLVNAFRQGFEKRFSVLHISNMILAIGSMIFHATLQHVLQQSDETPMVWEILLYMYVLYSPDWHYRSTMPTFLFLYGAAFAVVHFFARFQVVFKVHYIGLCLLCIPRMYKYYIQTKDVAAKRLAKLWVLTLTLGTLCWLVDRIFCKKLSHWYVNPQGHAWWHVLMGLNSYYANTFLMFCRAQQRGWEPRITHLLGFLPYVKVQKPEKRE

SEQ ID NO: 100123 - protein, 66 aa, Setaria italica
  Transcript Sequence Number=SeqID_34149
KYNAIEKAISHVKDDNKIQLGTADSSECESSHAESAAKCTVAKPGGLKHAGKGLNTDELEAKVFPH

SEQ ID NO: 100124 - protein, 140 aa, Setaria italica
  Transcript Sequence Number=SeqID_34150
  Subcellular localization annotation: CTP_CleavageSite=51; ConfidenceScore=5.31e-01
PEILSAFLFFCSFLFCFSLAVIFEPGSRAACTARQPPASGVRTGQARCRSRAAAQQCGCRGGCHRHVAGGGGCSRPSSSASCSRRPPSMAQGPKHLLQHQQLLLLGSLHLKVCCLVFPFLSCSPPARENGIALRLQRSSL

SEQ ID NO: 100125 - protein, 65 aa, Setaria italica
  Transcript Sequence Number=SeqID_34151
AAKLAVERLVVVGGTNIGQGLLVGTQVLLGRRHRNAVASMILLSDGQDTCLPPAIAQPNGGVAKS

SEQ ID NO: 100126 - protein, 168 aa, Setaria italica
  misc_feature (86)..(86): Xaa can be any naturally occurring amino acid
  misc_feature (153)..(153): Xaa can be any naturally occurring amino acid
  misc_feature (157)..(157): Xaa can be any naturally occurring amino acid
  Transcript Sequence Number=SeqID_34152
  Gene Ontology: Cellular component=chloroplast
  Homolog annotation: Hit_ID=B9RUY4; Match level="QueryCoverage=100%, HitCoverage=68%, E-value=2e-54, Identity=39%"; Hit description =Pentatricopeptide repeat-containing protein, putative
  Pfam annotation: Domain name=PPR; Domain location=106-140; Score =33.1; E_value=1.1e-06; Accession=PF01535.12; Description=PPR repeat
  Pfam annotation: Domain name=PPR; Domain location=4-38; Score=49.6; E_ value=1.2e-11; Accession=PF01535.12; Description=PPR repeat
  Pfam module annotation: Pfam domain module=PPR::PPR; Domain location =106-140::4-38
RDVFSWNVMVGGYGKAGLLEEALDLYHRMMWAGVRPDVYTFPCVLRSCGGVPDWRMGREVHAHVLRFGFGGEVDVLNALMTMYAKXCGDAVGARKVFDSMTVMDCISWNAMIAGHFENGECNTGLELFLTMLEEEVQPNLMTITSVTVASGLXTDVXFAMEMHGLAVK

SEQ ID NO: 100127 - protein, 182 aa, Setaria italica
  Transcript Sequence Number=SeqID_34153
  Gene Ontology: Mol. function=RNA-directed RNA polymerase activity
  Homolog annotation: Hit_ID=Q19VG2; Match level="QueryCoverage=97%, HitCoverage=15%, E-value=7e-94, Identity=91%"; Hit description=RNA -dependent RNA polymerase
  Pfam annotation: Domain name=RdRP; Domain location=57-181; Score= -144.7; E_value=9.2e-05; Accession=PF05183.4; Description=RNA dependent RNA polymerase
NSVWMFASNDSLSAESIRRWMGHFNDIRSVSKCAARMGQLFSSSRQTFEVSSYDVEVIPDIEVTTDGNKYIFSDGIGKISSRFARQIAKTIGLDPNNPPSAFQIRYGGYKGVIAVDPTSFYNLSLRPSMKKFESKSTMLNITNWSKSQPCYVNREIISLLSTLGIKDEIFLSMQQDDILLTL

SEQ ID NO: 100128 - protein, 848 aa, Setaria italica
  misc_feature (291)..(291): Xaa can be any naturally occurring amino acid
  misc_feature (305)..(305): Xaa can be any naturally occurring amino acid
  Transcript Sequence Number=SeqID_34154
  Gene Ontology: Mol. function=RNA-directed RNA polymerase activity
  Homolog annotation: Hit_ID=Q19VG2; Match level="QueryCoverage=99%, HitCoverage=74%, E-value=0.0, Identity=85%"; Hit description=RNA -dependent RNA polymerase
  Pfam annotation: Domain name=RdRP; Domain location=247-641; Score =565.3; E_value=7e-167; Accession=PF05183.4; Description=RNA dependent RNA polymerase
TSNLNEILFRLNSLVPMGKLVARHVNADLFKVLEDLPIGTLRRIFEKVSKLKSTCYEPLEFIRHEAHRMKISKKTLLSKKGEGEGKLLRCYRIHITPSKIYCLGPEEEVSNYVVKYHSQYASDFARVTFVDEDWSKLSPNALSARIEQGFFSTPLKTDLYHRILSILKEGFCIGPKKYEFLAFSASQLRGNSVWMFASNDSLSAESIRRWMGHFNDIRSVSKCAARMGQLFSSSRQTFEVSSYDVEVIPDIEVTTDGNKYIFSDGIGKISSRFARQIAKQLEVGSTAMTPXSHHTLFEKQKEGYXGVIAVDPTSFYNLSLRPSMKKFESKSTMLNITNWSKSQPCYVNREIISLLSTLGIKDEIFLSMQQDDMHESDEMLTNKEVALSVLGKIGGADTKIAAEMLLQGYEPSSEPYLLMILKAHRANRLTDIRTRCKIHVQKGRVLIGCLDETSKLDYGQVYIRITKNRKEQKYSEQPFFCNDDGKTAVIVGKVAISKNPCLHPGDVRVLEAIYDPGLDARGLVDCVVFPQRGDRPHPNECSGGDLDGDLFFITWDDKLIPEKVDAPMDYTATRPRIMDHVVTLEEIQKHFVSYMINDALGVISTAHLIHADRNPLKARSPECLQLAALHSMAVDFAKTGAPAEMPRALRPREFPDFMERWEKPMYVSNGVLGKLYRSALRHAENAEALLPEGPACSEYDPDLECPGFHDFLDAAEEHYEAYAEKLGTLMTYYSAEREDEILTGNIRNKLVYLRRDNKRYFEMKDRIIAAVDALHEEVRGWLRARREEDASKLASAWYHVTYHPCRRGEKRFWSFPWLACDTLLAVKAARRCRKRVEDAAAVPMDCDA

SEQ ID NO: 100129 - protein, 104 aa, Setaria italica
  Transcript Sequence Number=SeqID_34155
  Gene Ontology: Mol. function=protein disulfide oxidoreductase activity
MGCAGSKAATDVAVADVYRPPPTSVSLFDISAVEEPWRIAKNKAAGDDDEEDSSDEDEEEEETDDEEQEEEEEKPAVKTVVPLPLLDKLEGYELAPASWSEVSK

SEQ ID NO: 100130 - protein, 87 aa, Setaria italica
  Transcript Sequence Number=SeqID_34156
IVNTNKKRQIYRCKSNKIPWQTMPDVVPCAPMEKGDQHHKQLRENSQPRHRNHTICIMPPSKHASTGLGVGTLVFRNPLPLLFSRGL

SEQ ID NO: 100131 - protein, 219 aa, Setaria italica
  misc_feature (201)..(201): Xaa can be any naturally occurring amino acid
  Transcript Sequence Number=SeqID_34157
  Gene Ontology: Mol. function=1,3-beta-glucan synthase activity; Cellular component=1,3-beta-glucan synthase complex; Biological process=1,3-beta-glucan biosynthetic process
  Homolog annotation: Hit_ID=Q6K963; Match level="QueryCoverage=86%, HitCoverage=9%, E-value=1e-105, Identity=97%"; Hit description =Putative callose synthase 1 catalytic subunit
  Subcellular localization annotation: CTP_CleavageSite=23; ConfidenceScore=5.56e-01
MASSSGGRRMAPGGDSSSASPASAGAGAGPRRILRTQTAGNLGESIFDSEVVPSSLVEIAPILRVANEVEASNPRVAYLCRFYAFEKAHRLDPTSSGRGVRQFKTALLQRLERENDPTLKGRVKQSDAREMQSFYQHYYKKYIQALQNAADKADRAQLTKAYQTAAVLFEVLKAVNVSQKIEVDQSILETHNQVEEKKKLXSPYNILPLDPDSANQAIM

SEQ ID NO: 100132 - protein, 162 aa, Setaria italica
  Transcript Sequence Number=SeqID_34158
  Gene Ontology: Mol. function=metal ion binding
  Homolog annotation: Hit_ID=B6U0V7; Match level="QueryCoverage=91%, HitCoverage=32%, E-value=2e-48, Identity=63%"; Hit description =Protein binding protein
EPAPSTDQATTEDNSNQGLSGSASTLHDPITTPVWFSLVSSPNQKGGLQLPELSKSYLRIKDGSLQISFVQRYVAKKLDIGDENEVEILCHGKPVCPSSTLHGLVDLWPRREPEEPFPASLGAPAKEYVMVLCYRRRHRPLTPASSPRHQTTRLVRLSRSFV

SEQ ID NO: 100133 - protein, 116 aa, Setaria italica
  misc_feature (75)..(75): Xaa can be any naturally occurring amino acid
  Transcript Sequence Number=SeqID_34159
  Gene Ontology: Mol. function=oxidoreductase activity, acting on single donors with incorporation of molecular oxygen, incorporation of two atoms of oxygen; Cellular component=cytoplasm; Biological process=fatty acid biosynthetic process
  Homolog annotation: Hit_ID=A1XCH9; Match level="QueryCoverage=68%, HitCoverage=9%, E-value=1e-29, Identity=78%"; Hit description =Lipoxygenase
GGEEVGSRRRWPWLGPLGIWNPRQGGGGLVGVLAVGDFHASLLDGVHKILGWDEGVALRLVSATAAEPSNGGRGXLGNEAHLEEAVVSLKSKTNGETVFRVNFEWDESQGIPGAVL

SEQ ID NO: 100134 - protein, 89 aa, Setaria italica
  Transcript Sequence Number=SeqID_34160
  Gene Ontology: Mol. function=oxidoreductase activity, acting on single donors with incorporation of molecular oxygen, incorporation of two atoms of oxygen; Cellular component=cytoplasm; Biological process=fatty acid biosynthetic process
  Homolog annotation: Hit_ID=Q8W0V2; Match level="QueryCoverage=89%, HitCoverage=9%, E-value=3e-34, Identity=88%"; Hit description =Lipoxygenase
RVNAGEHLARVNPMMITRLTEFPPKSTLDPSKYGDQTSTITAEHIEKSLEGLTVQQALDGNRLFILDHHDRFMPFLIDVNILDHHVRVA

SEQ ID NO: 100135 - protein, 145 aa, Setaria italica
  misc_feature (56)..(56): Xaa can be any naturally occurring amino acid
  Transcript Sequence Number=SeqID_34161
  Gene Ontology: Mol. function=oxidoreductase activity, acting on single donors with incorporation of molecular oxygen, incorporation of two atoms of oxygen; Cellular component=cytoplasm; Biological process=fatty acid biosynthetic process
  Homolog annotation: Hit_ID=A1XCH9; Match level="QueryCoverage=92%, HitCoverage=15%, E-value=1e-58, Identity=76%"; Hit description =Lipoxygenase
  Pfam annotation: Domain name=Lipoxygenase; Domain location=1-145; Score=-379.7; E_value=0.089; Accession=PF00305.11; Description =Lipoxygenase
SLKLTFSITLKGYTVQNALKKNKLFILDHHDHFMPYLDRINKLEGNFIYASRTLLXLKDDGTLKPVAIELSLPHPDGQQHGADSKVYTPAHTGVAGHIWQLAKAYACVNDSAWHQLISHWLNTHAVIEPFVIATNQQLVHGMHHT

SEQ ID NO: 100136 - protein, 146 aa, Setaria italica
  misc_feature (16)..(16): Xaa can be any naturally occurring amino acid
  misc_feature (65)..(65): Xaa can be any naturally occurring amino acid
  Transcript Sequence Number=SeqID_34162
  Gene Ontology: Mol. function=oxidoreductase activity, acting on single donors with incorporation of molecular oxygen, incorporation of two atoms of oxygen; Cellular component=cytoplasm; Biological process=fatty acid biosynthetic process
  Homolog annotation: Hit_ID=B4FLR8; Match level="QueryCoverage=94%, HitCoverage=27%, E-value=2e-33, Identity=60%"; Hit description =Lipoxygenase
RRALHAAVNFGAVPLXAGYLPNRPTVSRRRDAREPGARTAYAELERDPGAGGFIHTITSQDPRTXISGISLIEILSKHSSDEVYLGQRDEPERWTSDAKALDAFKRFGSRLVEIEKRIVKMNNDPANKNRTGPVTSDVLGYSSMYG

SEQ ID NO: 100137 - protein, 95 aa, Setaria italica
  Transcript Sequence Number=SeqID_34163
  Homolog annotation: Hit_ID=B6SI20; Match level="QueryCoverage=72%, HitCoverage=14%, E-value=1e-10, Identity=53%"; Hit description=Ovate protein
  Pfam annotation: Domain name=DUF623; Domain location=29-95; Score =84.1; E_value=5.1e-22; Accession=PF04844.5; Description=Protein of unknown function, DUF623
HATRTDLRKRGTSTASAATDGGFAVVKRSADPYEDFRKSMQEMIAEWPAGGDVGDAGEGEHSAERLLETYLVLNSPRHYPAILAAFADVRETFCP

SEQ ID NO: 100138 - protein, 123 aa, Setaria italica
  Transcript Sequence Number=SeqID_34164
  Gene Ontology: Mol. function=oxidoreductase activity, acting on single donors with incorporation of molecular oxygen, incorporation of two atoms of oxygen; Cellular component=cytoplasm; Biological process=fatty acid biosynthetic process
  Homolog annotation: Hit_ID=A1XCH8; Match level="QueryCoverage=96%, HitCoverage=13%, E-value=2e-49, Identity=79%"; Hit description =Lipoxygenase
HPRQVPGRGTVVFVANSWVYPQSKYRYNRVFFANDTYLPSQMPAALKPYRDDELRNLRGDDQQGPYQAHDRVYRYDVYNDLGNPDGGNPRPTLGGSKHHPYPRRGRTGRRPTETDHDCESRLT

SEQ ID NO: 100139 - protein, 175 aa, Setaria italica
  misc_feature (139)..(139): Xaa can be any naturally occurring amino acid
  Transcript Sequence Number=SeqID_34165
  Gene Ontology: Mol. function=oxidoreductase activity, acting on single donors with incorporation of molecular oxygen, incorporation of two atoms of oxygen; Cellular component=cytoplasm; Biological process=fatty acid biosynthetic process
  Homolog annotation: Hit_ID=B4FLR8; Match level="QueryCoverage=94%, HitCoverage=31%, E-value=9e-80, Identity=85%"; Hit description =Lipoxygenase
CLRTYSILGLVVRSSCHAAVNFGQYPYAGYLPNRPTVSRRPMPEPGTKEYAQLEAGQEEADKVYIRTITSQFQTILGISLIEILSKHSSDEVYLGQRDEPERWTSDAKALDAFKRFGSRLVEIENRIKTMNDNPVSDRXGPVEMPYMLLYPNTSDVDGTKGEGLTAMGIPNSISI

SEQ ID NO: 100140 - protein, 190 aa, Setaria italica
  misc_feature (16)..(16): Xaa can be any naturally occurring amino acid
  Transcript Sequence Number=SeqID_34166
  Gene Ontology: Mol. function=oxidoreductase activity, acting on single donors with incorporation of molecular oxygen, incorporation of two atoms of oxygen; Cellular component=cytoplasm; Biological process=fatty acid biosynthetic process
  Homolog annotation: Hit_ID=Q8W0V2; Match level="QueryCoverage=95%, HitCoverage=20%, E-value=2e-81, Identity=80%"; Hit description =Lipoxygenase
  Pfam annotation: Domain name=Lipoxygenase; Domain location=1-190; Score=-223.0; E_value=1.3e-08; Accession=PF00305.11; Description =Lipoxygenase
PADLVKRGVAVPDPSXSPYKVRLLIQDYPYASDGLAIWHAIERWVGEYLAIYYPNDATLQGDAELQAWWKEVREVGHGDLKDAPWWPRMQAVTELASACTTIIWIASALHAAVNFGQYPYAGYLPNRPTVSRRRMPEPGTEAYAELERDPELGFIHTITSQIQTIIGISLIEVLSKHSSDEVVTLGLVVV

SEQ ID NO: 100141 - protein, 70 aa, Setaria italica
  Transcript Sequence Number=SeqID_34167
  Gene Ontology: Mol. function=oxidoreductase activity, acting on single donors with incorporation of molecular oxygen, incorporation of two atoms of oxygen; Cellular component=cytoplasm; Biological process=fatty acid biosynthetic process
  Homolog annotation: Hit_ID=B8A363; Match level="QueryCoverage=81%, HitCoverage=11%, E-value=8e-15, Identity=70%"; Hit description =Lipoxygenase
RERPGVRGPLRGVALVEIEGKVVAENRDPQLKNRSGPAEFPYTLLYPNTSDTTGAAAGLTAKGIPNSISI

SEQ ID NO: 100142 - protein, 160 aa, Setaria italica
  Transcript Sequence Number=SeqID_34168
  Gene Ontology: Mol. function=oxidoreductase activity, acting on single donors with incorporation of molecular oxygen, incorporation of two atoms of oxygen; Cellular component=cytoplasm; Biological process=fatty acid biosynthetic process
  Homolog annotation: Hit_ID=A1XCH9; Match level="QueryCoverage=100%, HitCoverage=18%, E-value=6e-75, Identity=83%"; Hit description =Lipoxygenase
  Pfam annotation: Domain name=PLAT; Domain location=58-160; Score =95.2; E_value=2.3e-25; Accession=PF01477.15; Description=PLATLH2 domain
MFWHGVADRLRGKNKEAWNEGKIRGTVVLVKKEVLAVGDFHASLLDGVHKILGWDEGVALRLVSATAAEPSNGGRGKLGNEAHLEEAVVSLKSKTNGETVFRVNFEWDESQGIPGAVLVRNLQHAEFFLKTITLEGVPGKGTVVFVANSWVFPHRLYTQD

SEQ ID NO: 100143 - protein, 888 aa, Setaria italica
  misc_feature (484)..(484): Xaa can be any naturally occurring amino acid
  Transcript Sequence Number=SeqID_34169
  Gene Ontology: Mol. function=oxidoreductase activity, acting on single donors with incorporation of molecular oxygen, incorporation of two atoms of oxygen; Cellular component=cytoplasm; Biological process=fatty acid biosynthetic process
  Homolog annotation: Hit_ID=A1XCH9; Match level="QueryCoverage=100%, HitCoverage=100%, E-value=0.0, Identity=77%"; Hit description =Lipoxygenase
  Pfam annotation: Domain name=Lipoxygenase; Domain location=175-865; Score=1353.9; E_value=0; Accession=PF00305.11; Description =Lipoxygenase
  Pfam annotation: Domain name=PLAT; Domain location=58-163; Score =109.9; E_value=8.4e-30; Accession=PF01477.15; Description=PLATLH2 domain
  Pfam module annotation: Pfam domain module=Lipoxygenase::PLAT; Domain location=175-865::58-163
MLLHAVADRLAGKNKAAWKHGRIRGTAVLVRKEALIFDHFHASLLDGLHRFLGQDTGLAFQLVSATAADPKNGGKGKDGKPAHLEELVMTVKSTEAGESMFRVNFEWDDSQGIPGAVIVRNHQTEEVFLKTLTLEGVPGKGTVVFVANSWVYNHNHYAHDRIFFANDTYLPSKMPAPLVPYRNEELKILRGDNNPGPYKEHDRVYRYDYYNDLGDPDHGKDKVRPILGGSKEHPYPRRGRTGRRPTKTDPNSESRLFLLNLNIYVPRDERFGHLKMSDFLGYSLKAVIEAVVPAIEAYTDDTRNEFDSFEDILGLYELGPEAPNNPLMAEIRKRIPSELLRSMLPVGAHDDPLKMPLPNVIQSDARNKVPQDKFGWRTDEEFAREMLAGVNPVVIRRLKDFPAKSTLDRRVYGDHTSKITEAHIQHNLEGLTVQEALRKNRLFILDHHDHFMPYLDQINKLKGNFIYATRTLLFLKEDGTLKPXLAIELSLPHPNGQRHGAVSKVYTPAHSGVERHIWQLAKAYVCVNDSGWHQLISHWLNTHAVIEPFVIATNRQLSVVHPVHKLLSPHFRDTMNINALARQTLINAGGIFELTVFPGKYALEMSSFVYNNWNLTEQALPNDLIKRGVAVPDASDPFGVRLLIKDYPYAKDGLMIWWTIEQWVKEYLAIYYHNDGEVRRDAELQAWWKEVREVAHGDLKDRDWWPKMITVKELTRTCTTIIWVASALHAAVNFGQYPYAGYLPNRPTVSRRPMPEPGTKEYAQLEAGQEEADKVYIRTITSQLQTILGISLIEILSKHSSDEVYLGQRDEPERWTSDAKALDAFKRFGSRLVEIEKRIVKMNNDPANKNRTGPVKMPYMLLYPNTSDVTGEKGEGLKAMGIPNSISI

SEQ ID NO: 100144 - protein, 880 aa, Setaria italica
  misc_feature (676)..(676): Xaa can be any naturally occurring amino acid
  misc_feature (815)..(815): Xaa can be any naturally occurring amino acid
  Transcript Sequence Number=SeqID_34170
  Gene Ontology: Mol. function=oxidoreductase activity, acting on single donors with incorporation of molecular oxygen, incorporation of two atoms of oxygen; Cellular component=cytoplasm; Biological process=fatty acid biosynthetic process
  Homolog annotation: Hit_ID=A1XCH9; Match level="QueryCoverage=92%, HitCoverage=91%, E-value=0.0, Identity=88%"; Hit description =Lipoxygenase
  Pfam annotation: Domain name=Lipoxygenase; Domain location=166-857; Score=1330.2; E_value=0; Accession=PF00305.11; Description =Lipoxygenase
  Pfam annotation: Domain name=PLAT; Domain location=48-154; Score =87.3; E_value=5.6e-23; Accession=PF01477.15; Description=PLATLH2 domain
  Pfam module annotation: Pfam domain module=Lipoxygenase::PLAT; Domain location=166-857::48-154
DTGNLRIRCSFIVNTQFRVDGTRRRSGPSEILLKILQGAFSLDLAAAVCVNGFSAVVDRFAGNGGRGKLGNEAHLEEAVVSLKSKTNGETVFRVNFEWDESQGIPGAVLVRNLQHAEFFLKTITLEGVPGKGTVVFVANSWVFPHRLYTQDRIFFANDTYLPSKMPAALVPYRQDELKILQGDNNAGPYKEHDRVYRYDFYNDLGEPDKGEIHARPILGGSQEHPYPRRCRTGRDPTETDPNSESRLFLLNLNIYVPRDERFGHLKMSDFLGYSLKAIIEAVLPTIGTFIDDTPKEFDSFEDILGLYELGPEAPNHPIIAAIREKIPSEFLRSILPNGSHDHPLKMPLPNIIKSDVLKKAPEFNFGWRTDEEFGRETLAGVNPVIIKRLTEFPVKSTLDLRQYGDHTSKITEAHIQHNLEGYTVQNALKKNKLFILDHHDHFMPYLDRINKLEGNFIYASRTLLFLKDDGTLKPVAIELSLPHPDGQQHGADSKVYTPAHTGVAGHIWQLAKAYACVNDSAWHQLISHWLNTHAVIEPFVIATNRQLSVVHPVHKLLSPHYRDTLNINALARQTLINAGGIFELTVFPGKYALEMSSDVYKSWNFNEQALPADLVKRGVAEPDQSSPYGVRLLIKDYPYAVDGLVIWWAIERWVKEYLDIYYPSDSELQRDVELQXAWWKEVREEAHGDLKDRDWWPKMDTVQQLARTCTTIIWVASALHAAVNFGQYPYAGYLPNRPTVSRRPMPEPGTKEYAQLEAGQEEADKVYIRTITSQFQTILGISLIEILSKHSSDEVYLGQRDEPERWTSDAKALDXAFKRFGSRLVEIENRIKTMNDNPVFKNRKGPVEMPYMLLYPNTSDVDGTKGEGLTAMGIPNSISI

SEQ ID NO: 100145 - protein, 814 aa, Setaria italica
  misc_feature (79)..(79): Xaa can be any naturally occurring amino acid
  misc_feature (174)..(174): Xaa can be any naturally occurring amino acid
  misc_feature (225)..(225): Xaa can be any naturally occurring amino acid
  misc_feature (242)..(242): Xaa can be any naturally occurring amino acid
  misc_feature (411)..(411): Xaa can be any naturally occurring amino acid
  misc_feature (457)..(457): Xaa can be any naturally occurring amino acid
  misc_feature (668)..(668): Xaa can be any naturally occurring amino acid
  misc_feature (693)..(693): Xaa can be any naturally occurring amino acid
  misc_feature (701)..(701): Xaa can be any naturally occurring amino acid
  misc_feature (782)..(782): Xaa can be any naturally occurring amino acid
  Transcript Sequence Number=SeqID_34171
  Gene Ontology: Mol. function=oxidoreductase activity, acting on single donors with incorporation of molecular oxygen, incorporation of two atoms of oxygen; Cellular component=cytoplasm; Biological process=fatty acid biosynthetic process
  Homolog annotation: Hit_ID=Q8W0V2; Match level="QueryCoverage=98%, HitCoverage=91%, E-value=0.0, Identity=88%"; Hit description =Lipoxygenase
  Pfam annotation: Domain name=Lipoxygenase; Domain location=113-792; Score=1325.0; E_value=0; Accession=PF00305.11; Description =Lipoxygenase
  Pfam annotation: Domain name=PLAT; Domain location=3-101; Score=82.2; E_value=1.9e-21; Accession=PF01477.15; Description=PLATLH2 domain
  Pfam module annotation: Pfam domain module=Lipoxygenase::PLAT; Domain location=113-792::3-101
  Subcellular localization annotation: CTP_CleavageSite=12; ConfidenceScore=5.01e-01
MMAPGTPSFSTSQSKATPNLEQWLTSLPSLTTGESKFGVAFDWEVEKLGVPGAIIVKNYHSAEFFLKTITLDEVPGRGXAVTFVANSWVYPVDKYRYNRVFFSNDTYLPSQMPAALKPYRDDELRNLRGDDQQGPYEDHDRVYRYDVYNDLGEPDRGNPRPVLGGSDDHPYPRXRCRTGRKPTTTDPNSESRLSLVEQIYVPRDERFGHLKMSDFLGYAIKAITXQGIVPAVRTYVDTTPGXEFDSFQDIINLYEGGIKLPKIQALEDMRKLFPLQLVKDLLPAGGDYLLKLPIPHIIKEDKNAWRTDEEFAREVLAGVNPMMITRLTEFPPKSTLDPSKYGDQTSTITAEHIEKSLEGLTVQQALDGNRLFILDHHDRFMPFLIDVNNLEGNFIYATRTLFFLRGDGRLXPLAIELSEPYIDGGLTKAKSKVYTPASSGVEAWIWQLAKAYVAVNXDSGWHQLISHWLNTHAVMEPFVIATNRQLSVTHPVHKLLHPHYRDTMTINALARQTLINGGGIFEMTVFPGKYALTMSSVVYKDWNFTEQGLPADLVKRGVAVPDPSSPYKVRLLIQDYPYASDGLAIWHAIERWVGEYLAIYYPNDATLQGDAELQAWWKEVREVGHGDLKDAPWWPRMQAVTELASACTTIIWIASALHAAVNFGQYPXYAGYLPNRPTVSRRRMPEPGTEAYXSLERDPEXGFIHTITSQIQTIIGISLIEVLSKHSSDEVYLGQRDTPEWTSDARALAAFKRFSDALVEIEGKVVAENRDPQLKNRSGPAXEFPYTLLYPNTSDTTGAAAGLTAKGIPNSISI

SEQ ID NO: 100146 - protein, 104 aa, Setaria italica
  Transcript Sequence Number=SeqID_34172
  Gene Ontology: Mol. function=structural constituent of ribosome; Cellular component=ribonucleoprotein complex; Biological process =translation
  Homolog annotation: Hit_ID=B6TLK0; Match level="QueryCoverage=100%, HitCoverage=100%, E-value=7e-47, Identity=84%"; Hit description=30S ribosomal protein S17
  Pfam annotation: Domain name=Ribosomal_S17; Domain location=6-74; Score=104.4; E_value=3.9e-28; Accession=PF00366.12; Description =Ribosomal protein S17
MKPVVGVVVSNKMQKSVVVAVDHLFHHKMYNRYVKRTSKFMAHDEEDACNIGDRVRLDPSRPLSRHKHWVVAEILRRAKMYVPPSATASSENDTKARQAGVATK

SEQ ID NO: 100147 - protein, 473 aa, Setaria italica
  Transcript Sequence Number=SeqID_34173
  Gene Ontology: Mol. function=transporter activity; Cellular component= membrane; Biological process=transport
  Homolog annotation: Hit_ID=B9N9Y7; Match level="QueryCoverage=99%, HitCoverage=86%, E-value=0.0, Identity=72%"; Hit description=Nramp transporter
  Pfam annotation: Domain name=LacY_symp; Domain location=101-389; Score=-322.6; E_value=0.09; Accession=PF01306.11; Description=LacY protonsugar symporter
  Pfam annotation: Domain name=Nramp; Domain location=1-355; Score =602.9; E_value=3.2e-178; Accession=PF01566.10; Description=Natural resistance-associated macrophage protein
  Pfam annotation: Domain name=PHO4; Domain location=11-262; Score= -191.9; E_value=0.092; Accession=PF01384.12; Description=Phosphate transporter family
  Pfam module annotation: Pfam domain module=LacY_symp::Nramp::PHO4; Domain location=101-389::1-355::11-262
QYKYELLWIILVASCAALIIQSLAARLGVVTGKHLAEHCRAEYPKVTNFVLWILAELAVVACDIPEVIGTAFALNMLFRIPVWCGVLITGLSTLMLLLLQQYGVRKLEFLIAFLVFLIATCFLVELGYSKPDASEVVRGLFVPELKGNGATGLAISLLGAMVMPHNLFLHSALVLSRKVPRSVHGIKEACRFYTIESAFALTVAFLINISIISVSGAVCGSGNLNPEDQANCSDLDLNKASFLLKNVLGTWSSKLFAVALLASGQSSTITGTYAGQYVMQGFLDLRMTPWIRNLVTRSLAILPSLIVSIIGGSSAAGQLIIIASMILSFELPFALVPLLKFTSSKTKMGQHTNSIFTSVLTWVIGSLIVIINTYFLVTSFVKLLLHSGLSTVSQVFSGIFGFLGMLIYMAAILYLVFRRNRKSTQPLLESDPELAASDHSTGAGAEGGSLGHLPREDISSMQLPQQRAGTDLD

SEQ ID NO: 100148 - protein, 109 aa, Setaria italica
  Transcript Sequence Number=SeqID_34174
  Subcellular localization annotation: CTP_CleavageSite=46; ConfidenceScore=5.24e-01
GFWQTLGTSVHVVGNYLIFFFKKVNRGNRGALSLFLLCPLVFPGPMALAEGPARYPCSPVAWLGLPDLCNWATGAASGEEEEKSTTTLAGACCSMPLPAAAAVLRPLAD

SEQ ID NO: 100149 - protein, 106 aa, Setaria italica
  Transcript Sequence Number=SeqID_34175
VSIVTLHMEQGPSKGTSTKHSIWILDNGYQCTMVQYKTLAMQNLRRHVNQASVQKYKYTTFLNHFGAVWFMNKFTMGNGEDKSLASQNQGHQSGGQDFGLLAKKMN

SEQ ID NO: 100150 - protein, 57 aa, Setaria italica
  Transcript Sequence Number=SeqID_34176
  Gene Ontology: Mol. function=binding; Cellular component=chloroplast; Biological process=regulation of transcription, DNA-dependent
  Homolog annotation: Hit_ID=Q53NS3; Match level="QueryCoverage=100%, HitCoverage=8%, E-value=2e-24, Identity=94%"; Hit description =Pentatricopeptide, putative, expressed
SVLSGKRLDLHRRILALIRENDLDEAALLTRHSIYSNCRPTVFTCNAVLAALLRQAR

SEQ ID NO: 100151 - protein, 82 aa, Setaria italica
  Transcript Sequence Number=SeqID_34177
  Gene Ontology: Mol. function=structural constituent of ribosome; Cellular component=ribonucleoprotein complex; Biological process =translation
  Homolog annotation: Hit_ID=Q06030; Match level="QueryCoverage=91%, HitCoverage=43%, E-value=1e-30, Identity=94%"; Hit description=50S ribosomal protein L12-1, chloroplastic
  Pfam annotation: Domain name=Ribosomal_L12; Domain location=14-82; Score=124.1; E_value=4.4e-34; Accession=PF00542.11; Description =Ribosomal protein L7L12 C-terminal domain
AGGEEAAAPVEKTEFDVVIEEVPSSARIATIKVVRALTNLALKEAKDLIEGLPKKLKEAVSKDEAEDAKKQLEEVGAKVSIA

SEQ ID NO: 100152 - protein, 60 aa, Setaria italica
  Transcript Sequence Number=SeqID_34178
VHLKVAVPQAPPLKGAEDMLQDNWRSNAVVEEMFGRMALQITDYPGSGPNDRHTPKAPGP

SEQ ID NO: 100153 - protein, 62 aa, Setaria italica
  Transcript Sequence Number=SeqID_34179
PVNSYSFSAFPISPCIKVEAQLQLYNAHSCRKIMKRNIGNLFACYSNYLSIFSFLLSKFRLN

SEQ ID NO: 100154 - protein, 176 aa, Setaria italica
  misc_feature (3)..(3): Xaa can be any naturally occurring amino acid
  Transcript Sequence Number=SeqID_34180
  Gene Ontology: Mol. function=binding
  Homolog annotation: Hit_ID=Q9M8J7; Match level="QueryCoverage=71%, HitCoverage=15%, E-value=2e-25, Identity=51%"; Hit description =F28L1.15 protein
RSXSRFFRHVMHAIADPAAAVGGGGGVDDEARARAVMFQRQVVAFMKRRAWHAPDVSLLPYTGWVFVSRKIGRLLNMLQVLSAFACVALSLMRLWKHDFGGDGNMRPALLLFYTLALVEASLFLLEKAYWTWKVSIRKLLHQVSAECELGEYGLVALTRFFYDAYSRCIAGSIFDG

SEQ ID NO: 100155 - protein, 185 aa, Setaria italica
  Transcript Sequence Number=SeqID_34181
  Gene Ontology: Mol. function=hydrolase activity
  Homolog annotation: Hit_ID=Q9FX41; Match level="QueryCoverage=98%, HitCoverage=44%, E-value=6e-67, Identity=67%"; Hit description =Lysophospholipase homolog, putative
QGLKVYAMDWIGHGGSDGVHGYVSSLDHAVGDLKEFLEDIVLEENHGLPCFLFGHSTGGAIVLKAALDPCVKLHVEGVVLTSPAIHVQPSHPIIKVVAPIFSVLAPKYRVSALHKRGPPVSRDPEALKMKYSDPLVYTGPIRVRTGNEILRISSYLQRNLSRVTVPFLVLHGTADTITDPRAYPR

SEQ ID NO: 100156 - protein, 59 aa, Setaria italica
  Transcript Sequence Number=SeqID_34182
  Gene Ontology: Mol. function=serine-type peptidase activity; Cellular component=membrane; Biological process=proteolysis
  Homolog annotation: Hit_ID=Q9FNF6; Match level="QueryCoverage=96%, HitCoverage=7%, E-value=1e-11, Identity=54%"; Hit description =Dipeptidyl peptidase IV-like protein
EETVGRPLPGYEAPTGLSFSPDDRRIAFLFSPDGTLHRSVFIFDIADGRRELLFTPPTA

SEQ ID NO: 100157 - protein, 57 aa, Setaria italica
  Transcript Sequence Number=SeqID_34183
DYGCPSPFVSLRLRAIALVFSMVEVYNLRIGLFSLHALSYFRDTLFTFLGETLGPTL

SEQ ID NO: 100158 - protein, 56 aa, Setaria italica
  Transcript Sequence Number=SeqID_34184
SNTRGLNIFRKIIRHLTGVMLMSLCPTPITRVIDDCGTSATQLGDTEVNHRTCILN

SEQ ID NO: 100159 - protein, 205 aa, Setaria italica
  Transcript Sequence Number=SeqID_34185
  Gene Ontology: Mol. function=structural constituent of ribosome; Cellular component=intracellular; Biological process=translation
  Homolog annotation: Hit_ID=B6T3L4; Match level="QueryCoverage=90%, HitCoverage=91%, E-value=2e-88, Identity=88%"; Hit description =Ribosomal protein L9, N-terminal domain containing protein
  Pfam annotation: Domain name=Ribosomal_L9_N; Domain location=35-83; Score=45.1; E_value=2.7e-10; Accession=PF01281.11; Description =Ribosomal protein L9, N-terminal domain
MASARAALLLRRQCLGAAAANPYLFSGHGLRYRKLEVILTTTIDKLGKAGEVVKVAPGHFRNHLMPKMLAVPNMDKFAILIREQRKLYQREEEVVKEVTKEDDDARLQEERLKQYQTAAKRLDNALLVLRRFISTGNELRTPVTKDEIVSEVARQLNINIHPDNLHLQSPLASLGEFELPLRLPQDIPRPEGKLQWTLNVKIRRK

SEQ ID NO: 100160 - protein, 157 aa, Setaria italica
  misc_feature (104)..(104): Xaa can be any naturally occurring amino acid
  Transcript Sequence Number=SeqID_34186
  Gene Ontology: Mol. function=binding; Cellular component=nuclear pore; Biological process=protein import into nucleus, docking
  Homolog annotation: Hit_ID=Q10MW7; Match level="QueryCoverage=99%, HitCoverage=14%, E-value=5e-58, Identity=68%"; Hit description =Importin-beta N-terminal domain containing protein
WNLWKSDVQTILQNLSMLSQRNDIDSILEQSNDLILICDRWLLCLKIVRQLIFSGYASDSRTAQDVWQVREVCPAVLTAIKSLLPYYDSFKDKQAKLWDFAKRXCIKLMKVLVTLQGRHPYSFVHETVLPATVDFCLNMITNSEQAGTSFEEFLIQS

SEQ ID NO: 100161 - protein, 104 aa, Setaria italica
  Transcript Sequence Number=SeqID_34187
LLHYYIYAAGGNETHQKGKKGRKNKKVGKKKKTKQNICVQSLYKDHTANSPRISGKKVIPKTTSVTRWAHLPRRRRRAHRWRPLAAAAAAAAGAEEGESRDRRG

SEQ ID NO: 100162 - protein, 464 aa, Setaria italica
  misc_feature (152)..(152): Xaa can be any naturally occurring amino acid
  Transcript Sequence Number=SeqID_34188
  Gene Ontology: Mol. function=catalytic activity; Biological process =metabolic process
  Homolog annotation: Hit_ID=B6ST13; Match level="QueryCoverage=91%, HitCoverage=74%, E-value=0.0, Identity=82%"; Hit description=AMP binding protein
  Pfam annotation: Domain name=AMP-binding; Domain location=25-446; Score=274.0; E_value=3.5e-79; Accession=PF00501.20; Description=AMP -binding enzyme
MFLPNQFVILINLCLLPCLGIIQKATAIVVVVAVQVAVFAQNIPAFCELHFGIPMAGAVICALNSRHDAGMVSVLLQHSEAKVLFVDAALLDTAQEALRLMSKAGARSPTVVLIKEVLDEPAVPADHHQYHEYEALLSSGGGGGSPEFVIRXWPADENEPIALNYTSGTTSRPKGVVYSHRGAYLNTLASVLLNDMAAMPVYLWTVPMFHCNGWCLVWGVAAQGGTNVCLRKVSSAGIFDAVARHGVTHMGGAPTVLSMVVNATAEERRPLPGGRPVTVMTGGAPPPPQVLFRMEELGFLVIHSYGLTETYGPATVCTWKPEWDALPAAERAAIKSRQGLHHLGLEVDVKDPATMRSVPADGRTMGEVMFRGNTVMSGYYKDAAATAEAMAGGWLRSGDLAVRHADGYVKIRDRSKDIIISGGENISTIEVEAALFAHPAVAEAAVVGRPDEYWGETPCAFVTL

SEQ ID NO: 100163 - protein, 234 aa, Setaria italica
  misc_feature (65)..(65): Xaa can be any naturally occurring amino acid
  misc_feature (225)..(225): Xaa can be any naturally occurring amino acid
  Transcript Sequence Number=SeqID_34189
  Gene Ontology: Mol. function=phosphopantetheine binding
  Homolog annotation: Hit_ID=Q6ZI81; Match level="QueryCoverage=71%, HitCoverage=22%, E-value=1e-65, Identity=71%"; Hit description =Putative T-complex protein 11
  Subcellular localization annotation: CTP_CleavageSite=33; ConfidenceScore=5.41e-01
FVFVLSQSFSSSKPENIDHLLKHLGSPKRRILPSSAGRSKVTPKKAVRNNDSSKVPRYSQRIALXAYMILGHPKSVLSGQGEREKLLMDSATNFVKEFELLVKTILDALDGACILKQSELDVASPGCSSYEESSSIVADRKKFRTQLVAFDKAWCAYLYHFVVWKAKDAESLEEDLIRAACRLELSMIQTCKITNEGQSDNFRGNLKAIQKQVAEDQKLLRERIXHLGGEAGIE

SEQ ID NO: 100164 - protein, 205 aa, Setaria italica
  misc_feature (17)..(17): Xaa can be any naturally occurring amino acid
  Transcript Sequence Number=SeqID_34190
  Gene Ontology: Mol. function=protein serine/threonine kinase activity; Biological process=protein amino acid phosphorylation
  Homolog annotation: Hit_ID=B6SZ72; Match level="QueryCoverage=94%, HitCoverage=34%, E-value=1e-98, Identity=88%"; Hit description=ATP binding protein
  Pfam annotation: Domain name=Pkinase; Domain location=1-179; Score =78.1; E_value=3.3e-20; Accession=PF00069.17; Description=Protein kinase domain
  Pfam annotation: Domain name=Pkinase_Tyr; Domain location=1-179; Score=90.1; E_value=8e-24; Accession=PF07714.9; Description=Protein tyrosine kinase
  Pfam module annotation: Pfam domain module=Pkinase::Pkinase_Tyr; Domain location=1-179::1-179
VIVTEYMPGGNLYDFLXHKQKNTVDLTMVLRIAIGISRGMDYLHQNNIVHRDLKTANLLMGSDHVVKIADFGVSRNPPQEGDMTAETGTYRWMAPEVINHKPYDHRADVFSFAVVLWELVTSKMPYENLTPLQAALGVRQGMRLEIPSWVHPQLSKLIQQCWDENPNVRPSFAEITAELEDMLRHLQGSKGSNRHSKGKVHKKSQ

SEQ ID NO: 100165 - protein, 69 aa, Setaria italica
  misc_feature (49)..(49): Xaa can be any naturally occurring amino acid
  Transcript Sequence Number=SeqID_34191
  Gene Ontology: Mol. function=ligase activity; Biological process =response to auxin stimulus
  Homolog annotation: Hit_ID=Q5NAZ7; Match level="QueryCoverage=98%, HitCoverage=14%, E-value=4e-16, Identity=67%"; Hit description =Probable indole-3-acetic acid-amido synthetase GH3.3
MKMPESKRSEGFCGEAVITEFEALTRDAAAVQRETLRRILADNAGTEYXRDRGLAGRTDAASFRACVPL

SEQ ID NO: 100166 - protein, 81 aa, Setaria italica
  Transcript Sequence Number=SeqID_34192
  Gene Ontology: Cellular component=integral to membrane
  Homolog annotation: Hit_ID=Q9FYQ8; Match level="QueryCoverage=72%, HitCoverage=8%, E-value=2e-21, Identity=88%"; Hit description =Endosomal protein-like
LVNSFLSSIGGVLNYLTILLCYFVINYLVFDLKSLSGPVSATLYIGYSLFMVIAIMLATGTVGFISSFCFVHYLFSSVKAD

SEQ ID NO: 100167 - protein, 122 aa, Setaria italica
  Transcript Sequence Number=SeqID_34193
GFSESCVGGGGALSLAAFASAKSRNTGYNPALIKKQKEFYKNAKLISKYKRTKKQQNQSSNPPEFPIHEGGGDFNVPKLQHKGKKRTAQSLKEEYEKKRAEVEKTQKERDAVIQAKREQKEK

SEQ ID NO: 100168 - protein, 149 aa, Setaria italica
  misc_feature (21)..(21): Xaa can be any naturally occurring amino acid
  Transcript Sequence Number=SeqID_34194
  Pfam annotation: Domain name=rRNA_processing; Domain location=10-148; Score=-39.9; E_value=0.00099; Accession=PF08524.3; Description=rRNA processing
GALSLAAFASAKSRNTGYNPXLVVKQKEFYKNAKLISKYKRTKKQQNQSSNPPEFPIHEGGGDFNVPKLQHKGKKRTAQSLKEEYEKKRAEVEKTQKERDAVIQAKREQKEKSEAKRRELREKMFKKTRSGQPVMKYRIEHLLETALES

SEQ ID NO: 100169 - protein, 661 aa, Setaria italica
  Transcript Sequence Number=SeqID_34195
  Gene Ontology: Cellular component=integral to membrane
  Homolog annotation: Hit_ID=B9SC23; Match level="QueryCoverage=96%, HitCoverage=96%, E-value=0.0, Identity=78%"; Hit description =Endosomal P24A protein, putative
  Pfam annotation: Domain name=EMP70; Domain location=58-619; Score =814.7; E_value=5.7e-242; Accession=PF02990.8; Description =Endomembrane protein 70
MARLGALLLVAVAAAAALLCALPGARGFYLPGSYPHKYNPGEPLSVKVNSLTSIDTEMPFSYYSLPFCVPPEGVKDSAENLGELLMGDRIENSPYRFKMYTNESDVFLCRSAPLAPDAFALLKKRIDEMYQVNLILDNLPAIRYTKKDDYFLRWTGYPVGIRVGVDYYVFNHLQFTVLVHKYEDANVARVMGAADATDAIPAGGKDGGSSSGWMVVGFEVVPCSIKHNPEDVKSTKMYDRYPSKIKCDPTTVSMSIKENEPIVYTYEVSFVESDIKWPSRWDAYLKMEGAKVHWFSILNSLMVIAFLAGIVFVILLRTVRRDLTKYEELDSEAQAQMNEELSGWKLVVSDVFRAPSNPMLLCVMVGDGVQILGMAVVTILFAALGFMSPASRGTLITGMLFFYLVLGILAGYAGVRVWKTIKCGDHSGWVGVSWRVACFFPGIAFLILTTLNFLLWGSQSTGAIPFSLFVVLLLLWFCISVPLTLVGGFLGAKAPHIEYPVRTNQIPREIPPQRYPSWLLVLGAGTLPFGTLFIELFFIMSSIWMGRVYYVFGFLFIVLLLLVIVCAEVSLVLTYMHLCVEDWKWWWKSFFSSGSVAIYIFLYSINYLVFDLKSLSGPVSATLYIGYSLFMVIAIMLATGTVGFISSFCFVHYLFSSVKAD

SEQ ID NO: 100170 - protein, 91 aa, Setaria italica
  Transcript Sequence Number=SeqID_34196
MEMGMTPEIMYGQNIFVPATANPYQYGYAEVGQPMEWYNHPSTVGYDGQDVFYPTEGMPCVYYAAPDNASMHPSYSPYPLDPSFIPDGSFM

SEQ ID NO: 100171 - protein, 33 aa, Setaria italica
  Transcript Sequence Number=SeqID_34197
YPARTSAAIHQILSLRVSKACLYEIIIHIDYIS

SEQ ID NO: 100172 - protein, 95 aa, Setaria italica
  misc_feature (81)..(81): Xaa can be any naturally occurring amino acid
  Transcript Sequence Number=SeqID_34198
MADADHVAAYQRRSPQHPRRRSSYEMDRSGEEHVKIVEVDISDPAARRGRSSCSAAATESREHRLSEYYCYGGGGVQCSPXPSSAAFGAELSPQR

SEQ ID NO: 100173 - protein, 292 aa, Setaria italica
  Transcript Sequence Number=SeqID_34199
  Gene Ontology: Mol. function=dopamine beta-monooxygenase activity; Biological process=histidine catabolic process
  Homolog annotation: Hit_ID=B9RNX5; Match level="QueryCoverage=99%, HitCoverage=35%, E-value=1e-103, Identity=62%"; Hit description =Dopamine beta-monooxygenase, putative
  Pfam annotation: Domain name=Cytochrom_B561; Domain location=45-247; Score=-56.6; E_value=0.013; Accession=PF03188.8; Description =Eukaryotic cytochrome b561
  Pfam annotation: Domain name=DUF2427; Domain location=55-164; Score= -27.7; E_value=0.086; Accession=PF10348.1; Description=Domain of unknown function (DUF2427)
  Pfam module annotation: Pfam domain module=Cytochrom_B561::DUF2427; Domain location=45-247::55-164
HRPLKPSCTGKVECKNIIDPTTPLKVVWAMGASWSGDDLTDSNMHSVTSSRPIRVLLLRGSAEAEQDLRPVLAVHGFMMFVAWGILLPGGIMAARYLKSLKGDGWYQIHVYLQYSGIAIMFLGVLFAAAELRGFFVSSVHVKFGVLALLLAVLQPLNAKFRPSKPANGEVPSRNRILWEYLHVITGRSAIIVGIVALFTGMKHLGHRYDSENVEELTWALMLWVLSVIVIVLSLEYKEVKRMSSNRSVRGHWVLGNTEEDDSVDLLHPDGTARNSDSSTSGVMEVQLEPLNR

SEQ ID NO: 100174 - protein, 165 aa, Setaria italica
  misc_feature (12)..(12): Xaa can be any naturally occurring amino acid
  misc_feature (114)..(114): Xaa can be any naturally occurring amino acid
  Transcript Sequence Number=SeqID_34200
  Homolog annotation: Hit_ID=B6TYR0; Match level="QueryCoverage=67%, HitCoverage=43%, E-value=2e-26, Identity=64%"; Hit description=DNA -binding WRKY
  Pfam annotation: Domain name=VQ; Domain location=58-88; Score=51.1; E_ value=4.2e-12; Accession=PF05678.6; Description=VQ motif
  Subcellular localization annotation: CTP_CleavageSite=87; ConfidenceScore=5.79e-01
MEVAAAKQLLPXARAPNSPSSSTSSSSPSSAASPSPRQQQHHPVPPSPKPVPRIIDTTPFPTTFVQADTANFKQVVQRLTGSDTPSSAQNKPAKGHHHHHHHHHNHGGASGLAXGPKKPAFKLYERRIGKNNLKMIAPLAMAAAAAAGASPRKVGPEVLSPSVLE

SEQ ID NO: 100175 - protein, 145 aa, Setaria italica
  Transcript Sequence Number=SeqID_34201
  Gene Ontology: Mol. function=metal ion binding; Biological process =regulation of transcription
  Homolog annotation: Hit_ID=O04600; Match level="QueryCoverage=86%, HitCoverage=44%, E-value=4e-11, Identity=41%"; Hit description=A _IG002N01.28 protein
FSRSLRTLLPIYSTLAVCFLACHIARQAILPSDIYRWAVESKLPYLAVFTEVDKLLGSSLHLQRCPLDARQLFRPVQVIGAWQLEAAAGSIAQRICLRLPSVNFYAIAERCLKDLSLPVDKILPHACRIYEWAMPAELWLSSNPA

SEQ ID NO: 100176 - protein, 104 aa, Setaria italica
  Transcript Sequence Number=SeqID_34202
FRLAAFSCATDGGGEVAIVDIKKAALISPNQQKILWRKDTMQAKINKNSPQADWTDQAPAHRIKEKTGLDRRRSRRTAEAAGDRRSGEVYGEMGGGGGAEEGGE

SEQ ID NO: 100177 - protein, 95 aa, Setaria italica
  misc_feature (16)..(16): Xaa can be any naturally occurring amino acid
  Transcript Sequence Number=SeqID_34203
  Homolog annotation: Hit_ID=B6T319; Match level="QueryCoverage=67%, HitCoverage=36%, E-value=1e-17, Identity=68%"; Hit description=RS21 -C6 protein
APGAVPGWEARETEHXGEELADVLLYLVRLSDMCGVDLGKAALRKIGLNAIKHPVGKRHNTSSKKFARCSGSNGNAGSTTGADKNEAVKEGDKEH

SEQ ID NO: 100178 - protein, 52 aa, Setaria italica
  Transcript Sequence Number=SeqID_34204
IAAAQGLNWVLLQPEALMPKVLLGSNIIPRSIQTVVPKNDSRPRCKCVHVNI

SEQ ID NO: 100179 - protein, 117 aa, Setaria italica
  misc_feature (51)..(51): Xaa can be any naturally occurring amino acid
  Transcript Sequence Number=SeqID_34205
  Gene Ontology: Mol. function=metal ion binding
  Homolog annotation: Hit_ID=Q2RA96; Match level="QueryCoverage=63%, HitCoverage=10%, E-value=1e-15, Identity=56%"; Hit description=PHD -finger family protein, expressed
  Pfam annotation: Domain name=PHD; Domain location=4-45; Score=-2.1; E_ value=0.045; Accession=PF00628.21; Description=PHD-finger
MDAVCEVCGDVGYRHLLVQCNSCKNATRHLGIMKIGQEYIPLAAHLSNQAXKKVQELSLSLPPVMKVTKHSELKAWQSRWEALELTAENISLYFFSDNMSVPREETLSVGSVQAQVR

SEQ ID NO: 100180 - protein, 100 aa, Setaria italica
  Transcript Sequence Number=SeqID_34206
HIKSCCFVVFQGRKHYLWGVFRRRLGRSKAATQVKQKVSTVSKSHTSEKKDHQDKMQSDAQNQEMHVSKGTMPSGSQPTSDAVHDVGTEPDLGDSLKSPP

SEQ ID NO: 100181 - protein, 164 aa, Setaria italica
  Transcript Sequence Number=SeqID_34207
  Gene Ontology: Mol. function=metal ion binding
  Homolog annotation: Hit_ID=Q2RA96; Match level="QueryCoverage=98%, HitCoverage=22%, E-value=4e-42, Identity=54%"; Hit description=PHD -finger family protein, expressed
IFLSAVANIFTFYADSGIMKIGQEYIPLAAHLSNQASKKVQELSLSLPPVMKVTKHSELKAWQSRWEALELTAENISLYFFSDNMRPNKELDRLVQYVTDYSIVLKYVVGLSKLLIFPSVLLPEQCQSMFQGRKHYLWGVFRRRLGRSKAATQVKQKVSTVSKS

SEQ ID NO: 100182 - protein, 491 aa, Setaria italica
  Transcript Sequence Number=SeqID_34208
  Gene Ontology: Mol. function=metal ion binding
  Homolog annotation: Hit_ID=Q2RA96; Match level="QueryCoverage=73%, HitCoverage=47%, E-value=4e-50, Identity=33%"; Hit description=PHD -finger family protein, expressed
MEDVNSESLPSNNVSPCKATQSSFKKQPNRDTQHHTKHQKIKLIVKDRNADHAQLKNCRPSKQLDHTCLSASLELSSEAKELNDAVPRCSSSAQTFENAVPMKRKRLIVPHSEDAEAMHVENLNPPSSENEGQVRMHKRHVESAVMNQRRSAKNHEEVNSNEQHVNNHTQTKKQRRATKDKKAPVGNPSVRCALNDAEQLASEAAGTLGHCSLSRMPVVSAPTDQQSFICPQPIDRPKWTGIMKIGQEYIPLAAHLSNQASKKVQELSLSLPPVMKVTKHSELKAWQSRWEALELTAENISLYFFSDNMRPNKELDRLVQYVTDYSIVLKYVVGLSKLLIFPSVLLPEQCQMFQGRKHYLWGVFRRRLGRSKAATQVKQKVSTVSKSHTSEKKDHQDKMQSDAQNQEMHVSKGTMPSGSQPTSDAVHDVGTEPDLGDHKKPQANSEAPPTKLLGLVVCATPRSEQFIKELENEGALVFAVKGIVKPAPERL

SEQ ID NO: 100183 - protein, 74 aa, Setaria italica
  Transcript Sequence Number=SeqID_34209
  Gene Ontology: Mol. function=ATPase activity, coupled to transmembrane movement of substances; Cellular component=integral to membrane; Biological process=transport
  Homolog annotation: Hit_ID=Q7FMW2; Match level="QueryCoverage=97%, HitCoverage=5%, E-value=1e-31, Identity=88%"; Hit description=MDR -like ABC transporter
NLVIMNFVYLGIAAGLASTLQVSCWTISGERQAARIRALYLKAILRQDIAFFDMEMTTGQVVERMAGDTFLIQD

SEQ ID NO: 100184 - protein, 110 aa, Setaria italica
  Transcript Sequence Number=SeqID_34210
FVDDKLKTFRGRDSNVLKIQLFPQIYNNHHGLKLLQPLLQDFTQGSTFSDVGSLNASLQNPSDGVINTTLYISYLSDYIVEISNESVLGPVSIIASIGGLYAFSVAIFLC

SEQ ID NO: 100185 - protein, 51 aa, Setaria italica
  Transcript Sequence Number=SeqID_34211
RGVVAARQSRGRRRNQHSVSCPFRAFRFSPGYIPFCLVLSKLFFCIIRILR

SEQ ID NO: 100186 - protein, 49 aa, Setaria italica
  Transcript Sequence Number=SeqID_34212
FALFVLLSSTGIVFFSVRLRRQACVVDHQHPLARVMITRFASKLLGRFC

SEQ ID NO: 100187 - protein, 83 aa, Setaria italica
  Transcript Sequence Number=SeqID_34213
ADDKAALERCSSCAMCCPAVRSEFVQPWVLLRGMVCAAADILFGFFLLPMHINPFVNRQFGDDKLKKGRRKSLRYSFIRKKVV

SEQ ID NO: 100188 - protein, 216 aa, Setaria italica
  Transcript Sequence Number=SeqID_34214
  Gene Ontology: Mol. function=protein binding
  Homolog annotation: Hit_ID=B6T8V9; Match level="QueryCoverage=93%, HitCoverage=37%, E-value=5e-45, Identity=51%"; Hit description=GAMYB- binding protein
  Pfam annotation: Domain name=BTB; Domain location=121-216; Score =14.6; E_value=0.00091; Accession=PF00651.23; Description=BTBPOZ domain
MDPDFSPGGGGPSFEFAFNEVNFSDRELRIEVVAGDDDAPGSSGGGAGGGGLADWARHRKRRREELLKEKESTTHMSDQTNCNEVEAEECDAYEENQEEPVAMIEESPPDVGQDGDDGPGIDSSWTVVGTPVLRVKTIYISSAILAAKSPFFFKLFSNGMKESDQRHATLRITDSEETALMELLSFMYSGKLTTTEPNLLLDILMAADKFEVVSCY

SEQ ID NO: 100189 - protein, 63 aa, Setaria italica
  Transcript Sequence Number=SeqID_34215
YLLWCSVTLMFHFFFLLGFSLILDNIYDATSLSSVEICLCYIRSARIPPRFRYCIEPIPETET

SEQ ID NO: 100190 - protein, 838 aa, Setaria italica
  misc_feature (498)..(498): Xaa can be any naturally occurring amino acid
  Transcript Sequence Number=SeqID_34216
  Gene Ontology: Mol. function=cysteine-type peptidase activity; Cellular component=nucleus; Biological process=ubiquitin-dependent protein catabolic process
  Homolog annotation: Hit_ID=Q94ED6; Match level="QueryCoverage=100%, HitCoverage=75%, E-value=0.0, Identity=73%"; Hit description =Ubiquitin carboxyl-terminal hydrolase
  Pfam annotation: Domain name=UCH; Domain location=1-242; Score=82.2; E_value=1.9e-21; Accession=PF00443.21; Description=Ubiquitin carboxyl-terminal hydrolase
QHDVQELNRVLCEKLENKMKGTTVEGAIQKLFEGHHMNYIECINVDHKSTRKESFYDLALDVKGCSDVYASFDKYVAVERLEGDNKYQSEEHGLQDAKKGMLFVDFPPVLQLQLKRFEYDFVRDTMVKINDRYEFPLQLDLDRDDGKYLSPEADRSVRNLYTLHSVLVHSGGVHGGHYYAFIRPTLSDQWYKFDDERVTKEDTKRALEEQYGGEEELPHTNPGLNTTPLRFTKHSNAYMLVYIRESDKEKIICDLDEEDISEHLKVRLRKEQEEKEYKKREKAEAHMFTALKVAWDSDLKEQIGRHVHFDLVDFDKVHSFRAPKNMSINEVKMELSKEFGIPVESQRFWVWAKRKNSTYRPSRPLTLQEEKTAIGLLKDATVTKFQTSEVRLFLEVHFGQENQPIAPPVKTKEDILLFFKLYDPEKEDLRYVGKFFVKASGKPFDIVERLNQIAGFPSDEDIDLYEEIMYDPSVMCEPIESNVSFHSSQIENGDIICXQKRCLPDKMDQYRYPTVSSFFEYIHNKQIVRFRLLEKPKEDYFSLELSKRSTYDDVVEKVAHQLGLDEPSKIRLTQHHPLSHQPKPYYIKYRGLDYLSDMLQHHNQMCDILYYETLDIPLPELEGLKTLKVAFQNAKNCEASFHIMRSPKSNALFDLIEDLKSKVELSCNDAEFRFFNVHLHKICKVYQPGDKIDSVSDQSGPLRIEEVPEEEKNAGPNDRLVHVYHFFKDIHHIQYFGEPFFFLIRDGEALSDIKVRIQKRLQVPDEQFLKWKFAYVTYGRPEYLQDSDIVLSRFQKQKPIYGAWEHILGLEHTATTPKRSFLASQNRHSFEKPVKIYN

SEQ ID NO: 100191 - protein, 42 aa, Setaria italica
  Transcript Sequence Number=SeqID_34217
  Gene Ontology: Mol. function=calcium ion binding
  Homolog annotation: Hit_ID=B6U4N5; Match level="QueryCoverage=100%, HitCoverage=24%, E-value=9e-17, Identity=97%"; Hit description =Calcineurin subunit B
MGNASSMLTQYDIEEVQEHCNYLFSQQEIVSLYERFCQLDRS

SEQ ID NO: 100192 - protein, 398 aa, Setaria italica
  Transcript Sequence Number=SeqID_34218
  Gene Ontology: Mol. function=transferase activity, transferring glycosyl groups; Cellular component=integral to membrane; Biological process=metabolic process
  Homolog annotation: Hit_ID=B6SZ65; Match level="QueryCoverage=96%, HitCoverage=79%, E-value=1e-169, Identity=75%"; Hit description =Cytokinin-O-glucosyltransferase 3
  Pfam annotation: Domain name=UDPGT; Domain location=3-394; Score= -144.9; E_value=0.0012; Accession=PF00201.10; Description=UDP -glucoronosyl and UDP-glucosyl transferase
FPGPGLGLPEGLENMDMLVEREHYMAFFRAVWRMDAPLEEYLRSLPRRPDCLVADSCNPWTAGVCARHGIPRLVLHCPSAYFLLATHNLSKHGVYDRVAGELEAFEVPGFPVRAVGSKATFRGFFQWPGVEGFQRDVDEAEATADGLILNTFRDIEGTFVDAYAAVLGRRTWAVGPTCASGLLDADAKAGRGNRADADAGGIVPWLDARPPSSVLYVSFGSLARLPAKQLIELGRGLEASGRPFVWAIKEAKSDAGVQAWLAEGFEERVEDRGLLVRGWAPQLTILSHPAVGGFLTHCGWNATLEAIAHGVPALTWPNFADQFSSEQLLVDVLRVGVRSGVKVPAYLPEEAVGVQVTRAGVEKAVAELMDEGPEGAAREGQGPRRSAAKAKAAVQEGG

SEQ ID NO: 100193 - protein, 312 aa, Setaria italica
  misc_feature (183)..(183): Xaa can be any naturally occurring amino acid
  Transcript Sequence Number=SeqID_34219
  Subcellular localization annotation: CTP_CleavageSite=48; ConfidenceScore=5.33e-01
MAILCSAPSVHSNFLPRWLLLNSSPRMYCHAFRDRMRLKRRNRHQWVTCFSKGSFLQDSMPSLKPSRLLPTEELKTYPNTVPEEIFSTIRLDDSDAFYVLELSTSREFSSSLLDKNSAILICLIDVDGDSLLQRVPAIYLGQPTPGMKAEQSMPFQSGSVDVVTFKGSKLQRIKEVWIGLESXSGSWRLDGLSLKVIHGPVGRSKDVNGTPELKFNGLQYTFEKINVPLGEDGASVAEARPVAVMDLSGVSLSDLQEGQLSSESTASIVKELKEDGLRQYADLKQSLLLYDAAIVITGFSVFTLASNDNAAY

SEQ ID NO: 100194 - protein, 97 aa, Setaria italica
  Transcript Sequence Number=SeqID_34220
HSLPEGKVHALLDTGGNLLKKRWYLQVLIYGSYMSNRCRSCLGRLKCSGTRLVQHLSLCSHVEPKFTYKEETNMAIVPFTDGSLCLYFAGRYIAGCQ

SEQ ID NO: 100195 - protein, 58 aa, Setaria italica
  Transcript Sequence Number=SeqID_34221
MERQMSWLKALQQILSSTVILDFDNSRLSACQQAFLHSIHHFPMGSLVDSNLHQLSKA

SEQ ID NO: 100196 - protein, 80 aa, Setaria italica
  Transcript Sequence Number=SeqID_34222
  Homolog annotation: Hit_ID=B6SJL2; Match level="QueryCoverage=70%, HitCoverage=24%, E-value=3e-24, Identity=94%"; Hit description =Thaumatin-like protein
  Subcellular localization annotation: CTP_CleavageSite=71; ConfidenceScore=5.24e-01
MASALAFVIVLAASTCASTATTLTIHNLCPHPVWPLVTPNSGLPSISDNTARLDTNALLSLSFPATFWAGRVAARTGCDA

SEQ ID NO: 100197 - protein, 270 aa, Setaria italica
  Transcript Sequence Number=SeqID_34223
  Gene Ontology: Mol. function=drug transporter activity; Cellular component=membrane; Biological process=multidrug transport
  Homolog annotation: Hit_ID=B9T6V3; Match level="QueryCoverage=89%, HitCoverage=50%, E-value=3e-82, Identity=63%"; Hit description =Multidrug resistance pump, putative
  Pfam annotation: Domain name=MatE; Domain location=53-216; Score =101.0; E_value=4.1e-27; Accession=PF01554.10; Description=MatE
RNLRPIQRSNLSWVVFAALLVAYALGGGCPETWSGFSTSAFVDLKEFVTLSASSGVMVCLENWYYRILLFLTGFLRNAELSVDALSICMSLTGWEMMIHMGFLAGTGVRVANELGAANGQGAKFATIVSTTTSFLISLFASLLALIFHDKLAMIFSSSQAVIDAVDGISILLALTILLNGIQPVLSGVAIGSGWQGLVAYVNIGSYYLIGVPLGVLLGWGFNYGVPGIWAGMIGGTMMQTLILALITLRCDWNEEALKAGNRVRPGSSAK

SEQ ID NO: 100198 - protein, 246 aa, Setaria italica
  Transcript Sequence Number=SeqID_34224
  Gene Ontology: Mol. function=squalene monooxygenase activity; Cellular component=membrane; Biological process=terpene biosynthetic process
  Homolog annotation: Hit_ID=B6U6N2; Match level="QueryCoverage=82%, HitCoverage=37%, E-value=1e-115, Identity=98%"; Hit description =Squalene monooxygenase
  Pfam annotation: Domain name=DAO; Domain location=46-246; Score= -24.2; E_value=0.00043; Accession=PF01266.16; Description=FAD dependent oxidoreductase
AVLVAAVLGRRRGSGPRSPLVEEKAAAEAACATGDGAGAAGDGGSDVIIVGAGVAGSALAYTLGKDGRRVHVIERDLTEPDRIVGELLQPGGYLKLIELGLEDCVEEIDAQRVLGYALFKDGRNTKLAYPLEKFHSDVAGRSFHNGRFIQRMRQKAASLPNVQLEQGTVTSLLEENGTVKGVQYKTKSGQELKAYAPLTIVCDGCFSNLRRALCSPKVDVPSCFVGLVLENCQLPHPNHGHVILAN

SEQ ID NO: 100199 - protein, 93 aa, Setaria italica
  Transcript Sequence Number=SeqID_34225
  Gene Ontology: Mol. function=nucleic acid binding
  Homolog annotation: Hit_ID=B9RTM6; Match level="QueryCoverage=86%, HitCoverage=14%, E-value=9e-20, Identity=61%"; Hit description=ATP -dependent RNA and DNA helicase, putative
PKTHNQLKELESVHKVLELYVSVSFKVEDSFPDREVAASQKAICSMLIEEYLERSGWQPQGRRKFLRGPQKLLREYDVSQMRKYFQEVDGQPK

SEQ ID NO: 100200 - protein, 94 aa, Setaria italica
  Transcript Sequence Number=SeqID_34226
  Gene Ontology: Mol. function=nucleoside-triphosphatase activity; Cellular component=cytoplasm; Biological process=protein metabolic process
  Homolog annotation: Hit_ID=Q334H8; Match level="QueryCoverage=98%, HitCoverage=10%, E-value=2e-46, Identity=98%"; Hit description=Heat shock protein 101
TNVPSNLLDVRLVALDMGALVAGAKYRGEFEERLKAVLKEVEEAEGKVILFIDEIHLVLGAGRTEGSMDAANLFKPMLARGQLRCIGATTLEEY

SEQ ID NO: 100201 - protein, 77 aa, Setaria italica
  Transcript Sequence Number=SeqID_34227
TGAMTKVHNGRRRLPAFEGCKLSLLYCSITLFSDLYCSTSGQRIRVIWFWGNTTERTCKPDIQLLSFFFDNRLLSIE

SEQ ID NO: 100202 - protein, 164 aa, Setaria italica
  Transcript Sequence Number=SeqID_34228
  Pfam annotation: Domain name=Nnf1; Domain location=44-143; Score =19.5; E_value=8.5e-05; Accession=PF03980.6; Description=Nnf1
MDPAAPGRFDILQTSFKAASKCLLTACSREAVKRAFPSFTDICGERLYHMLTQVMKAMHATIEEEFDEVCQERQVAAALDKIDDFDEEQNLDVLPSEKTSIEEIEEKISRAKKDEIEHLAALLKKVEESNNAMKARLELLKKGEDSTASRDVLNKLTQLNSTYA

SEQ ID NO: 100203 - protein, 151 aa, Setaria italica
  misc_feature (80)..(80): Xaa can be any naturally occurring amino acid
  misc_feature (103)..(103): Xaa can be any naturally occurring amino acid
  Transcript Sequence Number=SeqID_34229
  Gene Ontology: Mol. function=hydrolase activity, hydrolyzing O -glycosyl compounds; Cellular component=cytosolic ribosome; Biological process=carbohydrate metabolic process
  Homolog annotation: Hit_ID=B9T4F7; Match level="QueryCoverage=54%, HitCoverage=16%, E-value=4e-32, Identity=76%"; Hit description=Beta -glucosidase, putative
  Subcellular localization annotation: CTP_CleavageSite=39; ConfidenceScore=5.58e-01
SSLEDADRGAARRAPPPSPTQPPRTRPACRGRLVLSSPAVSAYQSPKNVCYQSLNLLREGRVRKRKAFADYADFCFKTFXDRVKNWMTFNEPRVVAALGYDMXDGRFAPGMCAKCKEGNSATEPYIVAHHLILSHAAAVQRYRHKYQISTR

SEQ ID NO: 100204 - protein, 58 aa, Setaria italica
  Transcript Sequence Number=SeqID_34230
  Subcellular localization annotation: CTP_CleavageSite=43; ConfidenceScore=5.34e-01
MGVYTFVCRNSGGEWTAKQHSASGVQSSFSMVTPSSAVFQVIVGAVGGGAMISGGAVA

SEQ ID NO: 100205 - protein, 46 aa, Setaria italica
  Transcript Sequence Number=SeqID_34231
ACNNLRTQFFRFTSHWLVPDRTAELTTTIGNHHQQISYLKHQHGAL

SEQ ID NO: 100206 - protein, 124 aa, Setaria italica
  Transcript Sequence Number=SeqID_34232
  Gene Ontology: Mol. function=unfolded protein binding; Cellular component=endoplasmic reticulum; Biological process=protein folding
  Homolog annotation: Hit_ID=Q40041; Match level="QueryCoverage=89%, HitCoverage=26%, E-value=3e-54, Identity=89%"; Hit description =Calreticulin (Fragment)
  Pfam annotation: Domain name=Calreticulin; Domain location=1-122; Score=-93.7; E_value=1.1e-11; Accession=PF00262.10; Description =Calreticulin family
LDCGGGYVKLLGGDVDQKKFGGDTPYSIMFGPDICGYATKKVHAILTRNGKNHLIKKEVPCETDQLTHVYTLIIRPDATYSILIDNAEKQSGSIYDDWDILPPKQIKDPECILCHPSLLASWLQ

SEQ ID NO: 100207 - protein, 288 aa, Setaria italica
  misc_feature (232)..(232): Xaa can be any naturally occurring amino acid
  misc_feature (240)..(240): Xaa can be any naturally occurring amino acid
  misc_feature (262)..(262): Xaa can be any naturally occurring amino acid
  Transcript Sequence Number=SeqID_34233
  Gene Ontology: Mol. function=unfolded protein binding; Cellular component=endoplasmic reticulum lumen; Biological process=protein folding
  Homolog annotation: Hit_ID=Q41799; Match level="QueryCoverage=73%, HitCoverage=66%, E-value=1e-102, Identity=90%"; Hit description =Calreticulin (Fragment)
  Pfam annotation: Domain name=Calreticulin; Domain location=2-207; Score=195.1; E_value=2e-55; Accession=PF00262.10; Description =Calreticulin family
INVWNQDNTSRVTSTKKVHTILTKDGKNHLIKKDVPCETDQLTHVYTLIIRPDATYSILIDNEEKQTGSVYEHWDILPPKQIKDPEAKKPEDWDDKEYIPDPEDKKPEGYDDIPKEIPDPDAKKPEDWDDEEDGEWTAPTIPNPEYKGPWKQKKIKNPNYQGKWKAPMIDNPDFKDDPYIYAFDSLKYIGIELWQVKSGTLFDNIIITDDPALAKTFAEETWGKHKEAEKAXFDEAEKKXEEEEAAKGGDDEDDDLEDEEDXEKADEDKADSDTEDGKDSDDEKHDEL

SEQ ID NO: 100208 - protein, 445 aa, Setaria italica
  Transcript Sequence Number=SeqID_34234
  Gene Ontology: Mol. function=unfolded protein binding; Cellular component=endoplasmic reticulum; Biological process=protein folding
  Homolog annotation: Hit_ID=Q9SLY8; Match level="QueryCoverage=76%, HitCoverage=80%, E-value=1e-169, Identity=86%"; Hit description =Calreticulin
  Pfam annotation: Domain name=Calreticulin; Domain location=31-343; Score=568.8; E_value=6e-168; Accession=PF00262.10; Description =Calreticulin family
MAVLERSSSTAAVAVAALIALASVAAVAGEVFFQEKFDDGWEDRWVKSDWKKDDSTAGEWNHTSGKWNGDADDKGIQTSEDYRFYAISAQYPEFSNKDKTLVLQFSVKHEQKLDCGGGYVKLLGGDVDQKKFGGDTPYSIMFGPDICGYATKKVHAILTRNGKNHLIKKEVPCETDQLTHVYTLIIRPDATYSILIDNAEKQSGSIYDDWDILPPKQIKDPEAKKPEDWDDKEYIPDPEDKKPEGYDDIPKEIPDPDAKKPEDWDDEEDGEWTASTIPNPEYKGPWKQKKIKNPDYKGKWKAPLIDNPDYKDDPYIYAFDSLKHIGIELWQVKSGTLFDNILITDDPEYAKKFAEETWGKHKDAEKAAFDEVEKKRLEEESASTKDEDDADEDEDEADDDKADTAAEEAKDSADAKPEDGKVAADEKRTEDSKDASAEEKKHDEL

SEQ ID NO: 100209 - protein, 120 aa, Setaria italica
  Transcript Sequence Number=SeqID_34235
  Gene Ontology: Mol. function=structural constituent of ribosome; Cellular component=ribonucleoprotein complex; Biological process =translational elongation
  Homolog annotation: Hit_ID=O24413; Match level="QueryCoverage=100%, HitCoverage=100%, E-value=4e-24, Identity=53%"; Hit description=60S acidic ribosomal protein P3
  Pfam annotation: Domain name=Ribosomal_60s; Domain location=41-119; Score=42.2; E_value=2.1e-09; Accession=PF00428.11; Description=60s Acidic ribosomal protein
MGVYTFVCRNSGGEWTAKQHSGEIEASAATPYELQRQLVAAASAADSASGVQSSFSMVTPSSAVFQVIVGAVGGGAMISGGAVAGGAASSGGGAADAPKEEKKEEEKEESDDDMGFSLFD

SEQ ID NO: 100210 - protein, 428 aa, Setaria italica
  misc_feature (230)..(230): Xaa can be any naturally occurring amino acid
  misc_feature (355)..(355): Xaa can be any naturally occurring amino acid
  Transcript Sequence Number=SeqID_34236
  Gene Ontology: Mol. function=unfolded protein binding; Cellular component=endoplasmic reticulum lumen; Biological process=protein folding
  Homolog annotation: Hit_ID=Q9SLY8; Match level="QueryCoverage=78%, HitCoverage=78%, E-value=1e-168, Identity=89%"; Hit description =Calreticulin
  Pfam annotation: Domain name=Calreticulin; Domain location=27-340; Score=548.4; E_value=8.5e-162; Accession=PF00262.10; Description =Calreticulin family
MAIRRGSSCAVAALLALASVAAVAGEVFFQEKFEDGWESRWVKSEWKKDENMAGEWNHTSGKWNGDAEDKGIQTSEDYRFYAISAEYPEFSNKDKTLVLQFSVKHEQKLDCGGGYVKLLSGDVDQKKFGGDTPYSIMFGPDILVGYSTKKVHTILTKDGKNHLIKKDVPCETDQLTHVYTLIIRPDATYSILIDNEEKQTGSVYEHWDILPPKQIKDPEAKKPEDWDDKXYIPDPEDKKPEGYDDIPKEIPDPDAKKPEDWDDEEDGEWTAPTIPNPEYKGPWKQKKIKNPNYQGKWKAPMIDNPDFKDDPYIYAFDSLKYIGIELWQVKSGTLFDNIIITDDPALAKTFAEETXWGKHKEAEKAAFDEAEKKKEEEEAAKGGDDEDDDLEDEEDDEKADEDKADSDTEDGKDSDDEKHVRTSSRWRG

SEQ ID NO: 100211 - protein, 128 aa, Setaria italica
  misc_feature (73)..(73): Xaa can be any naturally occurring amino acid
  misc_feature (119)..(119): Xaa can be any naturally occurring amino acid
  Transcript Sequence Number=SeqID_34237
  Gene Ontology: Biological process=response to stress
  Homolog annotation: Hit_ID=Q6EBV8; Match level="QueryCoverage=96%, HitCoverage=88%, E-value=2e-10, Identity=42%"; Hit description=22 kDa drought-inducible protein
  Pfam annotation: Domain name=ABA_WDS; Domain location=37-116; Score =153.8; E_value=5.2e-43; Accession=PF02496.8; Description=ABAWDS induced protein
SNHKKDDEAAEQPAGGYGEYTEATVTEVVSTGEDEYDTYKKEEKEHKHKQHLGEAGAVAAGAFALYEKHEAKXDPEHAHRHKIEEEVAAAAAVGSGGFAFHEHHEKKKDHKDAEEAGGXEKKHHHLFG

SEQ ID NO: 100212 - protein, 284 aa, Setaria italica
  misc_feature (119)..(119): Xaa can be any naturally occurring amino acid
  Transcript Sequence Number=SeqID_34238
  Gene Ontology: Mol. function=unfolded protein binding; Cellular component=endoplasmic reticulum lumen; Biological process=protein folding
  Homolog annotation: Hit_ID=Q41799; Match level="QueryCoverage=76%, HitCoverage=67%, E-value=1e-105, Identity=90%"; Hit description =Calreticulin (Fragment)
  Pfam annotation: Domain name=Calreticulin; Domain location=1-203; Score=182.4; E_value=1.3e-51; Accession=PF00262.10; Description =Calreticulin family
MCLAYLCGYSTKKVHTILTKDGKNHLIKKDVPCETDQLTHVYTLIIRPDATYSILIDNEEKQTGSVYEHWDILPPKQIKDPEAKKPEDWDDKEYIPDPEDKKPEGYDDIPKEIPDPDAXSPEDWDDEEDGEWTAPTIPNPEYKGPWKQKKIKNPNYQGKWKAPMIDNPDFKDDPYIYAFDSLKYIGIELWQVKSGTLFDNIIITDDPALAKTFAEETWGKHKEAEKAAFDEAEKKKEEEEAAKGGDDEDDDLEDEEDDEKADEDKADSDTEDGKDSDDEKHDEL

SEQ ID NO: 100213 - protein, 130 aa, Setaria italica
  Transcript Sequence Number=SeqID_34239
  Gene Ontology: Mol. function=structural constituent of ribosome; Cellular component=ribonucleoprotein complex; Biological process =translation
  Homolog annotation: Hit_ID=B4FKB3; Match level="QueryCoverage=100%, HitCoverage=100%, E-value=4e-62, Identity=87%"; Hit description=50S ribosomal protein L31
  Pfam annotation: Domain name=Ribosomal_L31; Domain location=36-104; Score=51.0; E_value=4.6e-12; Accession=PF01197.10; Description =Ribosomal protein L31
  Subcellular localization annotation: CTP_CleavageSite=33; ConfidenceScore=5.27e-01
MTLSLSTSFLPTPAAARTTARTLRSVVPSQGMRCSMRKKGLHPEIYEDAKVYCNGELVLVTGGTKPEYTVDVWSGNHPYYVGDTSALVVMDSQIEKFRKKWGHVKEYWPEDQWREMHPDGDPEFEPEGDN

SEQ ID NO: 100214 - protein, 106 aa, Setaria italica
  misc_feature (71)..(71): Xaa can be any naturally occurring amino acid
  Transcript Sequence Number=SeqID_34240
YITIPKCISLFLSTRFGTGSSNVKDEEKKKSRAERFGLASSSSSDEEAKKKARLERFGQGTNVDKAEEEKXRKARAARFAETSSGSPRENGKDNSKPDAATVTGTA

SEQ ID NO: 100215 - protein, 168 aa, Setaria italica
  Transcript Sequence Number=SeqID_34241
  Subcellular localization annotation: CTP_CleavageSite=66; ConfidenceScore=5.62e-01
MASQSSTPADAAAPSPAAAATGEAAASPASSTPAQNPTAAATAAAGATDLEKKMRRAERFGTAVVMSEEEKRSSRAERFGTGSSNVKDEEKKKSRAERFGLASSSSSDEEAKKKARLERFGQGTNVDKAEEEKRKARAARFAETSSGSPRENGKDNSKPDAATVTGTA

SEQ ID NO: 100216 - protein, 90 aa, Setaria italica
  Transcript Sequence Number=SeqID_34242
  Gene Ontology: Mol. function=extracellular-glutamate-gated ion channel activity; Cellular component=integral to membrane; Biological process=G-protein coupled receptor protein signaling pathway
  Homolog annotation: Hit_ID=Q69L15; Match level="QueryCoverage=96%, HitCoverage=9%, E-value=2e-26, Identity=64%"; Hit description =Putative Avr9/Cf-9 rapidly elicited protein 141
GNYYSASLTSMMTVRQLQPTVADLNQLISNGEYIGYQSGSFVKDLLKSLNVDERKIRSYRTDQYAEALMKGSWNGGVAAVVDEIPYLKLF

SEQ ID NO: 100217 - protein, 64 aa, Setaria italica
  Transcript Sequence Number=SeqID_34243
ENISDRGSRRIRNLENHALETVAGHRQRQYICRSHEGCARQAKTEVLNHCCLVISLYYRTIFDI

SEQ ID NO: 100218 - protein, 92 aa, Setaria italica
  Transcript Sequence Number=SeqID_34244
  Homolog annotation: Hit_ID=Q017C3; Match level="QueryCoverage=83%, HitCoverage=21%, E-value=4e-10, Identity=42%"; Hit description=[S] KOG2861 Uncharacterized conserved protein
SSVLGQSIALDHYIRQVDDMVEEFTEINRVMEKTGNFTMQRKKLFQLVGKANSNLADVIIRLGLFDRSEIAWKNANYAQIQFIFLPKILQNL

SEQ ID NO: 100219 - protein, 263 aa, Setaria italica
  misc_feature (177)..(177): Xaa can be any naturally occurring amino acid
  Transcript Sequence Number=SeqID_34245
  Homolog annotation: Hit_ID=Q017C3; Match level="QueryCoverage=82%, HitCoverage=62%, E-value=1e-45, Identity=42%"; Hit description=[S] KOG2861 Uncharacterized conserved protein
  Pfam annotation: Domain name=DUF155; Domain location=39-212; Score =126.6; E_value=7.8e-35; Accession=PF02582.6; Description =Uncharacterised ACR, YagE family COG1723
SDIVPPSTRLLNYIALRYSEFPPEIMDIGVKDSRFCYRYVVVFQYGSAVLFNIADHEAEYYLDIIRKHASGWLPEMRKDDYAVVEKPSLTTWMKGGLDYIVLKSLDTDGIRIISSVLGQSIALDHYIRQVDDMVEEFTEINRVMEKTGNFTMQRKKLFQLVGKANSNLADVIIRLGXFDRSEIAWKNANYAQILEYLREEYELNQRFGSLDFKLKFVEHNIHFLQEVLQNRRSDLLEWGVIILLTIEIAISLYEIVKDSNMIS

SEQ ID NO: 100220 - protein, 75 aa, Setaria italica
  misc_feature (11)..(11): Xaa can be any naturally occurring amino acid
  Transcript Sequence Number=SeqID_34246
  Gene Ontology: Mol. function=ligase activity; Biological process =protein amino acid phosphorylation
  Homolog annotation: Hit_ID=B9SUQ9; Match level="QueryCoverage=98%, HitCoverage=13%, E-value=9e-24, Identity=67%"; Hit description=DNA cross-link repair protein pso2/snm1, putative
HLESWEFVEMXEVGRTVAVDDPAGAFSVTAYDANHCPGAVMFLFEGQFGAILHTGDCRLTSDCVQNLPTKYIAKK

SEQ ID NO: 100221 - protein, 76 aa, Setaria italica
  Transcript Sequence Number=SeqID_34247
QEVEFSDAMIYQAKSTSEMEEVMLKGLNRLPWERVDVSFKKSRQRFFAHSTIQVKTYFMNSDGADVIFHMIDHFIY

SEQ ID NO: 100222 - protein, 169 aa, Setaria italica
  Transcript Sequence Number=SeqID_34248
  Gene Ontology: Mol. function=DNA binding; Cellular component=nucleus; Biological process=regulation of transcription
  Homolog annotation: Hit_ID=Q5N7Y8; Match level="QueryCoverage=98%, HitCoverage=16%, E-value=8e-37, Identity=54%"; Hit description =Putative Myb-like protein
MDSIPEPEKEQLVDLDQSCLEPTAYNGEEALPSQGDTVLSDKEDAGALCYEPPCFSSFEVPFVSCELVTSSDLPEYSPLGIRELMRSSLNFPTPVRLWGSPTRDGSPDAVLKNAAKSFVRTPSIMKKRPRDLSSPSPDIRNERNQILEKDCGRSGMSSTRIGKSFMDIP

SEQ ID NO: 100223 - protein, 45 aa, Setaria italica
  Transcript Sequence Number=SeqID_34249
  Homolog annotation: Hit_ID=B6TVV1; Match level="QueryCoverage=100%, HitCoverage=26%, E-value=7e-15, Identity=80%"; Hit description =Aprataxin
MRKTFCFGGSRVAKRISERAPMSDGCVFCDIARRAPTSTTALLYS

SEQ ID NO: 100224 - protein, 362 aa, Setaria italica
  misc_feature (180)..(180): Xaa can be any naturally occurring amino acid
  Transcript Sequence Number=SeqID_34250
  Gene Ontology: Mol. function=nucleoside-triphosphatase activity; Cellular component=integral to membrane; Biological process=transport
  Homolog annotation: Hit_ID=B9H498; Match level="QueryCoverage=98%, HitCoverage=56%, E-value=3e-83, Identity=45%"; Hit description=White- brown-complex ABC transporter family
  Pfam annotation: Domain name=ABC_tran; Domain location=3-158; Score =65.0; E_value=2.8e-16; Accession=PF00005.19; Description=ABC transporter
APELLLLDGTAATSADLRRVSGYVTQQDVLFPLLTVRETLLYSARLRLGATLPGKDMDARVDALLDDLTLRRAAATRIKDLSGGERRRVSIGVEAVHDPAVLILDEPTSGLDSASALQIVGALRAMAETRGRTVLLSIHQPGARIVKMFDSVLLLAAGSVLHHGTIDGLRSLLAGAGLQXLPPHVDAVEFSIDSVDALRLHRRHLTSPQQAAPPDPQPHPASSREGRCTLQQLFQLHSKQQVADEDAAKTTAMAKTGSRYANSRAREVAVLSQRFFKNVARTRQLFACRTVCMLVAGLALGSIFYDLGEEKVAERVGLFAFLLTFLLSSTTEALPIFLQEREILAKETSSGAYRVSSYALDQ

SEQ ID NO: 100225 - protein, 90 aa, Setaria italica
  Transcript Sequence Number=SeqID_34251
MMKKVILLAPQFVRLVSWLLNTVCTEIYMILQEISQPCIGPVFVWLCFRFAQAIIHCRCSWKFLNRVAVGNSHEFVKLNYCIQYSCVGDP

SEQ ID NO: 100226 - protein, 322 aa, Setaria italica
  Transcript Sequence Number=SeqID_34252
  Gene Ontology: Mol. function=hydrolase activity; Cellular component =mitochondrion
  Homolog annotation: Hit_ID=Q9SNS9; Match level="QueryCoverage=72%, HitCoverage=72%, E-value=1e-119, Identity=88%"; Hit description =MutT/nudix protein-like
  Pfam annotation: Domain name=NUDIX; Domain location=152-303; Score =54.9; E_value=3.1e-13; Accession=PF00293.20; Description=NUDIX domain
  Subcellular localization annotation: CTP_CleavageSite=35; ConfidenceScore=5.70e-01
MAAVAASTRARCLLGFRRRAPLPPLPFPFPSPVARAATRRRGVRMASSEASASAPPSTTIEVPGAAAPVLVVGAPGLPEADFRNAVDSSLFKQWLSNLQSEKGVLTYGRLNLTRILIQGVDMFGKRVGFMKFKADIIDEETKTKVPGIVFARGPAVAVLILLESNGQTYAILTEQVRVPIGKFVLELPAGMLDDEKGDFVGTAVREVEEETGIKLNLEDMVDLTALLDPATGGRMLPSPGGCDEEIGLFLYRGRVDEETIRSLQGKETGLRDHGELIKLRVVPYGQLWRSTADAKALCAVALYEMAKREGLLPPSSPPSANL

SEQ ID NO: 100227 - protein, 49 aa, Setaria italica
  Transcript Sequence Number=SeqID_34253
AVRKLLPNILKFSEHKLHSPWTLNLFTKSYHFGYSFDTNKFRISPKKTS

SEQ ID NO: 100228 - protein, 270 aa, Setaria italica
  misc_feature (72)..(72): Xaa can be any naturally occurring amino acid
  misc_feature (194)..(194): Xaa can be any naturally occurring amino acid
  Transcript Sequence Number=SeqID_34254
  Gene Ontology: Mol. function=electron carrier activity; Cellular component=peroxisome; Biological process=oxidation reduction
  Homolog annotation: Hit_ID=B9RBI9; Match level="QueryCoverage=94%, HitCoverage=65%, E-value=1e-106, Identity=71%"; Hit description =Sulfite reductase, putative
  Pfam annotation: Domain name=Mo-co_dimer; Domain location=132-263; Score=155.0; E_value=2.2e-43; Accession=PF03404.8; Description=Mo-co oxidoreductase dimerisation domain
  Pfam annotation: Domain name=Oxidored_molyb; Domain location=1-112; Score=35.2; E_value=5.6e-10; Accession=PF00174.11; Description =Oxidoreductase molybdopterin binding d
  Pfam module annotation: Pfam domain module=Mo-co_dimer::Oxidored _molyb; Domain location=132-263::1-112
LRGRKLKLSDALQLVGVPYHTEITPSGGKHVEFVSVDQCPEEKGGPYKASIPLGQATNPAADILLAYEMNGXKRDHGYPLRAIVPGVIGARSVKWLDRIDIIEEESQGFFMQKDYKMFPPSVDWDNIVWSTRKPQMDYPVQSAICSLEDMSAVKPGQVTVAGYALSGGGRGIERVDISPDGGKSWLEHTNQNKXSNQYVAGNVTSDKWAWVLFKAIVDVNSDTEIVAKAVDSSANVQPESVESIWNLRGILNTCWHRIRLLATPNLRSSM

SEQ ID NO: 100229 - protein, 73 aa, Setaria italica
  Transcript Sequence Number=SeqID_34255
NVVLGRERAAVGTGECLAKGEHSRLSLHPLRPRRVPCLTLRSRWRTCTLQVLRHMLVELSARSQPLRTESVYR

SEQ ID NO: 100230 - protein, 129 aa, Setaria italica
  Transcript Sequence Number=SeqID_34256
GRSMSELEFEEVKGLQDLGFTFSDAEVDAELASIVPGLRRKRSEEENSRATASAPAAPRAAASSSALREEEATAAAPAPRRPYLSEAWDDEEEEVRRALRNWRIPPPGNGNDLKEHLRMWAHTVASAVR

SEQ ID NO: 100231 - protein, 276 aa, Setaria italica
  Transcript Sequence Number=SeqID_34257
  Gene Ontology: Mol. function=metal ion binding; Cellular component =integral to membrane; Biological process=positive regulation of I -kappaB kinase/NF-kappaB cascade
  Homolog annotation: Hit_ID=B9T245; Match level="QueryCoverage=80%, HitCoverage=73%, E-value=7e-84, Identity=63%"; Hit description=Zinc finger protein, putative
  Pfam annotation: Domain name=zf-DHHC; Domain location=11-75; Score =90.1; E_value=7.9e-24; Accession=PF01529.12; Description=DHHC zinc finger domain
EPLLKRDLDNLELLDGNWSQLCITCKIVRPVRSKHCSTCDRCVEQFDHHCPWVSNCIGKRNKWEFFMFLILEVSAMIITGVTAIIRSVGDPASPASFGGWLGYTAINHSWVVSFVIMDLFLFFGIITLTVIQASQISRNVTTNEMANAMRYSYLRGPGGRFRNPYDHGVRKNCSDFFLKGYNEDIEKVVQTLQPDEEMGPIQMRSAVSQNSESVPLHANGSDHSSTHLQGNSNSHRQSSSKCCSNSKKSERTPLGLGLGLGRNSPSSRYLRSLLPL

SEQ ID NO: 100232 - protein, 68 aa, Setaria italica
  Transcript Sequence Number=SeqID_34258
RSRGSSVVSPANRPANRDHARTAHLDLLISCSLACSARLTALCLATEPATLFPSRGVGISSRGRRRRL

SEQ ID NO: 100233 - protein, 65 aa, Setaria italica
  Transcript Sequence Number=SeqID_34259
  Homolog annotation: Hit_ID=B4FQN7; Match level="QueryCoverage=100%, HitCoverage=15%, E-value=7e-21, Identity=80%"; Hit description =Interferon-related developmental regulator family protein
MLQKAFPKENGLLQDIFDIKVDTTETQSSTDKKIFRSEEEKERALKLNKERRLAQARKNAAMLVE

SEQ ID NO: 100234 - protein, 353 aa, Setaria italica
  misc_feature (24)..(24): Xaa can be any naturally occurring amino acid
  Transcript Sequence Number=SeqID_34260
  Gene Ontology: Mol. function=binding; Cellular component=nucleus; Biological process=multicellular organismal development
  Homolog annotation: Hit_ID=B4FQN7; Match level="QueryCoverage=100%, HitCoverage=81%, E-value=0.0, Identity=92%"; Hit description =Interferon-related developmental regulator family protein
  Pfam annotation: Domain name=IFRD; Domain location=1-251; Score=70.1; E_value=8.4e-18; Accession=PF05004.5; Description=Interferon-related developmental regulator (IFRD)
LHGRLENKYATMLSQFNNSVKKGXSAKEVFLASRAIGLLAITLGAGSSSHEIMEESHPQLCRVLQAWSDASKMISALDCLAVITFVGATDLAETELALKAMWDVIHPKSGSNVGTVRKPKPPVLAAAISAWTFLLTTIGSWRINTDSWKEPIAFLSTLLEAEDRAVRMAAGEALALCFELNLLDVSCEDGDANTGGTGGSKNKLFLDMQALKAKISGLASNLSAEAGGKGADKKNLTDQRDLFQRILDFVKYGDCPEESIKIAGKRDVLRVSSWSELIQLNFLKRFLGKGFLKHVKENGLLQDIFDIKVDTTETLSSTDKKIFRSEEEKERALKLNKERRLAQARKNAAMLVE

SEQ ID NO: 100235 - protein, 150 aa, Setaria italica
  Transcript Sequence Number=SeqID_34261
MLRQEQSFPDQMNDPHKFYGSFWKQSSSAQSSLHSTHEHKMNLGSWANQNQEDFTNSDKHKSPSNIAQQNSDVRASIWRKTYAYNGVIDLEKPCTSGDAVGDVGCSGFGNLSNQNGRSRDGSCCISPENSSLVESAQLCRAWNSSRLSPR

SEQ ID NO: 100236 - protein, 36 aa, Setaria italica
  Transcript Sequence Number=SeqID_34262
RRAHDLFSFFIFVNGIACLTVVISMSSISIIDTLNL

SEQ ID NO: 100237 - protein, 76 aa, Setaria italica
  Transcript Sequence Number=SeqID_34263
DLQRSGKGAKRGLVVVPEGGHLATAKDNGGDPSVDGQEALDVCQQDVRRVARFGVYRNRTQLAQGLSSPWWSLSII

SEQ ID NO: 100238 - protein, 154 aa, Setaria italica
  misc_feature (88)..(88): Xaa can be any naturally occurring amino acid
  Transcript Sequence Number=SeqID_34264
  Gene Ontology: Mol. function=serine-type endopeptidase activity; Biological process=proteolysis
  Homolog annotation: Hit_ID=Q3E6S8; Match level="QueryCoverage=98%, HitCoverage=32%, E-value=1e-57, Identity=72%"; Hit description =Putative protease Do-like 14
  Pfam annotation: Domain name=Trypsin; Domain location=1-141; Score= -4.4; E_value=0.00015; Accession=PF00089.18; Description=Trypsin
QVSVTLQDGREFEAVVLNADRHSDIAVLKIKSKTPLPAARLGTSSRLQPGDWVVALGCPLSLQNTVTAGIVSCVDRKSSDLGLGGLRXREYLQTDCAINQGNSGGPLVNLDGEIIGVNVMKVRNADGLSFAVPIDSVVKIVDNFKKNGYALLTA

SEQ ID NO: 100239 - protein, 335 aa, Setaria italica
  Transcript Sequence Number=SeqID_34265
  Gene Ontology: Mol. function=serine-type endopeptidase activity; Cellular component=extracellular region; Biological process =proteolysis
  Homolog annotation: Hit_ID=A2Q336; Match level="QueryCoverage=99%, HitCoverage=76%, E-value=1e-132, Identity=69%"; Hit description =Peptidase S1 and S6, chymotrypsin/Hap
  Pfam annotation: Domain name=Trypsin; Domain location=31-220; Score =63.8; E_value=6.5e-16; Accession=PF00089.18; Description=Trypsin
SAGSLDDSRCCPGCLGRNSIAKAASAVGPAVVNISCSQDAHGWLLEQSIGSGTIIDPDGTILTCAHVVADFQSTKAIVRGKVSVTLQDGREFEAVVLNADRHSDIAVLKIKSKTPLPAARLGTSSRLQPGDWVVALGCPLSLQNTVTAGIVSCVDRKSSDLGLGGLRREYLQTDCAINQGNSGGPLVNLDGEIIGVNVMKVRNADGLSFAVPIDSVVKIVDNFKKNGRVVRPWLGLKMLDLNPMIISQLKEKSSTFPDVRKGVLVPMVTPGSPAEQAGFRPGDVVVEFGGKPVESIKEIIDIMGDKVGVPFKVLVKRANLTVTLIVVPEEADAGR

SEQ ID NO: 100240 - protein, 261 aa, Setaria italica
  Transcript Sequence Number=SeqID_34266
  Homolog annotation: Hit_ID=Q6ASX1; Match level="QueryCoverage=99%, HitCoverage=23%, E-value=8e-81, Identity=59%"; Hit description=FYVE zinc finger containing protein
  Pfam annotation: Domain name=TPR_2; Domain location=157-190; Score =7.5; E_value=3.9; Accession=PF07719.9; Description=Tetratricopeptide repeat
  Pfam annotation: Domain name=TPR_2; Domain location=78-111; Score =16.3; E_value=0.12; Accession=PF07719.9; Description=Tetratricopeptid e repeat
  Pfam module annotation: Pfam domain module=TPR_2::TPR_2; Domain location=157-190::78-111
NDILMDDTKFPALNFEQILGASNDLAIDGHFDVTDDDMNDPDMAAALQSFGWSEDDDKQLENHEPVSSSNQVAIKEQVLALKREAVANRRSGNVAEAMSLLKKAKLLEKDLETEGPDSKFPSPEGQKTTNAEDITFAGSNARPVSAPKSKLAIQRELLALKKKALTLRREGKVDESEEELKKGSVLEKQLEELENSSKPPVAKETRSFASNPPYKVEPPNLNLADEGFEPEVTDNDMQDPALLSVLKNMGWEDVDTDSVEK

SEQ ID NO: 100241 - protein, 204 aa, Setaria italica
  misc_feature (69)..(69): Xaa can be any naturally occurring amino acid
  Transcript Sequence Number=SeqID_34267
  Gene Ontology: Mol. function=protein kinase activity; Cellular component=plasma membrane; Biological process=protein amino acid phosphorylation
  Homolog annotation: Hit_ID=B6SY66; Match level="QueryCoverage=98%, HitCoverage=23%, E-value=2e-94, Identity=81%"; Hit description =Receptor protein kinase CLAVATA1
  Pfam annotation: Domain name=Pkinase; Domain location=5-204; Score =46.5; E_value=2.9e-11; Accession=PF00069.17; Description=Protein kinase domain
  Pfam annotation: Domain name=Pkinase_Tyr; Domain location=5-204; Score=-31.8; E_value=1.3e-11; Accession=PF07714.9; Description =Protein tyrosine kinase
  Pfam module annotation: Pfam domain module=Pkinase::Pkinase_Tyr; Domain location=5-204::5-204
LLAGFHDRSIIGRGAFGKVYLIELQDGQNIAVKRLVNSGKLKFRAVKNEMKALAKVRHKNIAKMLGFFXSEGEVSIIYDYLQTGSLQDLICGPKFTVGWKDRVRIAMGVAQGLAHLHHDHTPQVLHRDLKASNVLLGDEFEPRIAGFGIDRVVGEMAYQTSMASDLNYKCYMAPEQSCAKNPTHLMDVYSFGVILLELVTGKPD

SEQ ID NO: 100242 - protein, 64 aa, Setaria italica
  Transcript Sequence Number=SeqID_34268
RDDARMYVCLVIGCYLPDMRFSHLYDRKKKHHVDVYEQPNRIMVAPVVICTNLSCLEQNGVAIF

SEQ ID NO: 100243 - protein, 260 aa, Setaria italica
  Transcript Sequence Number=SeqID_34269
  Gene Ontology: Mol. function=protein binding; Biological process =protein modification process
  Homolog annotation: Hit_ID=B4FV61; Match level="QueryCoverage=100%, HitCoverage=100%, E-value=1e-119, Identity=83%"; Hit description=BCL- 2 binding anthanogene-1
  Pfam annotation: Domain name=BAG; Domain location=132-210; Score =53.7; E_value=7.2e-13; Accession=PF02179.8; Description=BAG domain
  Pfam annotation: Domain name=ubiquitin; Domain location=40-109; Score= 20.0; E_value=0.0029; Accession=PF00240.15; Description=Ubiquitin family
  Pfam module annotation: Pfam domain module=BAG::ubiquitin; Domain location=132-210::40-109
MMSSRSSGGRDAEGEWEVRPGGMLVQRRDGEAAGPAIRIRVSHGATFREVLVPAQATFGELKRILVQTTGVEPERQRLFFRGKEKSDSEFLHAAGVKDGAKLLLLEKPAPATMEQKPEPVFMDESMMKACEAVACVRAEVDKLSAKVCDLEKSVLGGRKVDDKEFVVLTELLMMQLLKLDGIEAEGEARAQRKAEVRRVQSIVETLDKLKARNANPFSDHNKAVSVTTQWETFENGMGSLSAPPPRVSSTQVNTDWEQFD

SEQ ID NO: 100244 - protein, 58 aa, Setaria italica
  Transcript Sequence Number=SeqID_34270
IYVTQSFLKAIRLCIVIQKLRVIQDMCCTSLLFQPNLGRLKEYWQELKSGYNMYVRVK

SEQ ID NO: 100245 - protein, 97 aa, Setaria italica
  Transcript Sequence Number=SeqID_34271
  Subcellular localization annotation: CTP_CleavageSite=40; ConfidenceScore=5.19e-01
TSPAPPNPSPVPVPVPTPTPTANGTASPPKDQPPPPPQPQQQAGGQEELAAADGGGAEAAEAGVVAGGSGEAMEVDGGPGAGDAEAGGAAGGGGGSG

SEQ ID NO: 100246 - protein, 383 aa, Setaria italica
  Transcript Sequence Number=SeqID_34272
  Gene Ontology: Mol. function=hydrolase activity, acting on ester bonds; Biological process=lipid metabolic process
  Homolog annotation: Hit_ID=B6T560; Match level="QueryCoverage=89%, HitCoverage=91%, E-value=6e-53, Identity=36%"; Hit description=GSDL -motif lipase
  Pfam annotation: Domain name=Lipase_GDSL; Domain location=43-361; Score=133.4; E_value=7e-37; Accession=PF00657.14; Description=GDSL -like LipaseAcylhydrolase
  Subcellular localization annotation: CTP_CleavageSite=32; ConfidenceScore=5.02e-01
MEPAETMVGYRSAMASTALCLLVVSSSVLVTTAAAAGARPPAMFVFGDSTLDVGNNNYLSGPDVPRANKPYYGIDFPGSVSTGRFSNGYNIADYLAKSLGFPWSPPPYLSLAPSSGRLVQAAVAGGVSYASGGAGILDSTNAGNNIPLSKQVQYFKTTKSQMVAKLGSRAANLLLTKSVFLFSVGSNDLFVFAVAEQNKSAAGQQRDAAALYASLISGYSAAVRDLHALGASKFAVINVGLLGCVPAARLHDASGACSGALNQLASGFDDVLASMFSSLASRLPGFAYSLADYYGLSEATFADPRAVGYTDIAGACCGGGRLGAEAPCLPNATVCADRDRHAFWDAVHPSQRGAMLTAQNFYDSRPGRYTAPFNFKELAQTSL

SEQ ID NO: 100247 - protein, 99 aa, Setaria italica
  Transcript Sequence Number=SeqID_34273
KQKASRETLFFYVKKTKETLVLLYGDYLPLEVIDELCQLIHDNSVIKCKSYTFPVEPFFNIVNNLLAIRRQLGSCHIVLLFFASSLATVSCIVLEVNNQ

SEQ ID NO: 100248 - protein, 163 aa, Setaria italica
  misc_feature (135)..(135): Xaa can be any naturally occurring amino acid
  Transcript Sequence Number=SeqID_34274
  Gene Ontology: Cellular component=extracellular space
  Homolog annotation: Hit_ID=P33050; Match level="QueryCoverage=80%, HitCoverage=77%, E-value=2e-53, Identity=74%"; Hit description =Pollen-specific protein C13
  Pfam annotation: Domain name=Pollen_Ole_e_I; Domain location=31-151; Score=211.9; E_value=1.7e-60; Accession=PF01190.9; Description =Pollen proteins Ole e I family
MASLRILPAVTVAVLFYVVVAVATDAPDFVIQGRVYCDTCRAGFQTNVTEYIKGAKVRLECKHFGTGAVERAIDGVTDESGFYTIKLKGGHEEDICEVILIESPRKDCAEVPAHSDRASVLLAKDAGISDDMRFXNPLGYFKDVPLPVCGAVLKEYLLDDQDE

SEQ ID NO: 100249 - protein, 232 aa, Setaria italica
  Transcript Sequence Number=SeqID_34275
NVTFTLVSEDGKKNKVVAVTKGLDHTPNGSFVIELTDGQSQLMIVCDKYQIWLRGIVTHNGSRYELDMPGPKAMVGSESLHTTGSYPNLIGDSVHTCLIGFQSLLNAFHILVAYGGNTKKHKAAIAVILVMFFEAPRLQELHDLSFRLLRDKDDEIVGETNKHLINDWCDTSRDFYEESGGAEGVITIAESTGAATKKVAKSVRVLCRSRWDEWVKDNVPVVNPGAWKPVKK

SEQ ID NO: 100250 - protein, 167 aa, Setaria italica
  misc_feature (122)..(122): Xaa can be any naturally occurring amino acid
  misc_feature (133)..(133): Xaa can be any naturally occurring amino acid
  Transcript Sequence Number=SeqID_34276
  Homolog annotation: Hit_ID=Q53WP4; Match level="QueryCoverage=100%, HitCoverage=23%, E-value=7e-79, Identity=84%"; Hit description =Putative auxin-independent growth promoter
  Pfam annotation: Domain name=DUF246; Domain location=1-167; Score =25.5; E_value=4.5e-16; Accession=PF03138.6; Description=Plant protein family
YKKEIEELGNTLVDRLRNGSSNYIALHLRYEKDMLSFTGCSHNLTHQEAEELREMRLKVQHWKEKEINSEERRLQGGCPMTPREAALFLKAMGYPSSTKIYIVAGELYGVHSMDALRAEYPXNFYTHYSLATXNELESLKLYQNRLAAVDYNVALQSDVFVYTYDGN

SEQ ID NO: 100251 - protein, 542 aa, Setaria italica
  misc_feature (49)..(49): Xaa can be any naturally occurring amino acid
  Transcript Sequence Number=SeqID_34277
  Homolog annotation: Hit_ID=Q53WP4; Match level="QueryCoverage=83%, HitCoverage=56%, E-value=0.0, Identity=71%"; Hit description =Putative auxin-independent growth promoter
  Pfam annotation: Domain name=DUF246; Domain location=150-493; Score =652.3; E_value=4.5e-193; Accession=PF03138.6; Description=Plant protein family
RLADVERDAAADCCGVPSDDSDGGTERRGHVKALLFARRSGRQRQAGAXVDRAWVRNAVACLLGATVVLVLVVSSRRGDVGAGRLVRRVDAGDGEVLGWREENLTAIARRPPDPPMTQIWTKLDNKGYTKCIERPKNRYRINSATAGYIIVDANGGLNQMRMGISDMVAVAKLMNATLVIPTLDHKSFWTDPSDFKDIFDVEHFKETLENDIMIVDSLPPAYKRLKPYIRAPKSWAKASYYRAFTRTLKKTKVVKFTHTDSRIVNNGLPPSIQRLRCRANYEALRYKKEIEELGNTLVDRLRNGSSNYIALHLRYEKDMLSFTGCSHNLTHQEAEELREMRLKVQHWKEKEINSEERRLQGGCPMTPREAALFLKAMGYPSSTKIYIVAGELYGVHSMDALRAEYPNFYTHYSLATENELESLKLYQNRLAAVDYNVALQSDVFVYTYDGNMAKAVQGHRRYEGFRKTINPNRQKLVEMIDKLDEGTINWNEFESEVKMHHENRLGGPYQRLSGRSARHEEYFYANPLPGCLCKRNTQDQVA

SEQ ID NO: 100252 - protein, 243 aa, Setaria italica
  Transcript Sequence Number=SeqID_34278
  Gene Ontology: Cellular component=nucleus; Biological process=mitotic chromosome condensation
  Homolog annotation: Hit_ID=Q9LUR0; Match level="QueryCoverage=100%, HitCoverage=35%, E-value=1e-62, Identity=53%"; Hit description =Chromosoma associate protein subunit H2
GSGGSSGGRFPILQANRDPESNWELDVAKSLEEYLLKICSGEVTGEDGAHSVNFAEAALLLQGSVQVYSRKVEYLYSLVLHALEFLSQKKQDQQENGSAHTNENDPSTIHNEEDDIFMGLDDVPAEARTSLDNNVDRDDLKRKTVRPPANLLVFEGDCLDSEASELDSYLLATCDFYGDFLLLDPCDAPAVFEFLQGKCSGEENSVAHPGSSVPSKSRPYVFTSPNGRSGGTGRKSAPGKVQG

SEQ ID NO: 100253 - protein, 108 aa, Setaria italica
  Transcript Sequence Number=SeqID_34279
  Gene Ontology: Mol. function=receptor activity
  Homolog annotation: Hit_ID=B6UEB9; Match level="QueryCoverage=90%, HitCoverage=24%, E-value=3e-21, Identity=52%"; Hit description=F-box domain containing protein
EVDCLKWDGLSIWVLEDYDTEEWVLKHRVSFLELFGQMNSLDSFNSIVLSIHPDRNLIFILQHSNQKLISYDMDSKELHAFHTLGHNFESLTPYVPNFLEPLVLTNEH

SEQ ID NO: 100254 - protein, 64 aa, Setaria italica
  Transcript Sequence Number=SeqID_34280
  Homolog annotation: Hit_ID=B6TMF2; Match level="QueryCoverage=98%, HitCoverage=35%, E-value=2e-11, Identity=49%"; Hit description =Transmembrane protein 18
MEEVQAAMTAHLDQVSGLVQALSSELRRGMGPAADNLRAFVRAVDWTEPWLVCLMAFHVILLLT

SEQ ID NO: 100255 - protein, 65 aa, Setaria italica
  Transcript Sequence Number=SeqID_34281
  Gene Ontology: Mol. function=protein binding; Biological process =ubiquitin-dependent protein catabolic process
  Homolog annotation: Hit_ID=B6SWY8; Match level="QueryCoverage=100%, HitCoverage=19%, E-value=1e-30, Identity=98%"; Hit description=ASK20
MSESELAVIKPEALKTYIWLQCFDGSIQQVEEEVAMFCPMICREIVKNGTGSSKNHAIVLPERVN

SEQ ID NO: 100256 - protein, 190 aa, Setaria italica
  misc_feature (70)..(70): Xaa can be any naturally occurring amino acid
  Transcript Sequence Number=SeqID_34282
  Gene Ontology: Mol. function=protein binding; Biological process =ubiquitin-dependent protein catabolic process
  Homolog annotation: Hit_ID=B6SWY8; Match level="QueryCoverage=93%, HitCoverage=52%, E-value=6e-52, Identity=64%"; Hit description=ASK20
NLTEEEKLEPLKNINDDPRIRLLNRLYAKKRKELQERQKLKDVQVQEEQKDERSLDELLCFINGDGGIIXSSGGALAAKSKKKIKRRKDQAKNPARANSEPVNKEGAGCVVSRKADSGNISELPCQSQDLQDDIEYPFDDADLDDGLDPAMREEIDREVADFAMKLNLVWPERVLLGQDQRMESHVGARW

SEQ ID NO: 100257 - protein, 341 aa, Setaria italica
  Transcript Sequence Number=SeqID_34283
  Gene Ontology: Mol. function=protein binding; Cellular component=cell cortex; Biological process=ubiquitin-dependent protein catabolic process
  Homolog annotation: Hit_ID=B6SWY8; Match level="QueryCoverage=100%, HitCoverage=100%, E-value=1e-157, Identity=82%"; Hit description =ASK20
  Pfam annotation: Domain name=Skp1; Domain location=90-164; Score =54.3; E_value=4.7e-13; Accession=PF01466.11; Description=Skp1 family, dimerisation domain
  Pfam annotation: Domain name=Skp1_POZ; Domain location=16-81; Score =7.1; E_value=0.019; Accession=PF03931.7; Description=Skp1 family, tetramerisation domain
  Pfam module annotation: Pfam domain module=Skp1::Skp1_POZ; Domain location=90-164::16-81
MSETELAVIKPEALKTYIWLQCFDGSIQQVEEEVAMFCPMICREIVKNGTGSSKNHAIALPERVNPASLSLILDYCRFHQVPGRSNKERKSFDEKFVRIDTERLCELTSAADSLQLKPLVDLTSRALARIIEGKTPEEIRDIFHLPDDLTEEEKLEPLKNINDDPRIRLLNRLYAKKRKELQERQKLKDVQVQEEQKDERSLDELLCFINGDGGSGGGKTAKSKKKNKRRKDQAKNPPKADSEPVNKEHVTPCKVDGGNISRLPCQSPDMQDDVEDPFEDADLDDGLDPAMKEELDREVEDFARRLNSVWPERMHLGQDRRIESHIGGNGSLQRFPGFNHR

SEQ ID NO: 100258 - protein, 126 aa, Setaria italica
  Transcript Sequence Number=SeqID_34284
  Gene Ontology: Mol. function=protein disulfide oxidoreductase activity; Biological process=intracellular signaling cascade
ALSAPAPHGYAEEEAEETEAGGRQRPVDRSASANSAAAAVAVDVASIGRFLRDRRAVLSSAITRRISSLKESSAPPAAADTYGVQEIHLPNVKVTVRLKDAIAAEDDDISLADSNDDGGYSFSGGH

SEQ ID NO: 100259 - protein, 379 aa, Setaria italica
  Transcript Sequence Number=SeqID_34285
  Gene Ontology: Mol. function=structural molecule activity; Cellular component=cytoskeleton; Biological process=regulation of actin filament polymerization
  Homolog annotation: Hit_ID=B6STS7; Match level="QueryCoverage=100%, HitCoverage=87%, E-value=0.0, Identity=89%"; Hit description=Actin -like protein 3
  Pfam annotation: Domain name=Actin; Domain location=5-372; Score =184.2; E_value=3.6e-52; Accession=PF00022.11; Description=Actin
QYNAGIMADLDFFIGDEALSRLRSSGLYTLRSPIHNGQVDDWDTMERFWQQCIFNYLRCNPEEHYFLLTDSPVSTPESRECTGEIMFETFNVPGLYISVQSVLSLSAGYAYLKSISDENSDPSSDMTGVVVDIGDGASHIVPVVNGYVIGSSIKSFPLSGSDVTQFVSQLLQERGELVPPEDSLDISRKVKEMYCYTCSDIVKEFKKHDKKPDKYIKHWSAIKPKTGVPYTIDIGYERFLGPEIFFKPEIYSADFATPLPQLIDRCVQSAPIDTRRALYKNIVLSGGSTMFKDFHKRLQSDIKKIVDERVAATNAEHHVEVRPIEVNVVAHPIQSYAVWFGGSVAASNPEFYEYCHTKEEYEEHGASICRTSPVFKGMY

SEQ ID NO: 100260 - protein, 212 aa, Setaria italica
  misc_feature (33)..(33): Xaa can be any naturally occurring amino acid
  Transcript Sequence Number=SeqID_34286
  Gene Ontology: Mol. function=aminopeptidase activity; Cellular component=chloroplast; Biological process=cellular process
  Homolog annotation: Hit_ID=B9RF64; Match level="QueryCoverage=94%, HitCoverage=28%, E-value=3e-88, Identity=74%"; Hit description=Xaa -pro aminopeptidase, putative
  Pfam annotation: Domain name=Peptidase_M24; Domain location=1-143; Score=-75.3; E_value=0.0012; Accession=PF00557.16; Description =metallopeptidase family M24
GTDNHFYWIVGAQYIDGTTDITRTVHFGEPSPXQKECFTRVLQGHIAIDQAVFPERTPGFVLDVLARSSLWKIGLDYRHGTGHGVGAALNVHEGPQSISYRYGNLTALQKGMVVSNEPGYYEDNSFGIRIENLLLIKELNLANSFGGISYLGFEKLTFVPIQSKLIDMSLLSPAEINWVNAYHEEVWEKVSPLLSGDSRDWLWKNTRPLLEM

SEQ ID NO: 100261 - protein, 112 aa, Setaria italica
  Transcript Sequence Number=SeqID_34287
  Homolog annotation: Hit_ID=B6TRR6; Match level="QueryCoverage=100%, HitCoverage=27%, E-value=8e-52, Identity=87%"; Hit description =NOL1/NOP2/sun family protein
IAGSKAYQQGKIYGIDAASGAAILALDVRPGDHVLDLCAAPGAKLCMLADMLGSTGSLTGIDVAKHRLSACRTMLQKYSLGDRTRLFVADGTLFSILPVNSNLQRRKGQLAL

SEQ ID NO: 100262 - protein, 62 aa, Setaria italica
  Transcript Sequence Number=SeqID_34288
KNMMHVFFYGPQTRRTNRTLISHFGNIVKGWSWHPLILTLQPMVPKNCKLCMYCKGVALGTL

SEQ ID NO: 100263 - protein, 79 aa, Setaria italica
  Transcript Sequence Number=SeqID_34289
  Gene Ontology: Mol. function=protein serine/threonine kinase activity; Biological process=protein amino acid phosphorylation
  Homolog annotation: Hit_ID=B8XA57; Match level="QueryCoverage=93%, HitCoverage=6%, E-value=3e-14, Identity=56%"; Hit description =Receptor kinase
  Pfam annotation: Domain name=LRR_1; Domain location=14-36; Score =20.9; E_value=0.0051; Accession=PF00560.25; Description=Leucine Rich Repeat
  Pfam annotation: Domain name=LRR_1; Domain location=38-60; Score =16.2; E_value=0.14; Accession=PF00560.25; Description=Leucine Rich Repeat
  Pfam module annotation: Pfam domain module=LRR_1::LRR_1; Domain location=14-36::38-60
SPARSPAEIGRLVTLQVLDLSRNNLSGGIPPELSNLARLQVLILRRNRLTGPIPPALNQLNFLAVFSVSYNDLEGAIPT

SEQ ID NO: 100264 - protein, 76 aa, Setaria italica
  Transcript Sequence Number=SeqID_34290
  Subcellular localization annotation: CTP_CleavageSite=53; ConfidenceScore=5.42e-01
SNPTSILVNQPTCKPTPDNIRRGRDPSKAIQSNQHTRRTVLRNLAARTCLNRVCVHLRVLDLGEPHKPNTNSSTPR

SEQ ID NO: 100265 - protein, 108 aa, Setaria italica
  Transcript Sequence Number=SeqID_34291
  Homolog annotation: Hit_ID=Q9FX78; Match level="QueryCoverage=100%, HitCoverage=23%, E-value=1e-14, Identity=44%"; Hit description =F19K19.6 protein
HHASVTIARAERIKKHYAAKCVEKQLLTVPRTVTCHVLSSDTLAAVTLDACKDNHGEHVSETKACTMKSPQILEPTQNSPPLILAGLHACGDLSVNMLRVFVSCEQVK

SEQ ID NO: 100266 - protein, 57 aa, Setaria italica
  Transcript Sequence Number=SeqID_34292
  Gene Ontology: Mol. function=transferase activity, transferring phosphorus-containing groups; Cellular component=chloroplast; Biological process=sulfate assimilation
  Homolog annotation: Hit_ID=Q2R0R8; Match level="QueryCoverage=100%, HitCoverage=18%, E-value=5e-24, Identity=89%"; Hit description =Adenylyl-sulfate kinase
KLARAGKIKGFTGIDDPYEPPSDCEIVIECKIGDCPSPKSMADQVVSYLEANGFLED

SEQ ID NO: 100267 - protein, 90 aa, Setaria italica
  Transcript Sequence Number=SeqID_34293
LLPFIGRATPHGSLFLGLSKHNGPINAYRINVTTPDKDHAPNLSITVLPVKYMDNEVDAGPCFFSLEDGCFCSFSFSLDSCSITLHPKKR

SEQ ID NO: 100268 - protein, 263 aa, Setaria italica
  Transcript Sequence Number=SeqID_34294
AIVGFKKYGNMSYYQATMNKPHSTLTAYRPVAGLGRTHELLGRHSMCLHSTRSCKLQQKLYPRLVLVSACHKRLGPVYASSGKENSQLVNDPFSMESLNKAMAQAKRPRSLQDLLREQMAKLRGQGSGGNGGNKNRYGGSGGGSDGPEDESFKDSLYEMIQILIATIAFIIVYIHIIRGEELYRLARDYTRYLVTGKRTARLKRAMLNWREFSESITKKNGAQEDYYGRSDSSESTWWQQPQQLARRLEELFRGYLRPHAQES

SEQ ID NO: 100269 - protein, 115 aa, Setaria italica
  misc_feature (38)..(38): Xaa can be any naturally occurring amino acid
  Transcript Sequence Number=SeqID_34295
  Gene Ontology: Mol. function=histone-lysine N-methyltransferase activity; Cellular component=nucleus; Biological process=chromatin modification
  Homolog annotation: Hit_ID=Q8LPU2; Match level="QueryCoverage=99%, HitCoverage=17%, E-value=5e-36, Identity=64%"; Hit description=SET domain protein 105
  Pfam annotation: Domain name=YDG_SRA; Domain location=1-105; Score =139.8; E_value=8.4e-39; Accession=PF02182.9; Description=YDGSRA domain
PVAISIVSAGVYDNTEDDPDILVYTGQGMSGKDDQKLXERGNLALQRSLHRGNPIRVIRSIRDLTCPTGKIYIYDGLYKIKEAWVEKAKSGFNVFKHKLLREPGQPDGIAMWKKT

SEQ ID NO: 100270 - protein, 240 aa, Setaria italica
  misc_feature (57)..(57): Xaa can be any naturally occurring amino acid
  misc_feature (181)..(181): Xaa can be any naturally occurring amino acid
  misc_feature (198)..(198): Xaa can be any naturally occurring amino acid
  Transcript Sequence Number=SeqID_34296
  Homolog annotation: Hit_ID=B6U4D9; Match level="QueryCoverage=100%, HitCoverage=35%, E-value=3e-86, Identity=62%"; Hit description =Protein SEY1
GRSVVESKAKEEAGRVLIRMKDRFSTLFSRDADSMPRVWTGKEDIKAIILTARLRLXSNSMKLLATLAAIRLDEDGDNIENTLSLALVDAARPAGTTDRSIQLSDPLASSSWERVPEEKTLISPVQCKSLWRQFKAETEYTVTQAIAAQEANKRNNNWLPPPWALAAMAILGFNEFMTLLXRLADEGQRPAAGPERQXREMELQPKSTRNGSSYSNVTSAGSSSVTTSENGPEYSSPVAQ

SEQ ID NO: 100271 - protein, 810 aa, Setaria italica
  Transcript Sequence Number=SeqID_34297
  Gene Ontology: Mol. function=nucleotide binding; Cellular component =endoplasmic reticulum membrane
  Homolog annotation: Hit_ID=B6U4D9; Match level="QueryCoverage=100%, HitCoverage=100%, E-value=0.0, Identity=88%"; Hit description =Protein SEY1
  Pfam annotation: Domain name=MMR_HSR1; Domain location=39-132; Score=- 20.0; E_value=0.07; Accession=PF01926.15; Description=GTPase of unknown function
  Pfam annotation: Domain name=RHD3; Domain location=44-785; Score =1327.1; E_value=0; Accession=PF05879.4; Description=Root hair defective 3 GTP-binding protein (RHD3)
  Pfam module annotation: Pfam domain module=MMR_HSR1::RHD3; Domain location=39-132::44-785
MADVCFSTQLIDGDGVFNVSGLENFMKEVSLGECGLSYAVVSIMGPQSSGKSTLLNHLFRTNFREMDAFKGRSQTTKGIWLAKAQDIEPCTLVMDLEGTDGRERGEDDTAFEKQSALFALAVSDIVLINMWCHDIGREQAANKPLLKTVFQVMMRLFSPRKTTLLFVIRDKSRTPLENLEPILREDIQKIWDAVPKPHAHKETPLSEFFNVQVVALSSYEEKEELFKEQVSDLRDRFQHSIAPGGLAGDRRGVVPASGFSFSSQQFWKVIKENKDLDLPAHKVMVATVRCEEIGNEKVASFTADEEWQQFEEAVQHDYCPGFGKKISSLLDRCLSEYDMEAIYFDEGVRNSKRQQLESKLLQLVNPAYQSLLNHLRTRTLEAFKESFDKALEKEGFAAAARDCTQTFLEKFDKGSEDAAIQQVNWDTSKVKDKLKRDIEAHVASVRTTKLSEVCAKYEAQLSKALAEPVEALLDSASEDTWPAIRKLLERETKAAVLGLESAVSSFELDEATEKELLVKLEKHGKSVVESKAKEEAGRVLIRMKDKFSTLFSRDADSMPRVWTGKEDIKAITKTARSASMKLLSTMAAIRLEEDGDNIENTLSIALVDAARPAGTTDRSIQLSDPLASSSWERVPEEKTLITPVQCKNLWRQFKAETEYTVTQAIAAQEANKRNNNWLPPPWALAAMAILGFNEFMTLLRNPLYLLVIFVVYLVGKAIWVQSEIGREFQHGFLPAILSLSTKFVPTIMNILKRLADEGQRPAAGPERQREMELQPKSTRNGSSYSNVTSAGSSSVTTSEIGPEYSSPVAQ

SEQ ID NO: 100272 - protein, 50 aa, Setaria italica
  Transcript Sequence Number=SeqID_34298
YAIMILERYADYRGTACLQYMFRLIFANLCRISAWLSRNVITQLLFVTSM

SEQ ID NO: 100273 - protein, 33 aa, Setaria italica
  Transcript Sequence Number=SeqID_34299
GDQKLTHHVISLQYLTRPSRVIKKKHIPAEYFS

SEQ ID NO: 100274 - protein, 82 aa, Setaria italica
  Transcript Sequence Number=SeqID_34300
VTPARRAWAAVSTRVRARNTGSGGSILKLHEDVQTCGYRDVQVMFEILTSELEVASHGPKHHHQRKRPAWTPPPPWPSHRSS

SEQ ID NO: 100275 - protein, 40 aa, Setaria italica
  Transcript Sequence Number=SeqID_34301
LRSRGLCLVPVSCTLDVGVDVVADYWAAAAAPAFGMGFGG

SEQ ID NO: 100276 - protein, 115 aa, Setaria italica
  Transcript Sequence Number=SeqID_34302
  Gene Ontology: Mol. function=sequence-specific DNA binding; Cellular component=nucleus; Biological process=regulation of transcription, DNA-dependent
  Homolog annotation: Hit_ID=B6SVB9; Match level="QueryCoverage=94%, HitCoverage=18%, E-value=2e-31, Identity=69%"; Hit description =WRKY70-superfamily of TFs having WRKY and zinc finger domains
  Pfam annotation: Domain name=WRKY; Domain location=84-115; Score =30.2; E_value=1.6e-07; Accession=PF03106.7; Description=WRKY DNA -binding domain
DGDSRAAGGAFPQSSSMLMAPLGGLGDSYNGELQQQQPWSYQEPTTQFEAPSAATTQPDMLGNGGYSAVPAPASFREQSNRPSSDDGYNWRKYGQKNMKGSENPRSYYKCSFPGS

SEQ ID NO: 100277 - protein, 89 aa, Setaria italica
  Transcript Sequence Number=SeqID_34303
SGSAEDHPQAVPSGSGGASASGDTGEENERLRRENARLTRELGQMKKLCNNILLLMTKYASSQQLDASAALSSVVNCSGESSEALPPPP

SEQ ID NO: 100278 - protein, 63 aa, Setaria italica
  Transcript Sequence Number=SeqID_34304
  Homolog annotation: Hit_ID=UPI000034EDDF; Match level="QueryCoverage =84%, HitCoverage=9%, E-value=8e-15, Identity=66%"; Hit description =emb1381 (embryo defective 1381)
MAAGGQPWRVIPRPVLETVLHNHAIRPRVPQPLLFHGPRGVGKSTLLLDRLLPRWSENPHATA

SEQ ID NO: 100279 - protein, 263 aa, Setaria italica
  misc_feature (97)..(97): Xaa can be any naturally occurring amino acid
  misc_feature (129)..(129): Xaa can be any naturally occurring amino acid
  misc_feature (256)..(256): Xaa can be any naturally occurring amino acid
  Transcript Sequence Number=SeqID_34305
EALETLKLELNNAKQPVFDSLFELGALCLLCIFLLFPENILEACFTLLASAESDDVKGEGLYFLNQLTCHLNSNAANDSLDDKIDGQSSGTEGNLPXTQKIVRSNNSSDDNVDLENSMVESNECYITIXLQAISRHPSLRHWILSRYKKLCDSCKPAVVSEVSSCLKVLGSLSEPVEDKSDIGNGSSVLEKLDKNVRENMQPDELVSSSGQGALSKTEKKDSYGDKTSQDKNMDMVHADNQKSDRLADAKMDYCKXVSVVADT

SEQ ID NO: 100280 - protein, 31 aa, Setaria italica
  Transcript Sequence Number=SeqID_34306
  Homolog annotation: Hit_ID=B6TJ24; Match level="QueryCoverage=100%, HitCoverage=9%, E-value=9e-10, Identity=93%"; Hit description=Copper chaperone
MASGEAEPLQYTTTVLRVSIHCEGCKKKVKK

SEQ ID NO: 100281 - protein, 110 aa, Setaria italica
  Transcript Sequence Number=SeqID_34307
  Gene Ontology: Mol. function=catalytic activity; Cellular component =plasma membrane; Biological process=cellular metabolic process
  Homolog annotation: Hit_ID=B6TDM4; Match level="QueryCoverage=100%, HitCoverage=33%, E-value=5e-48, Identity=82%"; Hit description =Dihydroflavonol-4-reductase
GCTEEYRDIFIGAVHVEDVALAHILVFENPSASGRHLCNESISHWSDFAAKVAELYPNYKVPKFPTDTQPGLVRAEVGSKKLIALGMQFSSLEKIIRDAVESLKSRGYIS

SEQ ID NO: 100282 - protein, 324 aa, Setaria italica
  Transcript Sequence Number=SeqID_34308
  Gene Ontology: Mol. function=catalytic activity; Cellular component =plasma membrane; Biological process=cellular metabolic process
  Homolog annotation: Hit_ID=B6TDM4; Match level="QueryCoverage=99%, HitCoverage=97%, E-value=1e-141, Identity=75%"; Hit description =Dihydroflavonol-4-reductase
  Pfam annotation: Domain name=3Beta_HSD; Domain location=7-280; Score=- 29.1; E_value=5.3e-08; Accession=PF01073.11; Description=3-beta hydroxysteroid dehydrogenaseisomerase family
  Pfam annotation: Domain name=DapB_N; Domain location=4-107; Score= -37.6; E_value=0.076; Accession=PF01113.12; Description =Dihydrodipicolinate reductase, N-terminus
  Pfam annotation: Domain name=Epimerase; Domain location=6-254; Score =66.4; E_value=1.1e-16; Accession=PF01370.13; Description=NAD dependent epimerasedehydratase family
  Pfam annotation: Domain name=KR; Domain location=5-142; Score=-70.1; E_value=0.0057; Accession=PF08659.2; Description=KR domain
  Pfam annotation: Domain name=NAD_binding_4; Domain location=8-238; Score=-0.7; E_value=3e-09; Accession=PF07993.4; Description=Male sterility protein
  Pfam annotation: Domain name=NmrA; Domain location=6-277; Score= -107.3; E_value=0.052; Accession=PF05368.5; Description=NmrA-like family
  Pfam annotation: Domain name=Polysacc_synt_2; Domain location=6-266; Score=-175.1; E_value=0.0061; Accession=PF02719.7; Description =Polysaccharide biosynthesis protein
  Pfam annotation: Domain name=adh_short; Domain location=4-143; Score=- 5.6; E_value=3.2e-05; Accession=PF00106.17; Description=short chain dehydrogenase
  Pfam module annotation: Pfam domain module=3Beta_HSD::DapB _N::Epimerase::KR::NAD_binding_4::NmrA::Polysacc_synt_2::adh_short; Domain location=7-280::4-107::6-254::5-142::8-238::6-277::6-266::4 -143
KGGRTVVVTGASGFIGSTLVRRLLDRGYNVHAGVLNPDDKAETDHLLALAAGAGEGRLRIFRCDLLNRAAILDAARGCSGVFHLASPCTIDPVSDPQKQLIVPAVEGTLNVLRAAKEAGSVRRVVLTSSSSAIMPSPGWPAGEVPDERCWTDIDYCEKNGLWYSVSKTLAEKAAWKFAEEDGVDVAVVNPGTVMGPMIPPTINSSMSILLRLLEGCTEEYADIFMGPVHVEDVALAHILVFENPSASGRHICVESISHWSDFAAKVAELYPNLNVPKLPEDTQPGLVRAEVGSKKLIALGLQISPVEKIIRDAVESLKSRGYIS

SEQ ID NO: 100283 - protein, 152 aa, Setaria italica
  Transcript Sequence Number=SeqID_34309
  Gene Ontology: Mol. function=cyclin-dependent protein kinase inhibitor activity; Cellular component=nucleus; Biological process =cell cycle arrest
  Homolog annotation: Hit_ID=Q52PU9; Match level="QueryCoverage=96%, HitCoverage=76%, E-value=3e-39, Identity=56%"; Hit description =Cyclin-dependent kinase inhibitor 1
  Pfam annotation: Domain name=CDI; Domain location=105-152; Score =82.5; E_value=1.6e-21; Accession=PF02234.11; Description=Cyclin -dependent kinase inhibitor
RRRGREKESAGGEYLELRSRRLEKLPPPVPAGRRCGGKKAAAAAAAAQEEAEASFGENMLELDGMERSTRETTPCSLINSETISTPGSTTRPSHSSHRRVQAPVRTISISKELNEFFGAAERRQQQAFIDKYNFDPVNDCPLPGRYEWVKLD

SEQ ID NO: 100284 - protein, 198 aa, Setaria italica
  misc_feature (100)..(100): Xaa can be any naturally occurring amino acid
  Transcript Sequence Number=SeqID_34310
  Gene Ontology: Mol. function=protein binding; Cellular component =nucleus; Biological process=cell division
  Homolog annotation: Hit_ID=Q8LHA8; Match level="QueryCoverage=92%, HitCoverage=51%, E-value=3e-78, Identity=75%"; Hit description =Cyclin-D2-2
  Pfam annotation: Domain name=Cyclin_N; Domain location=23-155; Score =113.2; E_value=8.8e-31; Accession=PF00134.15; Description=Cyclin, N -terminal domain
EVGSALDFSDAAAGAVFPVDTDEAVRELVEKETDHLPLEGYAERLEHAGLESSWRRDAMDWICKVHSYYNFGPLSLYLAVNYLDRFISSYNLPHDKPWIXQLLSVACLSLAIKMEETVVPLPVDLQVCDPECEFEARNIGRMEIHVMTTLKWRMQAVTPFAFISYFLDKFSEGKPPSFALASRCADIIVGTLKGSAFL

SEQ ID NO: 100285 - protein, 164 aa, Setaria italica
  misc_feature (16)..(16): Xaa can be any naturally occurring amino acid
  misc_feature (20)..(20): Xaa can be any naturally occurring amino acid
  misc_feature (37)..(37): Xaa can be any naturally occurring amino acid
  Transcript Sequence Number=SeqID_34311
  Homolog annotation: Hit_ID=B9SEJ5; Match level="QueryCoverage=94%, HitCoverage=18%, E-value=4e-23, Identity=40%"; Hit description =Nucleotide binding protein, putative
  Pfam annotation: Domain name=WD40; Domain location=5-56; Score=16.1; E_value=0.15; Accession=PF00400.24; Description=WD domain, G-beta repeat
  Pfam annotation: Domain name=WD40; Domain location=74-119; Score =34.0; E_value=6e-07; Accession=PF00400.24; Description=WD domain, G -beta repeat
  Pfam module annotation: Pfam domain module=WD40::WD40; Domain location=5-56::74-119
SSYHGKQYARRDAHLXSLVXVAWSPLVSSSDGTLVSXSNWCILAVGSKSGNVSFWKLHKPEYYTIDAGVVTSDPILIGVLQAHKSWVSAITWEVSSAGSSKSSLLLATGCSDGSVKIWLANIEGLNQCTNAEEVPFALVAEVTTDLSAPVSSISLAVPIRSQYV

SEQ ID NO: 100286 - protein, 74 aa, Setaria italica
  Transcript Sequence Number=SeqID_34312
  Subcellular localization annotation: CTP_CleavageSite=49; ConfidenceScore=5.25e-01
LTKPPRTPTPTGTRAPHNPPPSRLRIRSPPEELGIPQAARPPPIRRAIRRSAPVSRLLLLHAPPPSSTKRKGTR

SEQ ID NO: 100287 - protein, 406 aa, Setaria italica
  misc_feature (177)..(177): Xaa can be any naturally occurring amino acid
  Transcript Sequence Number=SeqID_34313
  Gene Ontology: Mol. function=protein tyrosine kinase activity; Cellular component=integral to membrane; Biological process=protein amino acid phosphorylation
  Homolog annotation: Hit_ID=B9RUI5; Match level="QueryCoverage=85%, HitCoverage=55%, E-value=1e-109, Identity=56%"; Hit description =BRASSINOSTEROID INSENSITIVE 1-associated receptor kinase 1, putative
  Pfam annotation: Domain name=Pkinase; Domain location=97-378; Score= -19.8; E_value=2.6e-07; Accession=PF00069.17; Description=Protein kinase domain
  Pfam annotation: Domain name=Pkinase_Tyr; Domain location=97-378; Score=-40.8; E_value=5.2e-11; Accession=PF07714.9; Description =Protein tyrosine kinase
  Pfam module annotation: Pfam domain module=Pkinase::Pkinase_Tyr; Domain location=97-378::97-378
SLGGASLGILCAGLVIVIAAASLLLAYFFWRYTEKGKGGHRRQRRGGSESGGAAVEDGSWWAERLRAAHNRLAPVSLFQKPIVKVKLADLMAATQDFSTSHIVVAGSSRAGTAYRAVLRDGSALTVKRLHSCPLSEKAFRAEMGRIGQLRHPNIVPLLGFCVVEDERLLVYKHMESXGALSSVMKKPGEAPLDWATRLRIAVGAARGLAWLHHGFQVPQIHQNLSASAVLLDEDYEARITDVGLTRLVRMAPGEGGDTSPFLNGDFGEFGYVAPEYASNPVGTMKGDAYAFGVILFELVSGQEAAAVVTDVTGEGFKGTLVDWVNQLKASGRISDVVDKQLRGKGHDKEIDEFLKVAFACTQPRPKERYSMYRAYHSLKSIGQGRDVSEQFDEFPLAYNKEDSDTM

SEQ ID NO: 100288 - protein, 99 aa, Setaria italica
  Transcript Sequence Number=SeqID_34314
  Gene Ontology: Mol. function=nucleic acid binding; Cellular component= ribonucleoprotein complex; Biological process=nuclear mRNA splicing, via spliceosome
  Homolog annotation: Hit_ID=B9SCZ8; Match level="QueryCoverage=96%, HitCoverage=97%, E-value=2e-38, Identity=83%"; Hit description=Lsm1, putative
  Pfam annotation: Domain name=LSM; Domain location=6-75; Score=78.9; E_ value=1.8e-20; Accession=PF01423.14; Description=LSM domain
MASGGPALESLVNQVISVITNDGRNIVGTLRGFDQATNIILDESHERVYSTKEGVQQLVLGLYIIRGDNISVVGEVDEDLDARLDLSKLRAHPLKPVIH

SEQ ID NO: 100289 - protein, 41 aa, Setaria italica
  Transcript Sequence Number=SeqID_34315
NLFVRAPSCTFQKLLIRQAFCLFLILGKVARRATDFGSPFD

SEQ ID NO: 100290 - protein, 95 aa, Setaria italica
  misc_feature (11)..(11): Xaa can be any naturally occurring amino acid
  misc_feature (24)..(24): Xaa can be any naturally occurring amino acid
  Transcript Sequence Number=SeqID_34316
  Gene Ontology: Mol. function=electron carrier activity; Cellular component=cell wall; Biological process=DNA integration
  Homolog annotation: Hit_ID=B9SB07; Match level="QueryCoverage=100%, HitCoverage=17%, E-value=6e-17, Identity=45%"; Hit description =Reticuline oxidase, putative
LTSPIPAAGLXGLLARIVEDGGGXSIDIDPQGGAMGATPESATPYAHRRGYLYNVQYFVKWHGGAGGEEEEGHLGWVRGVHGFMAPYVSSGPRAA

SEQ ID NO: 100291 - protein, 89 aa, Setaria italica
  Transcript Sequence Number=SeqID_34317
HAAEASDTPSQALGGSSEGSLELPVPEQLGMETDLCEVGPSDAPYQVQDGSSGAASQLPIPEQRGTETDLREAETSPEHQDNREINLKP

SEQ ID NO: 100292 - protein, 93 aa, Setaria italica
  misc_feature (74)..(74): Xaa can be any naturally occurring amino acid
  Transcript Sequence Number=SeqID_34318
MEATADAGGHSSGVPEDQQPPKTLVDWALQILSTADPDEKARLGDLAASLWLCGEIPLPYDPSRPAPPPPDRPXRSAEVRLLPPSRMPKLGKG

SEQ ID NO: 100293 - protein, 82 aa, Setaria italica
  Transcript Sequence Number=SeqID_34319
  Gene Ontology: Mol. function=metal ion binding
MVALPRRAWPDVSFRAPASSSGREGDMTGLGKIMRLLKFSDSMEMTGIGAGRSVSFSAGSCQHPPARSGPSAAGVSSDEMPR

SEQ ID NO: 100294 - protein, 238 aa, Setaria italica
  misc_feature (11)..(11): Xaa can be any naturally occurring amino acid
  Transcript Sequence Number=SeqID_34320
ERKLISVIEDXFSAASSVRAEAEFTVSSLEETLIEVNLILDILFLAFYDNFSRCNGGLWISLCSLFKDILCGSYDVGKFAVSVEAKNSFHYAKAQLLLILIETLDFENLLRMIRDEVPLSVGCSTFSVGDILEMDVEISKIPEFLMVESGPLVLAWAVFLCLVLSLPESNANLEIDHTLYARRAFEFAPFNYLLGVLCSSIFRESDGPVSGYRGILRTFISAFIASYEIITYKVLSKV

SEQ ID NO: 100295 - protein, 136 aa, Setaria italica
  Transcript Sequence Number=SeqID_34321
  Gene Ontology: Mol. function=unfolded protein binding; Cellular component=prefoldin complex; Biological process=protein folding
  Homolog annotation: Hit_ID=Q9ZW98; Match level="QueryCoverage=92%, HitCoverage=45%, E-value=2e-35, Identity=53%"; Hit description =F11M21.31 protein
  Pfam annotation: Domain name=Prefoldin; Domain location=28-136; Score= 58.2; E_value=3.1e-14; Accession=PF02996.9; Description=Prefoldin subunit
MAAPRKGTATPLGAVFSPEETKRAVARVAESIADRRAELGRLQGFVADNAALVSLVNRLPDELSHEIMVPFGGAAFFPGRLIHTNELMVLLGEGYYAERSAKQTTDILHRRGMELEAQVEVMKATISRTFSKVLER

SEQ ID NO: 100296 - protein, 144 aa, Setaria italica
  misc_feature (80)..(80): Xaa can be any naturally occurring amino acid
  Transcript Sequence Number=SeqID_34322
  Subcellular localization annotation: CTP_CleavageSite=54; ConfidenceScore=5.24e-01
ISAAEPVPRQNSSNMVGSPWSRLITDSGVTAGLPVDGAPAATGSSCCLAVLLPLLSAASRCIRQACWCSSWCGGTVLLTXGWVRRKSPTLSAKETKKAACHCQSGGAGFLGLLPPAALVENFFPGGGLLTERGAGRSGPPFAAA

SEQ ID NO: 100297 - protein, 208 aa, Setaria italica
  Transcript Sequence Number=SeqID_34323
  Gene Ontology: Mol. function=hydrolase activity; Cellular component =chromosome; Biological process=DNA topological change
  Homolog annotation: Hit_ID=B6UAQ8; Match level="QueryCoverage=100%, HitCoverage=54%, E-value=1e-104, Identity=93%"; Hit description =Meiotic recombination protein SPO11
CQRHVNRAIQDVVSLLRCTRQSLGVMASSRGALIGRLVLHEPGEEQIDCSILGASGHAITGDLNVLSKLNLSSDARYIIVVEKDAIFQRLAEDRLYNQLPCILITAKGYPDIATRFILHRLSQTFPNMLIFALVDWNPAGLAILCTYKYGSISMGLESYRYACNVKWLGLRGDDLQLIPDRAFQELKPRDLQIAKSLLSSKFLQESHR

SEQ ID NO: 100298 - protein, 356 aa, Setaria italica
  misc_feature (32)..(32): Xaa can be any naturally occurring amino acid
  Transcript Sequence Number=SeqID_34324
  Gene Ontology: Mol. function=hydrolase activity; Cellular component =chromosome; Biological process=DNA topological change
  Homolog annotation: Hit_ID=B6UAQ8; Match level="QueryCoverage=95%, HitCoverage=95%, E-value=1e-167, Identity=83%"; Hit description =Meiotic recombination protein SPO11
  Pfam annotation: Domain name=TP6A_N; Domain location=64-137; Score =71.3; E_value=3.5e-18; Accession=PF04406.6; Description=Type IIB DNA topoisomerase
MAEAAADVAAASLFGADRRLCSADILAPAEVXQGSSSANCSLRSGLLSDVSSIYLSYAFCKRSLMRESNGKAFVRVWKVMEMCYKILGEGKLVHQRELFYKLLSDSPKYFSCQRHVNRAIQDVVSLLRCTRQSLGVMASSRGALIGRLVLHEPGEEQIDCSILGATGHAITGDLNVLSKLNLSSDARYLIVVEKDAIFQRLAEDRLYNQLPCILITAKGYPDIATRFILHRLSQTFPNMLIFALVDWNPAGLAILCTYKYGSISMGLESYRYACNVKWLGLRGDDLQLIPDRAFQELKPRDLQIAKSLLSSKFLQESHRAELMLMVETGKRAEIEALYSHGFDFLGKYIARKIVQG

SEQ ID NO: 100299 - protein, 195 aa, Setaria italica
  Transcript Sequence Number=SeqID_34325
  Gene Ontology: Mol. function=nucleic acid binding; Cellular component= intracellular
  Pfam annotation: Domain name=zf-C2H2; Domain location=120-144; Score =16.6; E_value=0.11; Accession=PF00096.18; Description=Zinc finger, C2H2 type
  Pfam annotation: Domain name=zf-C2H2; Domain location=52-76; Score =4.4; E_value=4; Accession=PF00096.18; Description=Zinc finger, C2H2 type
  Pfam module annotation: Pfam domain module=zf-C2H2::zf-C2H2; Domain location=120-144::52-76
NTYSEVSFEEHCAGYRHQSNLAEFEWTKEAAGAKRISTAEASIGMQHNPTAWNCSICQVKCLGELDLNNHLKGRRHQENAEVLWGESKESEGKSGFKEVELYEKKEVQLVNMDQRPTSRWNCSICKANCTSESDLESHLRGRRHEQTVKAQSIQGTRRPARQSASHLGGKNLQAVLSAYNWDAVANIVAKDDVAI

SEQ ID NO: 100300 - protein, 58 aa, Setaria italica
  Transcript Sequence Number=SeqID_34326
ILINLTLCDSSNLRTSNPLHSVAPTVSLIQALLERTVRASHGLEVLVRHRHQLLLHPR

SEQ ID NO: 100301 - protein, 42 aa, Setaria italica
  Transcript Sequence Number=SeqID_34327
RTCKLQQRAGRQLLGGPAQHATPSGPVQHGPEQVQLAQELAA

SEQ ID NO: 100302 - protein, 157 aa, Setaria italica
  misc_feature (120)..(120): Xaa can be any naturally occurring amino acid
  Transcript Sequence Number=SeqID_34328
  Gene Ontology: Cellular component=mitochondrion
  Homolog annotation: Hit_ID=B9TPR6; Match level="QueryCoverage=78%, HitCoverage=47%, E-value=6e-27, Identity=48%"; Hit description =Pentatricopeptide repeat-containing protein, putative (Fragment)
  Pfam annotation: Domain name=PPR; Domain location=46-80; Score=10.2; E_value=0.56; Accession=PF01535.12; Description=PPR repeat
  Pfam annotation: Domain name=PPR; Domain location=81-115; Score=28.6; E_value=2.6e-05; Accession=PF01535.12; Description=PPR repeat
  Pfam module annotation: Pfam domain module=PPR::PPR; Domain location =46-80::81-115
ERQVGYSHTSACYDELAEALSFEDRARTAERLLREIGEDDREVLGRLLNVLVRKCCRHGAWTEALEELGRLKDFGYRPLGATYNALVQVLATAGQVDMGFRVQKEMSESGFCMDKFTVGXFAQALCKEGRYSDALDMIEREDFKLDTVLCTQMISGL

SEQ ID NO: 100303 - protein, 121 aa, Setaria italica
  Transcript Sequence Number=SeqID_34329
  Gene Ontology: Mol. function=hydrolase activity
  Homolog annotation: Hit_ID=B9RAS9; Match level="QueryCoverage=98%, HitCoverage=36%, E-value=5e-30, Identity=49%"; Hit description =Hydrolase, putative
GGAQLRWLDGVLRGAARRRERVVVCSHLPVHPGAASPTGLMWNYEEVMAVVRRHEGCVVACLAGHVHRGGYAVDGCGVHHRTLEAAVECPPGTDAFGRVEVYPDRLRLVGSDRMASTEMLL

SEQ ID NO: 100304 - protein, 50 aa, Setaria italica
  Transcript Sequence Number=SeqID_34330
  Subcellular localization annotation: CTP_CleavageSite=13; ConfidenceScore=5.15e-01
AAVAVAPAAATAVAGSVVPSHCQFFPAAVDRTGQSTWNAAAAPLVTRELF

SEQ ID NO: 100305 - protein, 103 aa, Setaria italica
  Transcript Sequence Number=SeqID_34331
  Pfam annotation: Domain name=Yos1; Domain location=28-103; Score =146.1; E_value=1.1e-40; Accession=PF08571.2; Description=Yos1-like
DCLRRLTGARHSSRRRGRSRSSFAGMGLWTLLEGFLLLANALAILNEDRFLAPRGWSMSEVSGNGQTKSLKGQIVGLIYATQFLRMPLIALNVLIIVVKLVSG

SEQ ID NO: 100306 - protein, 95 aa, Setaria italica
  Transcript Sequence Number=SeqID_34332
  Subcellular localization annotation: CTP_CleavageSite=58; ConfidenceScore=5.56e-01
DLPLPPPPPPPASRHEPEPAKAQAASSKSKASVFSRISFPGAGAGGDANSSDAKRSRRASSDKPPAHSSSSSKKSGGAAAEDGDGRHRRGHRHHQ

SEQ ID NO: 100307 - protein, 71 aa, Setaria italica
  Transcript Sequence Number=SeqID_34333
  Gene Ontology: Mol. function=ATP-dependent helicase activity; Biological process=DNA recombination
  Homolog annotation: Hit_ID=Q5WN04; Match level="QueryCoverage=94%, HitCoverage=7%, E-value=1e-11, Identity=53%"; Hit description =Putative DNA helicase
IETNTKGPFSDASEWGRGWADPEIRRQRLAGRKTGRRKRMRRSGQAGQQHPTGFTTAKERLAAILSRKRRR

SEQ ID NO: 100308 - protein, 103 aa, Setaria italica
  Transcript Sequence Number=SeqID_34334
  Pfam annotation: Domain name=DUF872; Domain location=3-103; Score =167.4; E_value=4.1e-47; Accession=PF05915.4; Description=Eukaryotic protein of unknown function (DUF872)
MAYVDHAFSISDEDDLVGGAVGGPRGAPVKEIAFAAALLAFGALGAVGGLFMAANQVGGDRAHGIFFMILGIVMFIPGFYYTRIAYYAYKGYKGFSFSNIPPI

SEQ ID NO: 100309 - protein, 165 aa, Setaria italica
  misc_feature (81)..(81): Xaa can be any naturally occurring amino acid
  misc_feature (88)..(88): Xaa can be any naturally occurring amino acid
  Transcript Sequence Number=SeqID_34335
  Gene Ontology: Mol. function=helicase activity
  Homolog annotation: Hit_ID=Q1EPC6; Match level="QueryCoverage=100%, HitCoverage=11%, E-value=4e-19, Identity=31%"; Hit description=DNA helicase homolog, putative
NPFYGVYKELPKKHHALRQGKVHIYILKVPHELRQLFTSQTIRDAKYFRKHIRYFNSHFSFTSFGVSIDQRLANAKGSGVXFFKAHGXLYHKFDPLTRSGKGLQHMQLYFYDSDDSIAHRVNRSPNLDENLIRLIRGILLRLNPYVHLFTSLGIIKNVQEYTIEL

SEQ ID NO: 100310 - protein, 163 aa, Setaria italica
  misc_feature (122)..(122): Xaa can be any naturally occurring amino acid
  misc_feature (133)..(133): Xaa can be any naturally occurring amino acid
  Transcript Sequence Number=SeqID_34336
  Gene Ontology: Cellular component=cell wall
  Homolog annotation: Hit_ID=O65250; Match level="QueryCoverage=99%, HitCoverage=36%, E-value=1e-48, Identity=58%"; Hit description =F21E10.11 protein
  Pfam annotation: Domain name=PAE; Domain location=1-162; Score=104.9; E_value=2.7e-28; Accession=PF03283.5; Description=Pectinacetylesterase
YHLRRGFGSGSESWLIHLEGGGWCRNLKSCASRQRSILGSSRYMELQVEFTGILSNYKSQNPDFYNWNKVKIRYCDGASFSGNVKDELQNGTRFFFRGQRIWEAVMNELVFKGLRNAKQLSXAFLTGCSAGGXATYIHCDAFHALLPKDSRVKCLADGGFFLM

SEQ ID NO: 100311 - protein, 207 aa, Setaria italica
  Transcript Sequence Number=SeqID_34337
  Homolog annotation: Hit_ID=B6TBE4; Match level="QueryCoverage=100%, HitCoverage=50%, E-value=2e-87, Identity=76%"; Hit description=F-box domain containing protein
FTPIRRRSDPDLAAAVRGIDVFLTRVPFHDDVFPGWQIRECRGGCLLLLNWESKQIASYNPLTRALDLVPMPPDEISIGHRGKFIPKSYFLLPSDDEATDRSSFRVVYTCHDKSRVRAAVFSSATKKWQILPWSDPAPAQPASGKYWLLGGRQVNGFLCWSHSWHAYKALLDTATLQFSFIDLPEDLKGQGHLYMTGDTNDGKLCIV

SEQ ID NO: 100312 - protein, 146 aa, Setaria italica
  Transcript Sequence Number=SeqID_34338
  Gene Ontology: Mol. function=transferase activity, transferring glycosyl groups; Biological process=metabolic process
  Homolog annotation: Hit_ID=B6TY52; Match level="QueryCoverage=98%, HitCoverage=30%, E-value=3e-40, Identity=62%"; Hit description =Cytokinin-O-glucosyltransferase 2
ASSSAGGRRLRLVGVADGMDDGEDRDNLLRLNATMKEAMLPQLEALLDGEGGAAGKGLGRVTCVVVDAGMSWALDAAKRRGVPTAALWPASAAVLAVILGAKNLIHDGVIDDDGAPVKLENNSFRLAESMAPMDATFLSWNYMGNR

SEQ ID NO: 100313 - protein, 111 aa, Setaria italica
  Transcript Sequence Number=SeqID_34339
  Gene Ontology: Mol. function=protein binding; Cellular component =membrane fraction; Biological process=negative regulation of transport
  Homolog annotation: Hit_ID=B6T950; Match level="QueryCoverage=93%, HitCoverage=37%, E-value=2e-46, Identity=89%"; Hit description =Ischemia/reperfusion inducible protein
IANVLSILICLCLGENSILERSLNPGLDSIGVRVPDLDFIRSIARGAGSALALTSANLSGRPSSVSVKDFEDLWPHCSYVFDGGILPSGRAGSTIVDLITPGVYKILRDGR

SEQ ID NO: 100314 - protein, 52 aa, Setaria italica
  Transcript Sequence Number=SeqID_34340
LASSETIHTAGSCSCVHGLPYFDRFLFIPSLRGSCDVELVYLVMCTFLDLVK

SEQ ID NO: 100315 - protein, 70 aa, Setaria italica
  Transcript Sequence Number=SeqID_34341
VVEDGPPGRGRLDPGPGVADPPPAAGGGPWRRPRVCQVKWEPRASRRRLQRPPERRTAAAITTPRRCCQI

SEQ ID NO: 100316 - protein, 43 aa, Setaria italica
  misc_feature (17)..(17): Xaa can be any naturally occurring amino acid
  Transcript Sequence Number=SeqID_34342
QPPWILAERLLSLDWYXSRALESAISSLGVLGLWSGMLGGAGM

SEQ ID NO: 100317 - protein, 129 aa, Setaria italica
  Transcript Sequence Number=SeqID_34343
  Gene Ontology: Mol. function=nucleoside-triphosphatase activity; Cellular component=membrane; Biological process=proteolysis
  Homolog annotation: Hit_ID=Q6EQ64; Match level="QueryCoverage=100%, HitCoverage=20%, E-value=1e-66, Identity=90%"; Hit description=PDR -type ABC transporter-like
  Pfam annotation: Domain name=ABC2_membrane; Domain location=1-126; Score=10.5; E_value=0.0014; Accession=PF01061.16; Description=ABC-2 type transporter
AAHMYSPLPYALGQVAIELPYIFVQSLIYGVLVYAMIGFEWTAAKFFWYLFFMYFTLAYYTFYGMMMVGLTPNYNVSSVASTAFYAIWNLFSGFLIPRTRIPVWWRWFYWICPIAWTLNGLVTSQFGDV

SEQ ID NO: 100318 - protein, 237 aa, Setaria italica
  Transcript Sequence Number=SeqID_34344
  Gene Ontology: Mol. function=aspartic-type endopeptidase activity; Cellular component=chromatin; Biological process=chromatin assembly or disassembly
  Homolog annotation: Hit_ID=Q2R307; Match level="QueryCoverage=81%, HitCoverage=20%, E-value=1e-90, Identity=81%"; Hit description =Retrotransposon protein, putative, Ty3-gypsy subclass
  Pfam annotation: Domain name=RnaseH; Domain location=72-189; Score= -21.4; E_value=0.018; Accession=PF00075.16; Description=RNase H
KEPTNVTEVRSFLGHAGYYRRLVQGFSIVAKPMTNLTKKGVPFIWTKECEASFQTLKNKLVNAPILTLPESGKRFTLYTDASRIGLGCVLMQEGKVIAYASRQLKKHEQNYPTHDLELAAVIFALKIWRHYLYGESCDIFTDHQSLKYIFTQKELNLRQRRWLELIKDYDLTIQYHPGKANVVADALSRTGVPKTVMSLIVDMDRMGVSFCYAGVAHQETQMLIQSPIVDQVREAQQ

SEQ ID NO: 100319 - protein, 82 aa, Setaria italica
  Transcript Sequence Number=SeqID_34345
  Gene Ontology: Mol. function=metal ion binding
  Homolog annotation: Hit_ID=B6TJ34; Match level="QueryCoverage=100%, HitCoverage=21%, E-value=7e-17, Identity=59%"; Hit description=RING -H2 finger protein ATL3B
RAASLAGYPDAVERTPWWLASFWRSVSWQRQGRAETDASEDHGGGSQRVVPITGAPAERPSGSGAAWDDKEKSADFGALNQV

SEQ ID NO: 100320 - protein, 148 aa, Setaria italica
  Transcript Sequence Number=SeqID_34346
  Gene Ontology: Mol. function=NADH kinase activity; Cellular component= cytoplasm; Biological process=metabolic process
  Homolog annotation: Hit_ID=Q6EQG2; Match level="QueryCoverage=100%, HitCoverage=45%, E-value=1e-75, Identity=91%"; Hit description =Probable NADH kinase
TGYLCAATAGNFEQILDATLDGSRCPSELSRISVKLNGIQLPTYALNDILVSHPCPASVSRFSFRKRSNTGEGSHLINCRSSGLRVSTAAGSTAAMLSAGGFVMPLSSHELQYMIREPISPTDADKPLLHGLVKQEQHMLVVWYNQEG

SEQ ID NO: 100321 - protein, 98 aa, Setaria italica
  Transcript Sequence Number=SeqID_34347
VSYIVDKGRRRARREGNNPPKEEAEDKKEANEEEDASAAADGDEVVKEVVHDSARTWRLNELEAITNQIKALENMMHSDVADAGDTSPERQEDEVAGL

SEQ ID NO: 100322 - protein, 73 aa, Setaria italica
  Transcript Sequence Number=SeqID_34348
CCQNYDLGCVVPPIFGFIPRFWITCITCTHRVQLLCGFYQDLVVAYMLAINIPISRQSKLRDPGPIVISQQMK

SEQ ID NO: 100323 - protein, 230 aa, Setaria italica
  Transcript Sequence Number=SeqID_34349
  Gene Ontology: Cellular component=chloroplast
  Homolog annotation: Hit_ID=B6U434; Match level="QueryCoverage=72%, HitCoverage=71%, E-value=5e-50, Identity=67%"; Hit description=ABC -type Co2+ transport system, permease component
  Subcellular localization annotation: CTP_CleavageSite=43; ConfidenceScore=5.66e-01
MAALLHQAALPAAKPPHPWALNPTPSLSLSPLSRRRRRAPTIRSAATDSSIGAGAAPSENKKTTRKEKQQERRRQQDLQHRQQQLMMMEEASSLATKRDGDSNSGRRSGEKQDGGNDDDEELPQPVFDRILRRIMFAVGVPMASGVALLNAYDALKRGQGVEVPTWVPLLTILVAFGTSALGIAYGTLSASWDPDKEGSLLGIDEARANWPVLWKEEIEKEKAKAKQRKK

SEQ ID NO: 100324 - protein, 68 aa, Setaria italica
  Transcript Sequence Number=SeqID_34350
NTIYPFEQLLVQINKNIQWQAGAACSVVFMYKRTNAIAMLVILVANQKYCLHYELRHGNYFIQFMVKR

SEQ ID NO: 100325 - protein, 48 aa, Setaria italica
  Transcript Sequence Number=SeqID_34351
FFLFFFFPDTTMNPGHLNRGLCNPNCELKSICQSKITVYILTIPFSFL

SEQ ID NO: 100326 - protein, 47 aa, Setaria italica
  Transcript Sequence Number=SeqID_34352
  Homolog annotation: Hit_ID=B6TFK0; Match level="QueryCoverage=100%, HitCoverage=13%, E-value=8e-15, Identity=85%"; Hit description =Pollen-specific protein SF21
YGLYRPSQLDCSPRSPLSPFCISPELLSPESMGVKLKPIKTRVRLEV

SEQ ID NO: 100327 - protein, 263 aa, Setaria italica
  Transcript Sequence Number=SeqID_34353
  Gene Ontology: Mol. function=oxidoreductase activity; Cellular component=anchored to membrane
  Homolog annotation: Hit_ID=Q1EPX7; Match level="QueryCoverage=88%, HitCoverage=38%, E-value=1e-116, Identity=88%"; Hit description=C -terminal peptide-binding protein 1
  Pfam annotation: Domain name=Cu-oxidase_2; Domain location=61-201; Score=129.7; E_value=9.3e-36; Accession=PF07731.6; Description =Multicopper oxidase
  Subcellular localization annotation: CTP_CleavageSite=37; ConfidenceScore=5.47e-01
NQARSVRWNLSAGAARPNPQGSFRYSAINVTQAYLLRSTAPVSIGGRRRATLNGLSYAPPETPLRLADAYGVEGVYTLDFPERPPPGAAPRIARSIINGTYRGFMELIFQNNDTRMQSYHMDGYAFFVVGMDYGEWTEDSRGTYNKGDGVARSTIQVYPGAWAAVLVSLDNVGIWNVRSENLDSWYLGQEVYVRVVNPEDTGNKTEMAIPGNALYCGQLHKYQKEQTPHHKMGVSAAAPRSSFAARRLVSAALLLAGSFVLAP

SEQ ID NO: 100328 - protein, 481 aa, Setaria italica
  Transcript Sequence Number=SeqID_34354
  Gene Ontology: Mol. function=transferase activity, transferring glycosyl groups; Biological process=metabolic process
  Homolog annotation: Hit_ID=B4FG90; Match level="QueryCoverage=98%, HitCoverage=97%, E-value=1e-174, Identity=62%"; Hit description =Anthocyanidin 5,3-O-glucosyltransferase
  Pfam annotation: Domain name=UDPGT; Domain location=4-476; Score=8.0; E_value=8.8e-12; Accession=PF00201.10; Description=UDP-glucoronosyl and UDP-glucosyl transferase
MKQTVVLYPSAGVGHVVPMAELAKVFLSHGYDVTMVIVPPPFKSPALGASQAERIAAANPSVSFHVLPPIPAPDFAGSAKHPFLLMLQMQRQYNHELESFLRSIPRKRLHSLVIDMFCADAIDVAAKLGVPAYTFVPSGASPLAVLTQLPAVLGSRKTGLKELGDTPLDFLGVPPMPASHLVAEMLVHPEDELCRTMASIFKRGMDTRGVLVNTFESLESRAVQALRDPLCVPGKVLPPIYCVGPLVGNGARDGEKTESHECLAWLDAQPEHSVVFLCFGSMGTFSEEQLEEIAIGLDKSGQRFLWVVRVPSNIDDPKRLLEKQCEPDLDALLPEGFLERTKDRGLVVKSWAPQVDVLNHPSTGAFVTHCGWNSTMEGVMAGVPMLCWPLYAEQKMNKVFMTEDMGVGVEMQGYTAGFIKAEEVEAKVRQVMESKQGRELKTRVAARKKEAEAALEEGGSSRAAFVQFLLDVENLGEQPAE

SEQ ID NO: 100329 - protein, 89 aa, Setaria italica
  Transcript Sequence Number=SeqID_34355
  Gene Ontology: Mol. function=oxidoreductase activity; Cellular component=plastid inner membrane; Biological process=oxidation reduction
  Homolog annotation: Hit_ID=Q7FA34; Match level="QueryCoverage=97%, HitCoverage=17%, E-value=3e-30, Identity=77%"; Hit description =OSJNBa0034E24.2 protein
VGLPMAGLTALQGLKTIGNKFDGTDTGANILITAGSSGVGTYAVQLAKLGNHHVTATCGARNLELVTSLGADEVLDYGTPEGEALMNSL

SEQ ID NO: 100330 - protein, 46 aa, Setaria italica
  Transcript Sequence Number=SeqID_34356
SGCILPIEKQRNGKEKKRLRISPKACAESSQLFVLNQLAASLICHA

SEQ ID NO: 100331 - protein, 30 aa, Setaria italica
  Transcript Sequence Number=SeqID_34357
LHTEAVITTFGMSRGADTWKMGSEGPPEWS

SEQ ID NO: 100332 - protein, 50 aa, Setaria italica
  Transcript Sequence Number=SeqID_34358
DKTRRISTTSPHRYTYVLFMSKHKSIVVHDGSIDPMILSNRLNYSTFLFM

SEQ ID NO: 100333 - protein, 101 aa, Setaria italica
  Transcript Sequence Number=SeqID_34359
  Subcellular localization annotation: CTP_CleavageSite=56; ConfidenceScore=5.01e-01
LPQNYVLGVFPKQISVPIQGNRQSPLSVHSRSLINSPQYFKHRPRHRIGPIGRDARACGNQDWGRNANAKIYAVAGCFLASLKNWEGLGGLLEFIFFSLFS

SEQ ID NO: 100334 - protein, 97 aa, Setaria italica
  Transcript Sequence Number=SeqID_34360
  Gene Ontology: Mol. function=acid-amino acid ligase activity; Cellular component=intracellular; Biological process=ubiquitin -dependent protein catabolic process
  Homolog annotation: Hit_ID=A1Y2A1; Match level="QueryCoverage=100%, HitCoverage=33%, E-value=2e-28, Identity=64%"; Hit description =Ubiquitin-protein ligase (Fragment)
PLLQDNDPSHMHLVCLAVKTLQKLMEYSSPAVSLFKDLGGVELLSQRLHVEVQRVIGTVDGHNSMVTDAVKSEEDVLYSQKRLIRALLKALGSATYS

SEQ ID NO: 100335 - protein, 42 aa, Setaria italica
  Transcript Sequence Number=SeqID_34361
LLILNICSATPNACMATWPVRPSMVPCHASLSTLQWQVEFIF

SEQ ID NO: 100336 - protein, 52 aa, Setaria italica
  Transcript Sequence Number=SeqID_34362
LQNRMHSLCPAIWSKGVHSILQSTHEFQSGHVTQNKLAHTHLKCLNRHDRMV

SEQ ID NO: 100337 - protein, 60 aa, Setaria italica
  Transcript Sequence Number=SeqID_34363
TIIPELNCHVMTLTSKGLRVQLLNSQSHGACCVVVEARRDVCMIHSLLAAYNKLVIDPVN

SEQ ID NO: 100338 - protein, 93 aa, Setaria italica
  Transcript Sequence Number=SeqID_34364
  Homolog annotation: Hit_ID=Q9LPG1; Match level="QueryCoverage=75%, HitCoverage=18%, E-value=2e-23, Identity=60%"; Hit description =T3F20.23 protein
MCALQNRMHSLCPAIWSKHRKWMLMSMMCLNPVTCSFMDVQFPNGQLTYVAGEGITASGFFPLFGGLLQAHGKCPGETKVSFSFKLELLLSLV

SEQ ID NO: 100339 - protein, 80 aa, Setaria italica
  Transcript Sequence Number=SeqID_34365
MCALQNRMHSLCPAIWSKHRKWMLMSMMCLNPVTCVSLLVHAFSPSPIHLLLSCSPFQLLYPISGCYQISVILYSKFTMQ

SEQ ID NO: 100340 - protein, 126 aa, Setaria italica
  Transcript Sequence Number=SeqID_34366
  Homolog annotation: Hit_ID=Q9LPG1; Match level="QueryCoverage=100%, HitCoverage=26%, E-value=3e-41, Identity=54%"; Hit description =T3F20.23 protein
  Subcellular localization annotation: CTP_CleavageSite=55; ConfidenceScore=5.29e-01
NKRGTRFTPMFQWPDKSVSLGVTQPLAWKRSGLMVRPSIQVSLCPTFGGSDPGVREEVVHSLKEELNLMCGLSCTRHPSAFTALSIGRSKWNGQVGSSGVVITLETPLNNIGRPALSVQLNGGFEL

SEQ ID NO: 100341 - protein, 159 aa, Setaria italica
  misc_feature (66)..(66): Xaa can be any naturally occurring amino acid
  misc_feature (86)..(86): Xaa can be any naturally occurring amino acid
  Transcript Sequence Number=SeqID_34367
  Homolog annotation: Hit_ID=Q9LPG1; Match level="QueryCoverage=85%, HitCoverage=31%, E-value=2e-46, Identity=58%"; Hit description =T3F20.23 protein
TGKRSVESRTNSRWLMMSMMCLNPVACSFMDLQFPNGQLTYVAGEGISASGFLPLFGGLLQAQGKXYPGETRVSFSVKNKRGTRFXTPMFQWPDKSVSLGVTQPLAWKRSGLMVRPSIQVSLCPTFGGSDPGVRAEVVHSLKEELTTSARTPGSLSLKE

SEQ ID NO: 100342 - protein, 464 aa, Setaria italica
  Transcript Sequence Number=SeqID_34368
  Homolog annotation: Hit_ID=Q9LPG1; Match level="QueryCoverage=100%, HitCoverage=99%, E-value=1e-114, Identity=47%"; Hit description =T3F20.23 protein
MEISLEASWVGVQRHGQDLADRLAQGFSGLLLHAQPPQLPPWSPPALLPPKLAIPFEIDLPVVPFVDGVRRGGVDLPAVAVSSLVEIGGRLGQAGYELGAAVQQLARQVPVPLPFRALERATDIGSLEVAAAAAAAATGSATAASASGVGAGGADGLDEEEDGFGCEIGTLENVKNAKGTVNISAAYNTRHRDFESSVVARGDLWRLESSHGSLNSGNDSSPLFLIQVGPLLFVRDSTLLLPVHLSKQHLLWYGYDRKNRMHSLCPAIWSKHRKWMLMSMMCLNPVTCSFMDVQFPNGQLTYVAGEGITASGFFPLFGGLLQAHGKCPGETKVSFSFKSKQGTRFTPMFQWPDNSLSVGVAQAVAWKKSGLMVRPSIQVSVCPTFGGSDPGIRAEFVHSLKEELNVMCGFSCSRHPSAFTALSLGRSKWNGQVGSSGLVITLETPLDNMAMPSLSVQLNGGFEF

SEQ ID NO: 100343 - protein, 106 aa, Setaria italica
  Transcript Sequence Number=SeqID_34369
  Gene Ontology: Mol. function=magnesium ion binding; Cellular component=integral to membrane; Biological process=photosynthesis, light harvesting
  Homolog annotation: Hit_ID=B6SUC4; Match level="QueryCoverage=100%, HitCoverage=39%, E-value=3e-36, Identity=74%"; Hit description =Chlorophyll a-b binding protein 8
  Pfam annotation: Domain name=Chloroa_b-bind; Domain location=1-77; Score=-0.4; E_value=2.6e-05; Accession=PF00504.13; Description =Chlorophyll A-B binding protein
HRRLQDWYNPGSMGKQYFLGLEKFLAGSGDPSYPGGPLFNPLGFGKTEKEMKELKLKEIKNGRLAMLAILGYFIQGLVTGVGPFQNLLDHLADPVNNNVLTSLKFH

SEQ ID NO: 100344 - protein, 92 aa, Setaria italica
  Transcript Sequence Number=SeqID_34370
  Gene Ontology: Mol. function=calcium ion binding
  Homolog annotation: Hit_ID=B6UFR1; Match level="QueryCoverage=100%, HitCoverage=100%, E-value=1e-26, Identity=79%"; Hit description=EF hand family protein
  Pfam annotation: Domain name=efhand; Domain location=17-45; Score =38.1; E_value=3.5e-08; Accession=PF00036.24; Description=EF hand
  Pfam annotation: Domain name=efhand; Domain location=53-81; Score =10.4; E_value=1.5; Accession=PF00036.24; Description=EF hand
  Pfam module annotation: Pfam domain module=efhand::efhand; Domain location=17-45::53-81
MAIRGVASSREDMTLEEFKEWLKQFDADGDGKISRNELREALRRRGGWFTTWRSGRALRQADKNNSGFLDDSEIENLVAFAQKDLGMKVSTW

SEQ ID NO: 100345 - protein, 86 aa, Setaria italica
  Transcript Sequence Number=SeqID_34371
  Gene Ontology: Mol. function=protein serine/threonine kinase activity; Biological process=protein amino acid phosphorylation
  Homolog annotation: Hit_ID=Q6ZK05; Match level="QueryCoverage=100%, HitCoverage=11%, E-value=7e-28, Identity=62%"; Hit description =Putative wall-associated serine/threonine kinase
VSDFGASRGIAIDQSGVTTGVQGTHGYMDPEYYHTRRLTDKSDVYSYGVMLVELLTRKKPSMYLSPEGVSLVAHFVMLLNQDKLSE

SEQ ID NO: 100346 - protein, 34 aa, Setaria italica
  Transcript Sequence Number=SeqID_34372
MDRRSWPWKKKSSEKSSNTDALQSSNQAEQDEES

SEQ ID NO: 100347 - protein, 85 aa, Setaria italica
  Transcript Sequence Number=SeqID_34373
  Subcellular localization annotation: CTP_CleavageSite=28; ConfidenceScore=5.57e-01
RRSVTPPPNSRKVSLVGSKSLTQSPKTSASSYDSCLPRKRPETAETRHPFARGHISSSVTPQITSLKDPASPSCKSSQPLSTNWN

SEQ ID NO: 100348 - protein, 160 aa, Setaria italica
  Transcript Sequence Number=SeqID_34374
DHSPPAWLLLYNRPYAKALPLDMVREISRHIICDTERVRTLRVCCLVLSDPGARAIQPQLPWLLAASTDGPLLYCLNCGSGGNGTTHTTGAPMYVHTAYHYGAYDGRWLFSTLENGDSVMVNLLTGSRQRLPIEITYRQSGLSYPQKILAATLSAAPDSC

SEQ ID NO: 100349 - protein, 45 aa, Setaria italica
  Transcript Sequence Number=SeqID_34375
  Gene Ontology: Mol. function=serine-type endopeptidase activity; Cellular component=endoplasmic reticulum membrane; Biological process=cholesterol metabolic process
  Homolog annotation: Hit_ID=Q0WUG6; Match level="QueryCoverage=100%, HitCoverage=4%, E-value=2e-18, Identity=95%"; Hit description =Subtilisin like protein
TEIYAFRVFTDAQISYTSWFLDAFNYAIATGMDVLNLSIGGPDYL

SEQ ID NO: 100350 - protein, 179 aa, Setaria italica
  misc_feature (54)..(54): Xaa can be any naturally occurring amino acid
  Transcript Sequence Number=SeqID_34376
  Gene Ontology: Mol. function=nucleotide binding; Biological process =defense response
  Homolog annotation: Hit_ID=Q84KC8; Match level="QueryCoverage=99%, HitCoverage=11%, E-value=9e-57, Identity=63%"; Hit description=NBS -LRR disease resistance protein homologue
NVENLRTLMLFGSHHGSYAKVFGHLFREARALRATYVSGASYNVEDILHNFSKXVHLRYLRIKSSEYNNNDICLPAALSRLYHLEVIDLREWRGCFGFTRHMSNLEKLHHFLVPEHELQLHSNIVEVGKMKLLQELRCFEVGKESKGFDLSELRQLLELGGSLAICSLERIQTMKEAEE

SEQ ID NO: 100351 - protein, 77 aa, Setaria italica
  Transcript Sequence Number=SeqID_34377
  Gene Ontology: Mol. function=transferase activity, transferring glycosyl groups; Cellular component=cytoskeleton; Biological process= metabolic process
  Homolog annotation: Hit_ID=B6SRX8; Match level="QueryCoverage=93%, HitCoverage=14%, E-value=4e-14, Identity=61%"; Hit description =Indole-3-acetate beta-glucosyltransferase
ESAWRAGVRVRPAAADGLVRRGEVARGVEEVMGGERSGEYRRNAAAWMEKARAASREGGSSDRNIAEFVAKYSSNSK

SEQ ID NO: 100352 - protein, 135 aa, Setaria italica
  Transcript Sequence Number=SeqID_34378
  Gene Ontology: Mol. function=ion channel activity; Cellular component= integral to membrane; Biological process=ion transport
  Homolog annotation: Hit_ID=B9SF64; Match level="QueryCoverage=67%, HitCoverage=12%, E-value=2e-15, Identity=52%"; Hit description =Cyclic nucleotide-gated ion channel, putative
VNLQCAQFVCSNTTCLRVNQCLRDACSASTIPYCDTFIDCGRGVGSGLYRQQWFNDSGAAACFNTGNGATFQYGIYGQAVLLTTEESAVKRYIYSLFWGFQVFSVICFRLSTPLVSVCCIQNNPSFPNYYSFWLF

SEQ ID NO: 100353 - protein, 497 aa, Setaria italica
  misc_feature (32)..(32): Xaa can be any naturally occurring amino acid
  Transcript Sequence Number=SeqID_34379
  Gene Ontology: Mol. function=ion channel activity; Cellular component= integral to membrane; Biological process=ion transport
  Homolog annotation: Hit_ID=B9SF64; Match level="QueryCoverage=95%, HitCoverage=61%, E-value=1e-153, Identity=58%"; Hit description =Cyclic nucleotide-gated ion channel, putative
  Pfam annotation: Domain name=cNMP_binding; Domain location=326-430; Score=19.9; E_value=0.0058; Accession=PF00027.21; Description=Cyclic nucleotide-binding domain
YLRGYFLLDFFVVLPLPQVMILLVIPKYVGLXSGANYAKNLLRATVLLQYVPRIIRFVPLLDGQSANGFIFESAWANFVINLLMFVLAGHVVGSCWYLFGLQRVNQCLRDACSASTIPYCDTFIDCGRGVGSGLYRQQWFNDSGAAACFNTGNGATFQYGIYGQAVLLTTEESAVKRYIYSLFWGFQQISTLAGNLVPSYFAWEVLFTMAIIGLGLLLFALLIGNMQNFLQALGRRRLEMQLRRRDVEKWMSHRRLPEDLRRRVRRAERFTWAATQGVNEEELLSNLPEDIQRDIRRHFFRFLNKVRLFTLMDWPILDAICDKLRQNLYISGSDILYQGGPVDKMVFIVRGKLESVSADGSKAPLHDGDVCGEELLTWYLENSSVNRDAGKIKFQGMRLVAIRTVTCSTNVEAFVLRASDLEEVTSQFARFLRNPRVQGAIRYESPYWRTIAATRIQVAWRYRKRRLKRAEQSRLNEESYPSYSITAFDSFRRGQRG

SEQ ID NO: 100354 - protein, 71 aa, Setaria italica
  Transcript Sequence Number=SeqID_34380
  Subcellular localization annotation: CTP_CleavageSite=45; ConfidenceScore=5.56e-01
TTKAKPSRAALTDTQPHGLSLSPVGSRVWLNRPFHLVKTVLRTPRSSSIAATYAPKDVSTICLLLGRVHSY

SEQ ID NO: 100355 - protein, 70 aa, Setaria italica
  misc_feature (8)..(8): Xaa can be any naturally occurring amino acid
  Transcript Sequence Number=SeqID_34381
  Gene Ontology: Mol. function=transferase activity, transferring glycosyl groups; Biological process=metabolic process
  Homolog annotation: Hit_ID=B6TRF2; Match level="QueryCoverage=100%, HitCoverage=14%, E-value=4e-21, Identity=80%"; Hit description =Transferase, transferring glycosyl groups
MDAAGSSXSPSRPLRIVICPWLAFGHMLPYLELAERLASRGHHVSFVSTPCNLARLPPRRHVIDLVALSL

SEQ ID NO: 100356 - protein, 148 aa, Setaria italica
  Transcript Sequence Number=SeqID_34382
LQGQGGDSGDRQSPVVNRSIFNGVDADVLARFKVLQSRIDNLSSFGEIDCEGQQEASKKSYAVEDAVLARLKVLKSRPDTLTSSSQESIKHQLDASTNRADNADDAVMARLRILESHPNNATFLVHGSSKQQLDESTNREGGVMMLFA

SEQ ID NO: 100357 - protein, 868 aa, Setaria italica
  Transcript Sequence Number=SeqID_34383
NGQNNSYQLMNDTIGENSFSFSSYMNPCRINLDYFDCVWNEQKDLGYQTADKQHGKWSNSNDMATVGSYPLNSLGENHVGSEHSGNGIPMQESTEMKHDLGSFNSKLSSPEVGIVQPRDFSSELLEVNNTSVDSPCWKGTPASYQPSFGIMENNDAHHNVIRTIGYISSHQSQKIPELSSEYPGRFPERQEASGSENDPYKVFKLPARCKNTEDHKEVPPVNIEVHNDMATHASNLAYKEPSRTQKCYDSREDSKNVIPLSQQESACSGSKPKILDEHGGKHTASINEVMSKTVLNPVAITPRVDADHLTTGSTHGNSCSASLEKEGSTQKRGEDPSQCYPCVEGNVLNVACDSSSSTRAIFLKLMHNLSVVLLSTCKGGSSLQEDEEELLQSVIQNLTAASSKRSKVEQKNDDGLSNSSLMKFKNINCATNNFWMAMHAQLAQENSDSEFKTTVSQVLTSHMDDKMPDDTEVSQASIYKNLWVEAEASACKLKYELQHARMKLATAKSHNSTLKAPDSSESNKGSSSSLSSSKPQNHGKESITCTAALQGQGGDSGDRQSPVVNRSIFNGVDADVLARFKVLQSRIDNLSSFGEIDCEGQQEASKKSYAVEDAVLARLKVLKLTCLDLTLTSSSQESIKHQLDASTNRADNADDAVMARLRILESHPNNATFLVHGSSKQQLDESTNREGGVDDAVLARLRILKSRPDNITSVGGAIKEQEEACSDRLNGDDLNTMANGGITNAKVSAEHIWKFMQSDDLADHLGGKDSVGGIGTFGDGACAGENNETGGSADASTPKRCKATSDEVNIEGAVHGENHLSVETAGPSHVCTEGSHEAHLIASPVHQYGSTPSEWEHVLKENFFHPGK

SEQ ID NO: 100358 - protein, 50 aa, Setaria italica
  Transcript Sequence Number=SeqID_34384
LDLTCLLVVNVAFRFVGLRSSEKRGTAVLIPSQIIIYFNFIRYIASTMYL

SEQ ID NO: 100359 - protein, 108 aa, Setaria italica
  Transcript Sequence Number=SeqID_34385
RPRRTIRANQPLSSQQLLAFFQLPRAHRRRNRGGHGKKKMNDPKYAYPYPAQGYYQGPYQGPPVMAPPQYAAAPPRREPSFLEGCLAALCCCCLIDECCCDPSIIFVS

SEQ ID NO: 100360 - protein, 192 aa, Setaria italica
  misc_feature (83)..(83): Xaa can be any naturally occurring amino acid
  Transcript Sequence Number=SeqID_34386
  Gene Ontology: Mol. function=microtubule motor activity; Cellular component=microtubule associated complex; Biological process =microtubule-based movement
  Homolog annotation: Hit_ID=Q93XF3; Match level="QueryCoverage=87%, HitCoverage=18%, E-value=1e-82, Identity=86%"; Hit description =Kinesin heavy chain (Fragment)
  Pfam annotation: Domain name=Kinesin; Domain location=18-192; Score =4.8; E_value=7.6e-16; Accession=PF00225.15; Description=Kinesin motor domain
NGGGGGAGRMDRIQVLVRLRPLSEKEIARGEPAEWECINDTTVMFRSTFPDRPTAPTAYAFDRVFHSDCSTKEVYEEGVREVXLSVVSGINSSIFAYGQTSSGKTYTMTGVTEYTVADIYDYINKHEERAFVLKFSAIEIYNEVVRDLLSAENTPLRLWDDAEKGTYVENLTEVVLRDWNHLKGLISVCEAQ

SEQ ID NO: 100361 - protein, 49 aa, Setaria italica
  Transcript Sequence Number=SeqID_34387
NKMAHNSRLALSVGVKRVPEVIFDQIWGVHSIKCGFYQPFCHVIISLLD

SEQ ID NO: 100362 - protein, 56 aa, Setaria italica
  Transcript Sequence Number=SeqID_34388
  Gene Ontology: Mol. function=electron carrier activity; Biological process=response to oxidative stress
  Homolog annotation: Hit_ID=B6TFD7; Match level="QueryCoverage=91%, HitCoverage=15%, E-value=8e-15, Identity=74%"; Hit description =Peroxidase 66
YATKVGGNAYQVPSGRRDGNVSVAQETSGNLPPPTASVSQLNQIFGSKGLTQAEVG

SEQ ID NO: 100363 - protein, 265 aa, Setaria italica
  misc_feature (258)..(258): Xaa can be any naturally occurring amino acid
  Transcript Sequence Number=SeqID_34389
  Gene Ontology: Mol. function=electron carrier activity; Cellular component=extracellular region; Biological process=response to oxidative stress
  Homolog annotation: Hit_ID=B6TFD7; Match level="QueryCoverage=92%, HitCoverage=75%, E-value=1e-110, Identity=79%"; Hit description =Peroxidase 66
  Pfam annotation: Domain name=peroxidase; Domain location=1-228; Score= 363.0; E_value=5.4e-106; Accession=PF00141.15; Description=Peroxidase
TTSNDCFVRGCDASVLLDSTPGNQAEKDASPNTSLRGFEVIDSAKTRLEQACYGVVSCADVLAFAARDALALVGGNAYQVPSGRRDGNVSVAQETSGNLPPPTASVSQLNQIFGSKGLTQADMVALSGAHTIGNAHCSSFDSRLYAYGPNAGQDPSMDPSYLAALTQQCPNQSGGGPDGTVAMDPVTPTAFDTNYYASIVAKRGLLASDQALLADPTTAAQVVAYTNSPDTFQADFAAAMVKMGAIGVLTGTAGTIRXTNCRVAS

SEQ ID NO: 100364 - protein, 148 aa, Setaria italica
  Transcript Sequence Number=SeqID_34390
  Gene Ontology: Mol. function=extracellular-glutamate-gated ion channel activity; Cellular component=integral to membrane; Biological process=ion transport
  Homolog annotation: Hit_ID=Q69L15; Match level="QueryCoverage=79%, HitCoverage=12%, E-value=2e-18, Identity=42%"; Hit description =Putative Avr9/Cf-9 rapidly elicited protein 141
FMSKHCRNHSIIGRVYKTGGFGFVFPKGSPLVADVSRAILKVTEGDEIVGIERKWLGLDKVTCNSMTNALEMGSVVTWSSLKGVFFITFGLWGIAGIIYIVIKFWPWRQTESTVQEAIAELVLEHSNGDEQDDTIWPIERNSHLVFHL

SEQ ID NO: 100365 - protein, 57 aa, Setaria italica
  Transcript Sequence Number=SeqID_34391
MLQFPALMRQWPSPPLIPASTLLPVPATSHEDELLLAMAESDLEDKLNEIRKANSNL

SEQ ID NO: 100366 - protein, 55 aa, Setaria italica
  Transcript Sequence Number=SeqID_34392
LPNIFPLLGLTALVIYETNSMSDVYTAFYEFSLLLESKVCYAVLIFALCYTQYGV

SEQ ID NO: 100367 - protein, 403 aa, Setaria italica
  Transcript Sequence Number=SeqID_34393
  Gene Ontology: Mol. function=farnesyl-diphosphate farnesyltransferase activity; Cellular component=integral to membrane; Biological process= lipid biosynthetic process
  Homolog annotation: Hit_ID=O22107; Match level="QueryCoverage=94%, HitCoverage=92%, E-value=1e-174, Identity=74%"; Hit description =Squalene synthase
  Pfam annotation: Domain name=SQS_PSY; Domain location=40-327; Score =395.2; E_value=1.1e-115; Accession=PF00494.11; Description =Squalenephytoene synthase
MGALSRPEEVVALVKLRVAAGQMKRQIPPEEHWAFAYSMLQKVSRSFALVIQQLGTDLRNAVCIFYLVLRALDTVEDDTSIPTDVKVPILQEFYRHIYDRNWHYSCGTNNYRVLMDNFHHVSTAFLELGEGYQKAIEEITRRMGAGMAKFICKEVETIDDYDEYCHYVAGLVGYGLSRLFHATGTEDLAPDSLSNSMGLFLQKTNIIRDYLEDINEIPRSRMFWPREIWSKYADKLEDFKYEENSEKAVQCLNDLVTNALIHAEDCLQYMSALKDHTIFRFCAIPQIMAIGTCAFCYNNVNVFRGVVKMRRGLTARVIYETNSMSDVYTAFYEFSLLLESKIDDNDPNAALTRKRVDSIKQTCKSSGLLKRRGYHLDKSPYKPMLIMIVLLLLAIIFGVLYTK

SEQ ID NO: 100368 - protein, 822 aa, Setaria italica
  Transcript Sequence Number=SeqID_34394
  Gene Ontology: Mol. function=hydrolase activity, hydrolyzing O -glycosyl compounds; Cellular component=extracellular region; Biological process=carbohydrate metabolic process
  Homolog annotation: Hit_ID=Q43763; Match level="QueryCoverage=93%, HitCoverage=86%, E-value=0.0, Identity=72%"; Hit description=Alpha -glucosidase
  Pfam annotation: Domain name=Glyco_hydro_31; Domain location=273-738; Score=875.4; E_value=3.2e-260; Accession=PF01055.18; Description =Glycosyl hydrolases family 31
MGSTPPLSTAHTRVAVLLLLFLLAVVPWPGAAAQGGYRVMSVAGGGGQLSARLELAGDGEKAELGPDVQRLSLTASLETDSRLHVRITDAEHPRWEVPQDIIPRKAPRDIVLDASTGASPRSRVLSAATSDLTFTLHASPFRFTVSRRSTGDVLFDTSPSVFFKDRYLELTTALPAARASLYGLGEHTKRTFRLQRNDTFTLWNADIAAGNVDLNLYGSHPFYLDVRSASPAGAGNGAGAAHGVLLLNSNGMDIEYGGSYLTYRVIGGVLDFYFFAGPAPLNVVDQYTQLIGRPAPMPYWSFGFHQCRYGYKNVADLEGVVAGYAKARIPLEVMWTDIDYMDAFKDFTLDPLNFPAGPMRQFVDRLHRNGQKYVVILDPGINVNETYGTFIRGMQQDVFLKWNGTNYLGKVWPGNVYFPDFLNPRAAAFWAREISLFRRTLPVDGLWIDMNEISNFVDPPPLDALDDPPYRINNSGVRRPINNKTVPASAVHFGGVREYDAHNLYGLLEARATNAALRADTGRRPFVLSRSTFVGSGRYTAHWTGDNAATWDDLHYSINTMLSFGLFGIPMVGADICGFSGDTTEELCSRWIQLGAFYPFARDHSAIGTVRRELYLWETVARSARKALGLRYRLLPYLYTLMHEAHATGAPIARPLFFSYPKDVQTYGVDRQFLLGRGVLVSPVLEPGATAVDAYFPAGRWFSLFDYSLAVASATGKRVTLPAPADTVNVHVAGGNILPLQMPALTTSRARQTVFHLLVALAEDGSADGELFLDDGESPEMAGPRGQWSLVRFTCKAGRGGATVRSHVLHDSYGPSRKLVIG

SEQ ID NO: 100369 - protein, 237 aa, Setaria italica
  misc_feature (95)..(95): Xaa can be any naturally occurring amino acid
  Transcript Sequence Number=SeqID_34395
  Gene Ontology: Mol. function=receptor activity; Cellular component =cellular_component; Biological process=biological_process
  Homolog annotation: Hit_ID=B9RAY2; Match level="QueryCoverage=98%, HitCoverage=50%, E-value=2e-72, Identity=56%"; Hit description =Transcription factor, putative
  Pfam annotation: Domain name=JmjC; Domain location=1-86; Score=23.6; E_value=6.3e-06; Accession=PF02373.14; Description=JmjC domain
SWSANVCGRKQWLFLPPSQSHRIFDRYMRSSVYNLNDDVSEKQFPEFNKTEWIECIQEQNEIIFVPSGWYHQVHNLEDTISINHNWFNAYNLHWXDYKVAKEYIEDIRDICDDFEGLCQRNLAANTGMNFYDFFVFIVRFALANVIELYHLQQPEVATFSTETAHHFVYNLKSIRNVASKMTTTEAFTTENLRSISEDNRSAFSNVKQILEEESFRRLLMTLSKAYAHIDRGQRNCP

SEQ ID NO: 100370 - protein, 72 aa, Setaria italica
  Transcript Sequence Number=SeqID_34396
  Gene Ontology: Mol. function=drug transporter activity; Cellular component=membrane
  Homolog annotation: Hit_ID=Q9LE20; Match level="QueryCoverage=70%, HitCoverage=10%, E-value=7e-11, Identity=64%"; Hit description =F14O23.25 protein
MAIPLQGKDGKGGGQVGSDDHPSATAELRALWGMAAPITALNCVVYLRAMVSVLCLGRLGPLDRAGGALAIG

SEQ ID NO: 100371 - protein, 149 aa, Setaria italica
  Transcript Sequence Number=SeqID_34397
CCLAAVEPVGKLNIPHLRVWRLEKLDWKLEKAMKVAQVLGKHAPAGPLYYQARKVTNGMAVLCSTGRNLHFVIDLKTFRVMEKFEFNRDLPAFPCKCIGRLPFRWLQSVVSCPHPKMALLYVGVKRKVPRPTASVKRKLLRPAARMKMR

SEQ ID NO: 100372 - protein, 363 aa, Setaria italica
  Transcript Sequence Number=SeqID_34398
  Gene Ontology: Cellular component=integral to membrane
  Homolog annotation: Hit_ID=Q9SYG9; Match level="QueryCoverage=98%, HitCoverage=55%, E-value=1e-112, Identity=54%"; Hit description =Cation/calcium exchanger 4
  Pfam annotation: Domain name=Na_Ca_ex; Domain location=207-349; Score= 115.1; E_value=2.3e-31; Accession=PF01699.16; Description =Sodiumcalcium exchanger protein
VVAANEVLRKHARRLKFDVVTPLLPVRGSIFEQGAEEDESMYSSLLEEDADGETAQINTSLPQWMWASHVAIYSNHGTRVGSPDSSRPLWGWSEGEADTSTHNISKLFLFMELPLTIPRRLTIPIVEEDRWSKEYAVASACLAPVLLAFLWSSQDGVSTKASIAAYVIASIFGIGFAALAFLFTSSERPPRRYLFPWVFGGFVMSIIWFYIIANELVALLVALGAILGINPSILGLTVLAWGNSMGDLMSNVALAMNGGDGVQIAMSGCYAGPMFNTLAGLGLSMLLGAWSTAPDSYVLPQDRSLIYTMSFLVAGLIWALVMLPRGDMRPNKILGVGLVALYSVFLFIRVSSAMGILPLPGLS

SEQ ID NO: 100373 - protein, 57 aa, Setaria italica
  Transcript Sequence Number=SeqID_34399
KWGRRWKESGGKISKFHLFHCHVINSLQFTSSFYSRAVLEPSPRMQEDLNVSVPSWN

SEQ ID NO: 100374 - protein, 92 aa, Setaria italica
  Transcript Sequence Number=SeqID_34400
MAGGGLAAASELAVVFLFRPLLAVAFVLTLILFSWYVAWRTVLVHVPLVQEIAGLRPKKAAKPKPANRGRFARFYQSQAEAAQRNSKSEGTS

SEQ ID NO: 100375 - protein, 167 aa, Setaria italica
  misc_feature (23)..(23): Xaa can be any naturally occurring amino acid
  misc_feature (123)..(123): Xaa can be any naturally occurring amino acid
  Transcript Sequence Number=SeqID_34401
  Gene Ontology: Mol. function=nucleic acid binding
  Homolog annotation: Hit_ID=Q53L33; Match level="QueryCoverage=99%, HitCoverage=19%, E-value=2e-65, Identity=69%"; Hit description =Transposon protein, putative, mutator sub-class
  Pfam annotation: Domain name=SWIM; Domain location=94-126; Score =24.8; E_value=0.00036; Accession=PF04434.9; Description=SWIM zinc finger
WGRNCDSVDNNLCGSFNKWIVEXRFFPVITMLETIRRMVMARIHDNRTKSESWVTKICPNVLKKLNVYITQSGKCHAICNGASNFEVMHFDTRFTVDLEEKECLCRYWQLSGLPCPHAISCIXLKTNSLDEYVASCYSVESFKNTYEHCLQPIEDMTNWPVSDRVKL

SEQ ID NO: 100376 - protein, 45 aa, Setaria italica
  Transcript Sequence Number=SeqID_34402
  Homolog annotation: Hit_ID=Q9FZJ4; Match level="QueryCoverage=100%, HitCoverage=10%, E-value=1e-11, Identity=71%"; Hit description =F17L21.20
MEEGLVSVDKFSAGSQAYFLTHLHQDHTRGLASAGGWRHGPLYCS

SEQ ID NO: 100377 - protein, 67 aa, Setaria italica
  Transcript Sequence Number=SeqID_34403
  Subcellular localization annotation: CTP_CleavageSite=38; ConfidenceScore=5.19e-01
DISEAIPKSTSINTLALFVSLPGKPSGGSIYNNLFTIACATVKFHLESLQLSVFSGCCLLASLPQSI

SEQ ID NO: 100378 - protein, 104 aa, Setaria italica
  misc_feature (104)..(104): Xaa can be any naturally occurring amino acid
  Transcript Sequence Number=SeqID_34404
PSKSFSSLFDTEFNFHSLYDTIGFSIREPLNALRKDDFAPMGPTTLLLPLLPFSLLCSTPGQTAVEGTARRRASSARPPSTVPPSTPPPGPSCASLVPPRRRGX

SEQ ID NO: 100379 - protein, 93 aa, Setaria italica
  Transcript Sequence Number=SeqID_34405
  Gene Ontology: Mol. function=microtubule motor activity; Cellular component=microtubule associated complex; Biological process =microtubule-based process
  Homolog annotation: Hit_ID=B6TQK4; Match level="QueryCoverage=100%, HitCoverage=100%, E-value=5e-39, Identity=82%"; Hit description =Dynein light chain LC6, flagellar outer arm
  Pfam annotation: Domain name=Dynein_light; Domain location=1-91; Score=89.0; E_value=1.6e-23; Accession=PF01221.10; Description =Dynein light chain type 1
MLEGKAMVEDTDMPAKMQAQAMAAASRALDRFDVLDCRSIAAHIKKEFDTIHGPGWQCVVGSSFGCYFTHSKGSFIYFRLESLRFLVFKGAAA

SEQ ID NO: 100380 - protein, 129 aa, Setaria italica
  Transcript Sequence Number=SeqID_34406
  Homolog annotation: Hit_ID=B6U528; Match level="QueryCoverage=97%, HitCoverage=64%, E-value=7e-52, Identity=84%"; Hit description=Px19 -like protein
  Pfam annotation: Domain name=PRELI; Domain location=15-129; Score= -30.6; E_value=0.00025; Accession=PF04707.6; Description=PRELI-like family
MVVYAQEHVYLHPWDRVTAAVWRKFTDPASRTALSHVADVHTLHRRLDSDTGRLHAARSITVRSPPLPFILRRLLPSAAASPNGAALCHCVETSLVDAQRRAMDVVVRNVSLRGLIEVEERASYRPPYP

SEQ ID NO: 100381 - protein, 55 aa, Setaria italica
  Transcript Sequence Number=SeqID_34407
  Gene Ontology: Mol. function=violaxanthin de-epoxidase activity
  Homolog annotation: Hit_ID=B6SUQ7; Match level="QueryCoverage=100%, HitCoverage=12%, E-value=1e-18, Identity=80%"; Hit description =Violaxanthin de-epoxidase
IEVLQASDVFGSVKKWSRLQLVTMTGLVACVVLVVPSADAVDALKTCTCLLKECR

SEQ ID NO: 100382 - protein, 396 aa, Setaria italica
  Transcript Sequence Number=SeqID_34408
  Gene Ontology: Mol. function=violaxanthin de-epoxidase activity; Cellular component=thylakoid lumen; Biological process=transport
  Homolog annotation: Hit_ID=B6SUQ7; Match level="QueryCoverage=90%, HitCoverage=80%, E-value=0.0, Identity=87%"; Hit description =Violaxanthin de-epoxidase
  Pfam annotation: Domain name=VDE; Domain location=163-360; Score =565.1; E_value=8.2e-167; Accession=PF07137.3; Description =Violaxanthin de-epoxidase (VDE)
  Subcellular localization annotation: CTP_CleavageSite=27; ConfidenceScore=5.51e-01
MMSRHCANRVFPPGGSNILHGPKSRARAATGRHSAVRFRRCCVRANFWRSDHLPLKVTPSEIIEVLQASDVFGSVKKWSRLQLVTMTGLVACVVLVVPSADAVDALKTCTCLLKECRIELAKCIANPSCAANVACLNTCNNRPDETECQIKCGDLFENSVVDEFNECAVSRKKCVPRKSDVGEFPVPDPSALVKNFNMADFNGKWYISSGLNPTFDTFDCQLHEFHVEGDKLIANITWRIRTPDSGFFTRSTVQRFVQDPSQPGILYNHDNEFLHYQDDWYIISSKVENKDDDYIFVYYRGRNDAWDGYGGSVLYTRSKTVPETIIPELEKAAKSVGRDFSTFIRTDNTCGPEPPLVERIEKTVEEGEKTIIKEVKEIEGEIEEEVEELEKEEVTL

SEQ ID NO: 100383 - protein, 111 aa, Setaria italica
  Transcript Sequence Number=SeqID_34409
  Subcellular localization annotation: CTP_CleavageSite=33; ConfidenceScore=5.32e-01
DTARRHRTGRTASPARSPCPAAVACVLLATSRRQATRADVVHLASQKRVFVPAKNAILAIKRIGVVHAFCTMALDTDFTIDDDGLVTADGSLTPRYFVDREKKRAIGTPTY

SEQ ID NO: 100384 - protein, 97 aa, Setaria italica
  Transcript Sequence Number=SeqID_34410
  Gene Ontology: Mol. function=metal ion binding
  Homolog annotation: Hit_ID=B6SU64; Match level="QueryCoverage=100%, HitCoverage=26%, E-value=2e-42, Identity=84%"; Hit description=RING -H2 finger protein ATL5F
EENGRATPKPIRRSASMDSPLFLVAVPEAQDDVVRSNCKFQMGRETKIFKVKEKEAAGTSSSSCQSGRFKIGRSMSSSGQGFFFARNGRTSGTVMPL

SEQ ID NO: 100385 - protein, 409 aa, Setaria italica
  Transcript Sequence Number=SeqID_34411
  Gene Ontology: Mol. function=pyruvate kinase activity; Cellular component=cytoplasm; Biological process=glycolysis
  Homolog annotation: Hit_ID=Q5NBQ0; Match level="QueryCoverage=100%, HitCoverage=80%, E-value=0.0, Identity=93%"; Hit description =Pyruvate kinase
  Pfam annotation: Domain name=PK; Domain location=1-264; Score=454.1; E_value=2.1e-133; Accession=PF00224.13; Description=Pyruvate kinase, barrel domain
  Pfam annotation: Domain name=PK_C; Domain location=278-407; Score =173.4; E_value=6.5e-49; Accession=PF02887.8; Description=Pyruvate kinase, alphabeta domain
  Pfam module annotation: Pfam domain module=PK::PK_C; Domain location =1-264::278-407
QLKKGQEITISTDYSIKGDEKMISMSYKKLAVDLKPGSVILCADGTITLTVLHCDKEQGLVRCRCENTSMLGERKNVNLPGVIVDLPTLTDKDKEDILKWGVPNKIDMIALSFVRKGSDLVEVRKILGEHAKSIMLMSKVENQEGVANFDDILANSDAFMVARGDLGMEIPIEKIFFAQKVMIFKCNIQGKPVVTATQMLESMIKSPRPTRAEATDVANAVLDGTDCVMLSGETAAGAYPELAVQTMAKICLQAESCVDYGAVFKLIMASAPIPMSPLESLASSAVRTANSARAVLILVLTRGGTTARLVAKYRPSMPILSVVVPELKTDSFDWTCSDEGPARQSLIVRGVIPMLSAANAKAFDSEATEEALGFAIENAKVMGLCNTGESVVALHRIGIASVIKLLTVS

SEQ ID NO: 100386 - protein, 61 aa, Setaria italica
  Transcript Sequence Number=SeqID_34412
RSRSPAGSRCTSPARPSSPEKPSKPEREVEVSSAACSGAEVVVRVTCKCGVHKEFSFDHHL

SEQ ID NO: 100387 - protein, 89 aa, Setaria italica
  Transcript Sequence Number=SeqID_34413
  Subcellular localization annotation: CTP_CleavageSite=25; ConfidenceScore=5.33e-01
GDEQAAAAPSSAPAPHWECACVPCRSSSCSCRSRGLLLSARTAAFETHLLAFYGNLLLLPRSPAWERARRVLELVPERRKSRRGWCGCR

SEQ ID NO: 100388 - protein, 163 aa, Setaria italica
  Transcript Sequence Number=SeqID_34414
  Gene Ontology: Biological process=pollen maturation
  Homolog annotation: Hit_ID=Q9ZVT9; Match level="QueryCoverage=99%, HitCoverage=15%, E-value=4e-60, Identity=67%"; Hit description =F15K9.2 protein
HEGKEMPENLSGGVLLDQVYAVAPSALNAHLFSPSSDFLQSLAEIQGTTGLEIQQWRLENDGEILKRVVSYTKAPTKLVKAVKATEDMTYLKADGEMFAVLADVSTPDVPFGNNFRVEVLTCIMPGPQLPDDEQSSRLVVSWRLNFLQSTMMKSMIENGARQG

SEQ ID NO: 100389 - protein, 113 aa, Setaria italica
  misc_feature (13)..(13): Xaa can be any naturally occurring amino acid
  misc_feature (24)..(24): Xaa can be any naturally occurring amino acid
  Transcript Sequence Number=SeqID_34415
HLHLLRPRPPELXLNPPKPPPRAXPDPRKGAPGPPSSAPDPPPPRPAQHRLQWGTQFPPPVQRCAPRSAPSSSYQLPGPAADGCAHRGSRPSPGARQRGPGLPPAVRGVGILH

SEQ ID NO: 100390 - protein, 79 aa, Setaria italica
  Transcript Sequence Number=SeqID_34416
AHCISISLEQCTTKNSTCNQPVILIHLYYLCMPSFFSLNDFLSHLYLCSGKRCYICIASSILAVYLMKKLCVYAVQTSQ

SEQ ID NO: 100391 - protein, 66 aa, Setaria italica
  misc_feature (47)..(47): Xaa can be any naturally occurring amino acid
  Transcript Sequence Number=SeqID_34417
MTGVSNSISIGLPSYGLYAEPRFLSQSYRNFPRRSSYKYLRIRAVQXNDGRRRLVDIIRIIPELSR

SEQ ID NO: 100392 - protein, 155 aa, Setaria italica
  Transcript Sequence Number=SeqID_34418
  Gene Ontology: Cellular component=chloroplast
  Pfam annotation: Domain name=DUF565; Domain location=99-155; Score =100.0; E_value=8e-27; Accession=PF04483.4; Description=Protein of unknown function (DUF565)
MTGVSNSISIGLPSYGLYAEPRFLSQSYRNFPRRSSYKYLRIRAVQGNDGRRRLVDIIRIIPELSRNYFRSRSRRTLFGGISLLGGFYVAQTISLSFGALGVNDVIAAVVCVLLAEYVTKFYYSRPKVTFPIALLNNFKMGFTYGLFIDAFKLAS

SEQ ID NO: 100393 - protein, 85 aa, Setaria italica
  Transcript Sequence Number=SeqID_34419
  Gene Ontology: Mol. function=nucleotide binding; Biological process =defense response
  Homolog annotation: Hit_ID=Q8LJX9; Match level="QueryCoverage=92%, HitCoverage=8%, E-value=2e-12, Identity=55%"; Hit description =Putative stripe rust resistance protein Yr10
NLLHLRYLGLRHTYGIHELPEEIGKLKFLQTLDLEYSSIGVLPSGVCQLTQLICLRGNFDTCAPDGSFLRKVTSLEYLSICINNW

SEQ ID NO: 100394 - protein, 101 aa, Setaria italica
  misc_feature (86)..(86): Xaa can be any naturally occurring amino acid
  Transcript Sequence Number=SeqID_34420
  Gene Ontology: Cellular component=integral to membrane
  Homolog annotation: Hit_ID=A7R385; Match level="QueryCoverage=86%, HitCoverage=41%, E-value=7e-12, Identity=43%"; Hit description =UPF0497 membrane protein 12
  Pfam annotation: Domain name=DUF588; Domain location=1-97; Score= -0.9; E_value=0.00025; Accession=PF04535.4; Description=Domain of unknown function (DUF588)
AAAGYSLLQVARCCVTAAQRAGGGGTLTSRALAWCVFSCDQALAYAVLAAVAAALQASVIAKRGQPELQWMGICSMYGAFCRQAGXGIASAVAAAVAAVLL

SEQ ID NO: 100395 - protein, 120 aa, Setaria italica
  Transcript Sequence Number=SeqID_34421
  Gene Ontology: Mol. function=nucleotide binding; Cellular component =myosin complex
  Homolog annotation: Hit_ID=Q6L5H7; Match level="QueryCoverage=100%, HitCoverage=26%, E-value=3e-18, Identity=41%"; Hit description =Putative myosin heavy chain
QLKSTLSESEDRNQELLMKTEVTEKEIAHFQETIQRHEENMAALETSLRSERQQNDAIMKQQADSQAEIGELQRKLEDADGRNKLLQDSLQRLEQSAVAREATLLTERQEKDAISKALGQ

SEQ ID NO: 100396 - protein, 119 aa, Setaria italica
  Transcript Sequence Number=SeqID_34422
  Gene Ontology: Mol. function=nucleotide binding; Cellular component =myosin complex
  Homolog annotation: Hit_ID=Q6L5H7; Match level="QueryCoverage=100%, HitCoverage=25%, E-value=7e-17, Identity=41%"; Hit description =Putative myosin heavy chain
ADSQAEIGELQRKLEDADGRNKLLQDSLQRLEEDATAREALMVTERQENEVTKKTLTEALDQIEELVKEVECANHSVHQLQDSIQRLEQSAVAREATLLTERQEKDAISKALAEAQGRI

SEQ ID NO: 100397 - protein, 101 aa, Setaria italica
  Transcript Sequence Number=SeqID_34423
  Gene Ontology: Mol. function=nucleotide binding; Cellular component =myosin complex; Biological process=signal transduction
  Homolog annotation: Hit_ID=Q6L5H7; Match level="QueryCoverage=47%, HitCoverage=1%, E-value=6e-16, Identity=81%"; Hit description =Putative myosin heavy chain
GEKLQRIPRQKYQPSHHQQPQDDQQWLLTCISQYLGFSGSKPVAALLIYQCLLHWKSFEAMKTGVFDSILHAINSATENLTNCPVIFFPSSKAQNDMRTLA

SEQ ID NO: 100398 - protein, 45 aa, Setaria italica
  Transcript Sequence Number=SeqID_34424
FTSSLKSAVREESNMATSFSILLDDDSSIPFSLDDITKTLPAIEV

SEQ ID NO: 100399 - protein, 357 aa, Setaria italica
  Transcript Sequence Number=SeqID_34425
  Gene Ontology: Mol. function=nucleotide binding; Cellular component =myosin complex
  Homolog annotation: Hit_ID=Q6L5H7; Match level="QueryCoverage=98%, HitCoverage=31%, E-value=2e-77, Identity=36%"; Hit description =Putative myosin heavy chain
TSLRSERQQNDAIMKQQADSQAEIGELQRKLEDADGRNKLLQDSLQRLEEGATTTDALYLEEKQEHDQTKKSLSEAQEINKELLTKIEEAEKNIDQLLENVERLEKDTTARESILLTTKQSYDETAKLLLESQERNQELMHIVEDSASKIVLLEDSVKRLEESTADKDSLLAIERHENSETKKELAGSQKKIEELLTEVQDTRTCIAELEESVRRLEGNLGVTEALLLTEKEQNASTLKLLSEAQLRIEDLIKKLEGADRKSDSLQDTITRLEQEATAKEALLLTEKQAHEATRKTLSEVQERNEELLKNIHDNDKHILQLQFTIQRLEETTVANENLLLREREQNDATSKVVYVLL

SEQ ID NO: 100400 - protein, 931 aa, Setaria italica
  Transcript Sequence Number=SeqID_34426
  Gene Ontology: Mol. function=nucleotide binding; Cellular component =myosin complex; Biological process=signal transduction
  Homolog annotation: Hit_ID=Q6L5H7; Match level="QueryCoverage=93%, HitCoverage=52%, E-value=0.0, Identity=40%"; Hit description =Putative myosin heavy chain
  Pfam annotation: Domain name=DIL; Domain location=749-856; Score =161.0; E_value=3.5e-45; Accession=PF01843.11; Description=DIL domain
TDEKSTLLQTAIQSLEERLREKEALLATERQESEATKKSLSESEDRNQELLMKTEVTEKEIAHFQETIQRHEENMAALETSLRSERQQNDAIMKQQADSQAEIGELQRKLEDADGRNKLLQDSLQRLEQEATAKEALLLTEKQAHEATRKTLSEVQERNEELLKNIHDNDKHILQLQFTIQRLEETTVANENLLLREREQNDATSKAHVESQEKYEELLKKFVDVDRKIDLLQGTIERLGENTTTKDALLLSERHEKDAVKKALTEADEKNEELLMKVEDANEKIEHLQTMIIKLEDNVAAKDVSLEAAMKENDTIRKSLTEAQERNDELLKKISDSEYRIHLLQDTVQKLQVDAISRLSSFVMEKQESDAAKRAVTEAHERNEDLLKRNEDLLKRNDDLIKKIEESSKIVIQLQEALQRIEGKAANLEAENQALRQQATATPPSTAKSPASRSKITRIHRSPENGHILNGDMRQTEMKPSTSTSEAITSAGNVPDSGDQKEFEHGEKLQRIPRQKYQPSHHQQPQDDQQWLLTCISQYLGFSGSKPVAALLIYQCLLHWKSFEAMKTGVFDSILHAINSATEAQNDMRTLAYWLSNLSTLTVLLQRSFKTTRTAISTPRRRFSSERIFHGNQAPNAGLAYLSGQSAVGSAGLLQVEAKYPALLFKQQLVDLIEKVYGMISDSVKKELNPLLELCIQDPRTSHSSLAKGHLNGMGQQNQLTHWLGIVKILTSYLDVLKANHVPSILVHKLFTQIFSLIDVQLFNRLLLRRECCSFSNGEYVRAGLAELKHWSDNATREFAGSAWEALRHIRQAVDFLVISLKPMRTLREIRTDVCPALSIQQLERIVSMYWDDVNGTNTISAEFTSSLKSAVREESNMATSFSILLDDDSSIPFSLDDITKTLPAIEVADDDLLPFVHENPSFAFLLQRGE

SEQ ID NO: 100401 - protein, 221 aa, Setaria italica
  Transcript Sequence Number=SeqID_34427
  Gene Ontology: Mol. function=hydrolase activity, hydrolyzing O -glycosyl compounds; Biological process=carbohydrate metabolic process
  Homolog annotation: Hit_ID=Q8GTM7; Match level="QueryCoverage=81%, HitCoverage=57%, E-value=2e-60, Identity=62%"; Hit description =Putataive glucan 1,3-beta-glucosidase
  Pfam annotation: Domain name=Fascin; Domain location=79-189; Score= -2.7; E_value=0.0094; Accession=PF06268.5; Description=Fascin protein
MSSAGLPLLLLLVCSSWLLPRSDARRTMAAAGAPGPPIRAVNLGGWLLTEGWILPSLFDGIPNNDLLDGTQLQFKSVTQNRYLVADQGGGAAILADRVQPSGWETFKLWRIDETTFNFRVFGNQFVGVNATGGVVATATTPGPSETFQLVRRDSDKSRVRIRAPNGLFLQAKTMESVTADHSEDTDWGDDDPSVFVTNNVARLQGEYQICNGYGITKATEV

SEQ ID NO: 100402 - protein, 89 aa, Setaria italica
  Transcript Sequence Number=SeqID_34428
  Gene Ontology: Mol. function=electron carrier activity; Cellular component=cytoplasmic vesicle membrane; Biological process=oxidation reduction
  Homolog annotation: Hit_ID=Q7XU38; Match level="QueryCoverage=98%, HitCoverage=17%, E-value=1e-43, Identity=92%"; Hit description =Cytochrome P450 87A3
ADIYEDPLAFNPWRWQDKPEITGGTKHFMAFGGGLRFCVGTDFSRVLMATFIHSLVTKYSWRTVKGGNIVRTPGLGFPDGFHIQLVPRN

SEQ ID NO: 100403 - protein, 87 aa, Setaria italica
  Transcript Sequence Number=SeqID_34429
  Gene Ontology: Mol. function=catalytic activity; Cellular component =membrane; Biological process=plant-type hypersensitive response
  Homolog annotation: Hit_ID=Q2LGJ8; Match level="QueryCoverage=100%, HitCoverage=48%, E-value=3e-35, Identity=79%"; Hit description =Putative phosphaticid acid phosphatase (Fragment)
  Pfam annotation: Domain name=PAP2; Domain location=3-87; Score=2.5; E_ value=0.0035; Accession=PF01569.13; Description=PAP2 superfamily
GDAAVIKEGYKSFPSGHTSWSFAGLGFLSWYLAGKIKAFDRGGHVAKLCIVAMPLLLAAMVGVSRVDDYWHHWQDVFTAGVLGLVVA

SEQ ID NO: 100404 - protein, 126 aa, Setaria italica
  Transcript Sequence Number=SeqID_34430
  Gene Ontology: Cellular component=chloroplast
  Homolog annotation: Hit_ID=B9SMY0; Match level="QueryCoverage=98%, HitCoverage=75%, E-value=6e-35, Identity=36%"; Hit description =Pentatricopeptide repeat-containing protein, putative
  Pfam annotation: Domain name=PPR; Domain location=16-50; Score=23.7; E_value=0.00074; Accession=PF01535.12; Description=PPR repeat
  Pfam annotation: Domain name=PPR; Domain location=51-85; Score=29.3; E_value=1.6e-05; Accession=PF01535.12; Description=PPR repeat
  Pfam annotation: Domain name=PPR; Domain location=86-120; Score=25.1; E_value=0.00028; Accession=PF01535.12; Description=PPR repeat
  Pfam module annotation: Pfam domain module=PPR::PPR::PPR; Domain location=16-50::51-85::86-120
ELLQGLVSKGVSPDIITFSSIIGVLSKEDRVEEAIQMFHVVQDIGMRPKAVVYNKILLGLCKRCEIDNAIDFFAYMVSNGCMPNESTYIILIEGLAHEGLLKEARDLLSELCSRGVVSKNLIEEWQ

SEQ ID NO: 100405 - protein, 74 aa, Setaria italica
  Transcript Sequence Number=SeqID_34431
LRAEAPQRQDHPARVLLDHRSQATAAIIVGVVSVFVWGWMCCYFFVFFTLRWMHALFNSYKWCTDVLLSQCFVW

SEQ ID NO: 100406 - protein, 65 aa, Setaria italica
  Transcript Sequence Number=SeqID_34432
ARVMINLIYHTLFLKFGVTCNILWLVFSIFSGHVSTIPYFLLNFFVTTVVCDYANHSHFPSYVYD

SEQ ID NO: 100407 - protein, 352 aa, Setaria italica
  Transcript Sequence Number=SeqID_34433
  Gene Ontology: Mol. function=transferase activity, transferring glycosyl groups; Biological process=metabolic process
  Homolog annotation: Hit_ID=Q6JAG7; Match level="QueryCoverage=99%, HitCoverage=75%, E-value=1e-144, Identity=71%"; Hit description =Putative cis-zeatin O-glucosyltransferase
  Pfam annotation: Domain name=UDPGT; Domain location=1-352; Score= -178.2; E_value=0.074; Accession=PF00201.10; Description=UDP -glucoronosyl and UDP-glucosyl transferase
ASASHRRVVVLYDPLNGFVAEEAARLPNGEAYALHCTAVSSIVGRMEDGNALVRERGLGFLPLDEYVTEEFLEYAIKRARAEEGIASPAGLLANSCRALEGEFIDFLAEQMATGGKKLFAIGPLNPLLGASAPEHSSKRHHECLDWLDEQPPASVLYVSFGSMSSLPREQIVELAAALRGSHQRFIWVLRDADRGNIFADNGETQHARLLAEFTKQTDGRGLVVTGWAPQLEILAHPATAAFMSHCGWNSTMESMSYGKPILAWPMHSDQPWDAELVCEYLGAGFLVRPCEKQTKVTPAATIQQVIERMMVSDEGRAARQRAAEVGEAVRASAAAGGSSRKDFEDFIAHITR

SEQ ID NO: 100408 - protein, 94 aa, Setaria italica
  Transcript Sequence Number=SeqID_34434
  Subcellular localization annotation: CTP_CleavageSite=18; ConfidenceScore=5.14e-01
RDWRIWPNPSNAPSSWSRSASGSTSFGVFLGAGDMAKELGRVQDDIVRKLLLGNFATNVQTTIMVTNIQSPGGPPPPPPPPSQRQVIIDGINII

SEQ ID NO: 100409 - protein, 62 aa, Setaria italica
  Transcript Sequence Number=SeqID_34435
LCIRTALELRVQLYHCRIDLCDSFMLDQQMTSQSAASAGILFASYSAVHVASLHHCTEINRC

SEQ ID NO: 100410 - protein, 169 aa, Setaria italica
  misc_feature (139)..(139): Xaa can be any naturally occurring amino acid
  misc_feature (154)..(154): Xaa can be any naturally occurring amino acid
  misc_feature (164)..(164): Xaa can be any naturally occurring amino acid
  Transcript Sequence Number=SeqID_34436
  Gene Ontology: Mol. function=protein serine/threonine kinase activity; Cellular component=cell surface; Biological process =protein amino acid phosphorylation
  Homolog annotation: Hit_ID=Q01K00; Match level="QueryCoverage=99%, HitCoverage=20%, E-value=3e-80, Identity=86%"; Hit description =H0525E10.8 protein
  Pfam annotation: Domain name=Pkinase; Domain location=1-169; Score =0.4; E_value=1.6e-08; Accession=PF00069.17; Description=Protein kinase domain
  Pfam annotation: Domain name=Pkinase_Tyr; Domain location=1-167; Score=-38.9; E_value=3.8e-11; Accession=PF07714.9; Description =Protein tyrosine kinase
  Pfam module annotation: Pfam domain module=Pkinase::Pkinase_Tyr; Domain location=1-169::1-167
GSFGSVFKGYLSDSVTLAVKRLDGAHQGEKQFRAEVNSVGIIQHINLVKLIGFCCEGDKRLLVYEYMPNHSLDVHLFKTDDTGLDWNVRYQIAIGVARGLAYLHTSCRDCIIHCDIKPENILLDASFVPKIADFGMAKXLGREFSHAMTTMRGXIGYLAPEWIXGQLLH

SEQ ID NO: 100411 - protein, 76 aa, Setaria italica
  Transcript Sequence Number=SeqID_34437
RMNWVIIAITRVFSGELKCLYHQQQLFVMVCMNQLRFSRCSMHHRISLPTFWCLNTKVRVSCTKQCIIFFLVLTSL

SEQ ID NO: 100412 - protein, 100 aa, Setaria italica
  Transcript Sequence Number=SeqID_34438
SHQTVAKFVMISQDFQEVLCKDLYQIGTCIFYAPEHYKSLAHVEMVFITAAVVPNRVSSISGEPQQESLLPRLQLDKKNITTQNLYITYLSAMFWNLYAI

SEQ ID NO: 100413 - protein, 352 aa, Setaria italica
  misc_feature (16)..(16): Xaa can be any naturally occurring amino acid
  misc_feature (65)..(65): Xaa can be any naturally occurring amino acid
  Transcript Sequence Number=SeqID_34439
MLHMALLRKHRSSTVXTRTEHESRKKLDEAWDCILLHESSVNNQSRERMDPCNEMHSNLFWRKEXNSSVNKQGIEVSESTNCPANTGCEVVVKHATGPKDDIFGDLPLLELESSKTMFRTGVDELPTVIEESFITSQSEADSIPEAVPLRLIDASDITVQTPSPLVDLVKSEVNPHNEPAFISHSDVAGSRPSTVRMDGLPHHKNISVMEPDPGNMQLKFNGSALSTNSDLRSKCGSRNPLQGCSDANKNCSKEIKKHSTSSTSSPAMRTRTEATKCKDALVKGKKSTDIAAVVALPAPMNHLSSQVSVLPSAVSQGVFSTRTNADDMSSFRSMPAKECIPSTRPFGCLPMN

SEQ ID NO: 100414 - protein, 56 aa, Setaria italica
  Transcript Sequence Number=SeqID_34440
PPAVAPARKGASTTAIVSKHLTVAAAMSCNLLVLYDAISLLRTEDTDATRRLYQWA

SEQ ID NO: 100415 - protein, 85 aa, Setaria italica
  Transcript Sequence Number=SeqID_34441
  Gene Ontology: Mol. function=transferase activity, transferring glycosyl groups; Biological process=metabolic process
  Homolog annotation: Hit_ID=Q852C2; Match level="QueryCoverage=92%, HitCoverage=17%, E-value=1e-22, Identity=70%"; Hit description =Putative UDP-glucosyltransferase
PYFGDQMGNARYVEHVWRVGLELVGELEMGRVEAAIRRLMTGRDGAEMRSRAGQLKKAAEECTGKGGTSCLAIDKLVTKSRPCQC

SEQ ID NO: 100416 - protein, 127 aa, Setaria italica
  misc_feature (25)..(25): Xaa can be any naturally occurring amino acid
  Transcript Sequence Number=SeqID_34442
  Gene Ontology: Mol. function=DNA binding; Biological process =regulation of transcription
GAAVLLQYSSHLVELPQLESPSAPXRPNPSQASSADEVDGAESGRRGKKARADKVATDWRALDKFVASQLSPTECGGSLEATAPAAAMANVGLEHGEDDDMAALLFLNSDGREEAERWTGLLGPAAG

SEQ ID NO: 100417 - protein, 130 aa, Setaria italica
  misc_feature (109)..(109): Xaa can be any naturally occurring amino acid
  Transcript Sequence Number=SeqID_34443
  Gene Ontology: Mol. function=protein binding; Cellular component =cytoplasmic vesicle; Biological process=ubiquitin-dependent protein catabolic process
  Homolog annotation: Hit_ID=Q69RC4; Match level="QueryCoverage=84%, HitCoverage=100%, E-value=5e-47, Identity=79%"; Hit description =Autophagy-related protein 8A
  Pfam annotation: Domain name=MAP1_LC3; Domain location=34-128; Score =230.5; E_value=4.2e-66; Accession=PF02991.8; Description=Microtubule associated protein 1A1B, light chain 3
ARFRQPLDPIGSPDRRTRRALQSASFKMEHELEKRLSESARIRDKYPDRIPVIVEKAGKTDVPEIDKKKYLVPADLTVGQFIFVVRKRIKLSPEKAIFVFVKNTLPPTXNKDEDGFLYMTYSGENTFGSA

SEQ ID NO: 100418 - protein, 51 aa, Setaria italica
  misc_feature (1)..(1): Xaa can be any naturally occurring amino acid
  misc_feature (3)..(3): Xaa can be any naturally occurring amino acid
  Transcript Sequence Number=SeqID_34444
XPXFPLLVMQLYSSHLSGLWRPAPLLKLATINLVSTYDLLYNCYRSLYLTH

SEQ ID NO: 100419 - protein, 127 aa, Setaria italica
  misc_feature (100)..(100): Xaa can be any naturally occurring amino acid
  Transcript Sequence Number=SeqID_34445
  Homolog annotation: Hit_ID=B9S651; Match level="QueryCoverage=93%, HitCoverage=5%, E-value=2e-27, Identity=50%"; Hit description=RNA binding protein, putative
KLPSPYHRWHATNSSVAQVDSSLGISHALGLGFTKIIVEDTRVEGHEQVSSLHVVIPRTLFLYLVPVMDDSAHFHGITNIPSSKDWYVYPGRKYMVLVKXFAEGFDAREIYITEENELRLESSTMEF

SEQ ID NO: 100420 - protein, 145 aa, Setaria italica
  Transcript Sequence Number=SeqID_34446
  Gene Ontology: Mol. function=electron carrier activity; Cellular component=extracellular region; Biological process=response to oxidative stress
  Homolog annotation: Hit_ID=Q5U1F7; Match level="QueryCoverage=95%, HitCoverage=43%, E-value=6e-69, Identity=89%"; Hit description=Class III peroxidase 136
  Pfam annotation: Domain name=peroxidase; Domain location=21-145; Score=115.2; E_value=2.1e-31; Accession=PF00141.15; Description =Peroxidase
VSAQLTANFYDKSCPNALYTIQTAVKSAVAKENRMGASLLRLHFHDCFVNGCDGSVLLDDTPTFTGEKTAVPNNNSIRGFDVIDSIKAQIEGICPQVVSCADILAVAARDSVVTLGGPTWVVNLGRRDSTTASLDAANNVLFPKV

SEQ ID NO: 100421 - protein, 144 aa, Setaria italica
  Transcript Sequence Number=SeqID_34447
  Gene Ontology: Mol. function=protein tyrosine kinase activity; Biological process=protein amino acid phosphorylation
  Homolog annotation: Hit_ID=B9RZY6; Match level="QueryCoverage=99%, HitCoverage=9%, E-value=1e-38, Identity=56%"; Hit description =Neurobeachin, putative
PPSIRSAYMFLAPLQVLCTSRERIKYAAKLASEGALKAMGEFAAEMCAPYCLSLVSSSFLDVDTESALSLLKEFIKGLSIQATKELILHIIQKILQAPEYSHLKVALLQDSFVRDLWKKLGKQTYIEKVHPLVISNLYNSPNKI

SEQ ID NO: 100422 - protein, 222 aa, Setaria italica
  misc_feature (43)..(43): Xaa can be any naturally occurring amino acid
  Transcript Sequence Number=SeqID_34448
  Gene Ontology: Mol. function=anthranilate synthase activity; Cellular component=cyanelle; Biological process=glutamine metabolic process
  Homolog annotation: Hit_ID=Q42565; Match level="QueryCoverage=97%, HitCoverage=67%, E-value=1e-80, Identity=67%"; Hit description =Anthranilate synthase beta subunit
  Pfam annotation: Domain name=GATase; Domain location=1-211; Score =175.7; E_value=1.3e-49; Accession=PF00117.20; Description=Glutamine amidotransferase class-I
  Pfam annotation: Domain name=Peptidase_C26; Domain location=27-194; Score=-67.3; E_value=6.9e-05; Accession=PF07722.5; Description =Peptidase C26
  Pfam module annotation: Pfam domain module=GATase::Peptidase_C26; Domain location=1-211::27-194
LCQYMGEVGANFEVYRNDEITVEEIKKLVAVSSYVKSYMSACXFLLIKKLYAACCLFYRISPRGILISPGPGTPQDSGISLQTVTELGPSIPLFGVCMGLQCIGEAFGGKVVRSPYGVVHGKGSLVHYDEKLDGTLFSGLPNPFQAGRYHSLVIEKGSFPRDALEIVAWTDDGLIMAARHRKYKHIQGVQFHPESIITTEGRFMVKNFIKIIEGYEALNCIP

SEQ ID NO: 100423 - protein, 101 aa, Setaria italica
  Transcript Sequence Number=SeqID_34449
NKYIKESESKVRRVTMYYKHTGFRIQTTCYINQKLSQHRTIQIAKLNFTRSKHLPVQRKGGQPYARADGYENLRTSTCSARLQLHTGFLSILPSRPLLISG

SEQ ID NO: 100424 - protein, 90 aa, Setaria italica
  Transcript Sequence Number=SeqID_34450
  Gene Ontology: Mol. function=metal ion binding
  Homolog annotation: Hit_ID=B6T6X4; Match level="QueryCoverage=77%, HitCoverage=14%, E-value=9e-33, Identity=88%"; Hit description=BRCA1- associated protein
  Subcellular localization annotation: CTP_CleavageSite=48; ConfidenceScore=5.41e-01
AGKPAASLPPAAAPSTSAHALDSVHFSSGNPRIEETRGVVLLHPEPPAAASSSRLPVGRKPRVCVLAVPNHMTYADFCRFCGAFVPHTLE

SEQ ID NO: 100425 - protein, 228 aa, Setaria italica
  Transcript Sequence Number=SeqID_34451
  Gene Ontology: Mol. function=glutathione transferase activity; Biological process=auxin mediated signaling pathway
  Homolog annotation: Hit_ID=B6SUR9; Match level="QueryCoverage=99%, HitCoverage=99%, E-value=2e-89, Identity=69%"; Hit description =Glutathione S-transferase
  Pfam annotation: Domain name=GST_C; Domain location=96-194; Score =15.1; E_value=0.003; Accession=PF00043.17; Description=Glutathione S- transferase, C-terminal domain
  Pfam annotation: Domain name=GST_N; Domain location=3-76; Score=72.2; E_value=1.9e-18; Accession=PF02798.12; Description=Glutathione S -transferase, N-terminal domain
  Pfam module annotation: Pfam domain module=GST_C::GST_N; Domain location=96-194::3-76
MSPPVKVIGHIASPFSHRVEAALCLKGVPYELIQEDLFNKSELLLTHNPVHKKVPVLLHGDRAICESLVIVEYVDEAFEGPPLLPIDSYDRAMARFWADFMDNKLLKLFWLAHWTEGEVQKGITKEAKESLALLEDKLRGNRFFGGDTVSYLDLVYCWLAPWLSVVEEVTGVTVVDESEFPAIRQWEKEYNSCEALKPCMPDRDQIVAYFIESKESYKMFANAWAAQQ

SEQ ID NO: 100426 - protein, 66 aa, Setaria italica
  Transcript Sequence Number=SeqID_34452
FIGSIVSEKVFPYYNEYFLFSSFLNVWQLRPAISKSDIYHPLCETNLNKLISESSFPCSLILLILQ

SEQ ID NO: 100427 - protein, 98 aa, Setaria italica
  Transcript Sequence Number=SeqID_34453
  Gene Ontology: Mol. function=phosphotransferase activity, alcohol group as acceptor; Cellular component=cytoplasm; Biological process =metabolic process
  Homolog annotation: Hit_ID=B6UAN3; Match level="QueryCoverage=79%, HitCoverage=19%, E-value=1e-26, Identity=74%"; Hit description =Mevalonate kinase
TSTPHLPPASPQGEDGGAGVVELDLRDSCLTFSWPCSRIRRALGEVGGKAGAPTPCSPDELAAIAKLFEGQDIPEAKIRLSAGLSAFLYLYTSILGCK

SEQ ID NO: 100428 - protein, 517 aa, Setaria italica
  Transcript Sequence Number=SeqID_34454
  Gene Ontology: Mol. function=histone deacetylase activity; Cellular component=nucleus; Biological process=histone deacetylation
  Homolog annotation: Hit_ID=P56521; Match level="QueryCoverage=100%, HitCoverage=100%, E-value=0.0, Identity=89%"; Hit description =Probable histone deacetylase 19
  Pfam annotation: Domain name=Hist_deacetyl; Domain location=42-333; Score=368.6; E_value=1.1e-107; Accession=PF00850.11; Description =Histone deacetylase family
MDLSSAGSGGNSLPSVGPDGQKRRVCYFYDPEVGNYYYGQGHPMKPHRIRMTHSLLARYGLLNQMQVYRPNPARDRDLCRFHADDYINFLRSVTPETQQDQIRLLKRFNVGEDCPVFDGLYSFCQTYAGASVGGAVKLNHGHDIAINWSGGLHHAKKCEASGFCYVNDIVLAILELLKHHERVLYVDIDIHHGDGVEEAFYTTDRVMTVSFHKFGDYFPGTGDIRDIGHSKGKYYSLNVPLDDGIDDESYQSLFKPIMGKVMEVFRPGAVVLQCGADSLSGDRLGCFNLSIKGHAECVKYMRSFNVPLLLLGGGGYTIRNVARCWCYETGVALGQELEDKMPVNEYYEYFGPDYTLHVAPSNMENKNTRHQLDDIRSKLLDNLSKLRHAPSVQFQERPPDTELPEPDEDQVDPDERHDPDSDMEVDDHKAVEESTRRSNILGIRVKREFGESDTKVQDGGRVTSEHRGLEPMAEDIGSSKQAPADANAMAIDEPGNVKNEPESSTKLPDQPAMYHKP

SEQ ID NO: 100429 - protein, 55 aa, Setaria italica
  Transcript Sequence Number=SeqID_34455
  Gene Ontology: Mol. function=nucleotide binding; Cellular component =chromosome; Biological process=chromosome organization and biogenesis
  Homolog annotation: Hit_ID=A9S6L3; Match level="QueryCoverage=98%, HitCoverage=4%, E-value=3e-16, Identity=74%"; Hit description =Condensin complex component SMC2
RDPERDFDRSKVKGVVARLIRIKDSSAATALEVTAGGRLFNVVVDTEDTGKKLLK

SEQ ID NO: 100430 - protein, 290 aa, Setaria italica
  Transcript Sequence Number=SeqID_34456
  Gene Ontology: Mol. function=oxidoreductase activity; Biological process=metabolic process
  Homolog annotation: Hit_ID=B6SZZ4; Match level="QueryCoverage=100%, HitCoverage=70%, E-value=1e-125, Identity=79%"; Hit description =Monooxygenase
  Pfam annotation: Domain name=DAO; Domain location=9-210; Score=-15.8; E_value=0.00012; Accession=PF01266.16; Description=FAD dependent oxidoreductase
  Pfam annotation: Domain name=FAD_binding_2; Domain location=9-289; Score=-149.4; E_value=0.047; Accession=PF00890.16; Description=FAD binding domain
  Pfam annotation: Domain name=FAD_binding_3; Domain location=7-288; Score=-69.9; E_value=1.1e-07; Accession=PF01494.11; Description=FAD binding domain
  Pfam annotation: Domain name=Lycopene_cycl; Domain location=9-289; Score=-201.5; E_value=0.047; Accession=PF05834.4; Description =Lycopene cyclase protein
  Pfam module annotation: Pfam domain module=DAO::FAD_binding_2::FAD _binding_3::Lycopene_cycl; Domain location=9-210::9-289::7-288::9-289
MQGKDAAEDVVIVGAGMAGLAAALGLHRKGVRSLVLESSPSLRTSGFAFTTWKNAFRALDALGVGDKIREQHLQAQRLRVISSATGEIVREADLTQQGKRGPHEIRCVRRNVLLQALEEELPKGTIRYSSKIVSIEEDGDIKILQLADGSVLRAKVLIGCDGINSVVAKWLGLAKPSYSGRAAARGFAHYPDGHGFEPEFLQFIGHGFRSGMLPCNETDIYWFFTWTRSEHDKGVDESAAKMKQFVLDKLLGSKVPEEALAVIDRSEMSDVLAAPLRFRPPLSLVTASIS

SEQ ID NO: 100431 - protein, 224 aa, Setaria italica
  Transcript Sequence Number=SeqID_34457
  Gene Ontology: Mol. function=oxidoreductase activity; Biological process=metabolic process
  Homolog annotation: Hit_ID=B6SZZ4; Match level="QueryCoverage=89%, HitCoverage=48%, E-value=5e-86, Identity=79%"; Hit description =Monooxygenase
RFFSLVPVVSLSSFYSVLRSFRSDVLPCNETDIYWFFTWTRSEHDKGVDESAAKMKQFVLDKLRGSKVPEEALAVIDRSEMSDVLAAPLRFRPPLSLVTASISRGNVCVAGDALHPMTPDLGQGGCSALEDGVILARCLGEALAGKDAKGSGSAENGRIEAGLREYARIRRWRSVELVATAYTVGFIQQSDNAIVSFLRDKFLSGVLAGRLLKMADYDCGTLSN

SEQ ID NO: 100432 - protein, 86 aa, Setaria italica
  Transcript Sequence Number=SeqID_34458
  Gene Ontology: Mol. function=6-phosphofructo-2-kinase activity; Biological process=fructose 2,6-bisphosphate metabolic process
  Homolog annotation: Hit_ID=Q10MV3; Match level="QueryCoverage=91%, HitCoverage=15%, E-value=4e-25, Identity=64%"; Hit description=6 -phosphofructo-2-kinase family protein, expressed
ASPTKAPISPAMASSGGISDQLFVSVKLESPWLAELDLDPHLFGSHPVAGSWDPCKALPLERAAAAVWDLSCVVPSQHQPLDFKFI

SEQ ID NO: 100433 - protein, 76 aa, Setaria italica
  Transcript Sequence Number=SeqID_34459
GGVWRLSACAATASVLGVQSLAKASCAALYRHRGHIDRHAPAGHLTGCLLSYFFSLKRRFLSVACLWFVCAVGREV

SEQ ID NO: 100434 - protein, 204 aa, Setaria italica
  Transcript Sequence Number=SeqID_34460
  Gene Ontology: Cellular component=chloroplast; Biological process =cell redox homeostasis
  Homolog annotation: Hit_ID=Q4C3G6; Match level="QueryCoverage=51%, HitCoverage=30%, E-value=5e-26, Identity=54%"; Hit description =Similar to membrane protein
  Subcellular localization annotation: CTP_CleavageSite=32; ConfidenceScore=5.20e-01
LLATSMATASAYFLYILSTKFVGLSCSYCLLSAFLSFSLLFIRVKDFGFKRIQKFAGIQVAVAVIIALALTNSYSSATTQLKGTDDFVLEPYETEITTESSPFAISLARHLHSIGAKMYGAFWCSHCNEQKQMFGREATKILDYVECFPNGAGKGKKMTQECQAAGLEGFPTWFINGKVLSGDQELEVLAEASGFVAEGTEQSK

SEQ ID NO: 100435 - protein, 169 aa, Setaria italica
  Transcript Sequence Number=SeqID_34461
  Homolog annotation: Hit_ID=Q0J951; Match level="QueryCoverage=88%, HitCoverage=18%, E-value=8e-43, Identity=64%"; Hit description=Auxin response factor 12
  Subcellular localization annotation: CTP_CleavageSite=53; ConfidenceScore=5.59e-01
QHAHNDQKQKIQPDQPYQVPTSAVLPSPTSLPSHLREKFGFSDPNVNSSSFISSSSNENMLESNFLQGSSKCVDLSRFNQPTVSEQQQQQQAWKQKFMGSQSMSFGGSVSLNSPTSKDGSVDNKVGRDVQNQSLFSPQVDNSSLLYNMVPNLTSNCLLVLTNYYSYVFP

SEQ ID NO: 100436 - protein, 94 aa, Setaria italica
  Transcript Sequence Number=SeqID_34462
  Gene Ontology: Mol. function=protein dimerization activity; Cellular component=nucleus; Biological process=regulation of transcription, DNA-dependent
  Homolog annotation: Hit_ID=Q0J951; Match level="QueryCoverage=77%, HitCoverage=8%, E-value=2e-38, Identity=100%"; Hit description=Auxin response factor 12
SGSSGISSEASSEKNSYCLLSREELGQMFGIKGQLDDPDRSGWQLVFVDRENDVLLLGDDPWESFVNSVWYIKILSPEDVHKMGKQGNDPRYLS

SEQ ID NO: 100437 - protein, 813 aa, Setaria italica
  misc_feature (17)..(17): Xaa can be any naturally occurring amino acid
  misc_feature (160)..(160): Xaa can be any naturally occurring amino acid
  Transcript Sequence Number=SeqID_34463
  Gene Ontology: Mol. function=protein dimerization activity; Cellular component=nucleus; Biological process=regulation of transcription, DNA-dependent
  Homolog annotation: Hit_ID=Q0J951; Match level="QueryCoverage=100%, HitCoverage=99%, E-value=0.0, Identity=82%"; Hit description=Auxin response factor 12
  Pfam annotation: Domain name=Auxin_resp; Domain location=257-340; Score=178.7; E_value=1.7e-50; Accession=PF06507.5; Description=Auxin response factor
  Pfam annotation: Domain name=B3; Domain location=129-235; Score =101.4; E_value=3e-27; Accession=PF02362.13; Description=B3 DNA binding domain
  Pfam module annotation: Pfam domain module=Auxin_resp::B3; Domain location=257-340::129-235
SSAASIGQPPPPVVGCXAEKKCLNSELWHACAGPLVCLPTVGTRVIYFPQGHSEQVAASTNKEVDGHIPNYPNLPPQLICQLHDVTMHADVETDEVYAQMTLQPLNPQEQNDAYLPAEMGIMSKQPTNYFCKTLTASDTSTHGGFSVPRRAAERVFPPLXDFTQQPPAQELIARDIHDVEWKFRHIFRGQPKRHLLTTGWSVFVSAKRLVAGDSVLFIWNEKNQLLLGIRRASRPQTVMPSSVLSSDSMHIGLLAAAAHAAATNSRFTIFYNPRASPSEFVIPLSKYIKAVFHTRISVGMRFRMLFETEESSVRRYMGTITEVSDADPVRWPSSYWRSVKVGWDESTAGERPPRVSLWEIEPLTTFPMYPSLFPLRVKHPWYSGVAALHDDSNALMWLRGVAGEGGFQSFNFQSPGIGSWGQQRLHPSLLSNDHDQYQAVVAAAAASQSGGYLKQQFLHLQQPMQSPQEQCNLNPLLQQQIMQQASQQQLVSPDSQNIQSVLSPSAIQQQLHQLQQMQHAHNDQKQKIQPDQPYQVPTSAVLPSPTSLPSHLREKFGFSDPNVNSSSFISSSSNENMLESNFLQGSSKCVDLSRFNQPTVSEQQQQQQAWKQKFMGSQSMSFGGSVSLNSPTSKDGSVDNKVGRDVQNQSLFSPQVDNSSLLYNMVPNLTSNVVDNNISTIPSGSTYLQNPMYGCLDDSSGLLQNTGENDPTTRTFVKVYKSGSVGRSLDITRFSNYAELREELGQMFGIKGQLDDPDRSGWQLVFVDRENDVLLLGDDPWESFVNSILYIKILSPEDVHKMGKQGNDPRYLS

SEQ ID NO: 100438 - protein, 29 aa, Setaria italica
  Transcript Sequence Number=SeqID_34464
LYSIRYLLLIMKIQVRTWTPFVPVLKPGL

SEQ ID NO: 100439 - protein, 83 aa, Setaria italica
  Transcript Sequence Number=SeqID_34465
FDIQLGRGTVQLNDLALNADLINRKLSGSPIMLKEGSIKSLLVRFAASCEIVVEELELVLSPSVASEVVDVHNECSVSGCTSD

SEQ ID NO: 100440 - protein, 110 aa, Setaria italica
  Transcript Sequence Number=SeqID_34466
  Gene Ontology: Mol. function=acid-amino acid ligase activity; Cellular component=intracellular; Biological process=ubiquitin -dependent protein catabolic process
  Homolog annotation: Hit_ID=Q6YU89; Match level="QueryCoverage=93%, HitCoverage=5%, E-value=2e-46, Identity=86%"; Hit description =Putative HECT ubiquitin-protein ligase 3
  Pfam annotation: Domain name=Arm; Domain location=10-48; Score=17.8; E_value=0.046; Accession=PF00514.15; Description=Armadillobeta -catenin-like repeat
TAANMCRKLPSDASDFVMEAVPLLTNLLNYHDSKVLEHASVCLTHIVEAFSSSPEKLDELCNHGLVAQAASLISVSNSAGQASLSTSTYTGVIRLLSICASGSPLASKTL

SEQ ID NO: 100441 - protein, 72 aa, Setaria italica
  Transcript Sequence Number=SeqID_34467
  Gene Ontology: Mol. function=secondary active sulfate transmembrane transporter activity; Cellular component=integral to membrane; Biological process=sulfate transport
  Homolog annotation: Hit_ID=B9RJF7; Match level="QueryCoverage=98%, HitCoverage=10%, E-value=2e-27, Identity=80%"; Hit description =Sulfate transporter, putative
ALQCVFPVLQWGRSYTLKDFRSDVMAGLTLASLGIPQSIGYANLAKLDPQYGLYTSVVPPLIYAVMGTSREI

SEQ ID NO: 100442 - protein, 133 aa, Setaria italica
  Transcript Sequence Number=SeqID_34468
  Gene Ontology: Cellular component=extracellular region
  Homolog annotation: Hit_ID=B6SSB7; Match level="QueryCoverage=100%, HitCoverage=50%, E-value=1e-45, Identity=75%"; Hit description =Protein kinase
  Pfam annotation: Domain name=DUF26; Domain location=57-109; Score =83.6; E_value=7.2e-22; Accession=PF01657.9; Description=Domain of unknown function DUF26
PDTGYTLILINTMNASDPAAFDRAERKLMARVAAEAGDAASGGLVRETARFGSATTIYGLGWCTRDITAADCGLCVAQAVAELPNYCQFRRGCRVLYSSCMARYETYPFFFPVSGAAAASSHAGEYEKVILNH

SEQ ID NO: 100443 - protein, 147 aa, Setaria italica
  Transcript Sequence Number=SeqID_34469
  Gene Ontology: Mol. function=glutathione transferase activity; Cellular component=cytoplasm; Biological process=auxin mediated signaling pathway
  Homolog annotation: Hit_ID=B4FTF8; Match level="QueryCoverage=79%, HitCoverage=52%, E-value=2e-56, Identity=88%"; Hit description =Glutathione S-transferase
GYILSVTCVYVCLTVTDKINQDIRWPQSLCIVSLAESRAICRYICDQYADRGNKALLGKKEHGAVGRAAIEQWIEAEGQSFNPPSLAIIFQLAFAPMMGRATDMAVVEQNEVKLAKVLDVYDQRLGESQYFAGDEFSLADLVHLPNA

SEQ ID NO: 100444 - protein, 224 aa, Setaria italica
  Transcript Sequence Number=SeqID_34470
  Gene Ontology: Mol. function=glutathione transferase activity; Cellular component=cytoplasm; Biological process=auxin mediated signaling pathway
  Homolog annotation: Hit_ID=B4FTF8; Match level="QueryCoverage=100%, HitCoverage=100%, E-value=1e-121, Identity=92%"; Hit description =Glutathione S-transferase
  Pfam annotation: Domain name=GST_C; Domain location=117-209; Score =68.2; E_value=3e-17; Accession=PF00043.17; Description=Glutathione S- transferase, C-terminal domain
  Pfam annotation: Domain name=GST_N; Domain location=3-78; Score=81.5; E_value=3.1e-21; Accession=PF02798.12; Description=Glutathione S -transferase, N-terminal domain
  Pfam module annotation: Pfam domain module=GST_C::GST_N; Domain location=117-209::3-78
MAAPVTVYGPVISPAVARVAACLLEKDVPFQIEPVDMSKGEHKSPSFLKLQPFGQVPAFKDHLTTVFESRAICRYICDQYADRGNKALLGKKEHGAVGRAAIEQWIEAEGQSFNPPSLAIIFQLAFAPMMGRATDMAVVEQNEVKLAKVLDVYDQRLGESQYFAGDEFSLADLVHLPNADFLVNRTSKAGLITERKNLARWWDDVSARPTWKKVIEMQSAPGPS

SEQ ID NO: 100445 - protein, 81 aa, Setaria italica
  Transcript Sequence Number=SeqID_34471
FSYKFIEFCSRKLIHCAHTIQHKIRRLTIYVDSALLIAIAIYFFLGPPPRGRSTQRWHLAADQLQQLNSGTVSKKCTQQIL

SEQ ID NO: 100446 - protein, 56 aa, Setaria italica
  misc_feature (24)..(24): Xaa can be any naturally occurring amino acid
  misc_feature (29)..(29): Xaa can be any naturally occurring amino acid
  Transcript Sequence Number=SeqID_34472
VHFGCSIYACKAKKIHFPMLLVTXKNSIXVNGNHRNKWTYRICQGAASPFVGPQAL

SEQ ID NO: 100447 - protein, 54 aa, Setaria italica
  Transcript Sequence Number=SeqID_34473
RTKCCAMLKLCILSCELHPDFRCILYSDTQKSHHQFSLIQTIIVFEKPHIIYFT

SEQ ID NO: 100448 - protein, 74 aa, Setaria italica
  Transcript Sequence Number=SeqID_34474
  Homolog annotation: Hit_ID=A5HEG1; Match level="QueryCoverage=95%, HitCoverage=21%, E-value=1e-21, Identity=67%"; Hit description =Putative growth-regulating factor 2
EDHDQAYIVHGVGSSAENGNELQESLLLVSRETLDDGPLGEVFKSKICQSAYADILTDQWTVTRDLQLSNSNIT

SEQ ID NO: 100449 - protein, 185 aa, Setaria italica
  misc_feature (7)..(7): Xaa can be any naturally occurring amino acid
  misc_feature (10)..(10): Xaa can be any naturally occurring amino acid
  misc_feature (132)..(132): Xaa can be any naturally occurring amino acid
  Transcript Sequence Number=SeqID_34475
  Homolog annotation: Hit_ID=A5HEG1; Match level="QueryCoverage=98%, HitCoverage=51%, E-value=1e-55, Identity=64%"; Hit description =Putative growth-regulating factor 2
  Subcellular localization annotation: CTP_CleavageSite=57; ConfidenceScore=5.38e-01
LAEPSMXVSXGPSLHSYAVPWQQQVKSSAATMTDSFSRESNRKLLEKQNVHNQLSVSAPMDSFDFASSGSSQNRDIVPLSPVELQHDHDQAYIVHGVGSSAENGNELQESLLLVSRETLDDGPLGEVFKSRXCQSAYADILTDQWTVTRDLQLSNSNTMPVENHISSNGYLMATMVNSQTVPTFL

SEQ ID NO: 100450 - protein, 354 aa, Setaria italica
  misc_feature (87)..(87): Xaa can be any naturally occurring amino acid
  Transcript Sequence Number=SeqID_34476
  Gene Ontology: Mol. function=electron carrier activity; Cellular component=transcription factor complex; Biological process=positive regulation of transcription from RNA polymerase II promoter
  Homolog annotation: Hit_ID=Q336Y0; Match level="QueryCoverage=96%, HitCoverage=18%, E-value=1e-148, Identity=78%"; Hit description =Amine oxidase, flavin-containing family protein, expressed
  Subcellular localization annotation: CTP_CleavageSite=45; ConfidenceScore=5.38e-01
STLSSQNTSGKAAIDGQSISSDVHVNSAMVVLRKLFRDSSVPDPVASVVTNWGLDPFSRGAYSYVAVGASGRDYDILGRPVANCLFXAGEATCKEHPDTVGGAILSGLREAVRIIDLVNTGNDYIAEVEALQTYQMQSDSERSEVRDMSNRLEACALSTALSKNTSDVTYPIVSKESLLQEMFFSAKTTSGRLHLAKELLKLPTDVLKSFAGSKEGLSTLNTWILDSLGKNATQLLRHCVRLLVLVSTDLVAVRLSGIGRTVKEKVCVHTSRDIRAIARQLVSVWIEVFRKEKASNGLKLLRRMPSIELSKTKSKDLQSGKPTLRVPNETLDNNKVASQRQRARFASSHSPPKT

SEQ ID NO: 100451 - protein, 149 aa, Setaria italica
  Transcript Sequence Number=SeqID_34477
  Gene Ontology: Mol. function=hydrolase activity
  Homolog annotation: Hit_ID=B6TC35; Match level="QueryCoverage=85%, HitCoverage=36%, E-value=2e-63, Identity=89%"; Hit description =Tartrate-resistant acid phosphatase type 5
CRCPEEQPFSNIYTAKGLQKPWYLVLGNHDYTGNALAQLDPAIRNVDSRYTVIAKSFIVNSGIADFFLVDTTPFILHYWNNTKFDWRGVAPRDTYITNLLKNLEYALTQSKAPWKIVVGHHPISSGCGHGNNTELEELTYYPSTIQRTQ

SEQ ID NO: 100452 - protein, 324 aa, Setaria italica
  Transcript Sequence Number=SeqID_34478
  Gene Ontology: Mol. function=hydrolase activity
  Homolog annotation: Hit_ID=B6TC35; Match level="QueryCoverage=89%, HitCoverage=84%, E-value=1e-149, Identity=89%"; Hit description =Tartrate-resistant acid phosphatase type 5
  Pfam annotation: Domain name=Metallophos; Domain location=37-246; Score=73.4; E_value=8.4e-19; Accession=PF00149.20; Description =Calcineurin-like phosphoesterase
MARVGIMLVALGAVVALLQVAAALPRLEHPPKADGSLAILVVGDWGRRGQFNQTLVAQQMGVVGEKMDIDFVISTGDNIYDDGIANTSDPLFKESFSNIYTAKGLQKPWYLVLGNHDYTGNALAQLDPAIRNVDSRYTVIAKSFIVNSGIADFFLVDTTPFILHYWNNTKFDWRGVAPRDTYITNLLKNLEYALTQSKAPWKIVVGHHPISSGCGHGNNTELEELLLPVIKAHGADMYVNGHDHCLQRITSRDSPLQFLTSGGGSKAWAGKFKATPDKVEFLYDGQGFMSMRLSKTEAHLAFFDVAGSVLHCWGLTKTAAAAGH

SEQ ID NO: 100453 - protein, 185 aa, Setaria italica
  Transcript Sequence Number=SeqID_34479
  Pfam annotation: Domain name=DUF1645; Domain location=22-184; Score =28.5; E_value=1.3e-06; Accession=PF07816.3; Description=Protein of unknown function (DUF1645)
FPTYEEHEVEGFTFAAVARLPAGGAFPDGRVGPVYPVFGRPRSPPLREAEDPGTATALVPLGQLLLEERGAPSSGQSEDDDGGLDGVPAETYCLWSPGASPAPGSQSPSSPARCRKSGSTGSVLRWRQRVVRRSHSDGKEKFVFMDASSESERNAGRKSTFLPCKQDLVGFFANAGAFRRSYLPF

SEQ ID NO: 100454 - protein, 81 aa, Setaria italica
  Transcript Sequence Number=SeqID_34480
GESELSVMSLVGMGGVGKTTLAKKVYNHPHVTKHFDRSSWVYVSNMMERRGVLREMAKGLMRIPSAEASSLSEGQLQQLLL

SEQ ID NO: 100455 - protein, 92 aa, Setaria italica
  Transcript Sequence Number=SeqID_34481
  Subcellular localization annotation: CTP_CleavageSite=42; ConfidenceScore=5.47e-01
LLVLPLAAVSGAAAAGANATSSAPLGCSELSRVCTAFLAFPAAGAGAANATLLESMFDAAPGDLTADAAASPGYAFVRKNCSCLPSRTYLAN

SEQ ID NO: 100456 - protein, 43 aa, Setaria italica
  Transcript Sequence Number=SeqID_34482
MAGATAATPMDVDAAAPPPPPAGAAAKGKAPSTRREAAPVGWR

SEQ ID NO: 100457 - protein, 82 aa, Setaria italica
  Transcript Sequence Number=SeqID_34483
  Subcellular localization annotation: CTP_CleavageSite=19; ConfidenceScore=5.29e-01
TTPYPVTALKLLHSFSSPSSTSLTYSFTPQEYTPHNVFTTKASPHLPQYTPRIYLPPSPPHHYHDSNKRNKRQVLKHYVMTS

SEQ ID NO: 100458 - protein, 68 aa, Setaria italica
  Transcript Sequence Number=SeqID_34484
  Subcellular localization annotation: CTP_CleavageSite=26; ConfidenceScore=5.05e-01
FPVAATNGLSQRALPTFTSWTLVTTSAHQLPPNTMYIRLQGELILSALLCSPIAASYHLNHRHQQGPP

SEQ ID NO: 100459 - protein, 106 aa, Setaria italica
  misc_feature (15)..(15): Xaa can be any naturally occurring amino acid
  Transcript Sequence Number=SeqID_34485
  Gene Ontology: Mol. function=catalytic activity; Biological process =metabolic process
  Homolog annotation: Hit_ID=Q2QY22; Match level="QueryCoverage=72%, HitCoverage=30%, E-value=7e-25, Identity=72%"; Hit description =Phosphoglycerate mutase family protein
VSYLNMIADKHKGEXRVVVVSHGATIEEICRHANPMTTLVRRRIPNTSISEIHISGENGHWILEKLGDVGHINEDGFLQSAFGGDGKKTCCSALVRTAIQSATSSP

SEQ ID NO: 100460 - protein, 81 aa, Setaria italica
  Transcript Sequence Number=SeqID_34486
  Gene Ontology: Mol. function=catalytic activity; Biological process =metabolic process
  Homolog annotation: Hit_ID=Q2QY22; Match level="QueryCoverage=79%, HitCoverage=25%, E-value=3e-20, Identity=73%"; Hit description =Phosphoglycerate mutase family protein
HVAFAGERVVVVSHGAAIEEICRHADPTMTLVRRRIPNTSISVIHISGENRHWILEKLGDVGHLDEDGFLQSAFGGDGASV

SEQ ID NO: 100461 - protein, 122 aa, Setaria italica
  misc_feature (105)..(105): Xaa can be any naturally occurring amino acid
  misc_feature (107)..(107): Xaa can be any naturally occurring amino acid
  misc_feature (109)..(109): Xaa can be any naturally occurring amino acid
  misc_feature (118)..(118): Xaa can be any naturally occurring amino acid
  Transcript Sequence Number=SeqID_34487
  Gene Ontology: Mol. function=metal ion binding; Biological process =metal ion transport
  Homolog annotation: Hit_ID=B6U4D0; Match level="QueryCoverage=45%, HitCoverage=15%, E-value=2e-16, Identity=77%"; Hit description=ATFP3
  Pfam annotation: Domain name=HMA; Domain location=69-122; Score=20.9; E_value=0.0051; Accession=PF00403.18; Description=Heavy-metal -associated domain
QPHSHTVSHRSSTRRGARVSREQSTAHQGKEKPKDAAPAEEKSKEGGGGGEEKKEEAPPPPPPPPEEVEMRVYMHCEGCARKVKKILRRFDGVEDVIADSKAHKXVXGXRAPMKVVEXVQKK

SEQ ID NO: 100462 - protein, 56 aa, Setaria italica
  misc_feature (50)..(50): Xaa can be any naturally occurring amino acid
  Transcript Sequence Number=SeqID_34488
MESSFMTSEMEILWVGTAGVEDVIADSKAHKVVVKGKKAAADPMKVVERXQKKTGR

SEQ ID NO: 100463 - protein, 157 aa, Setaria italica
  Transcript Sequence Number=SeqID_34489
  Gene Ontology: Mol. function=metal ion binding; Biological process =metal ion transport
  Homolog annotation: Hit_ID=B6U4D0; Match level="QueryCoverage=43%, HitCoverage=18%, E-value=5e-21, Identity=75%"; Hit description=ATFP3
  Pfam annotation: Domain name=HMA; Domain location=69-133; Score=44.4; E_value=4.5e-10; Accession=PF00403.18; Description=Heavy-metal -associated domain
MGEEAKKEEVEKPKEAAPAEEKPKEAAPAEEKPKDAAPAEEKSKEGGGGGEEKKEEAPPPPPPPPEEVEMRVYMHCEGCARKVKKILRRFDGVEDVIADSKAHKVVVKGKKAAADPMKVVERVQKKTGRKVELLSPIPPPPEEKKEEEKKEEPEPPK

SEQ ID NO: 100464 - protein, 85 aa, Setaria italica
  misc_feature (79)..(79): Xaa can be any naturally occurring amino acid
  Transcript Sequence Number=SeqID_34490
GQGGDVDSGQPSAVTGKIESKEPDPVAPGDTTSTPDEDSSNESQKEDSSNESQKAEQGTCDLYHGEWVLDSSGPLYTNXSCPIIT

SEQ ID NO: 100465 - protein, 76 aa, Setaria italica
  Transcript Sequence Number=SeqID_34491
MVNWYCNCYCRKGIWLHFFFFASPFAVAEKYVILLRLWKPEHLHGFCIISGFYETRVAYYSWRGAPGYTFASIPDY

SEQ ID NO: 100466 - protein, 117 aa, Setaria italica
  misc_feature (7)..(7): Xaa can be any naturally occurring amino acid
  Transcript Sequence Number=SeqID_34492
  Pfam annotation: Domain name=DUF872; Domain location=9-117; Score =168.6; E_value=1.8e-47; Accession=PF05915.4; Description=Eukaryotic protein of unknown function (DUF872)
MASRRNXRYSPLPAEEGDDNNLTKEDVDLRFTYTPKSYRRIPWKSIALALFLLLLGSSLLFLSYFIFSGHMEGDSSQAYGLLFLGFLAFLPGFYETRVAYYSWRGAPGYTFASIPDY

SEQ ID NO: 100467 - protein, 111 aa, Setaria italica
  Transcript Sequence Number=SeqID_34493
  Gene Ontology: Mol. function=ligase activity; Biological process =response to auxin stimulus
  Homolog annotation: Hit_ID=P0C0M2; Match level="QueryCoverage=100%, HitCoverage=19%, E-value=1e-52, Identity=86%"; Hit description =Probable indole-3-acetic acid-amido synthetase GH3.2
YVVYWELMVREGGKMPEAAVFERCCLEMEEALNSVYRQLRNGDAIGPLEIRVVRGGTFEEVMDYAISRGASINQYKAPRCVSFGPIIELLNSRVLSKHFSPACPKFSPHKK

SEQ ID NO: 100468 - protein, 87 aa, Setaria italica
  Transcript Sequence Number=SeqID_34494
  Gene Ontology: Mol. function=transferase activity, transferring glycosyl groups; Cellular component=integral to membrane; Biological process=cellulose biosynthetic process
  Homolog annotation: Hit_ID=B9STK1; Match level="QueryCoverage=94%, HitCoverage=11%, E-value=1e-19, Identity=56%"; Hit description =Cellulose synthase, putative
MIRSACSQQLRVSSLVSNAPYLLVLDCDMSCNSRSSALEAMCFHLDRSPPAPESLAFVQFPQMFHNLSPNDIYTNDLRSFFATRWIR

SEQ ID NO: 100469 - protein, 74 aa, Setaria italica
  Transcript Sequence Number=SeqID_34495
FAGDDGQDDGGDRCGEAAEERRRMKKMYETFKGDIEEASKENSISRSWTKEKRQDHDAYVEINPIQSKQFLIIS

SEQ ID NO: 100470 - protein, 246 aa, Setaria italica
  Transcript Sequence Number=SeqID_34496
  Gene Ontology: Mol. function=transferase activity, transferring glycosyl groups; Cellular component=integral to membrane; Biological process=cellulose biosynthetic process
  Homolog annotation: Hit_ID=B9STK4; Match level="QueryCoverage=88%, HitCoverage=37%, E-value=7e-45, Identity=46%"; Hit description =Transferase, putative
GLLESRRRGDLPAVDVLVVTADPDKEPALGVMNTVVSAMALDYHGGRLSVYLSDDAGSPLTLMAARKAYAFARAWVPFCRRYSVQCPWPDRYFAGDDGQDDGGDRCGEAAEERRRMKKMYETFKGDIEEASKEKSISRSWTKEKRQDHDAYVEIITAGEEEDDDQQGEETMPLLVYVSREKRRASPHHFKAGALNALLRVSSLVSNAPYLLVLDCDMSCNSRSGAGGDRSRWKHHVLPSRPIPAGA

SEQ ID NO: 100471 - protein, 83 aa, Setaria italica
  misc_feature (24)..(24): Xaa can be any naturally occurring amino acid
  Transcript Sequence Number=SeqID_34497
  Homolog annotation: Hit_ID=Q7XK21; Match level="QueryCoverage=65%, HitCoverage=7%, E-value=4e-11, Identity=61%"; Hit description =OSJNBa0044K18.24 protein
AYPVCDLSKHDIFIVQVVNAPMVXPKFLYLKHLTILISERTFSPPYNYFSLVYFFDASPSLETFFLDETYPSKVSGHFVRSMI

SEQ ID NO: 100472 - protein, 164 aa, Setaria italica
  misc_feature (22)..(22): Xaa can be any naturally occurring amino acid
  misc_feature (54)..(54): Xaa can be any naturally occurring amino acid
  misc_feature (148)..(148): Xaa can be any naturally occurring amino acid
  Transcript Sequence Number=SeqID_34498
  Homolog annotation: Hit_ID=Q7XK21; Match level="QueryCoverage=100%, HitCoverage=21%, E-value=4e-40, Identity=56%"; Hit description =OSJNBa0044K18.24 protein
LYLKHLTILISERTFSPPYNYXFLLVYFFDASPSLETFFLDVPHEDVKHESVFXGSSHLGELPEQQHNCLKIVEIIGFSSAKSLVELTCCIVKNAVSLECLTLDTLRDPWRCSGEANKTCWPIHNDVLKEASRAVVAIRMYIEHKVAXTSKLIVLEPCTRCHSR

SEQ ID NO: 100473 - protein, 108 aa, Setaria italica
  Transcript Sequence Number=SeqID_34499
  Subcellular localization annotation: CTP_CleavageSite=68; ConfidenceScore=5.06e-01
GIGVAVAAVVLLGLAAGLIYFFVGRKRRRRPPPSHQGFPGEFYDPRRPVTPPHMSHAPSTTPSSSTPPLMHSWQSSRGPSESPLPPLNPSPAIMGAPFGYDDLAAATD

SEQ ID NO: 100474 - protein, 90 aa, Setaria italica
  Transcript Sequence Number=SeqID_34500
  Gene Ontology: Mol. function=7S RNA binding; Cellular component =signal recognition particle, endoplasmic reticulum targeting
  Homolog annotation: Hit_ID=P49964; Match level="QueryCoverage=47%, HitCoverage=31%, E-value=2e-16, Identity=90%"; Hit description =Signal recognition particle 19 kDa protein
QLPRLPYPLLPKDLSKHSGPHQPRSSCGSCARICAVVASNGAQMDGGGGDLRSTIKKWNVIYPVYLNSKKTVAEGRRIAASKACPDPTCI

SEQ ID NO: 100475 - protein, 163 aa, Setaria italica
  misc_feature (150)..(150): Xaa can be any naturally occurring amino acid
  Transcript Sequence Number=SeqID_34501
  Gene Ontology: Mol. function=7S RNA binding; Cellular component =signal recognition particle, endoplasmic reticulum targeting; Biological process=SRP-dependent cotranslational protein targeting to membrane
  Homolog annotation: Hit_ID=P49964; Match level="QueryCoverage=70%, HitCoverage=84%, E-value=8e-61, Identity=95%"; Hit description =Signal recognition particle 19 kDa protein
  Pfam annotation: Domain name=SRP19; Domain location=41-137; Score =95.1; E_value=2.5e-25; Accession=PF01922.9; Description=SRP19 protein
APSKPTGSPSLLLRICAVVASNGAQMDGGGGDLRSTIKKWNVIYPVYLNSKKTVAEGRRIAASKACPDPTCIEIADCCSHLKIPYAIELDKAYPRDFFQVGRVRVQLKKDDGSPVNPAIKTKKQLMIQIAELVPKHHGRTKKQESAPSSXPAAVSKNTKGGKK

SEQ ID NO: 100476 - protein, 95 aa, Setaria italica
  Transcript Sequence Number=SeqID_34502
  Subcellular localization annotation: CTP_CleavageSite=80; ConfidenceScore=5.51e-01
SSHLASASRAETPSNGDPHSPAERATGVPARSDPRSLLLRSAASRAYGTDSRKLRRRVGRGNRVGVGESAKEVSARGGAPASGGGGASAREMPKG

SEQ ID NO: 100477 - protein, 113 aa, Setaria italica
  Transcript Sequence Number=SeqID_34503
  Gene Ontology: Mol. function=substrate-specific transmembrane transporter activity; Cellular component=integral to membrane; Biological process=transmembrane transport
  Homolog annotation: Hit_ID=Q6B4G9; Match level="QueryCoverage=100%, HitCoverage=21%, E-value=2e-51, Identity=86%"; Hit description=Sugar transport protein 1
FETLGFKGDASLMSSVITGLVNVFATVVSIFTVDRLGRRALFLQGGAQMIICQVVVGSLIAAKFGTSGIGEMPKGYAAVVVLFICVYVAGFAWSWGPLGWLVPSEIFPLEIRP

SEQ ID NO: 100478 - protein, 89 aa, Setaria italica
  Transcript Sequence Number=SeqID_34504
  Gene Ontology: Mol. function=substrate-specific transmembrane transporter activity; Cellular component=integral to membrane; Biological process=transmembrane transport
  Homolog annotation: Hit_ID=Q6B4G9; Match level="QueryCoverage=76%, HitCoverage=13%, E-value=1e-21, Identity=69%"; Hit description=Sugar transport protein 1
LIIAQAFLPMLCRFKFILFFFFGAWVVVMTIFVALFLPETKNVPIEEMVLVWKNHWYWGRFIRDEDVHVGADLEMRGGANGNGKLAGMQ

SEQ ID NO: 100479 - protein, 519 aa, Setaria italica
  Transcript Sequence Number=SeqID_34505
  Gene Ontology: Mol. function=substrate-specific transmembrane transporter activity; Cellular component=integral to membrane; Biological process=transmembrane transport
  Homolog annotation: Hit_ID=Q6B4G9; Match level="QueryCoverage=97%, HitCoverage=96%, E-value=0.0, Identity=76%"; Hit description=Sugar transport protein 1
  Pfam annotation: Domain name=DUF895; Domain location=53-197; Score= -81.7; E_value=0.1; Accession=PF05978.8; Description=Eukaryotic protein of unknown function (DUF895)
  Pfam annotation: Domain name=MFS_1; Domain location=21-442; Score =90.2; E_value=7.4e-24; Accession=PF07690.8; Description=Major Facilitator Superfamily
  Pfam annotation: Domain name=Sugar_tr; Domain location=26-490; Score =547.6; E_value=1.5e-161; Accession=PF00083.16; Description=Sugar (and other) transporter
  Pfam module annotation: Pfam domain module=DUF895::MFS_1::Sugar_tr; Domain location=53-197::21-442::26-490
MAGGVVVNTGGGKDYPGKLTMFVLFACIVAATGGLIFGYDIGISGGVTSMNPFLMKFFPSVYRKEQEAERNQTNQYCKFDSQLLTMFTSSLYLAALVASFFAATVTRVAGRKWSMFGGGVTFLIGAALNGAAKDVVMLILGRVLLGIGVGFANQAVPVYLSEMAPARLRGMLNIGFQLMITIGILCANLINYGTAKIKGGWGWRVSLALAAVPAAIIAIGALFLPDTPNSLIDRGYTDAAKRMLKRVRGTEDVEEEYNDLVAASEESKLVAHPWRNILQPRYRPQLVMAIAIPMFQQLTGINVIMFYAPVLFKTLGFADDASLMSAVITGLVNVFATFVSIVTVDRLGRRKLFLQGGTQMLACQIVVGSLIGAKFGFSGVAEIPKAYAAIVVLFICAYVAGFAWSWGPLGWLVPSEIFPLEIRSAGQSINVSVNMLCTFIIAQAFLTMLCHFKFGLFYFFGGWVVIMTIFIALFLPETKNVPIEEMVLVWKSHWFWKKFIADEDAHVGNGAAARKGADA

SEQ ID NO: 100480 - protein, 82 aa, Setaria italica
  Transcript Sequence Number=SeqID_34506
FIQEQRRRKKEERKRVLSHGALRRPPPISGGRRRRRCGAVLQLRVRPCIGLLACNCSIRSARHLQQQEARLLQGGQVSVHQV

SEQ ID NO: 100481 - protein, 128 aa, Setaria italica
  Transcript Sequence Number=SeqID_34507
  Homolog annotation: Hit_ID=A8IXP9; Match level="QueryCoverage=53%, HitCoverage=46%, E-value=2e-13, Identity=55%"; Hit description =Stress enhanced protein 1
  Subcellular localization annotation: CTP_CleavageSite=54; ConfidenceScore=5.73e-01
MALFAVLRPSPVAAAAAAAAPSFSCVSGRASAVRVTSSSKRRVSSRAARSLSIRCEQSANQGGGPDVWLGRAAMVGFASAIAVEVATGKGVLQNFGVATPAPTLALVVSGLVVGLAVFFILQSGGSRD

SEQ ID NO: 100482 - protein, 79 aa, Setaria italica
  Transcript Sequence Number=SeqID_34508
  Homolog annotation: Hit_ID=B9S705; Match level="QueryCoverage=97%, HitCoverage=16%, E-value=2e-11, Identity=41%"; Hit description=Amino acid transporter, putative
  Subcellular localization annotation: CTP_CleavageSite=62; ConfidenceScore=5.10e-01
LSFNAVLGLLGAIAFWPLTVYFPVTMYMAQAKVAPGSRKWVALQALNAGALVVSLLAAVGSVADMVQRLGHVTIFQTQL

SEQ ID NO: 100483 - protein, 246 aa, Setaria italica
  misc_feature (93)..(93): Xaa can be any naturally occurring amino acid
  misc_feature (223)..(223): Xaa can be any naturally occurring amino acid
  Transcript Sequence Number=SeqID_34509
  Gene Ontology: Mol. function=transporter activity; Cellular component= integral to membrane; Biological process=transport
  Homolog annotation: Hit_ID=B9R8F8; Match level="QueryCoverage=77%, HitCoverage=43%, E-value=4e-60, Identity=56%"; Hit description =Tetracycline transporter, putative
MKDFAGLDHLFVVSFLFYFSYMVIPAITDVTMEAVCPGRDECSVAIYLSGFQNAVTGVGALVVTPIVGNLSDRYGRKALMTLPVTMAIVPLFXLACNRSEVYFYVYYVAKIVSGIFCEGTMHCLCFAYVADHVGPSRRAAAFGLLSGVSAAGFLSGTLTARFLTTSSTFQVAAAVATAAALYLRVFLPDSGGTSCVDEACDPLLQPSSCTSSTSSSASSSDEXLSPRLPPPQKGGLPSVSDMVALL

SEQ ID NO: 100484 - protein, 150 aa, Setaria italica
  Transcript Sequence Number=SeqID_34510
  Gene Ontology: Mol. function=electron carrier activity
  Homolog annotation: Hit_ID=B9RUK8; Match level="QueryCoverage=95%, HitCoverage=29%, E-value=2e-48, Identity=61%"; Hit description =Oxidoreductase, putative
  Pfam annotation: Domain name=HI0933_like; Domain location=1-147; Score=-231.0; E_value=0.00027; Accession=PF03486.6; Description =HI0933-like protein
MLVTHWGLSGPIVLRLSAWGARELHQCNYQGKLMVDFVPDIHIEDMRRILFHYKDQHAKHKVNNTFPMEFGLVKRFWRFLLEQENLDGDMHWASMPNNHLNAIALRLKQWIFEVVGKGQFKDEFVTAGGVPISEISLGTMESKNSQMISL

SEQ ID NO: 100485 - protein, 187 aa, Setaria italica
  Transcript Sequence Number=SeqID_34511
  Gene Ontology: Mol. function=electron carrier activity
  Homolog annotation: Hit_ID=Q2QLK5; Match level="QueryCoverage=93%, HitCoverage=48%, E-value=2e-86, Identity=86%"; Hit description =HI0933-like protein, expressed
  Pfam annotation: Domain name=HI0933_like; Domain location=1-184; Score=-117.7; E_value=1.1e-10; Accession=PF03486.6; Description =HI0933-like protein
HGVELKTEDDGRVFPVTDNSASVVDCLLNEARRLGVSLQAGKAVPSVSVTQHGKFVLKVEKRTADLVDYLNANYVLVATGSSQQGYSIAAQLGHSIISPVPSLFTFKVADKRLADLAGVTFPVVKAKLKLDGVQKSAPELTQTGPMLVTHWGLSGPIVLRLSAWGARELHQCNYQGMNYDAMKDAVD

SEQ ID NO: 100486 - protein, 167 aa, Setaria italica
  misc_feature (149)..(149): Xaa can be any naturally occurring amino acid
  Transcript Sequence Number=SeqID_34512
  Gene Ontology: Mol. function=RNA methyltransferase activity; Biological process=RNA processing
  Homolog annotation: Hit_ID=Q8L7S3; Match level="QueryCoverage=100%, HitCoverage=19%, E-value=2e-20, Identity=34%"; Hit description=Zinc finger CCCH domain-containing protein 24
  Pfam annotation: Domain name=RRM_1; Domain location=40-104; Score =4.6; E_value=0.074; Accession=PF00076.14; Description=RNA recognition motif. (a.k.a. RRM, RBD, o
PDGTWDPTSDRAKKLRKVAAEAQEETEEEVTVDEQSLDKCLVGLPRGWTADRLKGFLQDQGISYATAKKKKGMTVGFVTFESVEQLTNAVQVLKENPSGGKEIKIADANRRSHQKVHAEGPALDNGTATENGSNAAATAGEASAAEAVXQNKKSARDAVTPLAHMSY

SEQ ID NO: 100487 - protein, 88 aa, Setaria italica
  misc_feature (4)..(4): Xaa can be any naturally occurring amino acid
  Transcript Sequence Number=SeqID_34513
TGCXGSVIGENSSTRLALGSQNLSACMIFCSYSIFCQDIIILESWVSFCGILYLILVVQFLTSLQVCIIKLVQMFELEESSRSSKQDV

SEQ ID NO: 100488 - protein, 49 aa, Setaria italica
  Transcript Sequence Number=SeqID_34514
MGEAVTAAELLYGMPLLRSVTGGDGGGGGRGADPGGCGVLLAELKQLWG

SEQ ID NO: 100489 - protein, 133 aa, Setaria italica
  misc_feature (7)..(7): Xaa can be any naturally occurring amino acid
  misc_feature (21)..(21): Xaa can be any naturally occurring amino acid
  Transcript Sequence Number=SeqID_34515
  Gene Ontology: Mol. function=protein binding
  Homolog annotation: Hit_ID=Q8L4M1; Match level="QueryCoverage=100%, HitCoverage=37%, E-value=3e-17, Identity=36%"; Hit description =Putative WD-40 repeat protein
  Pfam annotation: Domain name=WD40; Domain location=65-105; Score =29.4; E_value=1.4e-05; Accession=PF00400.24; Description=WD domain, G-beta repeat
YRRGILXRARDLSSRTLFRAXFDHSDDPEPDVLLAAASSDGSLASFSLSSCISASSQAEAAVALVDPVCIVQAHSGPAYDVRFYPDPQQPLLFSCGDDGRIRGWRWHEMQSCLVPLSLQGDHLEPALDLVNPQ

SEQ ID NO: 100490 - protein, 64 aa, Setaria italica
  Transcript Sequence Number=SeqID_34516
NFQWKIANHGVWSLPDPSLCHGRRRPYRVCCLVWLKFHRFPLHSTTPAGACFMWSWSCLGGMFG

SEQ ID NO: 100491 - protein, 77 aa, Setaria italica
  Transcript Sequence Number=SeqID_34517
ATIFCAAAALRGLTPDMASSSIDMTSFPGTVDVGVVWFAAAGEAHQLILLPLLYPLVSVSLHTRLLSSLLLVRSRSE

SEQ ID NO: 100492 - protein, 117 aa, Setaria italica
  Transcript Sequence Number=SeqID_34518
  Gene Ontology: Mol. function=calmodulin binding; Cellular component =integral to membrane; Biological process=response to biotic stimulus
  Homolog annotation: Hit_ID=O22752; Match level="QueryCoverage=80%, HitCoverage=17%, E-value=8e-34, Identity=72%"; Hit description=MLO -like protein 7
  Pfam annotation: Domain name=Mlo; Domain location=1-117; Score= -256.6; E_value=7e-07; Accession=PF03094.7; Description=Mlo family
AKELVMLYVVSFFRQFFRSVRRTDYFTLRHGFIAAHLSPGTRFNFRKYIKRSLEDDFKTVVGISPPLWASALAVMLFNVHGWHNLFWFSTIPLVVILAVGTKLQAIIAMMAVEITER

SEQ ID NO: 100493 - protein, 176 aa, Setaria italica
  misc_feature (59)..(59): Xaa can be any naturally occurring amino acid
  Transcript Sequence Number=SeqID_34519
  Gene Ontology: Mol. function=calmodulin binding; Cellular component =integral to membrane; Biological process=response to biotic stimulus
  Homolog annotation: Hit_ID=Q94KB4; Match level="QueryCoverage=80%, HitCoverage=30%, E-value=5e-55, Identity=73%"; Hit description=MLO -like protein 9
  Pfam annotation: Domain name=Mlo; Domain location=1-176; Score=-69.8; E_value=3.9e-15; Accession=PF03094.7; Description=Mlo family
LFHGWHNLFWFSTIPLVVILAVGTKLQAIIAMMAVEITERHTVIQGMPVVKLSDDHFWXKPRLVLHLIHFASFQNAFEITYFFWIWYEFGLRSCFHDSFELIIARVCLGAVVQFMCSYITLPLYALVSQMGSQMKRTIFDEQTAKALKKWHKAVVKKKHNKESSDDPSQTTPMGLR

SEQ ID NO: 100494 - protein, 61 aa, Setaria italica
  Transcript Sequence Number=SeqID_34520
MASRAALLLCVSVVLAAAAAAEARDFVVGGANDGWKAQVQPDALTKWASVLRFQIGDKLVL

SEQ ID NO: 100495 - protein, 182 aa, Setaria italica
  misc_feature (31)..(31): Xaa can be any naturally occurring amino acid
  Transcript Sequence Number=SeqID_34521
RIGGKDGSEQMESEGCQNDGSQVISSVLVDXLSECLSCGTTCSLEIELCRLVIVLLAYIASSGKLGYEVLLGPVSARGANFLELIMQVLASQMQFETQELLKERCLLMREALILLNRLASHANFSKPTLEVLTRSKLCATLTIDVANRLPHTQMANDLAELAQKFRSRVYAFLEEKPLTIEY

SEQ ID NO: 100496 - protein, 118 aa, Setaria italica
  Transcript Sequence Number=SeqID_34522
  Homolog annotation: Hit_ID=Q8LIH0; Match level="QueryCoverage=100%, HitCoverage=13%, E-value=2e-30, Identity=58%"; Hit description =Centromere protein-like
SKHLEVQVSKKDGTISQIEQDYQESDKELTALRCMLKTVNDERDVSWQESEQLRRTVNGLQNEVASLKQKITSLNEDILLKESEILLREGEISILQDSIDKPFDIICSPQSMKQFGME

SEQ ID NO: 100497 - protein, 197 aa, Setaria italica
  Transcript Sequence Number=SeqID_34523
NYVQLVEIQAELTEPEEEEDEEENGWNRATWRRSNHQAELQSAEAGPPGLPLCTELFVWGCAAHATRRACRQGRANQAAIPMPGSNHGDFTKDSPGGRFPRRNGHGPWTLDFTVQSQSICFPSSRHCHGAVRPRRHAPTVAAAVLVRRQTFQRGRTRSGVWDGADGFSPVTSRTTGPRPSSRRRRCGLRPRSRASRA

SEQ ID NO: 100498 - protein, 112 aa, Setaria italica
  misc_feature (99)..(99): Xaa can be any naturally occurring amino acid
  Transcript Sequence Number=SeqID_34524
  Gene Ontology: Mol. function=microtubule binding; Cellular component =nuclear outer membrane; Biological process=mRNA export from nucleus
  Homolog annotation: Hit_ID=B6UGZ9; Match level="QueryCoverage=100%, HitCoverage=32%, E-value=6e-60, Identity=96%"; Hit description=Rae1 -like protein
  Pfam annotation: Domain name=WD40; Domain location=1-31; Score=24.3; E_value=0.0005; Accession=PF00400.24; Description=WD domain, G-beta repeat
  Pfam annotation: Domain name=WD40; Domain location=35-70; Score=1.7; E_value=25; Accession=PF00400.24; Description=WD domain, G-beta repeat
  Pfam module annotation: Pfam domain module=WD40::WD40; Domain location=1-31::35-70
GHEAPVKELAWVPQMNLLVSGSWDKTLRYWDIRQPQPVHVQQLPERCYALSLCYPLMVVGTADRNVIVFNLQNPQAEFKRIVSPLKLQTRCLAAFPDQXGFLVGSIEGRVGV

SEQ ID NO: 100499 - protein, 53 aa, Setaria italica
  Transcript Sequence Number=SeqID_34525
TAQITLVNPQQSAVTQAVDEMPALPPAEVYYPSTRSSSICMMLLLTLTHVTGT

SEQ ID NO: 100500 - protein, 55 aa, Setaria italica
  Transcript Sequence Number=SeqID_34526
LVRGSVVSRPVKVGPWMCRRHPDALAALMAGRRLKPAVRRKEGYARPLRTTLPPS

SEQ ID NO: 100501 - protein, 1153 aa, Setaria italica
  Transcript Sequence Number=SeqID_34527
  Gene Ontology: Mol. function=starch synthase activity; Cellular component=chloroplast; Biological process=glucan biosynthetic process
  Homolog annotation: Hit_ID=B2Z9Y2; Match level="QueryCoverage=100%, HitCoverage=100%, E-value=0.0, Identity=77%"; Hit description=Starch synthase IIIb
  Pfam annotation: Domain name=Glyco_transf_5; Domain location=706-900; Score=249.0; E_value=1.1e-71; Accession=PF08323.3; Description=Starch synthase catalytic domain
  Pfam annotation: Domain name=Glycos_transf_1; Domain location=943 -1128; Score=-4.1; E_value=0.0012; Accession=PF00534.12; Description =Glycosyl transferases group 1
  Pfam annotation: Domain name=SSIII; Domain location=206-354; Score =243.7; E_value=4.7e-70; Accession=PF07036.3; Description=Starch synthase III
  Pfam annotation: Domain name=SSIII; Domain location=380-535; Score =281.0; E_value=2.6e-81; Accession=PF07036.3; Description=Starch synthase III
  Pfam annotation: Domain name=SSIII; Domain location=548-695; Score =294.0; E_value=3.2e-85; Accession=PF07036.3; Description=Starch synthase III
  Pfam module annotation: Pfam domain module=Glyco_transf_5::Glycos _transf_1::SSIII::SSIII::SSIII; Domain location=706-900::943 -1128::206-354::380-535::548-695
  Subcellular localization annotation: CTP_CleavageSite=79; ConfidenceScore=5.62e-01
MEMALRAQSPLCSRGRPLLVVRPAAVLAQSTVGRSRFTGGRLVRCMVSSSDYSKRNPRRTSTPKPKGTASRGGYASRPTAESSTKKIEESSTDEGDLGKSNGTLHIEATEQAGTAAKDEVQATEEADQNQSSASSSTTLDDESIDRKLDEYRGKISALVSSKSEPSSLASVRGQDKPVVGVHEQEGSTTEEHDSSIVDEPPKGRPFAEAVVGYPVKDAEEDQEQYEPEMQAPVEDDVDPEVLKRRLQELADENYSVGNKCFVFPEVVKADSMIYLYLNRSMSTLASEPDVLIKGAFNGWRWNSFTEKLHKSELRGDWWCCELYIPKQAYRLDFVFFNGDTVYENNNHNDFFLEIESDIDEHSFEDFLVEEKRKELERLAAEEAERKRQAEEERRREEERAAMEADRAQAKSEVEMKKEKLHQMLSLASRYSDNLWYIEPNTYRGGDRVRLYYNRSSRPLMHNNEIWMHGGYNNWIDGLSIAERLVKSHEKDGDWWYAEVTLPEKALVLDWVFADGPPGNARNYDNNERQDFHAIVPNNIPEDMFWVEEEHRIFRRLQQERREKEDANRLKAEISAKMKAEMKEKTMRAFLLSQKHIVYTEPLEVRAGTTVDVLYNPSNTVLNGKPEVWFRGSFNRWTHPSGPLPPQKMVKAENGSHLQATVRVPLDAYMLDFVFSESEDGGIYDNRNGMDYHIPVLDSVAKEPPMHIVHIAVEMAPIAKVGGLGDVVTSLSRAVQDLGHKVEVILPKYDCLNLSNVKDLHYQQSFAWGGTEIKVWFGKVEDLPVYFLEPQNGMFWVGCVYGKNDESRFGFFCHSALEFLLERGSSPDIIHCHDWSSAPVAWLYKEQYALNGLGNGRVVFTIHNLEFGAHHIGKAMAHCDKATTVSDTYSKEVAGHGAIAPHYFKFHGIRNGIDPDIWDPYTDSFIPVHYTSENVAEGKSAAKKALQQKLGLQQTDTPIVGIISRLTVQKGIHLIKHAIYRTLERNGQVVLLGSAPDPRIQGDFTNLASQLHGEYHGRVKLCLTYDEPLSHLIYAGADFILVPSIFEPCGLTQLIAMRYGSIPIVRKTGGLYDTVFDVDNDKDRAQAQGLEPNGFSFEGADSSGVDYALDRAITTFYDARDWFNSLCKRVMEQDWSWNRPALDYMELYHSARKN

SEQ ID NO: 100502 - protein, 84 aa, Setaria italica
  Transcript Sequence Number=SeqID_34528
QSAHPQTTQEPKSRSHHSLTHHFTRVQRRDRLTECVAESRAERAEQRKESHGRGEGEGGGGGGPGDKGKEAEEKKDGGGRRGGE

SEQ ID NO: 100503 - protein, 161 aa, Setaria italica
  Transcript Sequence Number=SeqID_34529
  Gene Ontology: Mol. function=hydrolase activity
  Homolog annotation: Hit_ID=Q9FIZ7; Match level="QueryCoverage=89%, HitCoverage=11%, E-value=4e-47, Identity=62%"; Hit description=5 -oxoprolinase
ADSAAEASRRESLLVKQVKEKLREQGFVDESIRTNSYLNLRYDGTDTAIMVKQPEQGSGNDYATEFEKLFQQEYGFKLLNRKILICDVRVQGIGGTNILKPHELTHISTKPVQESSCQIYFSYGWQETPLYKLENLGYGHVLEGPAVIMNGNSTVIIEKAL

SEQ ID NO: 100504 - protein, 79 aa, Setaria italica
  Transcript Sequence Number=SeqID_34530
  Gene Ontology: Mol. function=dihydrodipicolinate reductase activity; Cellular component=chloroplast; Biological process=lysine biosynthetic process via diaminopimelate
  Homolog annotation: Hit_ID=Q10P67; Match level="QueryCoverage=100%, HitCoverage=24%, E-value=4e-37, Identity=89%"; Hit description =Probable dihydrodipicolinate reductase 2, chloroplastic
QLEMVGVPEEHIEGHAFHLYHLTSPDDSVSYEFQHNVCGRSIYAEGTIDAAIFLHRKVQSKDSKRIYDMYDVLREGYMR

SEQ ID NO: 100505 - protein, 118 aa, Setaria italica
  misc_feature (14)..(14): Xaa can be any naturally occurring amino acid
  misc_feature (104)..(104): Xaa can be any naturally occurring amino acid
  Transcript Sequence Number=SeqID_34531
  Gene Ontology: Mol. function=dihydrodipicolinate reductase activity; Cellular component=chloroplast; Biological process=lysine biosynthetic process via diaminopimelate
  Homolog annotation: Hit_ID=B6TNS3; Match level="QueryCoverage=99%, HitCoverage=35%, E-value=2e-55, Identity=88%"; Hit description =Dihydrodipicolinate reductase
LYKSVQDPKTMQLXISPQMGKQVVAFVAIMKFMAEQFPGSFSGYHLEVLESHQAGKLDTSGTAKDVIACFEEMGISYDMNRMVKIRDPEQQLEMVGVPEEHIEXHAFHLYHLTSPDDR

SEQ ID NO: 100506 - protein, 145 aa, Setaria italica
  Transcript Sequence Number=SeqID_34532
LRLNPAEISEVIAEVCSEATSNASQSIAQTRLSTQSRQPSADVAFSVLIKLVIDMYMMDSGTAAPLTLYMLEGMLSSQKTSARTKALDLILNLGVHAHLLEPMVVEDAPLIDKSEAVNHSYLSNEYGSSIDEPRAAEPEEEPKIS

SEQ ID NO: 100507 - protein, 73 aa, Setaria italica
  Transcript Sequence Number=SeqID_34533
MEEDVGRPEVLMINRYLRLWTATGNIASALGFLALLWSTVVLLGGFIDDLLLKEFWVVTALSFLMACRMAEFT

SEQ ID NO: 100508 - protein, 66 aa, Setaria italica
  misc_feature (3)..(3): Xaa can be any naturally occurring amino acid
  Transcript Sequence Number=SeqID_34534
  Gene Ontology: Mol. function=protein serine/threonine kinase activity; Biological process=protein amino acid phosphorylation
RLXKLDLSYNDLSGRLPENMSLPLIELFNISYNNFIGSHPTLRGSEQLAVFDAGYNSFAGQIDPGI

SEQ ID NO: 100509 - protein, 38 aa, Setaria italica
  Transcript Sequence Number=SeqID_34535
MAAVVDGVRHRTVEANGVRLHVAEAGPEGGAAPAVLLL

SEQ ID NO: 100510 - protein, 475 aa, Setaria italica
  Transcript Sequence Number=SeqID_34536
  Gene Ontology: Mol. function=catalytic activity; Cellular component =chloroplast; Biological process=cellular metabolic process
  Homolog annotation: Hit_ID=C0LIR3; Match level="QueryCoverage=99%, HitCoverage=99%, E-value=0.0, Identity=77%"; Hit description=UDP -sulfoquinovose synthase
  Pfam annotation: Domain name=Epimerase; Domain location=85-375; Score= 141.5; E_value=2.6e-39; Accession=PF01370.13; Description=NAD dependent epimerasedehydratase family
  Subcellular localization annotation: CTP_CleavageSite=58; ConfidenceScore=5.84e-01
MKMAHLITNCTFSASPAVKTLSGSPSYCCNVGRLQNSKSSNLSLKSSSKRQKKSYVTCASAAVQGHTQTPLAGSQEASSSKPKKVMVIGGDGYCGWATALHLSNKGYEVAIVDNLVRRLFDHQLGLDSLTPITSIQNRVRRWKSLTGKTIQLFIGDICDFEFLSEAFKSFEPDAAVHFGEQRSAPYSMIDRSRAVYTQHNNVIGTLNVLFAIKEYSEECHLVKLGTMGEYGTPNIDIEEGFITITHNGRTDTLPYPKQASSFYHLSKVHDSHNIAFTCKAWGIRATDLNQGVVYGVRTDETAMHEELSNRFDYDGVFGTALNRFCVQAAVGHPLTVYGKGGQTRGYLDIRDTVQCVELAIANPAKPGEFRVFNQFTEQFSVNELAKLVTAAGAKLGLDVQTKSVPNPRVEAEEHYYNAKHTKLIELGLEPHLLSDSLLDSLLNFAVQYKDRVDIAQIMPSVSWKKMGAKPRTVSV

SEQ ID NO: 100511 - protein, 74 aa, Setaria italica
  misc_feature (56)..(56): Xaa can be any naturally occurring amino acid
  Transcript Sequence Number=SeqID_34537
  Gene Ontology: Mol. function=binding
VLRKLANAHMPTYDVQASSATLMEALLTQCSFHKKFLGITSSLLGLSKHLFSVQKXLGLCYLPEISVVLSSLSY

SEQ ID NO: 100512 - protein, 100 aa, Setaria italica
  Transcript Sequence Number=SeqID_34538
SAAGRTRRWRIGGGGCGFVVEARRIREAGEVCGVAPRGGGRVGRAAAAPWIPVWAPREARDRVYGRTPSAIRSILLFFSLFLFSFFLSFFFFFCLRNAIR

SEQ ID NO: 100513 - protein, 91 aa, Setaria italica
  misc_feature (15)..(15): Xaa can be any naturally occurring amino acid
  Transcript Sequence Number=SeqID_34539
AARSRGGVGSPRVSXPGAAHRNWWAAAPSGPSIERIALAFLLASLALVLSCALYLYFFRHPGRDRVVAEFAGESLESCDVFDGIWVPDERY

SEQ ID NO: 100514 - protein, 50 aa, Setaria italica
  Transcript Sequence Number=SeqID_34540
RSFGMFRRWEACRYFDAGEGSGEETRPWFRVQKAGKNEAAVTIHGSGRTY

SEQ ID NO: 100515 - protein, 60 aa, Setaria italica
  Transcript Sequence Number=SeqID_34541
  Subcellular localization annotation: CTP_CleavageSite=44; ConfidenceScore=5.10e-01
MASRASSVKITSVLAIRPNCKKWPMRPSALSCLKVSVGEILVVVGEGLAELPPRRHDVEE

SEQ ID NO: 100516 - protein, 109 aa, Setaria italica
  Transcript Sequence Number=SeqID_34542
KSKGKKSAKSDDENKANDGDPSPNETEASNGKTDINDTPMDESQASDEDARDSGKNGGGTDLNLNLGLKDPDGDNEADTAEQQEAAKNPQTENNRFKRKSVTPDLEMRM

SEQ ID NO: 100517 - protein, 94 aa, Setaria italica
  Transcript Sequence Number=SeqID_34543
  Gene Ontology: Mol. function=binding
  Homolog annotation: Hit_ID=B6TFA8; Match level="QueryCoverage=100%, HitCoverage=27%, E-value=8e-45, Identity=92%"; Hit description =Protein Mo25
MSFFFRGGSRQRPTPQEIVRSIKDSLVALDTKTGAKALEDAEKNILTLRHALSGDGEVEPNQEQVLQIALEICKEGVLSLFVQNLPSLGWEGRK

SEQ ID NO: 100518 - protein, 165 aa, Setaria italica
  misc_feature (85)..(85): Xaa can be any naturally occurring amino acid
  Transcript Sequence Number=SeqID_34544
  Subcellular localization annotation: CTP_CleavageSite=78; ConfidenceScore=5.09e-01
MEGVGARLGRTSARYGPATTFTGPVRKWHKEWVPVAAAAANANTSASANGSAASSTGTGSGSGSRGNNLLLFKWTPVNGANGGEXGSDGEQQAAAADTATRRRRYVPVSVVEEQRQESAKSDDENKANDGDPSPNETEASNGKTDINDTPMDESQVLNYNSDLLT

SEQ ID NO: 100519 - protein, 101 aa, Setaria italica
  Transcript Sequence Number=SeqID_34545
  Subcellular localization annotation: CTP_CleavageSite=75; ConfidenceScore=5.86e-01
SLSLSDPPPALLRARRRSPPHLYALSPSSRSTRATTPHPNAAACPVSSCRSSFSISKDVSSPSSVHTLDCRPSVVAALLPRLYGLLVLRHSYGITSRGVRH

SEQ ID NO: 100520 - protein, 99 aa, Setaria italica
  Transcript Sequence Number=SeqID_34546
  Gene Ontology: Mol. function=protein tyrosine kinase activity; Biological process=protein amino acid phosphorylation
  Homolog annotation: Hit_ID=Q84SY9; Match level="QueryCoverage=100%, HitCoverage=22%, E-value=3e-42, Identity=90%"; Hit description =Protein kinase family protein, putative, expressed
VVLELVTGLRPVDVGRERRDVTLADWVVAKIQVGELREVVDPPVLGEGPGVMATVEAVAELAFRCVAPDKDDRPDAREVLAELRRIQTMLPDLPGGKGS

SEQ ID NO: 100521 - protein, 84 aa, Setaria italica
  Transcript Sequence Number=SeqID_34547
  Gene Ontology: Mol. function=calcium ion binding
  Homolog annotation: Hit_ID=B6TEH6; Match level="QueryCoverage=100%, HitCoverage=86%, E-value=9e-34, Identity=88%"; Hit description=EF hand family protein
  Pfam annotation: Domain name=efhand; Domain location=18-46; Score =33.3; E_value=9.7e-07; Accession=PF00036.24; Description=EF hand
MAFMRYRALPQGEPTVEEFRAWLAQFDADSDGRISREELQHALRSLNVWFAWWKARGGVRAADANHDGGVAGDDEVARLFAFAQ

SEQ ID NO: 100522 - protein, 87 aa, Setaria italica
  Transcript Sequence Number=SeqID_34548
EARHTPTLVSHALRGVQEGLTGLTSKPGGKPGQSDGVKSKDGWHHHECCVEVKRSREGTRSVRCTDKKLDGFTHMKYLCCMFYVRVF

SEQ ID NO: 100523 - protein, 141 aa, Setaria italica
  misc_feature (132)..(132): Xaa can be any naturally occurring amino acid
  Transcript Sequence Number=SeqID_34549
  Gene Ontology: Mol. function=protein serine/threonine kinase activity; Biological process=protein amino acid phosphorylation
  Homolog annotation: Hit_ID=Q84SG9; Match level="QueryCoverage=98%, HitCoverage=20%, E-value=5e-16, Identity=38%"; Hit description =Serine/threonine kinase receptor-like protein
  Pfam annotation: Domain name=DUF26; Domain location=98-141; Score =24.9; E_value=0.00029; Accession=PF01657.9; Description=Domain of unknown function DUF26
GADRDATFYADLCTARYSGADFLSRGGAGEVDNSPVINGMDFNASTYPGWDARNATSRSFFLSLVGTLFGEMAMYGAYNSSRRLASAVMFINAQLPTVYGFAQCTPDLAPAQCWHCFQGVADLNRQWYDGRXGGRISGVRC

SEQ ID NO: 100524 - protein, 56 aa, Setaria italica
  Transcript Sequence Number=SeqID_34550
LAEVSEPKRVSYATMHGAYIHVRSRSSCRNGLCMWSNCNLKFVLKVFVMFLQGRGI

SEQ ID NO: 100525 - protein, 189 aa, Setaria italica
  Transcript Sequence Number=SeqID_34551
  Gene Ontology: Mol. function=DNA binding; Cellular component=nucleus; Biological process=regulation of transcription
  Homolog annotation: Hit_ID=B6SRZ1; Match level="QueryCoverage=93%, HitCoverage=79%, E-value=3e-53, Identity=63%"; Hit description=NAC domain-containing protein 68
  Pfam annotation: Domain name=NAM; Domain location=25-166; Score =126.2; E_value=1e-34; Accession=PF02365.7; Description=No apical meristem (NAM) protein
LLVLGMESAPVLVRHAGGVAALRQLPPGFRFRPTDEELVVQYLRRKAFGVPLPAAVIPVVPDLYSLDPWDIPADASEGEKYFFAVRTAGAGSGCSKSGGARAATASGRWKPAGKEKPVVLPRPCGGGSLLVGVKRTLTFVTRRKKKASAPSASLGNGWVMHEYRLAAPLHKNGCRLGQAFASSLFITFC

SEQ ID NO: 100526 - protein, 89 aa, Setaria italica
  Transcript Sequence Number=SeqID_34552
  Subcellular localization annotation: CTP_CleavageSite=29; ConfidenceScore=5.54e-01
PESIPVNSILLQPNSPRYTAQRSGKKNANGAAESTRSTVESLNTTSIKNSNRLCSKTVNPESATLAPVPSMKKASKHARHMQRARLCYR

SEQ ID NO: 100527 - protein, 201 aa, Setaria italica
  misc_feature (10)..(10): Xaa can be any naturally occurring amino acid
  misc_feature (173)..(173): Xaa can be any naturally occurring amino acid
  Transcript Sequence Number=SeqID_34553
  Gene Ontology: Mol. function=binding
  Homolog annotation: Hit_ID=Q2R9P0; Match level="QueryCoverage=100%, HitCoverage=9%, E-value=3e-67, Identity=64%"; Hit description =Armadillo/beta-catenin-like repeat family protein, expressed
  Pfam annotation: Domain name=Arm; Domain location=11-52; Score=10.4; E_value=0.58; Accession=PF00514.15; Description=Armadillobeta -catenin-like repeat
  Pfam annotation: Domain name=Arm; Domain location=144-185; Score=1.5; E_value=7.9; Accession=PF00514.15; Description=Armadillobeta-catenin -like repeat
  Pfam annotation: Domain name=Arm; Domain location=53-93; Score=23.0; E_value=0.0013; Accession=PF00514.15; Description=Armadillobeta -catenin-like repeat
  Pfam annotation: Domain name=Arm; Domain location=99-142; Score=4.8; E_value=3; Accession=PF00514.15; Description=Armadillobeta-catenin -like repeat
  Pfam annotation: Domain name=HEAT; Domain location=59-95; Score=18.0; E_value=0.04; Accession=PF02985.14; Description=HEAT repeat
  Pfam module annotation: Pfam domain module=Arm::Arm::Arm::Arm::HEAT; Domain location=11-52::144-185::53-93::99-142::59-95
TRRLLELAKXKKEARILIGSHSQAMPLLISTLRIGSSAAKVNAAALLSALCKEEDLRVRVLLGGCIPPLISLLKSESAEAKKAAAEAIYEVSSGGLSDDHIGRKIFVTEGVVPTLWDLLNPRSCQDRVVEGFVTGALRNLCGDKDGYWKATLEAGGVEIITGLLSSKNTASQXSNAASLLARFICAFGDSIPKIIDAGAVK

SEQ ID NO: 100528 - protein, 66 aa, Setaria italica
  Transcript Sequence Number=SeqID_34554
FLSVYAVATVDKMQYKNCLPLFGIISFPLTLHFYCILLHSSEVIPNIPILLTSVSIVYVDAFITSS

SEQ ID NO: 100529 - protein, 73 aa, Setaria italica
  Transcript Sequence Number=SeqID_34555
HLRRRRGARPRAEAVASSIGDDERRAYVLLQLNHPIHHHPVNCTIAQRCRSVLFSLACLLCCCMMCMLVLYGR

SEQ ID NO: 100530 - protein, 63 aa, Setaria italica
  misc_feature (12)..(12): Xaa can be any naturally occurring amino acid
  misc_feature (31)..(31): Xaa can be any naturally occurring amino acid
  Transcript Sequence Number=SeqID_34556
  Gene Ontology: Mol. function=RNA binding; Biological process =hemolysis by symbiont of host red blood cells
  Homolog annotation: Hit_ID=B6UCU6; Match level="QueryCoverage=95%, HitCoverage=20%, E-value=2e-24, Identity=91%"; Hit description =Hemolysin A
TGWVRPSCCPPXREFAAVRAQKIQLPKKKRXLDEVCSERFQQYSRTYIQSWILQGKVNVDGRV

SEQ ID NO: 100531 - protein, 129 aa, Setaria italica
  Transcript Sequence Number=SeqID_34557
  Gene Ontology: Mol. function=RNA binding; Biological process =hemolysis by symbiont of host red blood cells
  Homolog annotation: Hit_ID=B6UCU6; Match level="QueryCoverage=56%, HitCoverage=24%, E-value=2e-34, Identity=94%"; Hit description =Hemolysin A
  Pfam annotation: Domain name=S4; Domain location=87-128; Score=26.3; E_value=0.00013; Accession=PF01479.17; Description=S4 domain
  Subcellular localization annotation: CTP_CleavageSite=45; ConfidenceScore=5.74e-01
MWAPHVRTAASLRAQIGFSSSAPATQSPLLASQGKHRAATKKSRVAMMASRLRLHLRLVGIRPSCYPPSRAFAAVRAQKIQLPRKKRRLDEVCLERFQQYSRTYIQSWILQGKVIVDGRVVNKAGTQVI

SEQ ID NO: 100532 - protein, 100 aa, Setaria italica
  Transcript Sequence Number=SeqID_34558
  Gene Ontology: Biological process=cell wall catabolic process
  Homolog annotation: Hit_ID=B6TNR1; Match level="QueryCoverage=95%, HitCoverage=22%, E-value=5e-35, Identity=81%"; Hit description =Erwinia induced protein 1
  Subcellular localization annotation: CTP_CleavageSite=81; ConfidenceScore=5.11e-01
QLWRFVNGTITTSLSAGLQPRCPAPHQFPALTDPPTTVSHDSTYLPPLSAPGPAEAGGVMPEPGSAGSPVQGGPFTLPKVSTSNGPAGSVSEAPSMDTPR

SEQ ID NO: 100533 - protein, 52 aa, Setaria italica
  Transcript Sequence Number=SeqID_34559
YPLCALPIHCCVSQNHHMHACPQTNRLRGSRRDGTATSTTASNHHAWPPPVI

SEQ ID NO: 100534 - protein, 59 aa, Setaria italica
  Transcript Sequence Number=SeqID_34560
GEWGARREATALPRLSLVSSWEVEVVLRSAMSVVGVCLRPVIWPEMALAAKAEAGLRRI

SEQ ID NO: 100535 - protein, 330 aa, Setaria italica
  misc_feature (100)..(100): Xaa can be any naturally occurring amino acid
  Transcript Sequence Number=SeqID_34561
  Gene Ontology: Mol. function=nucleoside-triphosphatase activity; Biological process=cell division
  Homolog annotation: Hit_ID=Q2R8Q8; Match level="QueryCoverage=99%, HitCoverage=54%, E-value=1e-124, Identity=56%"; Hit description =ATPase, AAA family protein, expressed
  Pfam annotation: Domain name=AAA; Domain location=104-288; Score =293.4; E_value=4.9e-85; Accession=PF00004.21; Description=ATPase family associated with various cellular activities (AAA)
  Pfam annotation: Domain name=AAA_5; Domain location=104-236; Score =7.0; E_value=0.00025; Accession=PF07728.6; Description=ATPase family associated with various
  Pfam module annotation: Pfam domain module=AAA::AAA_5; Domain location=104-288::104-236
SLDDAPCTNSNTKSSESYYVNTKCSASYDAIDEKALSVNTEDFKKAKTKVRPSAMREVMLELPKVCWEDVGGQANVKQQLIEAIHWPQECPEAFKRIGTXPPKGLLMMGPPGCSKTLMARAAASEAQLNFLAVKGPELFSKWVGDSEKAVRSLFAKARANAPAIIFFDEIDGLAVTRGHENDGTSVADRVLTQLLVEMDGLDEKVIVIAATNRPDKIDPALTRPGRFDRLLNVQPPNETDRADIFRIHTRSIPCGPDVNLEELARLTEGYTGADIKLVCREAAVAALDESFDIKQVAMRHFEFAISKIKPSDVKFYQKLGEDYRRFVDGS

SEQ ID NO: 100536 - protein, 28 aa, Setaria italica
  Transcript Sequence Number=SeqID_34562
FHMPIGAVIIQRYPKPRSNILYNSLSKY

SEQ ID NO: 100537 - protein, 569 aa, Setaria italica
  Transcript Sequence Number=SeqID_34563
  Gene Ontology: Mol. function=protein dimerization activity; Cellular component=nucleus; Biological process=regulation of transcription, DNA-dependent
  Homolog annotation: Hit_ID=Q0D9R7; Match level="QueryCoverage=85%, HitCoverage=41%, E-value=0.0, Identity=73%"; Hit description=Auxin response factor 19
  Pfam annotation: Domain name=AUX_IAA; Domain location=351-528; Score=- 94.6; E_value=0.012; Accession=PF02309.8; Description=AUXIAA family
  Subcellular localization annotation: CTP_CleavageSite=48; ConfidenceScore=5.04e-01
PTPQQQQQQQQQQQQQQQLKLLHQQQQLLLQQQQLQQQQQNQQQLNKMAAQVPNLAAQQLQLSDQQLQLQLLQKLQQQQQSLLSQPAVTLAQLPLIQEQQKLILDMQQQLSNSQSLSQQQTMPQQSTKVPSQATPPPPPSMQQEPQQKVPQKHVGFTDTSHAAIPPTTSVNAISAAGSSMMANGAAHSVLTEEIPSCSTSPSTANGNHLAQPILGRNQQCGMINNEKLPQSTAPMSIPSSLEAVTGIPRSTKELPKLNSNVKQSVMASKLPNTGPIPQNLVNSAPPTDYLETASSATSVWLSQADGLLHQGFPMSNFNQQQIFKDAPPETDIQGTDPSNNALFGINNDGQLGFPMGADAFLSNGIDASKYQNHISTDIDGNYRIPKDGQQEISSSMVSQSFGASDMAFNSIDSGMNDGGFLNRTSWPPAAPLKRMRTFTKVYKRGAVGRSIDISHYSGYDELKHALARMFSIEGQLEEQQRIGWKLVYKDHEDDILLLGDDPWEEFVNCVRCIRILSPQEVQQMSLDGDLGNNILPNQACSSSDGGNAWRARCDQNSGNPSTGSYDQFE

SEQ ID NO: 100538 - protein, 70 aa, Setaria italica
  Transcript Sequence Number=SeqID_34564
RERAGLHLRSFGRSTAAILYYTNAAGSSLYWKEWKCILGQHSTGHVQPAITHSRPSSAGRVLVGGSLLSS

SEQ ID NO: 100539 - protein, 188 aa, Setaria italica
  Transcript Sequence Number=SeqID_34565
  Gene Ontology: Mol. function=pseudouridine synthase activity; Biological process=pseudouridine synthesis
  Homolog annotation: Hit_ID=A3BN26; Match level="QueryCoverage=99%, HitCoverage=38%, E-value=2e-53, Identity=68%"; Hit description=RNA pseudourine synthase 6, chloroplastic
  Subcellular localization annotation: CTP_CleavageSite=57; ConfidenceScore=5.83e-01
MPKPATSVASLLPKLWHRRFLPPSLVPRALSSSCPLLTTHSAPRRRSRLSPSTHIAPAATVSTAAAVEAPTTTAYPVYDRLLPCPLQDDPPRIEHLVAREDEVAADFISRSLGLPPLYVADLIKFGAVYYALVAPQPPPYAAPEHVRIFREVTDPSVLRRRASIKGKTVREAQKTFRVTDPNQLLEAR

SEQ ID NO: 100540 - protein, 68 aa, Setaria italica
  Transcript Sequence Number=SeqID_34566
GFWMHGILLARECMSQLMWTALTRHLLQNRIAGAALKRQVVSQVSRSVQLLDGECFIFHQYIYFLRSR

SEQ ID NO: 100541 - protein, 72 aa, Setaria italica
  Transcript Sequence Number=SeqID_34567
  Subcellular localization annotation: CTP_CleavageSite=62; ConfidenceScore=5.52e-01
HCLLATTLVQICNKLDFFLQSSKFQQQQHVRARSSSSSSSRRRRRSRLVLWCPLSVVHSHPCSGLFSSSSSP

SEQ ID NO: 100542 - protein, 110 aa, Setaria italica
  Transcript Sequence Number=SeqID_34568
NKLRNTASFPQCLLENSAIFFNALGRFGHQRQAEHDKAPTKPNISTSRLPLYSDTSSTPKVQTRVQNTCKDTLPSISSSQWSSSSSSSHKAIPSSNAATSCQSQRKPSPK

SEQ ID NO: 100543 - protein, 122 aa, Setaria italica
  Transcript Sequence Number=SeqID_34569
KVQEKDQRKKKPGKISNPALLLNPYAIKSCSSFMRRKWLGGENSFIAAAAQEPPSSADLSGVLMEIHALGLINQTTGTSESHREGVTGTAMISPARLSLSLWETDRRRARGKYKKRGAEKNE

SEQ ID NO: 100544 - protein, 58 aa, Setaria italica
  Transcript Sequence Number=SeqID_34570
  Homolog annotation: Hit_ID=B6SKQ7; Match level="QueryCoverage=86%, HitCoverage=56%, E-value=4e-15, Identity=82%"; Hit description =Complex 1 protein containing protein
VVSAEFRDNARNVDRRNFVCIEYLLRRGKRQLEQLKNPDITGLATLEVKKGESCRPPA

SEQ ID NO: 100545 - protein, 183 aa, Setaria italica
  Transcript Sequence Number=SeqID_34571
RRGGPAPCFLRRLYSRFRLSLFARMGAGRPVELGSRPLAFTVVAVVAVFVIVGHGCEVSLNKIKLCFSFSPFLRADPSTRRLDLLGFPLASAVFGVDSASSGSNPAACVVDPVVCTSNLPGSALISSTVNPYAIFRLRAALRQISSNSPHVLRRLSSSEPPTGSGEPFFYPSATASTKSLFRR

SEQ ID NO: 100546 - protein, 103 aa, Setaria italica
  Transcript Sequence Number=SeqID_34572
TSNKLGETCSLTYILHFDFAICLFCNYVIFEGKALGPLMYSFPFLFVSFHSFSGISTHCGFPVELEMTCHFFFTQVLKVVEKTFNHGHLHKNLLLPEYTEKGY

SEQ ID NO: 100547 - protein, 53 aa, Setaria italica
  Transcript Sequence Number=SeqID_34573
LEHILTHTFLASHFIINKTRVSFECLASIAQFTGQFGARNGSRHGNKKHKRHW

SEQ ID NO: 100548 - protein, 173 aa, Setaria italica
  misc_feature (39)..(39): Xaa can be any naturally occurring amino acid
  misc_feature (158)..(158): Xaa can be any naturally occurring amino acid
  Transcript Sequence Number=SeqID_34574
  Gene Ontology: Mol. function=nucleic acid binding; Cellular component= small nucleolar ribonucleoprotein complex; Biological process =ribosome biogenesis
  Homolog annotation: Hit_ID=B6TFJ5; Match level="QueryCoverage=61%, HitCoverage=53%, E-value=1e-52, Identity=97%"; Hit description=H/ACA ribonucleoprotein complex subunit 1-like protein 1
  Pfam annotation: Domain name=Gar1; Domain location=22-124; Score =236.8; E_value=5.3e-68; Accession=PF04410.6; Description=Gar1 protein RNA binding region
GLAASSPRSSALRLREGGGFRDEGPPAEVVEVSTFLHAXCEGDAVTKLTNEKVPYFNAPIYLQNKTQIGKVDEIFGPINESYFSVKMMEGIIATSYNEGDKFYIDPMKLLPLSRFLPQPKGQSQGAPRGGGRGGRGGGRGRGGSFRGGRGPPRGRGGXPRGGGRGGFRGRGRF

SEQ ID NO: 100549 - protein, 50 aa, Setaria italica
  Transcript Sequence Number=SeqID_34575
QVYSQKIYNCIYPKLLILVLMSTPNSVFCQLPGVTAVFYAFMHMSNSSHC

SEQ ID NO: 100550 - protein, 62 aa, Setaria italica
  Transcript Sequence Number=SeqID_34576
WGWQQSPRTTTRFVYLWAQEMALHPSIQSSNHTDSHHQTSCCSWLIDDELITYSSHSVNHNP

SEQ ID NO: 100551 - protein, 148 aa, Setaria italica
  misc_feature (59)..(59): Xaa can be any naturally occurring amino acid
  Transcript Sequence Number=SeqID_34577
  Gene Ontology: Mol. function=protein serine/threonine kinase activity; Biological process=protein amino acid phosphorylation
  Homolog annotation: Hit_ID=Q6ZEZ5; Match level="QueryCoverage=93%, HitCoverage=24%, E-value=1e-44, Identity=70%"; Hit description =Serine/threonine-protein kinase Nek3
NRPNRVEATRRESPRRNMIKTPEKRQATNILTRLKSPDVSVNSPRIDRIAEFPLASSEXHLHHITKLALPSIIDQSITKDKCTFQVLRSDSENYSDSPDIDLLGADNSPRSSSDWRQRRFDTRSYQQRAEALEGLLEFSAQLLQQDPE

SEQ ID NO: 100552 - protein, 249 aa, Setaria italica
  Transcript Sequence Number=SeqID_34578
  Subcellular localization annotation: CTP_CleavageSite=10; ConfidenceScore=5.05e-01
AVSGGAPATEAARRRRRRRPRRRAPGGWSRISTPSPLPPPRFDLYRSLAPHTNLHENLSKIWDSASNLRRRRSYECPDREAKDLPTGLRRGEEKRNPGKESNQRGEAIIRDQKAAVPFPFSENKNPRAFGRKSIEATEQQHLRCSSSDAHYLDRPPGDKRIPRARRRRPPASWTTSICPLPLSLPQSRTPPGRRGSAGTDLIWRSEENRGKSLSREGDFRAREAGLPTGKERWVGGKRFLGRVRGSWPL

SEQ ID NO: 100553 - protein, 60 aa, Setaria italica
  Transcript Sequence Number=SeqID_34579
MQPMHAQYLVSLYLYVTSTEVLELIPLPPRNYASNHVLGTGYNIIYGIAGVRYLLQKKKK

SEQ ID NO: 100554 - protein, 91 aa, Setaria italica
  Transcript Sequence Number=SeqID_34580
VAWIFSFLGNIWIAKWSHKVFMFQLKLWGINMILFFLRDCLIIRFIKFNYCFSQVEFCLQPHNEINRHHEHSLIVLSVNTVNNLMFHFNSL

SEQ ID NO: 100555 - protein, 156 aa, Setaria italica
  misc_feature (56)..(56): Xaa can be any naturally occurring amino acid
  Transcript Sequence Number=SeqID_34581
  Gene Ontology: Mol. function=binding; Cellular component=plasma membrane
  Homolog annotation: Hit_ID=B9RT56; Match level="QueryCoverage=100%, HitCoverage=71%, E-value=2e-57, Identity=36%"; Hit description =Pentatricopeptide repeat-containing protein, putative
  Pfam annotation: Domain name=PPR; Domain location=109-143; Score =41.5; E_value=3.3e-09; Accession=PF01535.12; Description=PPR repeat
  Pfam annotation: Domain name=PPR; Domain location=39-73; Score=26.8; E_value=9.1e-05; Accession=PF01535.12; Description=PPR repeat
  Pfam annotation: Domain name=PPR; Domain location=4-38; Score=32.4; E_ value=1.8e-06; Accession=PF01535.12; Description=PPR repeat
  Pfam annotation: Domain name=PPR; Domain location=74-108; Score=41.0; E_value=4.6e-09; Accession=PF01535.12; Description=PPR repeat
  Pfam module annotation: Pfam domain module=PPR::PPR::PPR::PPR; Domain location=109-143::39-73::4-38::74-108
PAFSAYTVLIGALAEARRPERALELLRQMQEVGYEVGVPLFTTLVRALAREGRLGXALELVDEVKGSCLEPDIVLFNVCIDCFGKAGNVDMAWKFFHELKAQGLKPDDVSYTSMIWVLCKAGRLSEAEELFGQMEAERAVPCAYAYNTMIMGYGSA

SEQ ID NO: 100556 - protein, 304 aa, Setaria italica
  Transcript Sequence Number=SeqID_34582
  Pfam annotation: Domain name=ENT; Domain location=237-303; Score =63.3; E_value=9.1e-16; Accession=PF03735.6; Description=ENT domain
KLKIVGAAKVLTVPPQRLRMRQVLRDDDVWVKLHKDNQIAVPSAMPFHTNGVSVDMGTGKGKGGYEPMRPGFTPLLQKRSFGMLGSTSNTIINGNRFEDTTKRFCAKEEPRYEAEVIVPNVFLNKQDEMSNEYCDVVGAGSNSDVDQQQHIENEVDIEGSDSESASSSDGSSSSSSNSDSRTRSMESGEDCAAARASRPCNDQKVDQLQTREKEHCGSKAESREIERKTLNDQKATVQEHIHRLELEAYQNLMKAFHACGKVLSWQKMELLSDLRVHLHITNDEHLQVLNVILNRKGRFAGSQF

SEQ ID NO: 100557 - protein, 54 aa, Setaria italica
  Transcript Sequence Number=SeqID_34583
IVIPRNCRMYLPLSLNLCSWILALQSVLTDAELDSSALPAADYLLHHNTFACIL

SEQ ID NO: 100558 - protein, 100 aa, Setaria italica
  Transcript Sequence Number=SeqID_34584
  Subcellular localization annotation: CTP_CleavageSite=73; ConfidenceScore=5.35e-01
FFCPPFQRSRMHQGNNRALSKVLGLLLRLVFSSFLYIPLFFTFNSRFLAFLKKLYCSIGFMSLVPSVCILRIVEYYISAECCDLAITITTACSRCTLFHY

SEQ ID NO: 100559 - protein, 190 aa, Setaria italica
  Transcript Sequence Number=SeqID_34585
  Gene Ontology: Mol. function=hydroxyethylthiazole kinase activity; Biological process=thiamin biosynthetic process
  Homolog annotation: Hit_ID=B9RWP8; Match level="QueryCoverage=98%, HitCoverage=65%, E-value=2e-43, Identity=48%"; Hit description =Hydroxyethylthiazole kinase, putative
  Pfam annotation: Domain name=HK; Domain location=1-178; Score=76.3; E_ value=1.1e-19; Accession=PF02110.7; Description=Hydroxyethylthiazole kinase family
RAAASSGRPWVLDPVAAAASGFRMEACLELLALRPAVVRGNASEILAVADCSVAASSNFKGADSSHESVDALEAAKALALSSGSVVAVSGAVDFITNGEQVVGASNGVPMMQKITATGCAVTALIAAFVAIEPSDALVAAACALAIFGLAGEIGMESSKGPASLRMHLIDTLYCLDEETVTSRVKIALRP

SEQ ID NO: 100560 - protein, 107 aa, Setaria italica
  Transcript Sequence Number=SeqID_34586
  Gene Ontology: Mol. function=calcium ion binding; Biological process =embryonic development ending in birth or egg hatching
  Homolog annotation: Hit_ID=B6SKB5; Match level="QueryCoverage=68%, HitCoverage=14%, E-value=8e-34, Identity=94%"; Hit description=ATPase
RFKDNLINVLYLFYCVANTPNYTVQVTDVADAMILNRLFSQLFSKGVILVSTSNRAPDKLYEGGLQRDLFLPFIDTLKERCIAHPIGSAVDYRQLGSVCDQLAEQPV

SEQ ID NO: 100561 - protein, 225 aa, Setaria italica
  misc_feature (166)..(166): Xaa can be any naturally occurring amino acid
  misc_feature (206)..(206): Xaa can be any naturally occurring amino acid
  Transcript Sequence Number=SeqID_34587
  Gene Ontology: Mol. function=calcium ion binding
  Homolog annotation: Hit_ID=B6SKB5; Match level="QueryCoverage=97%, HitCoverage=42%, E-value=2e-98, Identity=81%"; Hit description=ATPase
  Pfam annotation: Domain name=AFG1_ATPase; Domain location=1-205; Score=-167.2; E_value=0.00096; Accession=PF03969.8; Description=AFG1- like ATPase
RLSICRLFPFGSAVDYRQLGSAEQGFYFVGKHYSTLLKQKLQSLIGDEEPSPQTVEIIMGRKLQVPLGANGCAYFPFEDLCDRPLGAADYFGLFKKFHTLALDGVPKFGSSNRTTAYRFVTLVDVMYENKARLLCTAEAGPIELFENIVTVAEALKLRPRSSNSPXSDDPDLCVDNELGFAKDRTISRLTEINSREYLEGFEAKVXQQQQQPLQGVDNGADVVLA

SEQ ID NO: 100562 - protein, 104 aa, Setaria italica
  Transcript Sequence Number=SeqID_34588
NLLQPTDRGTRNRVTARYQPVTKKAPERETSEKNDAPNDQILRSCRVNHKRSLKERSGFELKNSRHHLTRAGTLAQERRLMAGLSPPEDPTASRRWRRSAAGQK

SEQ ID NO: 100563 - protein, 325 aa, Setaria italica
  misc_feature (204)..(204): Xaa can be any naturally occurring amino acid
  Transcript Sequence Number=SeqID_34589
  Gene Ontology: Mol. function=nucleotide binding; Biological process =embryonic development ending in birth or egg hatching
  Homolog annotation: Hit_ID=B6SKB5; Match level="QueryCoverage=89%, HitCoverage=57%, E-value=1e-140, Identity=83%"; Hit description =ATPase
  Pfam annotation: Domain name=AAA; Domain location=159-322; Score= -40.3; E_value=0.087; Accession=PF00004.21; Description=ATPase family associated with various cellular activities (AAA)
  Pfam annotation: Domain name=AAA_5; Domain location=159-287; Score= -23.7; E_value=0.087; Accession=PF07728.6; Description=ATPase family associated with various
  Pfam annotation: Domain name=AFG1_ATPase; Domain location=83-323; Score=63.2; E_value=2e-16; Accession=PF03969.8; Description=AFG1 -like ATPase
  Pfam module annotation: Pfam domain module=AAA::AAA_5::AFG1_ATPase; Domain location=159-322::159-287::83-323
  Subcellular localization annotation: CTP_CleavageSite=66; ConfidenceScore=5.27e-01
MRSVVRSLRQLRRFTQHHAESHSSTTRLIRQQNALIMHSSTSRSLRTLCRSGEITRFASPSVDLMRSMLSTVAADSIKDIGRGGPMVEYERRIASGELVDGDSFQVDTIQQLQRLYEELIENEEDCQLDRYKSSEKSGRSRWLWSRLIAQPSTYAPVKGLYLYGGVGTGKTMLMDLFYEQLPSNWRKKRIHFHDFMLNVHSRLXDPLDVVAAEISDEAIILCLDEFMVTDVADAMILNRLFSQLFSKGVILVSTSNRAPDKLYEGGLQRDLFLPFIDTLKERCIAHPIGSAVDYRQLGSVCDQFLLASSVNLVSSAHYFPSLSLN

SEQ ID NO: 100564 - protein, 401 aa, Setaria italica
  misc_feature (225)..(225): Xaa can be any naturally occurring amino acid
  Transcript Sequence Number=SeqID_34590
  Gene Ontology: Mol. function=nucleotide binding
  Homolog annotation: Hit_ID=B6SKB5; Match level="QueryCoverage=98%, HitCoverage=77%, E-value=0.0, Identity=83%"; Hit description=ATPase
  Pfam annotation: Domain name=AFG1_ATPase; Domain location=81-401; Score=165.7; E_value=1.3e-46; Accession=PF03969.8; Description=AFG1 -like ATPase
  Subcellular localization annotation: CTP_CleavageSite=64; ConfidenceScore=5.31e-01
VYGSFVGQLRRFTQHHAESHSSTTRLIRQQNALIMHSSTSRSLRTLCRSGEITRFASPSVDLMRSMLSTVAADSIKDIGRGGPMVEYERRIASGELVDGDSFQVDTIQQLQRLYEELIENEEDCQLDRYKSSEKSGRSRWLWSRLIAQPSTYAPVKGLYLYGGVGTGKTMLMDLFYEQLPSNWRKKRIHFHDFMLNVHSRLQILFSSMCCICFIVLLTRPTILCXVTDVADAMILNRLFSQLFSKGVILVSTSNRAPDKLYEGGLQRDLFLPFIDTLKERCIAHPIGSAVDYRQLGSAEQGFYFVGKHYSTLLKQKLQSLIGDEEPSPQTVEIIMGRKLQVPLGANGCAYFPFEDLCDRPLGAADYFGLFKKFHTLALDGVPKFGSSNRTTAYRFVTLVDV

SEQ ID NO: 100565 - protein, 414 aa, Setaria italica
  Transcript Sequence Number=SeqID_34591
  Gene Ontology: Mol. function=nucleotide binding
  Homolog annotation: Hit_ID=B6SKB5; Match level="QueryCoverage=95%, HitCoverage=76%, E-value=0.0, Identity=90%"; Hit description=ATPase
  Pfam annotation: Domain name=AAA; Domain location=159-330; Score= -38.5; E_value=0.059; Accession=PF00004.21; Description=ATPase family associated with various cellular activities (AAA)
  Pfam annotation: Domain name=AAA_5; Domain location=159-293; Score= -24.4; E_value=0.1; Accession=PF07728.6; Description=ATPase family associated with various
  Pfam annotation: Domain name=AFG1_ATPase; Domain location=83-413; Score=244.9; E_value=2e-70; Accession=PF03969.8; Description=AFG1 -like ATPase
  Pfam module annotation: Pfam domain module=AAA::AAA_5::AFG1_ATPase; Domain location=159-330::159-293::83-413
  Subcellular localization annotation: CTP_CleavageSite=37; ConfidenceScore=5.32e-01
MRSVVRSLRQLRRFTQHHAESHSSTTRLIRQQNALIMCSSTSRSLSTLHRSGEITRFASPCVDLMRSMFSTVAADSIKDIGRGGPMVEYERRIASGELVDGDSFQVDTIQQLQRLYEELIENEEDCQLDRYKSSEKSGRSRWLWSRLIAQPSTYAPVKGLYLYGGVGTGKTMLMDLFYEQLPSNWRKKRIHFHDFMLNVHSRLQMHKGVSDPLDVVAAEISDEAIILCLDEFMVTDVADAMILNRLFRQLFSKGVILVSTSNRAPDKLYEGGLQRDLFLPFIDTLKERCIAHPIGSAVDYRQLGSAKQGFYFVGKHYSTLLKQKLQSLIGDEEPSPQTVEVIMGRKLQVPLGANGCAYFPFEDLCDRPLGAADYFGLFKKFHTLALDGVPKFGSSNRTAAYRFVTLVDVRSLLC

SEQ ID NO: 100566 - protein, 376 aa, Setaria italica
  misc_feature (215)..(215): Xaa can be any naturally occurring amino acid
  Transcript Sequence Number=SeqID_34592
  Gene Ontology: Mol. function=nucleotide binding
  Homolog annotation: Hit_ID=B6SKB5; Match level="QueryCoverage=99%, HitCoverage=71%, E-value=0.0, Identity=90%"; Hit description=ATPase
  Pfam annotation: Domain name=AAA; Domain location=24-191; Score= -37.6; E_value=0.05; Accession=PF00004.21; Description=ATPase family associated with various cellular activities (AAA)
  Pfam annotation: Domain name=AFG1_ATPase; Domain location=1-356; Score=261.9; E_value=1.5e-75; Accession=PF03969.8; Description=AFG1 -like ATPase
  Pfam module annotation: Pfam domain module=AAA::AFG1_ATPase; Domain location=24-191::1-356
KSGRSRWLWSRLIAQPSTYAPVKGLYLYGGVGTGKTMLMDLFYEQLPSNWRKKRIHFHDFMLNVHSRLQMHKGVSDPLDVVAAEISDEAIILCLDEFMVTDVADAMILNRLFSQLFSKGVILVSTSNRAPDKLYEGGLQRDLFLPFIDTLKERCIAHPIGSAVDYRQLGSAEQGFYFVGKHYSTLLKQKLQSLIGDEEPSPQTVEIIMVRKLHKXVPLGANGCAYFPFEDLCDRPLGAADYFGLFKKFHTLALDGVPKFGSSNRTTAYRFVTLVDVMYENKARLLCTAEAGPIELFENIVTVAEAHKVSPRSSRSQKSDDPDLCVDNELGFAKDRTISRLTEINSREYLEGFEARLLQQQQQPLQGVDNGADVVLA

SEQ ID NO: 100567 - protein, 291 aa, Setaria italica
  Transcript Sequence Number=SeqID_34593
  Gene Ontology: Mol. function=calcium ion binding
  Homolog annotation: Hit_ID=B6SKB5; Match level="QueryCoverage=94%, HitCoverage=52%, E-value=1e-144, Identity=90%"; Hit description =ATPase
  Pfam annotation: Domain name=AFG1_ATPase; Domain location=2-271; Score=13.5; E_value=1.1e-13; Accession=PF03969.8; Description=AFG1 -like ATPase
MCCICVGNTPNYTVQVTDVADAMILNRLFRQLFSKGVILVSTSNRAPDKLYEGGLQRDLFLPFIDTLKERCIAHPIGSAVDYRQLGSAKQGFYFVGKHYSTLLKQKLQSLIGDEEPSPQTVEVIMGRKLQVPLGANGCAYFPFEDLCDRPLGAADYFGLFKKFHTLALDGVPKFGSSNRTAAYRFVTLVDVMYENKARLLCTAEAGPIELFENIVTVAEAHKVSPRSSRSQKSDDPDLCVDNELGFAKDRTISRLTEINSREYLEGFEARLLQQQQQPLQGVDNGADIVLA

SEQ ID NO: 100568 - protein, 119 aa, Setaria italica
  Transcript Sequence Number=SeqID_34594
MHRVLVNIRSDSHNWISLVFLCKFRNLHAHIYFLNESCSHLLIQEVCNKDLMRTQEFHWKQKIAAFRCVYRPTATNFILACVYGDPYHRRTALIWQDVLSFVENYPNLPAFCFNKKKKK

SEQ ID NO: 100569 - protein, 179 aa, Setaria italica
  Transcript Sequence Number=SeqID_34595
  Gene Ontology: Cellular component=ribosome
  Homolog annotation: Hit_ID=B6SM91; Match level="QueryCoverage=89%, HitCoverage=89%, E-value=6e-65, Identity=79%"; Hit description=18S subunit ribosomal protein
  Pfam annotation: Domain name=zf-LSD1; Domain location=46-70; Score =37.6; E_value=5e-08; Accession=PF06943.4; Description=LSD1 zinc finger
  Pfam annotation: Domain name=zf-LSD1; Domain location=7-31; Score =40.7; E_value=5.6e-09; Accession=PF06943.4; Description=LSD1 zinc finger
  Pfam annotation: Domain name=zf-LSD1; Domain location=84-108; Score =53.7; E_value=7.3e-13; Accession=PF06943.4; Description=LSD1 zinc finger
  Pfam module annotation: Pfam domain module=zf-LSD1::zf-LSD1::zf-LSD1; Domain location=46-70::7-31::84-108
MQSQIVCHGCRRLLLYPRGAPSVCCAVCRVVSNVPPPGMEMARLICGGCQTLLMYTCNATTVRCSCCDTVNLVRPVSSIAHVNCGRCQTVLMYPYGAPSVKCAICNFITSVGGHQVPTVRPLPPTLPASSGNSYNIPSTSAPMSQSQNVTVVVENPMTVDDKGKLVSNVVVGVTTGGKK

SEQ ID NO: 100570 - protein, 192 aa, Setaria italica
  Transcript Sequence Number=SeqID_34596
  Gene Ontology: Mol. function=ubiquitin-protein ligase activity
  Homolog annotation: Hit_ID=A2Q2P3; Match level="QueryCoverage=96%, HitCoverage=8%, E-value=3e-22, Identity=32%"; Hit description=Zinc finger, N-recognin; WD40-like
LGSDLSNSQQGPIQLAADLICFMKASIFSPEWSRAIYMDACRKFNTCHLDQFLSILKCQACFPDESSTGNTMSSENKLLHIHTNKKHCRSSKQAALMCSNLFSEDLVEKVFNVDNGKYTYNHYALALVAHAMTYAANSGFSLGRKIFVQYVTYLLEKANDTSSSSLNVSDFCASLPCAFHLEILLATFHLTA

SEQ ID NO: 100571 - protein, 322 aa, Setaria italica
  Transcript Sequence Number=SeqID_34597
  Gene Ontology: Cellular component=cell wall
  Homolog annotation: Hit_ID=B9RSW6; Match level="QueryCoverage=97%, HitCoverage=35%, E-value=1e-118, Identity=64%"; Hit description =Inosine-uridine preferring nucleoside hydrolase, putative
PGAVRVAGNLFTATAANPFAEFNFFGDPFAAYQVLHSGVPVTLVPLDATNTVPVTEEFYSEFRRRQSTYEAQYGFQSLDQVLARRRRRSDSHNNTGYYMWDSFAAGVALSSMRHGETNGGGNEFAELEYMNITVVTSNEPYGARDGSNPFFDGRTKPKFGLQEGGVHSGHVQTGIRDAFCLVPGSNRGRCEDGYTTEVSGPEAVQVYVATTAKPNTNKSSLLDKEFCKSFLEVLNLPKNTGRFNISTQFPYYREVLYKPDFRNVSRGKPVIFDMDMSPGDFVSLIYLLKEPREVLDLKGVLINGNGWANSASIDIVYDVLHM

SEQ ID NO: 100572 - protein, 443 aa, Setaria italica
  misc_feature (396)..(396): Xaa can be any naturally occurring amino acid
  Transcript Sequence Number=SeqID_34598
  Homolog annotation: Hit_ID=Q25AP3; Match level="QueryCoverage=78%, HitCoverage=45%, E-value=1e-66, Identity=49%"; Hit description =H0811D08.6 protein
RVLERQAELIGQYEEEEKAQWEWEKQYNENRNANKVDVEVKNKAYQTDAEANSSKNDLPITINPSAECLPNGSLSESPQNASQENGAQRREARDEPDNGRAQTPSVSAQESSTTSTVTKQDQDRGDLISDGDSGYNANTKHYAIKAPSEGSPSSDTLNSKVSDWSSSQFHDNTDSQADTHPYRPASTNIEDIESVLQALQRARISLSAKLSKPVPPNQVTLALPAPGDEHKEYDDTQTIDDSSNSFREELGTSSPARQEILALPAPEDYHERVGLLVHDTGISVAERLSSSSPRREEILALPAPGDDCRREIEDYRNIPVGAPGLFRLPTDSFPVDEKMFSASISFGTPVAVHGAARSAPSVPGDGSGIPAKQRYDLQAPALLSVPTPGRCNVPTXDFTVGSAPFLPGIPGLEQDLRRAGPLGNADLFMQRGIAYTISNKWML

SEQ ID NO: 100573 - protein, 79 aa, Setaria italica
  Transcript Sequence Number=SeqID_34599
FMYFSFIRLVDNGNEKRKEHYRILFFCILILIHTFVLIITKRVLTLFCYSIIGSTNLCLQDLLQRSKSLWCFFHFMLIR

SEQ ID NO: 100574 - protein, 204 aa, Setaria italica
  misc_feature (80)..(80): Xaa can be any naturally occurring amino acid
  Transcript Sequence Number=SeqID_34600
MEFTFEDAEELCSLVSSQESLVDKKRRWLESMILKPGGCSSRVKRPKFLDEAYLPESYIRSGEISCEKVRASMVKKFEFXSNGYTHHIVQDGLRLFDLQKKENEPFGPEYLGIIQTTISKLTYETLQSVACIVTRNKFSFDKTRLAMEKIVESHLPSYLAKLDHKELFYIFRNPCSYRSGSVRLVTPVSPQLLSVIHHALDGLD

SEQ ID NO: 100575 - protein, 124 aa, Setaria italica
  Transcript Sequence Number=SeqID_34601
  Gene Ontology: Mol. function=transcription factor activity; Cellular component=nucleus; Biological process=regulation of transcription, DNA-dependent
  Homolog annotation: Hit_ID=Q5MGQ8; Match level="QueryCoverage=62%, HitCoverage=23%, E-value=2e-29, Identity=80%"; Hit description=DREB 2A
EPSGHLWSGHDGGSEAGHADAGAGHAARKNIWSRGQYCGAWFRQNNRKKRPRRLRDGPTSVAAVIQRWAEHNKQLEHDSEGAKRPRKAPAKGSKKGCMKGKGGPENTHCGYRGVRQRTWGKWVA

SEQ ID NO: 100576 - protein, 355 aa, Setaria italica
  Transcript Sequence Number=SeqID_34602
  Gene Ontology: Mol. function=transcription factor activity; Cellular component=nucleus; Biological process=regulation of transcription, DNA-dependent
  Homolog annotation: Hit_ID=Q5MGQ8; Match level="QueryCoverage=88%, HitCoverage=96%, E-value=1e-133, Identity=78%"; Hit description=DREB 2A
  Pfam annotation: Domain name=AP2; Domain location=105-156; Score =81.8; E_value=2.5e-21; Accession=PF00847.12; Description=AP2 domain
AFSVYRYICWVISFYCVLVHYIFFCAVFYTTTDILKCFLSFSRKKRPRRLRDGPTSVAAVIQRWAEHNKQLEHDSEGAKRPRKAPAKGSKKGCMKGKGGPENTHCGYRGVRQRTWGKWVAEIREPNRANRLWLGTFPTAEDAARAYDQAARAMYGEVARTNFPRQNAVASSQVAWAATPAQVAPSVVEGVVHSTSCESTTTSNHSDIASTLHKPEVSDLSSSVKVECPEVVEAGSRRSEMVSGTSHQHEDSHPSTQASTPNVGDKEVFEPLEPIANLPEGDFDGFDIDEMLRMMEADPQNEGGAGAGMEQPFYFDGLDSSLLESMLQSEPEPYSLSEEQDMFLAGFESPGFFEGL

SEQ ID NO: 100577 - protein, 242 aa, Setaria italica
  Transcript Sequence Number=SeqID_34603
  Gene Ontology: Mol. function=heat shock protein binding
RSRWRQPRLAASRADDSSPAPFEMTVEGALKLLGVAEGASFEEILRAKNAVLASCKDDQDAVAQVEAAYDMLLMQSLSQRRAGKVADNSIRYADVKPVKSAGAGTVPQWMQATMKNAPITFETPSSSSLGIQSCVYGALMVFTYASGSSTSLPSAYTSPDVPGFILATGFGASLYFLAKKNMNLGKAALITVGGLAAGATVGSAVENFLQVDIVPFLGIHSPAVVVSEFILFSQLLVSLFVR

SEQ ID NO: 100578 - protein, 391 aa, Setaria italica
  Transcript Sequence Number=SeqID_34604
  Gene Ontology: Mol. function=protein serine/threonine kinase activity; Cellular component=plasma membrane; Biological process =protein amino acid phosphorylation
  Homolog annotation: Hit_ID=B9RND0; Match level="QueryCoverage=58%, HitCoverage=32%, E-value=2e-45, Identity=44%"; Hit description =Kinase, putative
MAWLGRAGCRPSRGFSEDTLRNLAFNFLAAVLILEFLSGISLVVQTSALEVVAPAMPPSQGWRPFHSMASQDKVLIGVSVQPADEQRQKKLYSSTVALSSAHPPVSVPSYSSVPGTLDLAIYSSDLSRPLVQHDRILATAAPAHVDADPPDAASNSSAAPSGLVQPPVSPHNGCCAPNMVQKRGTRDCHCVYPVRVELFLRNVSLISNWSNDFLQELASQLNLRVNQFEIVNFYVVGASGLNITMDIAPHTGISFAADQVNTMNYSLTQHTIRIDPVLVGDYNLLNLTWFRPLAPAPAPAFTIAPKASPSTSSTIPSPSGDPSNNRHSSLITVIIICVGALIGVLLIVLTICFCTFRKGKKKVPPVETPKQRTPDAVSAVESLPRPTSTKG

SEQ ID NO: 100579 - protein, 449 aa, Setaria italica
  Transcript Sequence Number=SeqID_34605
  Gene Ontology: Mol. function=protein serine/threonine kinase activity; Cellular component=plasma membrane; Biological process =protein amino acid phosphorylation
  Homolog annotation: Hit_ID=B9RND0; Match level="QueryCoverage=87%, HitCoverage=52%, E-value=1e-164, Identity=74%"; Hit description =Kinase, putative
  Pfam annotation: Domain name=APH; Domain location=108-288; Score= -21.2; E_value=0.084; Accession=PF01636.15; Description =Phosphotransferase enzyme family
  Pfam annotation: Domain name=Pkinase; Domain location=106-381; Score =137.8; E_value=3.4e-38; Accession=PF00069.17; Description=Protein kinase domain
  Pfam annotation: Domain name=Pkinase_Tyr; Domain location=106-381; Score=107.4; E_value=4.7e-29; Accession=PF07714.9; Description =Protein tyrosine kinase
  Pfam module annotation: Pfam domain module=APH::Pkinase::Pkinase_Tyr; Domain location=108-288::106-381::106-381
KLKETKKLSFKTNLDLLDNNLRKRIRNRHSSLITVIIICVGALIGVLLIVLTICFCTFRKGKKKVPPVETPKQRTPDAVSAVESLPRPTSTRFLSYEELKAATNNFEPSSVLGEGGFGRVFKGVLGDGTAVAIKKLTTGGHQGDKEFLVEVEMLSRLHHRNLVKLIGYYSSRESSQNLLCYELVPNGSLEAWLHGALGANCPLDWDTRMRIALDAARGLAYLHEDSQPCVIHRDFKASNILLENDFHAKVSDFGLAKQAPEGRANYLSTRVMGTFGYVAPEYAMTGHLLVKSDVYSYGVVLLELLTGRRPVDMSQPSGQENLVTWARPILRDQDRLEELADPRLGAQYPKDDFVRVCTIAAACVSPEANQRPTMGEVVQSLKMVQRSVEFQESMPTPPTRPNVRQSSTTYESDGTSSMFSSGPFSGLSPFDTETIPRTAVFSEDLHEGR

SEQ ID NO: 100580 - protein, 132 aa, Setaria italica
  Transcript Sequence Number=SeqID_34606
  Gene Ontology: Mol. function=hydrolase activity; Cellular component =cellular_component; Biological process=metabolic process
  Homolog annotation: Hit_ID=B6THA2; Match level="QueryCoverage=59%, HitCoverage=32%, E-value=6e-29, Identity=75%"; Hit description =Haloacid dehalogenase-like hydrolase domain-containing protein 1A
LLDTEGFYTAVQEKILARYGKVFDWSVKAKMMGKTTAESTRILFEECGLTGLLTTEQFLEEREIMLKELLPTCVAMPGDEDYLSNLSVSAGTTYTLPIWYGYMTVGVLCHCNLLGLQICPIKVTSKRRTNIN

SEQ ID NO: 100581 - protein, 133 aa, Setaria italica
  Transcript Sequence Number=SeqID_34607
  Gene Ontology: Mol. function=oxidoreductase activity, acting on single donors with incorporation of molecular oxygen, incorporation of two atoms of oxygen; Cellular component=cytoplasm; Biological process=fatty acid biosynthetic process
  Homolog annotation: Hit_ID=A1XCI1; Match level="QueryCoverage=94%, HitCoverage=14%, E-value=2e-46, Identity=65%"; Hit description =Lipoxygenase
INFVVKKFICRGVAGRSRKNPEKVDLLIKDYPYAVDGLEIWTAIKKWVTDYCTIYYTNDSAVTGDSELQAWWREVRHVGHGDLQGAQWWPAMDRLADLVETCTTIIWLGSAFHAAVGLGQYGYQGFVPNSPTL

SEQ ID NO: 100582 - protein, 172 aa, Setaria italica
  Transcript Sequence Number=SeqID_34608
  Gene Ontology: Mol. function=metal ion binding; Cellular component =integral to membrane; Biological process=cytochrome complex assembly
  Homolog annotation: Hit_ID=B6UB16; Match level="QueryCoverage=83%, HitCoverage=55%, E-value=2e-73, Identity=94%"; Hit description=ATG1
  Pfam annotation: Domain name=CcmE; Domain location=1-135; Score=68.5; E_value=2.5e-17; Accession=PF03100.7; Description=CcmE
  Subcellular localization annotation: CTP_CleavageSite=43; ConfidenceScore=5.05e-01
GFVVAVLATFQDQLVFYVTPTDALAKFTADPSKSRVRLGGLVLEGSVAHPSPSSPEIEFVVTDLITDVLVRYDGALPDLFREGHSVVVEGFLKPFTDDLRRDDGRKVAEKARECACFLRGTEVLAKHDEKYMPKEVAEALERNKKQLEADAKAAAAQVTTVATAAEGAKATS

SEQ ID NO: 100583 - protein, 44 aa, Setaria italica
  Transcript Sequence Number=SeqID_34609
GLVKLCVELARPTSSLSLHFFFLTTKLNMHDSHTHHLQASASST

SEQ ID NO: 100584 - protein, 85 aa, Setaria italica
  Transcript Sequence Number=SeqID_34610
  Gene Ontology: Mol. function=protein binding; Biological process =defense response
  Homolog annotation: Hit_ID=Q2QNN4; Match level="QueryCoverage=100%, HitCoverage=13%, E-value=4e-24, Identity=63%"; Hit description =Leucine Rich Repeat family protein
SCFLYISIFPEDHKIRRRRLIRRWSAEGYSREIRDKSLEEVADNYFMELIERSMILPSQLSVNSRKGIDSCQVHDLMREISISKS

SEQ ID NO: 100585 - protein, 146 aa, Setaria italica
  misc_feature (94)..(94): Xaa can be any naturally occurring amino acid
  misc_feature (105)..(105): Xaa can be any naturally occurring amino acid
  Transcript Sequence Number=SeqID_34611
  Homolog annotation: Hit_ID=Q9AVH2; Match level="QueryCoverage=67%, HitCoverage=33%, E-value=8e-44, Identity=85%"; Hit description =Putative senescence-associated protein (Fragment)
  Subcellular localization annotation: CTP_CleavageSite=48; ConfidenceScore=5.09e-01
VSSAIFSPPPERKGASRRPATAHRPGRLSQWHGPLGRERPNVGRGERRAQAPVASLDSDLEAFSHNPTHGSFAPLAFQPSAMTNCVNQRFLSYXVELLSRHGHQXGKTNLSHDGLTPAHVPYWWVNNPTLGEFCFTMIGRADIRTI

SEQ ID NO: 100586 - protein, 238 aa, Setaria italica
  Transcript Sequence Number=SeqID_34612
  Gene Ontology: Mol. function=ATP binding; Cellular component =chromosome; Biological process=chromosome organization and biogenesis
  Homolog annotation: Hit_ID=Q8GU52; Match level="QueryCoverage=93%, HitCoverage=23%, E-value=1e-86, Identity=63%"; Hit description=SMC6 protein
KKIAEDARKINHLKSQIRDFQQRQHDKVTAFGGDRVLSLFRSIERHQSRFKCPPVGPIGAHVELSSDSWSVAVDCAFGRLLDAFIVSCHKDSLLLRECAKEANYRNLQIIIYDFAKPLHDIPNHLVPSTPHPTILSVIRSESPTILNVLVDQGHAERQVLVQDYEMGKSVAFDQRIRNLKEVYTSDGYKMFCRGSVQTILPPNRKWRAGRLCTSVGETITEMKNEATGIEQINLEREG

SEQ ID NO: 100587 - protein, 89 aa, Setaria italica
  Transcript Sequence Number=SeqID_34613
  Homolog annotation: Hit_ID=Q6YZ25; Match level="QueryCoverage=100%, HitCoverage=16%, E-value=2e-15, Identity=51%"; Hit description =Transducin / WD-40 repeat protein-like
LRPANVRRVVPGRILSVRVLPLADRTVVVAGNKVGHIGFWDVDGLVEDDEDDDGADGLFEYFPHRGAVGGIVVHPTDPRKIYSSSYHGE

SEQ ID NO: 100588 - protein, 75 aa, Setaria italica
  Transcript Sequence Number=SeqID_34614
  Subcellular localization annotation: CTP_CleavageSite=63; ConfidenceScore=5.17e-01
MVGTVLYSRHPCHFFFLFGTSGCKVMMSAKLITVACVLIVVSFCSKLKESIFTWTMVVNSSVKLNSLSSSGHCLF

SEQ ID NO: 100589 - protein, 54 aa, Setaria italica
  Transcript Sequence Number=SeqID_34615
QQRQLPHLPGAAALSCLFHRLSLVKLQDHRKQDLYYNCDEQYVLQPPLLAPLLH

SEQ ID NO: 100590 - protein, 73 aa, Setaria italica
  misc_feature (62)..(62): Xaa can be any naturally occurring amino acid
  misc_feature (71)..(71): Xaa can be any naturally occurring amino acid
  Transcript Sequence Number=SeqID_34616
  Subcellular localization annotation: CTP_CleavageSite=55; ConfidenceScore=5.44e-01
VSTSTTACRIPSPPSVSIYLKAAAASRHLGARPRDPGRPTELAVSVSGAAVLLVSLSRGRGXEREREREGXVG

SEQ ID NO: 100591 - protein, 62 aa, Setaria italica
  Transcript Sequence Number=SeqID_34617
TEVWKIIYNLEQCIRSQNIAKFFYKFNAGSIVLAKYLPCGLDHLRLLASLFMLEFEESTMKL

SEQ ID NO: 100592 - protein, 212 aa, Setaria italica
  Transcript Sequence Number=SeqID_34618
  Gene Ontology: Mol. function=protein binding; Cellular component =cellular_component; Biological process=cell redox homeostasis
  Homolog annotation: Hit_ID=B9RY61; Match level="QueryCoverage=98%, HitCoverage=97%, E-value=4e-81, Identity=69%"; Hit description =Thioredoxin domain-containing protein, putative
  Pfam annotation: Domain name=Thioredoxin; Domain location=67-175; Score=-29.8; E_value=0.055; Accession=PF00085.12; Description =Thioredoxin
MDEVVSQILEKQVLTAAKAVEDKLDEEISALDRLDPDDIEALRERRIQQMRRAAERRAKWRAQGHGEYAEVPEKEFFSAAKASERLVCHFYRDNWPCKVLDKHLSILAKQHVETRFIKVHAEKAPFLTEKLKIVVLPTLAIVKNAKVEDYVVGFDELGGKDDFSTEDLEERLAKSQVIFLDGEGSAFVSKQAAAASKRSVRQSGTGDSSDSE

SEQ ID NO: 100593 - protein, 46 aa, Setaria italica
  Transcript Sequence Number=SeqID_34619
  Subcellular localization annotation: CTP_CleavageSite=26; ConfidenceScore=5.42e-01
TPASSAPPPPPPPTGASSSASASSTSAAAATTTTTRKEAEGSAPSS

SEQ ID NO: 100594 - protein, 183 aa, Setaria italica
  misc_feature (109)..(109): Xaa can be any naturally occurring amino acid
  misc_feature (126)..(126): Xaa can be any naturally occurring amino acid
  Transcript Sequence Number=SeqID_34620
  Gene Ontology: Mol. function=binding; Cellular component=cytoplasm; Biological process=embryonic development via the syncytial blastoderm
  Homolog annotation: Hit_ID=B9T038; Match level="QueryCoverage=92%, HitCoverage=37%, E-value=7e-76, Identity=79%"; Hit description =Calcium-binding protein, putative
  Pfam annotation: Domain name=Mo25; Domain location=1-177; Score=83.0; E_value=1e-21; Accession=PF08569.3; Description=Mo25 protein family
RECIRHQSIARYVLESEHMKKFFDYIQLPNFDIASDASATFKELLTRHKATVAEFLTNNYDWFFEEFNSRLLSSTNYITKRQAIKLLGDMLLDRSNVAVMMRYVSSKDXNLMILMNLLRDSSKNIXQIEAFHVFKLFAANKNKPAEVVNILVTNRSKLLRFFAGFKIDKGTIPALTFVRVLAC

SEQ ID NO: 100595 - protein, 103 aa, Setaria italica
  Transcript Sequence Number=SeqID_34621
KLSHFHGRNPTPIWSYCSAKSDRIPHRNVLLHMHFLNKRKTITRTNYILRHTQSADISLMTCSLSASNCSSSLSILNPAKKRRSLLLLVTSMFTTSADYLPAT

SEQ ID NO: 100596 - protein, 336 aa, Setaria italica
  Transcript Sequence Number=SeqID_34622
  Gene Ontology: Mol. function=binding; Cellular component=cytoplasm; Biological process=embryonic development ending in birth or egg hatching
  Homolog annotation: Hit_ID=B9T038; Match level="QueryCoverage=100%, HitCoverage=75%, E-value=1e-161, Identity=80%"; Hit description =Calcium-binding protein, putative
  Pfam annotation: Domain name=Mo25; Domain location=1-336; Score =561.9; E_value=7.3e-166; Accession=PF08569.3; Description=Mo25 protein family
MKGLFKSKPRTPVDVVRQTRENLVHLDLNSGSRGGDAKREEKMAELSKNIRELKSILYGNGESEPVTEACVQLTQEFFRENTLRLLIIHLPKLNLETRKDATQVVANLQRQQVSSKIVASEYLESNKDLLDILISGYENMDIALHYGAMLRECIRHQSIARYVLESEHMKKFFDYIQLPNFDIASDASATFKELLTRHKATVAEFLTNNYDWFFEEFNSRLLSSTNYITKRQAIKLLGDMLLDRSNVAVMMRYVSSKDNLMILMNLLRDSSKNIQIEAFHVFKLFAANKNKPAEVVNILVTNRSKLLRFFAGFKIDKEDEQFEADKEQVIKEISAL

SEQ ID NO: 100597 - protein, 78 aa, Setaria italica
  Transcript Sequence Number=SeqID_34623
  Gene Ontology: Mol. function=metal ion binding; Cellular component =intracellular; Biological process=transport
  Homolog annotation: Hit_ID=Q10N10; Match level="QueryCoverage=100%, HitCoverage=27%, E-value=1e-36, Identity=92%"; Hit description =Phosphatidylinositol transfer protein, expressed
EIGLSYTIMKMEQQNTNSKEGVEVLQQVPFEDEKLGKGQLTSKVYHLQSKIPSWMKGFAPASALTVYEDSWCAFPNSR

SEQ ID NO: 100598 - protein, 90 aa, Setaria italica
  Transcript Sequence Number=SeqID_34624
EERPPPFYYPSSSPTSSQGSLCGVGPYASGGFSGTHGGGWSKDYGCYTSLSDDDDMSSMHSGKYSALHYASGNEEEEAKLPPEEENVVRP

SEQ ID NO: 100599 - protein, 92 aa, Setaria italica
  Transcript Sequence Number=SeqID_34625
ALTRLHFGQNFVGVDYGCYTSLSDDDDMSSMHSGKYSALHYASGNEEEEAKLPPEEENVVGPSSCTAKASRFSPGERSSRSPGRADTAQQQS

SEQ ID NO: 100600 - protein, 244 aa, Setaria italica
  Transcript Sequence Number=SeqID_34626
  Gene Ontology: Mol. function=protein serine/threonine kinase activity; Biological process=protein amino acid phosphorylation
  Homolog annotation: Hit_ID=Q84XZ4; Match level="QueryCoverage=81%, HitCoverage=29%, E-value=8e-53, Identity=60%"; Hit description =Mitogen-activated protein kinase
NPAQIYKKVTAGKLPDAFYRVQDDDARRFIGRCLVIASKRPSAAELLTDPFLLDDHHHSKSACAVMPPSSLHVAASCSSTCSTSDVEEDAEPPTPIRTDMTITGKLNAEEDTIFLKVQIADQTGNNVRNIYFPFDMASDTAMEVAEEMVKELEITDRDPSEIAAMIEQEIERLLPGREQQHEYSVYAANGDDDDGNEERPPPFYYPSSSPTSSQGSLCGVGPYASGGFSGTHGGGWSKDYGCYT

SEQ ID NO: 100601 - protein, 99 aa, Setaria italica
  Transcript Sequence Number=SeqID_34627
  Subcellular localization annotation: CTP_CleavageSite=46; ConfidenceScore=5.36e-01
RSNNHKSTADQINWNLVHTLGSSKVIGSFVNSSWPRFILQSTMNCVAWVTKTCNYDNFSTEKFCFEVFWQQPQGQAVKSSRFTRTGPCGSKRTKLQKFG

SEQ ID NO: 100602 - protein, 163 aa, Setaria italica
  misc_feature (11)..(11): Xaa can be any naturally occurring amino acid
  misc_feature (41)..(41): Xaa can be any naturally occurring amino acid
  Transcript Sequence Number=SeqID_34628
  Subcellular localization annotation: CTP_CleavageSite=42; ConfidenceScore=5.46e-01
SQPEPDADANXPGGSAQTRDYYMDTSSRRRRSLDRSSSVRXRSFEVTDPKPVPVPVPVPVPVAAPAATANGKESPLMGSSEFYHFQHAEDLLDHHRFSTSSLVEDFSASLDGAFHGPAKKPRRWSKAWSLWGLIHRRAAGRRSAASDAADRAFSEPWPELRVR

SEQ ID NO: 100603 - protein, 39 aa, Setaria italica
  Transcript Sequence Number=SeqID_34629
GNANRFKLFPASQRKRERDKNHTSMAIDTQLDWRTGCQS

SEQ ID NO: 100604 - protein, 78 aa, Setaria italica
  Transcript Sequence Number=SeqID_34630
  Gene Ontology: Mol. function=protein serine/threonine kinase activity; Cellular component=plasma membrane; Biological process =protein amino acid phosphorylation
  Homolog annotation: Hit_ID=B9SBN3; Match level="QueryCoverage=78%, HitCoverage=15%, E-value=2e-13, Identity=60%"; Hit description =Protein kinase APK1B, chloroplast, putative
ERDRSEDRKLPSNPGEVEALRRGASAAARNPLVAFSFAELRKVASDFHKDALIGGGGFGRVYKGSFAPAGDAPTLAVA

SEQ ID NO: 100605 - protein, 77 aa, Setaria italica
  misc_feature (46)..(46): Xaa can be any naturally occurring amino acid
  Transcript Sequence Number=SeqID_34631
MDLSHSLTSSSDNETRALNTLLDVFGCAFSLDDIADAYIKAKGDVXNKAGDFLTDLQLSLPHINAVEPSVETNLPQA

SEQ ID NO: 100606 - protein, 224 aa, Setaria italica
  Transcript Sequence Number=SeqID_34632
  Gene Ontology: Mol. function=protein kinase activity; Cellular component=integral to membrane; Biological process=protein amino acid phosphorylation
  Homolog annotation: Hit_ID=Q6L569; Match level="QueryCoverage=76%, HitCoverage=25%, E-value=6e-50, Identity=65%"; Hit description =Putative receptor protein kinase
  Pfam annotation: Domain name=LRR_1; Domain location=105-126; Score =15.5; E_value=0.22; Accession=PF00560.25; Description=Leucine Rich Repeat
  Pfam annotation: Domain name=LRR_1; Domain location=128-150; Score =10.0; E_value=3.6; Accession=PF00560.25; Description=Leucine Rich Repeat
  Pfam annotation: Domain name=LRR_1; Domain location=32-54; Score =14.5; E_value=0.46; Accession=PF00560.25; Description=Leucine Rich Repeat
  Pfam annotation: Domain name=LRR_1; Domain location=56-78; Score =14.7; E_value=0.4; Accession=PF00560.25; Description=Leucine Rich Repeat
  Pfam annotation: Domain name=LRR_1; Domain location=7-30; Score=1.1; E_value=1.9e+02; Accession=PF00560.25; Description=Leucine Rich Repeat
  Pfam annotation: Domain name=LRR_1; Domain location=81-103; Score =16.8; E_value=0.089; Accession=PF00560.25; Description=Leucine Rich Repeat
  Pfam module annotation: Pfam domain module=LRR_1::LRR_1::LRR_1::LRR _1::LRR_1::LRR_1; Domain location=105-126::128-150::32-54::56-78::7 -30::81-103
CDAANATVVELHLPGVGLIGGVPQGTLGGLRGLQVLSLRDNRLLGDIPRDLFVLPRLRSLYLQGNLLTGVIPDEVGRLAASLEHLALSRNNLTGDVPSALNNLTRLRSLRLDGNRLSGSLPSLSSVRRLEVFNVADNDLNGSIPSSLARFPPESFAGNVHLCGPPLVDQPCQAVPSPAPSPPGVLVPSSKKKRKLSGAAVVAIAVGAGAAALLALVLLALCAVH

SEQ ID NO: 100607 - protein, 106 aa, Setaria italica
  Transcript Sequence Number=SeqID_34633
  Gene Ontology: Mol. function=nucleoside-triphosphatase activity; Cellular component=chloroplast; Biological process=chlorophyll biosynthetic process
  Homolog annotation: Hit_ID=B9RIG5; Match level="QueryCoverage=94%, HitCoverage=14%, E-value=2e-19, Identity=53%"; Hit description =Magnesium-chelatase subunit chlD, chloroplast, putative
WKPWLPLYAARVAKCLAAMEGREKVFVDDLKKAVELVILPRSILSDNPQDQTSEDQDEEEEDDQEDDEEENELLRYLLVLLFIFDAEGGLVDDKLLFFAQQAQRRR

SEQ ID NO: 100608 - protein, 64 aa, Setaria italica
  Transcript Sequence Number=SeqID_34634
  Gene Ontology: Mol. function=nucleoside-triphosphatase activity; Cellular component=chloroplast; Biological process=chlorophyll biosynthetic process
  Homolog annotation: Hit_ID=Q93YN7; Match level="QueryCoverage=100%, HitCoverage=13%, E-value=1e-26, Identity=92%"; Hit description =Similar to magnesium-chelatase subunit ChlD
EVAGKIYKAGMSLLVIDTENKFVSTGFAKEIARVAQGKYYYLPNASDAVISAATKTALTDLKGS

SEQ ID NO: 100609 - protein, 762 aa, Setaria italica
  Transcript Sequence Number=SeqID_34635
  Gene Ontology: Mol. function=nucleoside-triphosphatase activity; Cellular component=chloroplast; Biological process=chlorophyll biosynthetic process
  Homolog annotation: Hit_ID=B9RIG5; Match level="QueryCoverage=92%, HitCoverage=92%, E-value=0.0, Identity=78%"; Hit description =Magnesium-chelatase subunit chlD, chloroplast, putative
  Pfam annotation: Domain name=AAA_2; Domain location=107-285; Score= -46.2; E_value=0.041; Accession=PF07724.6; Description=ATPase family associated with various
  Pfam annotation: Domain name=MCM; Domain location=157-402; Score= -241.4; E_value=0.067; Accession=PF00493.15; Description=MCM235 family
  Pfam annotation: Domain name=Mg_chelatase; Domain location=87-297; Score=-106.7; E_value=1.1e-05; Accession=PF01078.13; Description =Magnesium chelatase, subunit ChlI
  Pfam annotation: Domain name=VWA; Domain location=560-751; Score=2.5; E_value=0.0045; Accession=PF00092.20; Description=von Willebrand factor type A domain
  Pfam module annotation: Pfam domain module=AAA_2::MCM::Mg _chelatase::VWA; Domain location=107-285::157-402::87-297::560-751
  Subcellular localization annotation: CTP_CleavageSite=41; ConfidenceScore=5.83e-01
LRTRPPSMATATALSTSLPHLPPRRVTSFPSSSAAVPLHSRAARLRESRLAAVAPTASEVLDSTNGAIPTASKSGAARGYGREYFPLAAVVGQDAIKTALLLGAIDREIGGIAISGKRGTAKTVMARGLHAMLPPIEVVVGSIANADPNSPDEWEDGLADRLQYDADGNVKTEIVKTPFVQIPLGVTEDRLIGSVDVEASVRSGTTVFQPGLLAEAHRGVLYVDEINLLDDGISNLLLNVLTEGVNIVEREGISFRHPCKPLLIATYNPEEGSVREHLLDRIAINLSADLPMSFDDRVAAVEIATQFQESSKEVFKMVEEETEVAKTQIILAREYLKDVNISTEQLKYLVMEAIRGGCQGHRAELYAARVAKCLAAMEGREKVFVDDLKKAVELVILPRSILSDNPQDQQQEQPPPPPPPPPPENQDSSEDQDEEEEDDQEDDEEENEQQDQQIPEEFIFDAEGGLVDDKLLFFAQQAQRRRGKAGRAKNVIFSEDRGRYIKPMLPKGPVRRLAVDATLRAAAPYQKLRKAKDNDKTRKVFVEKTDMRAKRMARKAGALVIFVVDASGSMALNRMQNAKGAALKLLAESYTSRDQVSIIPFRGDYAEVLLPPSRSIAMARKRLEKLPCGGGSPLAHGLSTAVRVGLNAEKSGDVGRIMIVAITDGRANVSLKRSTDPEAAAASDAPRPSTQELKDEILEVAGKIYKAGMSLLVIDTENKFVSTGFAKEIARVAQGKYYYLPNASDAVISAATKTALTDLKGS

SEQ ID NO: 100610 - protein, 52 aa, Setaria italica
  Transcript Sequence Number=SeqID_34636
LRVPHKLMARKMLRSKQNQTVPQKKNWFFLCMPNTFDFVIKLAAKCKLQQGS

SEQ ID NO: 100611 - protein, 88 aa, Setaria italica
  Transcript Sequence Number=SeqID_34637
  Gene Ontology: Mol. function=G-protein coupled photoreceptor activity; Cellular component=membrane; Biological process=regulation of transcription, DNA-dependent
  Homolog annotation: Hit_ID=P93528; Match level="QueryCoverage=92%, HitCoverage=7%, E-value=2e-37, Identity=91%"; Hit description =Phytochrome C
  Pfam annotation: Domain name=HATPase_c; Domain location=1-74; Score =1.8; E_value=0.064; Accession=PF02518.18; Description=Histidine kinase-, DNA gyrase B-, and HSP90-like ATPase
QLLIFLNECRIVHPAPGVPEALIQEMFRHNPEMSREGLGLYISQKLVKTMSGTVQYLREADSSSFIVLVEFPVAQLSSKRSKPSTSRF

SEQ ID NO: 100612 - protein, 929 aa, Setaria italica
  Transcript Sequence Number=SeqID_34638
  Gene Ontology: Mol. function=G-protein coupled photoreceptor activity; Cellular component=membrane; Biological process=regulation of transcription, DNA-dependent
  Homolog annotation: Hit_ID=P93528; Match level="QueryCoverage=99%, HitCoverage=81%, E-value=0.0, Identity=92%"; Hit description =Phytochrome C
  Pfam annotation: Domain name=GAF; Domain location=11-193; Score =113.5; E_value=6.8e-31; Accession=PF01590.18; Description=GAF domain
  Pfam annotation: Domain name=HATPase_c; Domain location=801-915; Score=55.0; E_value=3e-13; Accession=PF02518.18; Description =Histidine kinase-, DNA gyrase B-, and HSP90-like ATPase
  Pfam annotation: Domain name=HisKA; Domain location=690-753; Score =37.8; E_value=4.4e-08; Accession=PF00512.17; Description=His Kinase A (phosphoacceptor) domain
  Pfam annotation: Domain name=PAS; Domain location=414-529; Score =87.3; E_value=5.6e-23; Accession=PF00989.16; Description=PAS domain
  Pfam annotation: Domain name=PAS; Domain location=544-669; Score =69.9; E_value=9.2e-18; Accession=PF00989.16; Description=PAS domain
  Pfam annotation: Domain name=PAS_4; Domain location=420-534; Score =18.9; E_value=0.0032; Accession=PF08448.2; Description=PAS fold
  Pfam annotation: Domain name=Phytochrome; Domain location=204-384; Score=390.1; E_value=3.7e-114; Accession=PF00360.12; Description =Phytochrome region
  Pfam module annotation: Pfam domain module=GAF::HATPase _c::HisKA::PAS::PAS::PAS_4::Phytochrome; Domain location=11-193::801 -915::690-753::414-529::544-669::420-534::204-384
SSRLQSLPSGNLSLLCDVLVREVSELTGYDRVMAYKFHEDEHGEVIAECRRSDLEPYLGLHYPATDIPQASRFLFMKNKVRMICDYSAVPVKIIQDDSLAQPLSLCGSTLRAPHGCHAQYMANMGSVASLVMSVTINEDEEDEDTGSDQQPKGRKLWGLVVCHHTSPRFVPFPLSFACEFLLQVFGIQLNKEVELAAQAKERHILRTQTLLCDMLLRDAPVGIFTQSPNVMDLVKCDGAALYYQNQLWALGSVPSEAEIKSIVAWLQENHDGSTGLSTDSLVEAGYPGAAALREVVCGMAAIKISSKDFIFWFRAHTAKEIKWGGAKHEAVDADENGRKMHPRSSFKAFLEVVKWRSVPWEDVEMDAIHSLQLILRGSLQDEDANRNNVRTIVKAPSEDTKKIQGLLELRTVTDEMVRLIETATAPILAVDIAGNINGWNNKAAELTGLPVMEAIGRPLVDLVMSDSVEVVKQILDSALQGIEEQNLEIRLKTFNQQECNGPVILMVNSCCSRDLSEKVVGVCFVAQDLTGQKMIMDKYTRIQGDYVAIVKNPSELIPPIFMINDLGSCLEWNEAMQKITGMKREDAIDKLLIGEVFTLHDYGCRVKDHATLTKLSILMNTVISGQDPGKLPFGFFNTDGKYVESLLTANKRTNAEGKITGALCFLHVASPELQHALQVQKMSEQAATNSFKELTYIRQELRNPLNGMQFTHSLLEPSELTEEQRRLVASNVLCQDQLKKILHDTDLESIEQCYMEMNTVEFKLEEALNTVLMQGMSLGKEKRISIERDWPVEVSCMHLYGDNLRLQQVLADYLACTLQFTQPAEGPIVLQVIPKKENIGSGMQIAHLEFRIVHPAPGVPEALIQEMFRHNPEMSREGLGLYISQKLVKTMSGTVQYLREADSSSFIVLVEFPVAQLSSKRSKPSTSRF

SEQ ID NO: 100613 - protein, 221 aa, Setaria italica
  Transcript Sequence Number=SeqID_34639
  Gene Ontology: Mol. function=G-protein coupled photoreceptor activity; Cellular component=membrane; Biological process=regulation of transcription, DNA-dependent
  Homolog annotation: Hit_ID=P93528; Match level="QueryCoverage=99%, HitCoverage=19%, E-value=1e-115, Identity=93%"; Hit description =Phytochrome C
  Pfam annotation: Domain name=PAS_2; Domain location=35-151; Score =221.2; E_value=2.7e-63; Accession=PF08446.3; Description=PAS fold
AQLHAEFEGSQRHFDYSSSVGAANRPLASTSTVSAYLQTMQRGRYIQPFGCLLAVHPDTFALLAYSENAPEMLDLTPHAVRTIDQRDALAVGADVRTLFRSQSSVALHKAATFGEVNLLNPILVHARTLGKPFYAIMHRIDVGLVIDLEPVNPADVPVTAAGALKSYKLAAKAISRLQSLPSGNLSLLCDVLVREVSELTGYDRVMAYKFHEDEHGEVILL

SEQ ID NO: 100614 - protein, 116 aa, Setaria italica
  Transcript Sequence Number=SeqID_34640
  Gene Ontology: Mol. function=oxidoreductase activity; Biological process=protein amino acid phosphorylation
  Homolog annotation: Hit_ID=B6T3T7; Match level="QueryCoverage=92%, HitCoverage=34%, E-value=4e-41, Identity=77%"; Hit description =Carbonyl reductase 3
  Pfam annotation: Domain name=KR; Domain location=15-114; Score=-83.3; E_value=0.03; Accession=PF08659.2; Description=KR domain
  Pfam annotation: Domain name=adh_short; Domain location=12-116; Score= -11.1; E_value=7.4e-05; Accession=PF00106.17; Description=short chain dehydrogenase
  Pfam module annotation: Pfam domain module=KR::adh_short; Domain location=15-114::12-116
MEGTISNPPNTRIAVVTGGNKGIGLEVCRQLAASGVTVVLTARDETRGAAAVEKLREQGLSDVIFHQLEVTDASSIARLADFLKASFGKLDILVNNAAVGGAEYVQGLVYPSTGED

SEQ ID NO: 100615 - protein, 121 aa, Setaria italica
  misc_feature (109)..(109): Xaa can be any naturally occurring amino acid
  Transcript Sequence Number=SeqID_34641
  Homolog annotation: Hit_ID=Q259K5; Match level="QueryCoverage=95%, HitCoverage=16%, E-value=9e-11, Identity=31%"; Hit description =H0402C08.8 protein
HHGRQTHKMGDIFLSDEQVLCIGSSKKRPVLKWEENTAWPGNLTLTDKALYFEAIGLSGTKKPMRLDLTDRNSRVEKAKVGPFGSKLFDSAVSVSSGSTSDEWTLEFVXFSGEMRREVWLA

SEQ ID NO: 100616 - protein, 162 aa, Setaria italica
  misc_feature (36)..(36): Xaa can be any naturally occurring amino acid
  misc_feature (64)..(64): Xaa can be any naturally occurring amino acid
  Transcript Sequence Number=SeqID_34642
  Homolog annotation: Hit_ID=Q259K5; Match level="QueryCoverage=77%, HitCoverage=18%, E-value=5e-14, Identity=31%"; Hit description =H0402C08.8 protein
QCYNVQLNRVHHGRQTHKMGDIFLSDEQVLCIGSSXKRPVLKWEENTAWPGNLTLTDKALYFEXTKKPMRLDLTDRNSRVEKAKVGPFGSKLFDSAVSVSSGSTSDEWTLEFVDFSGEMRREVWLAFISEMISVYRFIREYGPGDNDPAIHHVYGAQRRQEK

SEQ ID NO: 100617 - protein, 464 aa, Setaria italica
  Transcript Sequence Number=SeqID_34643
  Homolog annotation: Hit_ID=Q7XKB6; Match level="QueryCoverage=73%, HitCoverage=42%, E-value=3e-15, Identity=23%"; Hit description =OSJNBa0064G10.15 protein
  Pfam annotation: Domain name=DUF639; Domain location=2-427; Score =165.2; E_value=1.9e-46; Accession=PF04842.4; Description=Plant protein of unknown function (DUF639)
  Pfam annotation: Domain name=Reticulon; Domain location=247-414; Score=-28.9; E_value=0.0099; Accession=PF02453.9; Description =Reticulon
  Pfam module annotation: Pfam domain module=DUF639::Reticulon; Domain location=2-427::247-414
CTASTSDEWTLEFVDFSGEMRREVWLAFISEMISVYRFIREYGPGDNDPAIHHVYGAHKGKKRAVSSAANSIARLQSLQFIRRLHEDPAKLVQFSYLSNAPFGDVVLQTLAVKFWGGPLITKVKSANHRSPQWHRSSEDPSSGHAHVYDIDGSVYLRKWMTSPSWASSHSANFWRNSSVKHGVVLSKSLVVADKNLVEKAMINCKEKRKVVERTQATIVAATIEGIPSNIDLFKELMLPFVIMAEKFKKLQRWENPRSTICFLLLVHTVVFRNMLSYVFPFTLMMMALSMLAVKGLKEQGRLGRSFGKVTIRDQPPSNTIQKILALKEAMASVENYLQNLNVSLLKIRTIFLAGQPEVTTQVALVLLASSAVLLVFPFKYVLAFFTFDLFTRELEFRREMVRAFMNFLKERWESIHAAPVVVLPYEGAESSPKPLPSKASGQSEPQNVQRVGSYVTSKNGISNS

SEQ ID NO: 100618 - protein, 76 aa, Setaria italica
  Transcript Sequence Number=SeqID_34644
  Gene Ontology: Mol. function=nucleotide binding; Cellular component =chloroplast; Biological process=cellular metal ion homeostasis
  Homolog annotation: Hit_ID=B5VXK1; Match level="QueryCoverage=90%, HitCoverage=18%, E-value=2e-13, Identity=58%"; Hit description=Anion- transporting ATPase
ASTVYPSVSFDAVQKSVTLFMPGFDKSEIKLYQYRGGSELLIEAGDQRRVIKLPPAMQGKAGGAKFVDRNLIVSIR

SEQ ID NO: 100619 - protein, 49 aa, Setaria italica
  Transcript Sequence Number=SeqID_34645
AIPWYVGAILLCCSTVDHREKPAYVACTIAAALATIAVIIGATAGAHVY

SEQ ID NO: 100620 - protein, 82 aa, Setaria italica
  Transcript Sequence Number=SeqID_34646
RVQAVQGIGKPSMADGVGHRVLLSLCHLRVSLPRAEAPSSITRQDAKSNSSNQSPHCITVYCQDTRWFVGNERGGEGGRDAP

SEQ ID NO: 100621 - protein, 83 aa, Setaria italica
  Transcript Sequence Number=SeqID_34647
  Subcellular localization annotation: CTP_CleavageSite=26; ConfidenceScore=5.01e-01
RRRTGRRQPNRRIPRPHATFQAFQPSAPAIRPLPARLRPSRPPPPGDRDVDAVHFAGLRVRAVHLPCRGGGRGHDPVLLPRAL

SEQ ID NO: 100622 - protein, 40 aa, Setaria italica
  Transcript Sequence Number=SeqID_34648
MSSLSSIEAYFEFFSAKSAQENEELEEAEIELELIQKEKS

SEQ ID NO: 100623 - protein, 1220 aa, Setaria italica
  Transcript Sequence Number=SeqID_34649
  Gene Ontology: Mol. function=aspartic-type endopeptidase activity; Cellular component=chromatin
  Homolog annotation: Hit_ID=Q7XP97; Match level="QueryCoverage=95%, HitCoverage=70%, E-value=1e-154, Identity=58%"; Hit description =OSJNBa0060B20.14 protein
  Pfam annotation: Domain name=HEAT; Domain location=668-704; Score =18.0; E_value=0.038; Accession=PF02985.14; Description=HEAT repeat
SLLFLLHSATELFCPPENVIDIILKSAENLNEQLACLYSCVNAGKKNLDRVKVHGLRRRWTLLQKLVLASSGSDNTREIARTKRDGFRFRSLVPPSTWIQKISDFSRFSSPLPRFLGWMAVSRYAKEYLNERLFLASDFSQLTSLLSIYMDELCLMDGVSTQKVRPAKGEQSNCKHLLLKKETTLSDQRSMAKQFKILLPELHFFFPSMSRLFNAFGESILEAVGLQLKCLPNNAVPDVLCWFSELCLWPYLERIKEHLVAANRISYLRGNIAANVKAVVFYLLESIITEHMEAIIPEMPRIVHILVSLCRASYTDVAFLKSVLCLMKPLISYFLRKGTDNTKVLGHVMEGSNFELLCFEELFEIVRCGKDLEDTSVDKIQVPLLIFILGSMFPDFSFERRIEMLSSLLVWVDCISSDPPSLLCSYLQGFQKLLDGCETVLVQNIELLGVSILSATSQSVESTDSLGVDGIMQLEKNTQDSEEQILVKSTAYYENDGSRKGVYSLHPSSIIEFCGAMEKFISHLTPSIEGSWKWHHQLASGLSLSIAKCLLFANFLKSIAQEETVSSSSEQDVAVKISSELAQKHWQSALEGLGKIILANQKTQCWQVASNMLDYIMSMPNVLAWGNVLSATCSAVKGFCSHAPRISWRLQTDKWLSLLVSGGIESFNNSETCLIDLFCTMLSHSEPEQRSIALQQLGRIINSTSSTEADLKSPTYDQNFLTSVSTVTSLLVTHTWDRVAALALHDSSMLLRNHAMALLTEYVPYVDRKHLQSFLASSNSILNGLGQLSGVVEEGYFTRMSLLLLSRACLYSTPEDIALIPECVWQKLENMQTSSGGFGYMEKDLCRALCQLRSESDAKTVVKEVLSGSTCQAVSPDFKSIRDSILQVMSSLSSIEAYFEFFSAKSAQENEELEEAEIELELIQKEKSVHNFVVHRGDTVVPDMPSYHKGGNDVNKRLQQVRENIRSLEKSRLKEEITVRRQKKLLIRHAREKYLEETSSREMELMQELDRERGLEMEREVERQRQLDIERAKSRELQFNLDLEKEKQTQRELQRELEQVELGRSSSRREFSANPNSRSRERYRERDGGRAQQEAGSLRSSSRGHEGGSAQATAPAGGPPVVLAGTRSFSGGTLPTILQPRDRAAAADDDNAWTEGSRDFGDASSIGDPEFDGPRPQGPRGGGGGGKSSSSRQVVERRERDGTSAGTGRREGKWERKQHS

SEQ ID NO: 100624 - protein, 59 aa, Setaria italica
  Transcript Sequence Number=SeqID_34650
  Gene Ontology: Mol. function=protein kinase activity; Biological process=protein amino acid phosphorylation
  Homolog annotation: Hit_ID=Q6L569; Match level="QueryCoverage=100%, HitCoverage=7%, E-value=2e-13, Identity=69%"; Hit description =Putative receptor protein kinase
ALLQVAMACVSTAPDARPDAPDVVRMIEEIAGGHGRTATEESEGTRGASDEERSRGPTP

SEQ ID NO: 100625 - protein, 95 aa, Setaria italica
  Transcript Sequence Number=SeqID_34651
  Gene Ontology: Mol. function=translation elongation factor activity; Cellular component=cytoplasm; Biological process=translation
  Homolog annotation: Hit_ID=O23755; Match level="QueryCoverage=98%, HitCoverage=11%, E-value=2e-42, Identity=89%"; Hit description =Elongation factor 2
  Pfam annotation: Domain name=GTP_EFTU; Domain location=17-95; Score= -75.4; E_value=0.0018; Accession=PF00009.19; Description=Elongation factor Tu GTP binding domain
MVKFTAEELRGIMDKKNNIRNMSVIAHVDHGKSTLTDSLVAAAGIIAQEVAGDVRMTDTHADEAERGITIKSTGISLYYEMTEESLKSYKGEREW

SEQ ID NO: 100626 - protein, 182 aa, Setaria italica
  Transcript Sequence Number=SeqID_34652
  Gene Ontology: Cellular component=chloroplast
  Homolog annotation: Hit_ID=Q5JKQ7; Match level="QueryCoverage=98%, HitCoverage=28%, E-value=4e-61, Identity=68%"; Hit description =Putative PPR protein
  Subcellular localization annotation: CTP_CleavageSite=61; ConfidenceScore=5.67e-01
MEASSLPMLTASRFLPPPPPPPLLTPTCPRQAVPFVRAAARTLEAPEAPKPQRPSPRRSAVAEVKASSDPVAALNRFEDVLQTQDCNIILRHCGDTRRWDDLSKVFEWMQEREMTNAASYSSYFKYLGLSRDPARALQVYGAIQDCTMRVHVSVCNSVLGCLVKNGRFDSSFKLYDEMIREG

SEQ ID NO: 100627 - protein, 228 aa, Setaria italica
  Transcript Sequence Number=SeqID_34653
  Gene Ontology: Mol. function=microtubule motor activity; Cellular component=microtubule associated complex; Biological process =microtubule-based movement
  Homolog annotation: Hit_ID=Q01IZ0; Match level="QueryCoverage=94%, HitCoverage=18%, E-value=3e-82, Identity=77%"; Hit description =OSIGBa0102D10.3 protein
LRVSDLLLDLKDGRRKSMTRKGDDATLADSFLERTQAGDLFSAASRAHHPPPSGTTIVDQIDLLQEQVKMLAGEVALCTSSLKRLSEQAANNPDDVHIQGQIEKLKEEIAEKKLHIHLLEQRMVQSLETTEDPATKTELSQTFSKLSTQLSEKTFELEIMSADNRILQDQLQAKVTENAELRETVAQLRQEISSLKAAKSEDSFASVQSSEPSTASTDTRDNTNEISN

SEQ ID NO: 100628 - protein, 193 aa, Setaria italica
  misc_feature (73)..(73): Xaa can be any naturally occurring amino acid
  misc_feature (180)..(180): Xaa can be any naturally occurring amino acid
  Transcript Sequence Number=SeqID_34654
  Gene Ontology: Mol. function=phosphatidylinositol phosphate kinase activity; Biological process=phosphatidylinositol metabolic process
  Homolog annotation: Hit_ID=Q2QVA9; Match level="QueryCoverage=100%, HitCoverage=11%, E-value=5e-67, Identity=70%"; Hit description =Phosphatidylinositol-4-phosphate 5-Kinase family protein, expressed
NTIVYNNISNTEPDMKNGANFDNENECLYPLVLPSFDADPLIWLPPEPENKEDDFDTVLNICDQSENYSTWVXRSSFNFNLAERSKESHEDQLQKVMSEVMNGQFKILVSRFLAAEGFSLSYGGTEKNWFDIVASLSWDAALLVKPDANSGNAMDPGLYVKVKCIASGSYQQSEVINGLXFKKSAAHKQMRAN

SEQ ID NO: 100629 - protein, 123 aa, Setaria italica
  misc_feature (11)..(11): Xaa can be any naturally occurring amino acid
  misc_feature (50)..(50): Xaa can be any naturally occurring amino acid
  Transcript Sequence Number=SeqID_34655
  Homolog annotation: Hit_ID=Q7XPL9; Match level="QueryCoverage=95%, HitCoverage=13%, E-value=6e-26, Identity=57%"; Hit description =OSJNBa0085I10.7 protein
LRRSTRLSKQXENPINDEPVQQPATSNQCNSDPLNIDKIISNLCPSPLPXHQMPQASSSQWGQADTATGPSPSNHDAPQDGQFPLYYSQPYPPEVPDEHSLDRIGDEQPHSPEAQFHVYCCCL

SEQ ID NO: 100630 - protein, 128 aa, Setaria italica
  Transcript Sequence Number=SeqID_34656
  Pfam annotation: Domain name=PIG-H; Domain location=24-91; Score =79.0; E_value=1.7e-20; Accession=PF10181.1; Description=GPI-GlcNAc transferase complex, PIG-H compon
LEIINNLPILVAKCLQYKPVKKESVVIMPAFGVQLEIHFWSYPLGRVDRRFVPIGKILKPLINECVTPVTCYWSLALLLRDEEELLLVFQKCRPPVKMLVPVWKALCTLTNSERLSPSRVDKPNSLEK

SEQ ID NO: 100631 - protein, 92 aa, Setaria italica
  Transcript Sequence Number=SeqID_34657
CTRLDYRDGEEDCMRSVRMRLSSCSASNYCTIIHATRSARVACVQIPSESAKLARSSAGERKRGVGAAAAGSPSVSPSAEGRDDAVGRRGRR

SEQ ID NO: 100632 - protein, 72 aa, Setaria italica
  Transcript Sequence Number=SeqID_34658
RSKLKELYDEQETPQEQSAAATLQRTYQSRTWIMPLKQFKRFTIVLPWLPSRLLISSPMRCLRTSTLDNWLK

SEQ ID NO: 100633 - protein, 76 aa, Setaria italica
  Transcript Sequence Number=SeqID_34659
TKVRYSIIKLRHFSFAHTTFTTNKDWLHDSFTIALINSAHANKITKLYSSALQFNHTVTPSCTMHQLRHNTWTQLP

SEQ ID NO: 100634 - protein, 66 aa, Setaria italica
  Transcript Sequence Number=SeqID_34660
  Homolog annotation: Hit_ID=Q8LJ32; Match level="QueryCoverage=100%, HitCoverage=15%, E-value=2e-22, Identity=80%"; Hit description =Putative UVB-resistance protein UVR8
HSAALDEYGHLYIWGRALIGQHDNDQPWSVFPSLSISQVALGWHHALLLSGGELFTIGVYRHQKCD

SEQ ID NO: 100635 - protein, 122 aa, Setaria italica
  misc_feature (64)..(64): Xaa can be any naturally occurring amino acid
  misc_feature (80)..(80): Xaa can be any naturally occurring amino acid
  Transcript Sequence Number=SeqID_34661
  Subcellular localization annotation: CTP_CleavageSite=56; ConfidenceScore=5.15e-01
MAKIKPKALLAQSKVKKGPSQISVTTIFTYLVLGVVVVSSVYAAYKYWVGKGPAVTAAGVEGNXNPNYVTDFVVVSSAWXTFGCCSPVNGTWIDYILLQFYCNPRVHCIDICMLNSFLKNMK

SEQ ID NO: 100636 - protein, 85 aa, Setaria italica
  Transcript Sequence Number=SeqID_34662
GRYSALPFRDGAAIALDGEPKESWTKPVSVIVAGLLVPAVMAAVAVNGVPELLRSSRLINGIFPPWILVSAVIIFARARTRPRAP

SEQ ID NO: 100637 - protein, 95 aa, Setaria italica
  misc_feature (90)..(90): Xaa can be any naturally occurring amino acid
  Transcript Sequence Number=SeqID_34663
  Gene Ontology: Mol. function=transition metal ion binding; Cellular component=cytoskeleton; Biological process=inositol phosphate biosynthetic process
  Homolog annotation: Hit_ID=A2Q2R2; Match level="QueryCoverage=88%, HitCoverage=8%, E-value=6e-31, Identity=70%"; Hit description =Histidine acid phosphatase
MVVMEGNGGAGKITIGVCVMEKKVFSSPMEQILERLRAFGEFEIIIFGDKVILDDPIEIWPNCDCLIAFYSSGFPLQKVQAYAALRRPFXVNELE

SEQ ID NO: 100638 - protein, 61 aa, Setaria italica
  Transcript Sequence Number=SeqID_34664
FFFFCCHRSLQKRKDISLTFPTGHHKIDCLLTFARRKYKLHMWRQNTVLSHKFFMDVYKVN

SEQ ID NO: 100639 - protein, 293 aa, Setaria italica
  Transcript Sequence Number=SeqID_34665
  Gene Ontology: Mol. function=transferase activity, transferring glycosyl groups; Cellular component=endoplasmic reticulum membrane; Biological process=GPI anchor biosynthetic process
  Homolog annotation: Hit_ID=B6T639; Match level="QueryCoverage=98%, HitCoverage=65%, E-value=1e-151, Identity=89%"; Hit description=PNT1
  Pfam annotation: Domain name=Mannosyl_trans; Domain location=5-269; Score=226.5; E_value=6.8e-65; Accession=PF05007.5; Description =Mannosyltransferase (PIG-M)
LPFAGRVFQAAFWYGLIVHFRIYPIIYAIPFVIVLGKSYAGSSGRPTLTLWRSEQHLQNDKSSQREGPTSFLATLWDFLSNFITRNAILFGLLSGSMFFVWTGVFFYLYGWEFLNEALLYHLTRTDPRHNFSIYFYHIYLHHQQGFSSIQRLASFLPQLIVQLALIARFCRDLPFCMFLQTVAFVAFNKVMTAQYFVWFFCLLPLILPWSSMKLKWKGLACMLVWMGSQLHWLMWAYLLEFKGRNVFVQLWLAGLVFLAANTFVMLMVIKHHKYTPLFSTPVKPGSKVATKKE

SEQ ID NO: 100640 - protein, 92 aa, Setaria italica
  Transcript Sequence Number=SeqID_34666
TMNIFSWKFRELCELPLFEDSNFRLNLNMGWTWAGEEEGWLILGHNQLGRLLDTSIGRELHSGFPSSLPEVEEDRGKPATKADGGDGRKLLL

SEQ ID NO: 100641 - protein, 118 aa, Setaria italica
  Transcript Sequence Number=SeqID_34667
VLISLPVSSLFGLVGCLGHSQGFLQYAVQEDCTCTMMQIWTLKDFEKGEWILKHRFEIEVAPQTKILFDYAGNALCSEIFYVVVFHPERDLVFLPIEGYKMLSYNLINTEVKEICKLE

SEQ ID NO: 100642 - protein, 69 aa, Setaria italica
  Transcript Sequence Number=SeqID_34668
  Subcellular localization annotation: CTP_CleavageSite=29; ConfidenceScore=5.23e-01
RNGPTNDEKMNVGDDGSGKSNSTSPMSLSQSVKQQGSPNGPLRNESFEIHSISPARQLTRAGMFEILHP

SEQ ID NO: 100643 - protein, 183 aa, Setaria italica
  Transcript Sequence Number=SeqID_34669
  Gene Ontology: Mol. function=protein serine/threonine kinase activity; Biological process=protein amino acid phosphorylation
  Homolog annotation: Hit_ID=Q6ETL7; Match level="QueryCoverage=81%, HitCoverage=22%, E-value=6e-17, Identity=42%"; Hit description =Putative oxidative-stress responsive 1
FNVRFLFELDIVDESTQLQDLRTRNGPTNDEKMNVGDDGSGKSNSTSPMSLSQSVKQQGSPNGLLRNESFEIHSISPARQLTRAVSNCKDVDEYLEKTAFQKGRFKVIHDYSKLEGATQREKELLERINSLEKMLLATQDEVERLKSKGGKNKQRDAYNNYSSEVKVNYVCYLGDACNGRERL

SEQ ID NO: 100644 - protein, 169 aa, Setaria italica
  misc_feature (113)..(113): Xaa can be any naturally occurring amino acid
  Transcript Sequence Number=SeqID_34670
  Gene Ontology: Mol. function=molecular_function; Cellular component =integral to membrane; Biological process=biological_process
  Homolog annotation: Hit_ID=B6SML9; Match level="QueryCoverage=100%, HitCoverage=100%, E-value=2e-81, Identity=83%"; Hit description =FAM18-like protein
  Pfam annotation: Domain name=DUF846; Domain location=10-138; Score =225.1; E_value=1.7e-64; Accession=PF05832.4; Description=Eukaryotic protein of unknown function (DUF846)
MDQRQVVSENYANPITCFFHVLFKAAALAFYILFSLFVKSFVIIFVITVLLAALDFWVVKNVSGRILVGLRWWNEINDEGESVWKFECLDAESLARMNKKDSWLFWWTLYLAXQADYLLVIGVCLSLSIANIVGFTKCNKDAKKNIQDWTKNALLSGSVRSHLQSAFGV

SEQ ID NO: 100645 - protein, 184 aa, Setaria italica
  Transcript Sequence Number=SeqID_34671
  Gene Ontology: Mol. function=molecular_function; Cellular component =integral to membrane; Biological process=biological_process
  Homolog annotation: Hit_ID=B6SML9; Match level="QueryCoverage=96%, HitCoverage=97%, E-value=2e-75, Identity=80%"; Hit description=FAM18- like protein
  Pfam annotation: Domain name=DUF846; Domain location=11-153; Score =279.2; E_value=9.1e-81; Accession=PF05832.4; Description=Eukaryotic protein of unknown function (DUF846)
MDQQPQGITENYANPKTCFFHVLFKAAALAFYILSALFVNNFVIIFVITVLLAALDFWVVKNVSGRILVGLRWWNEINDEGESVWKFECLDAESLARMNKKDSWLFWWTLYLAAAAWIILGIFSLIRLQADYLLVVGVCLSLSIANIVGFTKCNKDAKKNIQAFAQNALASRVTSSLQSAFGVI

SEQ ID NO: 100646 - protein, 79 aa, Setaria italica
  Transcript Sequence Number=SeqID_34672
  Homolog annotation: Hit_ID=B9HPF8; Match level="QueryCoverage=86%, HitCoverage=8%, E-value=3e-21, Identity=66%"; Hit description=GRAS family transcription factor
NLMDESVLIESPRDIVLNNIRKMRPHAFIHAIVNGSFSAPFFVTRFREALFYYSALFDVLDTTTPHHEQPQPQPQAQPS

SEQ ID NO: 100647 - protein, 599 aa, Setaria italica
  Transcript Sequence Number=SeqID_34673
  Gene Ontology: Cellular component=nucleus; Biological process =regulation of transcription, DNA-dependent
  Homolog annotation: Hit_ID=Q53MB0; Match level="QueryCoverage=95%, HitCoverage=78%, E-value=1e-166, Identity=53%"; Hit description=GRAS family transcription factor containing protein, expressed
  Pfam annotation: Domain name=GRAS; Domain location=218-590; Score =495.4; E_value=7.5e-146; Accession=PF03514.6; Description=GRAS family transcription factor
CSSDAANAPLTPAAVDSYASAPGAQFNGFDLDPAAFFSDGANSDLMSSAFLKGMEEANKFLPSQDKLVIDLDPPEDAKRFVLPTENKFAAAGFNGSAPVAAAVAVKEEVVAVAAPDAVPGGGGGWGVAVRKNRFLTYDEEDLEMDRRSSKQSALQGDGDDRDVFDKYMITSHEMCVEQMEKLRIAMQEEAAKKEAVNGNGKAKAKGGGRRGGREVVDLRTLLIHCAQAVASDDRRNATELLKQIKQHASPQGDATQRLAHCFAEGLQARLAGTGSMVYQSLMAKRTSAVDILQAYQLYMAAICFKKVVFIFSNQTIYNASLGKKKIHIVDYGIHYGFQWPCFLRRIACREGGPPEVRITGIDLPQPGFRPTQRIEETGRRLSKYAQEFGVPFKYQVIAASKMETIRAEDLNLDPEEVLIVNCLYQFKNLMDESVLIESPRDIVLNNIRKMRPHAFIHAIVNGSFSAPFFVTRFREALFYYSALFDVLDTTTPRDSNQRMLIEQNIFGRAALNVIACEGTDRVERPETYKQWQVRNQRAGLKQLPLNPDVVQVVRDKVDGCYHKDFVIDIDHNWLLQGWKGRILYAISTWVANDDAGSYF

SEQ ID NO: 100648 - protein, 62 aa, Setaria italica
  Transcript Sequence Number=SeqID_34674
WVDGLFICYYSKCRKLFRKCILPEVGSFSFLKNFLTPCLVLEGKLVFFSIVDFIFPHQEYSL

SEQ ID NO: 100649 - protein, 134 aa, Setaria italica
  Transcript Sequence Number=SeqID_34675
  Gene Ontology: Mol. function=peptidyl-prolyl cis-trans isomerase activity; Cellular component=endoplasmic reticulum lumen; Biological process=protein folding
  Homolog annotation: Hit_ID=B4FUK2; Match level="QueryCoverage=79%, HitCoverage=81%, E-value=8e-50, Identity=81%"; Hit description=FK506- binding protein 2-1
  Pfam annotation: Domain name=FKBP_C; Domain location=27-116; Score =162.0; E_value=1.8e-45; Accession=PF00254.20; Description=FKBP-type peptidyl-prolyl cis-trans isomer
MGRKRQLICLATAVAAAAILLTASAKKSGDVTELQIGVKGTLIDGSVFDSSYDRGDPFEFTLGNGQVIKGWDQGLLGMCVGEKRKLKIPAKMGYGERGSPPKIPGGATLIFDTELIAVNGKTSGGAKAESNSEL

SEQ ID NO: 100650 - protein, 158 aa, Setaria italica
  Transcript Sequence Number=SeqID_34676
  Gene Ontology: Mol. function=peptidyl-prolyl cis-trans isomerase activity; Cellular component=endoplasmic reticulum lumen; Biological process=protein folding
  Homolog annotation: Hit_ID=B4FUK2; Match level="QueryCoverage=92%, HitCoverage=94%, E-value=6e-62, Identity=82%"; Hit description=FK506- binding protein 2-1
  Pfam annotation: Domain name=FKBP_C; Domain location=43-137; Score =191.2; E_value=3e-54; Accession=PF00254.20; Description=FKBP-type peptidyl-prolyl cis-trans isomer
MGKKRQLICLATAVAAAAILLTASAKKSGDVTELQIGVKYRPEACTLQAHKGDKIKVHYRGTLIDGSVFDSSYDRGDPFEFTLGNGQVIKGWDQGLLGMCVGEKRKLKIPAKMGYGERGSPPKIPGGATLIFDTELIAVNGKTSGGAKARKQQRARRP

SEQ ID NO: 100651 - protein, 44 aa, Setaria italica
  Transcript Sequence Number=SeqID_34677
ITLVTKSIKLEKDFLNKQHPKTNTNNACFYYIGLLQSTNLRSTT

SEQ ID NO: 100652 - protein, 36 aa, Setaria italica
  Transcript Sequence Number=SeqID_34678
  Gene Ontology: Mol. function=structural molecule activity; Cellular component=protein complex; Biological process=microtubule-based movement
  Homolog annotation: Hit_ID=C0SK37; Match level="QueryCoverage=94%, HitCoverage=8%, E-value=7e-14, Identity=100%"; Hit description=Alpha tubulin (Fragment)
DEVRTGTYRQLFHPEQLISGKEDAANNFARGHYTSK

SEQ ID NO: 100653 - protein, 153 aa, Setaria italica
  misc_feature (116)..(116): Xaa can be any naturally occurring amino acid
  Transcript Sequence Number=SeqID_34679
  Gene Ontology: Mol. function=transferase activity; Cellular component= endoplasmic reticulum membrane; Biological process=GPI anchor biosynthetic process
  Homolog annotation: Hit_ID=Q6EUN5; Match level="QueryCoverage=98%, HitCoverage=18%, E-value=2e-82, Identity=94%"; Hit description =Putative phosphatidylinositolglycan class N short form
IIKLRQLLLQDKLVIFLHLLGCDTNGHAHRPYSSIYLNNVKVVDQIAESMYNLMENYFKDNQTAYVFTADHGMSDKGSHGDGHPSNTDTPLVAWGAGIRSPKFLAYTEKPDDGFRXVDDHKHDTPTPQDWALEGFERADVNQADIAPLMSTLV

SEQ ID NO: 100654 - protein, 84 aa, Setaria italica
  Transcript Sequence Number=SeqID_34680
IGLRENNLFLSGRMFLPGSEYRMLLLGLHGSIFAGGVWVQIDSVWPAVWRRVAIWPGRSSLTSASEFGSVHGLLRSRQGSRLCS

SEQ ID NO: 100655 - protein, 242 aa, Setaria italica
  Transcript Sequence Number=SeqID_34681
  Gene Ontology: Mol. function=nutrient reservoir activity; Cellular component=chloroplast; Biological process=response to DNA damage stimulus
  Homolog annotation: Hit_ID=B6TS69; Match level="QueryCoverage=100%, HitCoverage=66%, E-value=1e-103, Identity=65%"; Hit description =Polygalacturonase inhibitor 2
  Pfam annotation: Domain name=LRR_1; Domain location=102-124; Score =10.9; E_value=2.5; Accession=PF00560.25; Description=Leucine Rich Repeat
  Pfam annotation: Domain name=LRR_1; Domain location=126-149; Score =12.7; E_value=1.1; Accession=PF00560.25; Description=Leucine Rich Repeat
  Pfam annotation: Domain name=LRR_1; Domain location=150-169; Score =3.4; E_value=70; Accession=PF00560.25; Description=Leucine Rich Repeat
  Pfam annotation: Domain name=LRR_1; Domain location=174-196; Score =6.3; E_value=19; Accession=PF00560.25; Description=Leucine Rich Repeat
  Pfam annotation: Domain name=LRR_1; Domain location=198-221; Score =5.9; E_value=22; Accession=PF00560.25; Description=Leucine Rich Repeat
  Pfam annotation: Domain name=LRR_1; Domain location=30-52; Score =14.4; E_value=0.49; Accession=PF00560.25; Description=Leucine Rich Repeat
  Pfam annotation: Domain name=LRR_1; Domain location=54-76; Score =19.5; E_value=0.014; Accession=PF00560.25; Description=Leucine Rich Repeat
  Pfam annotation: Domain name=LRR_1; Domain location=6-28; Score=11.6; E_value=1.9; Accession=PF00560.25; Description=Leucine Rich Repeat
  Pfam annotation: Domain name=LRR_1; Domain location=78-100; Score =2.1; E_value=1.2e+02; Accession=PF00560.25; Description=Leucine Rich Repeat
  Pfam module annotation: Pfam domain module=LRR_1::LRR_1::LRR_1::LRR _1::LRR_1::LRR_1::LRR_1::LRR_1::LRR_1; Domain location=102-124::126 -149::150-169::174-196::198-221::30-52::54-76::6-28::78-100
ATDLPYLRILELPGNRLTGGIPPAVGSLSRLTVLNLADNQLTGAVPGSITSLASLKHLDLANNQLTGRVPADLGKLVMLSRALLGRNRLSGPIPASVSSMPRLADLDLSENQLTGAIPGGLGSAHVLTSLYLGGNRLSGGIPASLLRNSGLGILNLSQNALEGAVPDVFTPQSYFMLLDLSRNRLSGGVPRSLASAAYVGHLDLSHNRLCGAIPAGPPFNHFDAESFGGNSCLCGGPLGKCT

SEQ ID NO: 100656 - protein, 243 aa, Setaria italica
  misc_feature (38)..(38): Xaa can be any naturally occurring amino acid
  misc_feature (100)..(100): Xaa can be any naturally occurring amino acid
  Transcript Sequence Number=SeqID_34682
  Homolog annotation: Hit_ID=Q9AS82; Match level="QueryCoverage=98%, HitCoverage=25%, E-value=3e-59, Identity=52%"; Hit description =P0028E10.10 protein
SNSSMKEAGSQPRLSSPFGHQGVAAAVNSHEEPISCKXISPSINYSTRKQNQNLECQSEISLIDLVSYEGSKNKSTARPARELHASFSVKGLGHIKMETXSPFTEANQKGFTLPPKAIRSTYKAKRSIPFDVTKALDSMNSINMLKEQRLSAKMGSTFNESGFEKSKQFNCYFPGSSENHNSDLYLEDEAMFCEPQPKMEWQSKHMRSDGNLVDEGSDRLWRIDQFNSEDHFPNQREEHFDTS

SEQ ID NO: 100657 - protein, 102 aa, Setaria italica
  Transcript Sequence Number=SeqID_34683
  Gene Ontology: Biological process=cell redox homeostasis
  Homolog annotation: Hit_ID=B9SA45; Match level="QueryCoverage=95%, HitCoverage=19%, E-value=3e-28, Identity=60%"; Hit description =Thioredoxin domain-containing protein, putative
FPFLWSKVDCTEEADLCRRHHIQGYPSIRVFRKGSDVKENQGHHDHESYYGERDTESLVAAIETYVANIPKEAHVLALEDKSNKTVDPAKRPAPVTGGCSNL

SEQ ID NO: 100658 - protein, 108 aa, Setaria italica
  Transcript Sequence Number=SeqID_34684
  Subcellular localization annotation: CTP_CleavageSite=72; ConfidenceScore=5.01e-01
THRIKCRLFLPFLGSCSSCWVSSLAYTKLLVQGFGVGWNLGQFQQFLTVKLNCCSLKCLLTAVVFYSFPALSCEFASVDVSDVLGTVRYIFASYVFFFVLSFRIWQYY

SEQ ID NO: 100659 - protein, 232 aa, Setaria italica
  Transcript Sequence Number=SeqID_34685
  Gene Ontology: Mol. function=isomerase activity; Cellular component =endoplasmic reticulum lumen; Biological process=cell redox homeostasis
  Homolog annotation: Hit_ID=B9SA45; Match level="QueryCoverage=99%, HitCoverage=48%, E-value=1e-104, Identity=78%"; Hit description =Thioredoxin domain-containing protein, putative
  Pfam annotation: Domain name=Thioredoxin; Domain location=140-232; Score=10.0; E_value=3.3e-05; Accession=PF00085.12; Description =Thioredoxin
MISSKLKSVDFYRKIPRDLTEASLSGAGLSIVAALAMMFLFGMELSSYLAVNTTTSVIVDRSSDGEFLRIDFNISFPALSCEFASVDVSDVLGTNRLNITKTVRKFSIDRNLVPTGSEFHPGPIPIVSKHGDDVEEVVDGSVPLSSRNFDSYSHQYPVLVVNFYAPWCYWSNRLKPSWEKTATIIRERYDPEMDGRILLGKVDCTEEADLCRRHHIQGYPSIRVFRKGSDVK

SEQ ID NO: 100660 - protein, 493 aa, Setaria italica
  misc_feature (104)..(104): Xaa can be any naturally occurring amino acid
  Transcript Sequence Number=SeqID_34686
  Gene Ontology: Mol. function=isomerase activity; Cellular component =ER-Golgi intermediate compartment membrane; Biological process=cell redox homeostasis
  Homolog annotation: Hit_ID=B9SA45; Match level="QueryCoverage=99%, HitCoverage=99%, E-value=0.0, Identity=71%"; Hit description =Thioredoxin domain-containing protein, putative
  Pfam annotation: Domain name=DUF1692; Domain location=283-474; Score =196.2; E_value=9.1e-56; Accession=PF07970.4; Description=Protein of unknown function (DUF1692)
  Pfam annotation: Domain name=Thioredoxin; Domain location=150-269; Score=43.4; E_value=8.6e-10; Accession=PF00085.12; Description =Thioredoxin
  Pfam module annotation: Pfam domain module=DUF1692::Thioredoxin; Domain location=283-474::150-269
MISSKLKSVDFYRKIPRDLTEASLSGAGLSIVAALAMMFLFGMELSSYLAVNTTTSVIVDRSSDGEFLRIDFNISFPALSCEFASVDVSDVLGTLISYLLNPGXNRLNITKTVRKFSIDRNLVPTGSEFHPGPIPIVSKHGDDVEEVVDGSVPLSSRNFDSYSHQYPVLVVNFYAPWCYWSNRLKPSWEKTATIIRERYDPEMDGRILLGKVDCTEEADLCRRHHIQGYPSIRVFRKGSDVKENQGHHDHESYYGERDTESLVAAMETYVANIPKEAHVLALEDKSNKTVDPAKRPAPVTGGCRIEGFVRVKRVPGSVVISARSGSHSFDPSQINVSHYVTQFSFGKKLSPRMFYEFVRLTPYLRGYHDRLAGQSYMVKHGEVNANVTIEHYLQIVKTELVTLRSSKELKVLEEYEYTAHSSLVHSFYVPVVKFHFEPSPMQVLVTEVPRSFSHFITNVCAIIGGVFTVAGILDSIFHNTLRMVKKVELGKNI

SEQ ID NO: 100661 - protein, 162 aa, Setaria italica
  misc_feature (27)..(27): Xaa can be any naturally occurring amino acid
  Transcript Sequence Number=SeqID_34687
  Gene Ontology: Mol. function=methyltransferase activity; Cellular component=cytoplasm
  Homolog annotation: Hit_ID=B9S2X8; Match level="QueryCoverage=99%, HitCoverage=39%, E-value=9e-45, Identity=59%"; Hit description=S -adenosyl-methyltransferase mraw, putative
  Pfam annotation: Domain name=Methyltransf_5; Domain location=1-162; Score=-89.2; E_value=1.2e-06; Accession=PF01795.11; Description=MraW methylase family
IVKAREMGGLHSTGDLVKLIQRKCNVXKGRQGWIKTATRVFQALRIAVNDELRVLEDSLHSSFDCLATGGRLAVISFHSLEDRIVKKTFLELIHGGEADDEEDDEDDLALPDIDDEDEPWFNQRLQGRNGIVLTKRPITPSQEEEKLNQRCRSAKLRVIQKA

SEQ ID NO: 100662 - protein, 80 aa, Setaria italica
  Transcript Sequence Number=SeqID_34688
  Gene Ontology: Mol. function=protein serine/threonine kinase activity; Biological process=protein amino acid phosphorylation
  Homolog annotation: Hit_ID=B9RC79; Match level="QueryCoverage=81%, HitCoverage=5%, E-value=4e-16, Identity=56%"; Hit description =Leucine-rich repeat receptor protein kinase EXS, putative
RRQRWELVGWVAQMRAMGRREEVLDHRLRGNGDEAQMLYVLDLACLCVDAAPFSRPAIQEVVSWLENVDTIVKTSEDVKD

SEQ ID NO: 100663 - protein, 70 aa, Setaria italica
  Transcript Sequence Number=SeqID_34689
PAHSRYSCGQFLRQTEPEYYKERQMCRVFEVKNITVTHALNNIAHTLGINHSFSGVTRNFQDATQRNFYL

SEQ ID NO: 100664 - protein, 62 aa, Setaria italica
  Transcript Sequence Number=SeqID_34690
  Subcellular localization annotation: CTP_CleavageSite=4; ConfidenceScore=5.18e-01
THTTATPSSPSPSSPPNNQMQVYTQLHLDFIISSIYHSHRSTPAQNTLASIDLLNRKRRRRG

SEQ ID NO: 100665 - protein, 172 aa, Setaria italica
  Transcript Sequence Number=SeqID_34691
RATRDARRRTLRWRRARRRDLAAWRRSISNGHHRDGDRCLLASKPQPSPSSLPLALGFLLPGHRFLFRRLVHGLAEIWIYSCARPAGHRCTICEIQQQPRPSCESLIGIYLESGGCSHRCHPLDLIGICLYSSMTSICMWYWHLFGDVGMVCMLGSCCLPRSIQYSFLCLRA

SEQ ID NO: 100666 - protein, 58 aa, Setaria italica
  Transcript Sequence Number=SeqID_34692
  Homolog annotation: Hit_ID=B9ST47; Match level="QueryCoverage=98%, HitCoverage=13%, E-value=1e-11, Identity=54%"; Hit description =Electron transporter, putative
LLEGLPRARVWCAGCAGVRFVMCRDCNGSRKVLDTERKETTKCDECNENGLVRCPICT

SEQ ID NO: 100667 - protein, 35 aa, Setaria italica
  Transcript Sequence Number=SeqID_34693
  Gene Ontology: Mol. function=metal ion binding
  Homolog annotation: Hit_ID=B9RVW9; Match level="QueryCoverage=97%, HitCoverage=5%, E-value=1e-12, Identity=91%"; Hit description =Protein binding protein, putative
  Pfam annotation: Domain name=zf-C3HC4; Domain location=2-28; Score =8.7; E_value=0.01; Accession=PF00097.17; Description=Zinc finger, C3HC4 type (RING finger)
YMVAPCEHIFHSGCLQRWMDIKMECPTCRRSLPPA

SEQ ID NO: 100668 - protein, 152 aa, Setaria italica
  misc_feature (100)..(100): Xaa can be any naturally occurring amino acid
  Transcript Sequence Number=SeqID_34694
  Gene Ontology: Mol. function=metal ion binding
  Homolog annotation: Hit_ID=B9RVW9; Match level="QueryCoverage=88%, HitCoverage=27%, E-value=5e-60, Identity=75%"; Hit description =Protein binding protein, putative
TNRLEGLIESPAVGDDGECFSPILLNATSLNVEVYYNKAVNYTLMVTFISFLQVLLLIRQMEHSNTQSGAAKVSILMIGQQAIMDAYLCLLHLTAGILVXYLLAIWKASRPLNSGEGWEIMRRELSVLYSRFCKYLLHSSDFFTLRIMPVGQ

SEQ ID NO: 100669 - protein, 61 aa, Setaria italica
  Transcript Sequence Number=SeqID_34695
  Gene Ontology: Mol. function=metal ion binding
  Homolog annotation: Hit_ID=B9RVW9; Match level="QueryCoverage=67%, HitCoverage=7%, E-value=7e-17, Identity=82%"; Hit description =Protein binding protein, putative
  Pfam annotation: Domain name=zf-C3HC4; Domain location=17-54; Score =23.5; E_value=0.00021; Accession=PF00097.17; Description=Zinc finger, C3HC4 type (RING finger)
ARNKAARTKIVLKQKHCCLDTQRTSEYMVAPCEHIFHSGCLQRWMDIKMECPTCRRSLPPA

SEQ ID NO: 100670 - protein, 195 aa, Setaria italica
  Transcript Sequence Number=SeqID_34696
  Gene Ontology: Mol. function=metal ion binding
  Homolog annotation: Hit_ID=B9RVW9; Match level="QueryCoverage=88%, HitCoverage=30%, E-value=5e-59, Identity=64%"; Hit description =Protein binding protein, putative
LVGIALAPPLAAALRPLRERVPSRGAATSAGSWGDEHAFFKRDENDIGPYSWNITGTYKGSWAFAGATNGSSRFLEFVKSKGDSVLELLSTPTKISGVHYVQGSITFHDVIDNAHDHGVAQIRLEGVYIWPFRQLRMVANSGADGEPLQEEDYFFSNPYHLLQIFSSQVFQESSEEKNRRKNSLTYDMEKHCNTE

SEQ ID NO: 100671 - protein, 414 aa, Setaria italica
  Transcript Sequence Number=SeqID_34697
  Gene Ontology: Mol. function=metal ion binding; Cellular component =integral to membrane; Biological process=ubiquitin-dependent protein catabolic process via the multivesicular body pathway
  Homolog annotation: Hit_ID=B9RVW9; Match level="QueryCoverage=100%, HitCoverage=72%, E-value=0.0, Identity=73%"; Hit description=Protein binding protein, putative
  Pfam annotation: Domain name=zf-C3HC4; Domain location=364-407; Score= 35.2; E_value=2.6e-07; Accession=PF00097.17; Description=Zinc finger, C3HC4 type (RING finger)
MVANSGADGEPLQEEDYFFSNPYHLLQIFSSQVFQESSEEKNRRKNSLTYDMEKHCNTEIAAKVVRVSSNPNDGEHEKYRLEGLIESPAVGDDGECFSPILLNATSLNVEVYYNKAVNYTLMVTFISFLQVLLLIRQMEHSNTQSGAAKVSILMIGQQAIMDAYLCLLHLTAGILVESLFNAFATAAFFKFVVFSIFEMRYLLAIWKASRPLNSGEGWEIMRRELSVLYSRFYGILLGGILLMYELHNFLRPLLLLMYSFWVPQIVTNIIRDTRKPLHPQYILGMTVTRLAIPLYIFGCPSNFMRIEPDKKWCIVVTVFMGIQAAVLLLQHYLGSRCFIPRQILPEKYCYHRKVEDSTNQPIDCVICMTTIDLTQRTSEYMVAPCEHIFHSGCLQRWMDIKMECPTCRRSLPPA

SEQ ID NO: 100672 - protein, 76 aa, Setaria italica
  Transcript Sequence Number=SeqID_34698
  Subcellular localization annotation: CTP_CleavageSite=55; ConfidenceScore=5.26e-01
HLPYPRAAGPPSAPSRAPRQPRPGPWPDRGRRGSSLPLQWHTHHPPSGSTPEPCVCSLDVGQTEQLQLVLGKRNME

SEQ ID NO: 100673 - protein, 69 aa, Setaria italica
  Transcript Sequence Number=SeqID_34699
  Homolog annotation: Hit_ID=B6SSV3; Match level="QueryCoverage=55%, HitCoverage=13%, E-value=2e-14, Identity=94%"; Hit description =Fasciclin-like arabinogalactan protein 7
STSWIWSCGDRPLSTPALSLSKASLADALPPTDVNKALKDDQFSEFKQLLHDTRVDTQINAQLTDSYNG

SEQ ID NO: 100674 - protein, 89 aa, Setaria italica
  Transcript Sequence Number=SeqID_34700
  Homolog annotation: Hit_ID=B6TE21; Match level="QueryCoverage=71%, HitCoverage=35%, E-value=1e-22, Identity=79%"; Hit description =Fasciclin-like arabinogalactan protein 7
EHELDLVLRRQAVEHAGPYRYDIKRAGNNVNISTGVNSMLLGSPVSKDFPLAVYPVDKVPLPYELFGPKPPTPAPAPAPAPTKSKTKKK

SEQ ID NO: 100675 - protein, 165 aa, Setaria italica
  misc_feature (129)..(129): Xaa can be any naturally occurring amino acid
  Transcript Sequence Number=SeqID_34701
  Gene Ontology: Cellular component=anchored to membrane
  Homolog annotation: Hit_ID=B6SSV3; Match level="QueryCoverage=77%, HitCoverage=47%, E-value=4e-55, Identity=81%"; Hit description =Fasciclin-like arabinogalactan protein 7
  Pfam annotation: Domain name=Fasciclin; Domain location=10-136; Score= 28.3; E_value=4.8e-06; Accession=PF02469.14; Description=Fasciclin domain
REDGEPVVAVRQLRVDLGVHAQLTDSYNGLTIFAPTNDAFDKLKAGVLNGLSPQDQIQLVLYCVLPRFYSLSMLGTLNGKVNTQGSGHDGPYRYDIKRAGNNVNISTGVNSMLLGSPVSKDFPLAVYPXVDKVPLPYELLSVPLSPSLPRSSRRSRSYRFVPFTF

SEQ ID NO: 100676 - protein, 264 aa, Setaria italica
  Transcript Sequence Number=SeqID_34702
  Gene Ontology: Cellular component=anchored to membrane
  Homolog annotation: Hit_ID=B6SSV3; Match level="QueryCoverage=56%, HitCoverage=54%, E-value=1e-77, Identity=91%"; Hit description =Fasciclin-like arabinogalactan protein 7
  Pfam annotation: Domain name=Fasciclin; Domain location=54-187; Score= 51.6; E_value=3e-12; Accession=PF02469.14; Description=Fasciclin domain
MAASPRLAILVVLLAASSALAAAQKAKAKPASGPAGAADALPPTDVNKALKDDQFSEFKQLLHDTRVDTQINAQLTDSYNGLTIFAPTNDAFDKLKAGVLNGLSPQDQIQLVLYCVLPRFYSLSMLGTLNGKVNTQGSGHDGPYRYDIKRAGNNVNISTGVNSMLLGSPVSKDFPLAVYPVDKVPLPYELFGPKPPTPAPAPAPAPTKSKTKKKHKKSTGIAEPPVADDSTASDEDKKSAAVPGAGVARWVAAALAAAVVGSLF

SEQ ID NO: 100677 - protein, 57 aa, Setaria italica
  Transcript Sequence Number=SeqID_34703
LESTSAVSSGAHAFISDGDLALVLGLTGELGIGREESSYNLCSTRSEVRVNGGSTRL

SEQ ID NO: 100678 - protein, 141 aa, Setaria italica
  Transcript Sequence Number=SeqID_34704
RPGAPRRPDHRRPGRRLHQQPRHVPGRLRRRHGQDGRHRSAHRHRRHHPDQLQGRQLIPSVSIHRWARCLEPSFLDWGVDRVIKLYVMRGLVECCSASDKDGSIVTGCSCVRLSRVLVYIFLVPPLLLLYFFLLVLMMRDI

SEQ ID NO: 100679 - protein, 102 aa, Setaria italica
  misc_feature (80)..(80): Xaa can be any naturally occurring amino acid
  Transcript Sequence Number=SeqID_34705
  Gene Ontology: Mol. function=hydrolase activity, acting on glycosyl bonds; Biological process=polysaccharide catabolic process
  Homolog annotation: Hit_ID=C0P5G0; Match level="QueryCoverage=90%, HitCoverage=15%, E-value=3e-30, Identity=69%"; Hit description=Beta -amylase
EPPTRRVAAVTYLRLSDELLAGNNFRVFRTFVRKMHADLDYCPDPARYGRPMRPLERSSPEIPMERLLEATAPAPALPFXPETDMSVGGGLAEAIDWVLGKI

SEQ ID NO: 100680 - protein, 366 aa, Setaria italica
  misc_feature (9)..(9): Xaa can be any naturally occurring amino acid
  misc_feature (22)..(22): Xaa can be any naturally occurring amino acid
  misc_feature (65)..(65): Xaa can be any naturally occurring amino acid
  misc_feature (362)..(362): Xaa can be any naturally occurring amino acid
  Transcript Sequence Number=SeqID_34706
  Gene Ontology: Mol. function=catalytic activity; Cellular component =plasma membrane; Biological process=multicellular organismal development
  Homolog annotation: Hit_ID=Q6ZGY0; Match level="QueryCoverage=90%, HitCoverage=55%, E-value=1e-117, Identity=67%"; Hit description =Probable protein phosphatase 2C 26
  Subcellular localization annotation: CTP_CleavageSite=25; ConfidenceScore=5.57e-01
PYSSAFHTXSSSFSSAPLPALXNLSSRAASSLLLGPIDRGPQLSGPLDQAVPFSGPLPAKPTKPXPSSSSRGFSRRFRKPSFGSLRRSVSEKNRPCVVPLRREDGVQWAHGRAGEDRVHVVVSEDQRWLFVGIYDGFNGPEAPDFLVANLYRFLLRELRGIFYEEADPDSKRLWQFLADGDDDDSELDFSGSGRFALSLARLKERRHPIWAHAAAAGDGQSGREWEVKRLTAAPAVRDHSAVLAALTRALAATESAYLDMTNQSMGTHPELAVTGACLLVALLRDDDVYVMNLGDSRAIVAQRRDDDDDCVLGTMRVEDIGVALETETRIHGYSAIGLEALQLSTDHSTSIEEEVQRIKREXPDDD

SEQ ID NO: 100681 - protein, 81 aa, Setaria italica
  Transcript Sequence Number=SeqID_34707
NLYLQLHLRRVGVEPRPDLVQGFTQNGSSGSSKDQIEGRDGFGDSPGDNGHRGTGGSDHDVRYCGSESQDSDEPIPTSTMY

SEQ ID NO: 100682 - protein, 345 aa, Setaria italica
  Transcript Sequence Number=SeqID_34708
  Gene Ontology: Mol. function=CD4 receptor binding; Cellular component= trans-Golgi network transport vesicle
  Homolog annotation: Hit_ID=B9RBS1; Match level="QueryCoverage=96%, HitCoverage=81%, E-value=1e-137, Identity=70%"; Hit description =Maspardin, putative
  Pfam annotation: Domain name=Abhydrolase_1; Domain location=71-270; Score=27.6; E_value=3.3e-05; Accession=PF00561.12; Description =alphabeta hydrolase fold
MKGVTGGAAAPGDYVYFKSIVPLHKISIGQKLWRYYDFGPKVVPSLVCIPGIAGTADVYYKQIMSLCMKGYRVISIDVPQVWNHHEWIHSFEKFLDSMNIHHVHIYGTSLGGFLAQIFAQHRPRRVKSLVLSNTFLETHKFAAAMPWSPVVNWTPSFLLKRYLLTGIRDGPHEPFIADSVDFVVGQVETLSRDDLSSRLMLNVNVSSVGSLMLPDSLITIMDTNDYSAVPQQLKDQLNERYPGARRAVLKTGGDFPFLSRPDEVNLYLQLHLRRVGVEPRPDLVQGFTQNGSSGSSKDQIEGRDGFGDSPGDNGHRGTGGSDHDVRYCGSESQDSDEPIPTSTMY

SEQ ID NO: 100683 - protein, 107 aa, Setaria italica
  misc_feature (4)..(4): Xaa can be any naturally occurring amino acid
  misc_feature (13)..(13): Xaa can be any naturally occurring amino acid
  Transcript Sequence Number=SeqID_34709
  Gene Ontology: Mol. function=transferase activity
  Homolog annotation: Hit_ID=Q5QPY3; Match level="QueryCoverage=99%, HitCoverage=23%, E-value=6e-21, Identity=49%"; Hit description =Glycosyltransferase (Fragment)
LLLXSRKSTRAFXNAGAIARAATALGYEVVVSEPSRQHAAALASFARLVNSCDVLVGVHGAGLANLVFLPAGAVVVQVVPLGGLDAMAAEDFGAPARDAGLRYVHYA

SEQ ID NO: 100684 - protein, 53 aa, Setaria italica
  Transcript Sequence Number=SeqID_34710
YHCEQGENEKLSGTLPFLSYASTVFGKNINKCSMVQQSQHKHFYVHLHSTEIS

SEQ ID NO: 100685 - protein, 84 aa, Setaria italica
  Transcript Sequence Number=SeqID_34711
  Gene Ontology: Mol. function=nucleotide binding; Cellular component =integral to membrane; Biological process=transport
  Homolog annotation: Hit_ID=C3SA41; Match level="QueryCoverage=97%, HitCoverage=18%, E-value=7e-24, Identity=65%"; Hit description =Ureide permease 2-like protein 2
MAVDSVVACASSPLLAWDKVIAGGALKMLVIEDKAGAIALMLASLLFLGTWPALLTLLERRGRLPQHTYLDYSLTNFLAAVLIA

SEQ ID NO: 100686 - protein, 163 aa, Setaria italica
  misc_feature (85)..(85): Xaa can be any naturally occurring amino acid
  Transcript Sequence Number=SeqID_34712
  Gene Ontology: Mol. function=nucleotide binding; Cellular component =integral to membrane; Biological process=transport
  Homolog annotation: Hit_ID=C3SA41; Match level="QueryCoverage=86%, HitCoverage=28%, E-value=4e-63, Identity=83%"; Hit description =Ureide permease 2-like protein 2
MDHVLACASSPLTCHEVLEGPLLSSLSSVRTGLTMYVIEDKGGAIALMLASLLFLGTWPAVLTLLERRGRLPQHTYLDYSITNLXLAAVLIALTFGQLGNSKDGMPNFFTQLSQDNWPSVLFAMAGGVVLSVGNLSTQYAWDVIVGTYYGRTRRLIQDYQDNR

SEQ ID NO: 100687 - protein, 323 aa, Setaria italica
  Transcript Sequence Number=SeqID_34713
  Gene Ontology: Mol. function=nucleotide binding; Cellular component =integral to membrane; Biological process=transport
  Homolog annotation: Hit_ID=C3SA41; Match level="QueryCoverage=97%, HitCoverage=64%, E-value=1e-153, Identity=84%"; Hit description =Ureide permease 2-like protein 2
  Pfam annotation: Domain name=DUF6; Domain location=48-186; Score= -0.7; E_value=0.084; Accession=PF00892.12; Description=Integral membrane protein DUF6
  Pfam annotation: Domain name=FAE_3-kCoA_syn1; Domain location=43-322; Score=465.7; E_value=6.6e-137; Accession=PF07168.3; Description=Fatty acid elongase 3-ketoacyl-CoA sy
  Pfam module annotation: Pfam domain module=DUF6::FAE_3-kCoA_syn1; Domain location=48-186::43-322
PSYSSDKHCHEVLEGPLLSSLSSVRTGLTMYVIEDKGGAIALMLASLLFLGTWPAVLTLLERRGRLPQHTYLDYSITNFLAAVLIALTFGQLGNSKDGMPNFIPQLSQDNWPSVLFAMAGGVVLSVGNLSTQYAWAYVGLSVTEVISSSMVVVIGTTLNYFLDNRINRAEILFTGVACFLVAVILGSAVHASNATDNAEKLNASNKLGANGSVEPSKGVLDKDTPKDLENGASGTKHVTKAEAGTAEYLIELEERRSIKVFGSSTFIGLGIVFFSGVCFSLFSPAFNLATNDQWHTLKDGVPHLVVYTAFFYFSISCFVIGIG

SEQ ID NO: 100688 - protein, 440 aa, Setaria italica
  misc_feature (224)..(224): Xaa can be any naturally occurring amino acid
  Transcript Sequence Number=SeqID_34714
  Gene Ontology: Mol. function=nucleotide binding; Cellular component =integral to membrane; Biological process=transport
  Homolog annotation: Hit_ID=B6U6B9; Match level="QueryCoverage=100%, HitCoverage=100%, E-value=1e-174, Identity=71%"; Hit description =Ureide permease 2
  Pfam annotation: Domain name=DUF1123; Domain location=77-171; Score= -51.8; E_value=0.023; Accession=PF06561.3; Description=Protein of unknown function (DUF1123)
  Pfam annotation: Domain name=DUF2074; Domain location=33-395; Score= -206.6; E_value=0.086; Accession=PF09847.1; Description=Predicted permease (DUF2074)
  Pfam annotation: Domain name=FAE_3-kCoA_syn1; Domain location=45-388; Score=669.5; E_value=3e-198; Accession=PF07168.3; Description=Fatty acid elongase 3-ketoacyl-CoA sy
  Pfam annotation: Domain name=OPT; Domain location=11-429; Score= -286.3; E_value=0.084; Accession=PF03169.7; Description=OPT oligopeptide transporter protein
  Pfam module annotation: Pfam domain module=DUF1123::DUF2074::FAE_3 -kCoA_syn1::OPT; Domain location=77-171::33-395::45-388::11-429
MDHVLACASSPLTCHEVLEGPLLSLPVLCLTMYVIEDKGGAIALMLASLLFLGTWPALLTLLERRGRLPQHTYLDYSLTNFLAAVLIALTFGQLGNLRYRFLRSVVGKPNFIPQLSQDNWPSVLFAMAGGVALSVGNLSTQYAWAYVGLSVTEVISCSMVVVIGTTMNYFLDNRINRAEILFPGVACFLVAVILGSAVHASNAADNEEKLRASESEEPSKEALXKEYAPKDLENGASGTKHVTKAEAGTAEFLIELEERRSIKVSRSSTFFGLGIVFFSGVCLSLFSPAFNLATNDQWDALPAGVPHLAVYTAFFYFSISCFVINVVLNILLLYRPMAGAPKSSFRAYINDWKGRQWALLAGLIGGFGNGLQFMGGQAAGYAAADAVQALPLVSTFWGVVLFGEYRRSSRRTYILLGFMLFMFITAVAVLMASSGHRGNE

SEQ ID NO: 100689 - protein, 188 aa, Setaria italica
  Transcript Sequence Number=SeqID_34715
  Gene Ontology: Mol. function=prephenate dehydratase activity; Biological process=L-phenylalanine biosynthetic process
  Homolog annotation: Hit_ID=B6UA96; Match level="QueryCoverage=86%, HitCoverage=38%, E-value=8e-58, Identity=75%"; Hit description=P -protein
  Pfam annotation: Domain name=Collagen; Domain location=46-104; Score=- 33.1; E_value=0.023; Accession=PF01391.10; Description=Collagen triple helix repeat (20 copies)
  Pfam annotation: Domain name=PDT; Domain location=98-186; Score= -18.5; E_value=3.6e-08; Accession=PF00800.10; Description=Prephenate dehydratase
  Pfam module annotation: Pfam domain module=Collagen::PDT; Domain location=46-104::98-186
MAYTSSLHLPKLLLLPNPRRTRHRPSFVPAAAAKASGVNGHAPPEKPAPNGKAHINGVNGKKGVNGVNGKKGVNGHADRIHLTVSTGGGGQDGTGLRVAFQGAPGAYSEFAAKTALPGCDTVPCRAFADALAAVERGGADRAILPVESTMEGTALRNYDLLLRHDLVVAQEINLFVHYCLLAMPGVRA

SEQ ID NO: 100690 - protein, 54 aa, Setaria italica
  Transcript Sequence Number=SeqID_34716
CYCAAVPSTRSCSALFLIIYCSRAVADTCSRGIDLSPFLLVQQTWHPQQTARQA

SEQ ID NO: 100691 - protein, 85 aa, Setaria italica
  Transcript Sequence Number=SeqID_34717
PRSGGTGGGARPHGMMEPQVVDLEDDSINFWASLGVSPHVDQMPLHNVHIVDHQAQPPPAAAAAQPQSVCRDLFPVESDAWTEPR

SEQ ID NO: 100692 - protein, 192 aa, Setaria italica
  Transcript Sequence Number=SeqID_34718
  Homolog annotation: Hit_ID=Q7Y194; Match level="QueryCoverage=94%, HitCoverage=39%, E-value=1e-87, Identity=82%"; Hit description =Membrane associated salt-inducible protein, putative
HLRDLILAQRTGSLLVRDLEKEVGFVQKWNFLSLIERHPNIFHVSGGSASREPIAVTLTEKARRISNEEDRARELMEPILVKNLRKLLMMSMDCQIPLEKIELIQSELGLPKNFKNNLLPRYPEFFSIRDVKGLDYLCLENWDSSLAVTVREEKINFEGFQIGCRGIPKDGNILGPFAFKLKYPAGFRPKPE

SEQ ID NO: 100693 - protein, 80 aa, Setaria italica
  Transcript Sequence Number=SeqID_34719
  Homolog annotation: Hit_ID=Q7Y194; Match level="QueryCoverage=43%, HitCoverage=7%, E-value=9e-11, Identity=88%"; Hit description =Membrane associated salt-inducible protein, putative
MTGRRLAGHEYLSPRTIYFIQWKSMSSFSAGHGRRPKKKLYHREPGLDKAMDLQKKPALLLHLRDLLFSVCTGVSYVRDL

SEQ ID NO: 100694 - protein, 82 aa, Setaria italica
  Transcript Sequence Number=SeqID_34720
VVVTSPTNSYQLLSSPSELLHCQLFFNTTHANLTIPSINKNHTIESWKFLRLRWMTMFTIVTLNFLHIGTDDNLQILFICRL

SEQ ID NO: 100695 - protein, 38 aa, Setaria italica
  misc_feature (25)..(25): Xaa can be any naturally occurring amino acid
  Transcript Sequence Number=SeqID_34721
  Gene Ontology: Mol. function=oxidoreductase activity; Cellular component=plasma membrane; Biological process=negative regulation of transcription
  Homolog annotation: Hit_ID=B9RXX3; Match level="QueryCoverage=100%, HitCoverage=18%, E-value=3e-10, Identity=81%"; Hit description =Flavoprotein wrbA, putative
MATKIYIVYYSTYGHVATLAEEIKXGAASVDGVEVKLW

SEQ ID NO: 100696 - protein, 64 aa, Setaria italica
  Transcript Sequence Number=SeqID_34722
  Homolog annotation: Hit_ID=B6SRJ9; Match level="QueryCoverage=100%, HitCoverage=34%, E-value=2e-25, Identity=89%"; Hit description=F-box domain containing protein
MSASDLPDELWARVLELGAASSALGFRDLCCLAIASRRLGRLSLHPALWSALFSRDFPSQSQPS

SEQ ID NO: 100697 - protein, 124 aa, Setaria italica
  Transcript Sequence Number=SeqID_34723
  Homolog annotation: Hit_ID=Q01MT7; Match level="QueryCoverage=62%, HitCoverage=37%, E-value=1e-18, Identity=55%"; Hit description =OSIGBa0131J24.6 protein
  Subcellular localization annotation: CTP_CleavageSite=61; ConfidenceScore=5.39e-01
MSWAAAAARKLAGISQSSDPPALTGGLLYRSYGSGSSGSRKRSLPWRVVSIGAISLAGGLVLSAVNDLAIFHGCTTKAIEKAADNPKVVEAIGVPIVRGPWYEASLEVGHRRRSVSCTFPVSGP

SEQ ID NO: 100698 - protein, 77 aa, Setaria italica
  misc_feature (9)..(9): Xaa can be any naturally occurring amino acid
  Transcript Sequence Number=SeqID_34724
  Gene Ontology: Mol. function=transition metal ion binding; Cellular component=perinuclear region of cytoplasm; Biological process =generation of precursor metabolites and energy
  Homolog annotation: Hit_ID=B6T383; Match level="QueryCoverage=94%, HitCoverage=33%, E-value=3e-37, Identity=97%"; Hit description =Cytoplasm protein
  Pfam annotation: Domain name=Cyt-b5; Domain location=1-74; Score =76.0; E_value=1.4e-19; Accession=PF00173.20; Description=Cytochrome b5-like HemeSteroid binding doma
FLLEEVKQXKTGDCIWTVLKGRVYNIAPYMKFHPGGVDMLMKAAGKDCTALFNKYHAWVNAEFLLEKCLVGFLDPNE

SEQ ID NO: 100699 - protein, 170 aa, Setaria italica
  Transcript Sequence Number=SeqID_34725
  Homolog annotation: Hit_ID=Q01MT7; Match level="QueryCoverage=74%, HitCoverage=60%, E-value=2e-33, Identity=50%"; Hit description =OSIGBa0131J24.6 protein
MVLKCRIDKNANRSYGSGSSGSRKRSLPWRVVSIGAISLAGGLVLSAVNDLAIFHGCTTKAIEKAADNPKVVEAIGVPIVRGPWYEASLEVGHRRRSVSCTFPVSGPHGSGSFQIEATRNGEDGMLSFLRHHDWEILTMEAHLHVPSDDEQQKTLVKVASNGSAQSGEPE

SEQ ID NO: 100700 - protein, 126 aa, Setaria italica
  Transcript Sequence Number=SeqID_34726
  Gene Ontology: Mol. function=aspartic-type endopeptidase activity; Biological process=proteolysis
MAQPVESSLLLFLVLLSPLVASAGIAKLNSSSPLFGIEFPPFNTAVSDTGCDGKLVVAEEARDEQTQPASLSPSLKLQMTRRAAAAGWTRKDSFLDSAQKDAVRIETMHRRAAARAGGERAYSPRR

SEQ ID NO: 100701 - protein, 81 aa, Setaria italica
  Transcript Sequence Number=SeqID_34727
NVQTENYINSHTFYLYLSGKEVILYVFCSISVCYGKFQMPFNLHSLLEINCQLVLDILDSTLHRSRTDIVHFLFRIMSSWE

SEQ ID NO: 100702 - protein, 336 aa, Setaria italica
  Transcript Sequence Number=SeqID_34728
  Gene Ontology: Mol. function=phosphoric diester hydrolase activity; Biological process=intracellular signaling cascade
  Homolog annotation: Hit_ID=B9SQL5; Match level="QueryCoverage=94%, HitCoverage=100%, E-value=1e-129, Identity=65%"; Hit description =Phospholipase C, putative
  Pfam annotation: Domain name=PI-PLC-X; Domain location=80-211; Score=- 17.5; E_value=0.00031; Accession=PF00388.11; Description =Phosphatidylinositol-specific phospholipase C, X domain
MAASNSSGKNGTNPLEAMGAFFAKQVDRRKLVTTEKQALATRLSSSGDTFPGSDHRPADRKKWMAELGADRVRVHQVVWPGTHDSATNKIGVPLVTRPFARCQSMSVYEQLSMGTRVIDVRVQEERRVCHGILATYPVDVVLDDVRRFLGETEQEVVILEVRTEFGHEDPPEFAKFLVEKLGEENLIPQDEAVFHKTIAELLPRRVICVWKPRKSPAPKPGEPLWSAGYLKDNWIDTDLPETKFESNVKFLGQQPPVADRRFFYRVENTVTPKADNPVLCVWPVTKRIHGYARLFIAEVFAKGLGDKLQVFSTDFIDGDFVDACAGVTKARVEGTA

SEQ ID NO: 100703 - protein, 408 aa, Setaria italica
  Transcript Sequence Number=SeqID_34729
  Gene Ontology: Mol. function=hydrolase activity, acting on acid anhydrides, in phosphorus-containing anhydrides; Cellular component =vacuole; Biological process=metabolic process
  Homolog annotation: Hit_ID=Q9SD77; Match level="QueryCoverage=80%, HitCoverage=24%, E-value=1e-130, Identity=69%"; Hit description =Putative helicase
  Pfam annotation: Domain name=DEAD; Domain location=159-310; Score =103.6; E_value=6.9e-28; Accession=PF00270.21; Description=DEADDEAH box helicase
  Pfam annotation: Domain name=ResIII; Domain location=155-305; Score= -21.2; E_value=0.0032; Accession=PF04851.7; Description=Type III restriction enzyme, res subunit
  Pfam module annotation: Pfam domain module=DEAD::ResIII; Domain location=159-310::155-305
KCFRNGELVEEQPASSSNDTMEKYSVQFDDLFKIAWEEDAANKALQEDDVQQSAEDEGTEGVGEQKVDALQDASETVTKLDAEKHEVDAISDDPGTQTDLDLMLSAEVQYARRESGVSGDDKPTQDGKVWALVGGDEDIVTNFYKLVPDMAIEFPFELDKFQKEAIYYLEKGESVFVAAHTSAGKTVVAEYAFALATKHCTRAVYTAPIKTISNQKYRDFSGKFDVGLLTGDVSIRPEATCLIMTTEILRSMLYRGADIIRDIEWVIFDEVHYVNDAERGVVWEEVIIMLPKHINIVLLSATVPNTVEFADWIGRTKQKKIRVTSTNKRPVPLEHCLFYSGEVYKICERDTFLTQGFREAKDSFKKKNSNKLGVKPGPKSGTPAVRAGTQGKNPDTSNRGRDQKYPKH

SEQ ID NO: 100704 - protein, 599 aa, Setaria italica
  misc_feature (298)..(298): Xaa can be any naturally occurring amino acid
  Transcript Sequence Number=SeqID_34730
  Gene Ontology: Mol. function=phosphoribosylformylglycinamidine synthase activity; Cellular component=chloroplast; Biological process='de novo' IMP biosynthetic process
  Homolog annotation: Hit_ID=B9SDY9; Match level="QueryCoverage=100%, HitCoverage=42%, E-value=0.0, Identity=76%"; Hit description =Phosphoribosylformylglycinamidine synthase, putative
  Pfam annotation: Domain name=AIRS; Domain location=95-230; Score =37.1; E_value=7.2e-08; Accession=PF00586.16; Description=AIR synthase related protein, N-terminal domain
  Pfam annotation: Domain name=AIRS_C; Domain location=269-427; Score =102.4; E_value=1.5e-27; Accession=PF02769.14; Description=AIR synthase related protein, C-terminal domain
  Pfam module annotation: Pfam domain module=AIRS::AIRS_C; Domain location=95-230::269-427
IERGREALEEINVRMGLAFDEQDIKYYTHLFRDDIKHNPTTVELFDIAQSNSEHSRHWFFNGKLVIDGETMARTMFQLVKSPLKANPNNSVIGFKDNSSAIKGYQVNQLHPALPGSTSPLSLMMRELDILFTAETHNFPCAVAPYPGAETGAGGRIRDTHATGQGSFIVASTAGYCVGNLRIEESYAPWEDSSFSYPSNLASPLQILIDASDGASDYGNKFGEPLIQGFTRNFGTRLPNGERREWLKPIMFSGAIGQIDHVHISKGDPEIGMLVVKIGGPAYRIGMGGGAASSMVSGXNDAELDFNAVQRGDAEMAQKLYRVIRACAEMGEKNPIISIHDQGAGGNCNVVKEIIYPKGAEIDIRSIVVGDHTLSVLEIWGAEYQEQDALLVKPESRRLLESLCERERVSMAVIGEIDGSGKIVLIDSVAVEQAKLNGLPPPPPVVDLELEKVLGDMPQKTFEFNRVTRLGEPLDIAPEVTLMDVLKRVLKLPSVCSKRFLTTKVDRCVTGLVAQQQTVGPLQLPLADVAVIAQTYTDLTGGACAIGEQPIKGLLNPRPWQDLLLGKRLTNLVWAKVTSLADVKASGNWMYAAKLDGEGA

SEQ ID NO: 100705 - protein, 663 aa, Setaria italica
  Transcript Sequence Number=SeqID_34731
  Gene Ontology: Mol. function=phosphoribosylformylglycinamidine synthase activity; Cellular component=chloroplast; Biological process='de novo' IMP biosynthetic process
  Homolog annotation: Hit_ID=Q84XV9; Match level="QueryCoverage=99%, HitCoverage=50%, E-value=0.0, Identity=75%"; Hit description =Phosphoribosylformylglycinamidine synthase
  Pfam annotation: Domain name=AIRS_C; Domain location=180-326; Score =88.5; E_value=2.4e-23; Accession=PF02769.14; Description=AIR synthase related protein, C-terminal domain
GNALNIQKGASKRFLTTKVDRCVTGLVAQQQTVGPLQLPLADVAVIAQTYTDLTGGACAIGEQPIKGLLNPKAMARLAVGEALTNLVWAKVTSLADVKASGNWMYAAKLDGEGADMYDAGVALADCMVELGIAIDGGKDSLSMAAQCDGEVVKAPGNLVISAYVTCPDITLTVTPDLKLGDDGVLLHIDLAKGKRRLGCSALTQAFDQIGNDCPDIEDVPYLKKVFDAVQELLSERLISAGHDISDGGLIVTVLEMAFAGNCGVNLNVGLGDYDLLQVLFAEELGLVLEVHSNDLDVVKQKLHVAGVSANVIGKVTTAPDIGLVVDGEVRLKEKTSDLRDLWEETSFQLEELQRLKSCVKLEKEGLKSRTSPSWRLSFTPKFTEKKILTTATKPKVAIIREEGSNSDREMAAAFHSAGFEPWDITMSDLLTQKISLTEFRGLAFVGGFSYADVLDSAKGWAASIRFNQPLIQQFQEFYNRPDTFSLGVCNGCQLMALLGWVPGPDVGGSLGVGGDISQPRFIHNESGRFECRFTSVAIGDSPAIMFKGMEGSTLGIWSAHGEGRAFFPDENILSGVVKSNLAPLRYCDDYNNVTEVYPFNPNGSPLGIAALCSPDGRHLAMMPHPERSFMMWQYPWYPKDWQVEKSGPSPWLRMFQNAREWCS

SEQ ID NO: 100706 - protein, 64 aa, Setaria italica
  Transcript Sequence Number=SeqID_34732
  Gene Ontology: Mol. function=metal ion binding; Cellular component =nucleus; Biological process=regulation of transcription from RNA polymerase II promoter
  Homolog annotation: Hit_ID=Q25AP3; Match level="QueryCoverage=93%, HitCoverage=7%, E-value=5e-28, Identity=96%"; Hit description =H0811D08.6 protein
  Pfam annotation: Domain name=G10; Domain location=2-64; Score=27.8; E_ value=7.1e-09; Accession=PF01125.9; Description=G10 protein
FSLAAENDPHDGKRKCEALWPIFRISHQKSRYIYDLYYRRKEISKELYEFCLDQGYADRNLIAK

SEQ ID NO: 100707 - protein, 142 aa, Setaria italica
  misc_feature (10)..(10): Xaa can be any naturally occurring amino acid
  Transcript Sequence Number=SeqID_34733
  Gene Ontology: Mol. function=metal ion binding; Cellular component =nucleus; Biological process=regulation of transcription from RNA polymerase II promoter
  Homolog annotation: Hit_ID=Q94DE2; Match level="QueryCoverage=99%, HitCoverage=97%, E-value=1e-73, Identity=94%"; Hit description =Protein BUD31 homolog 1
  Pfam annotation: Domain name=G10; Domain location=2-140; Score=362.6; E_value=7.3e-106; Accession=PF01125.9; Description=G10 protein
DKTSRVKYPXGWELIEPTLCDLEAKMREAENDPHDGKRKCEALWPIFRISHQKSRYIYDLYYRRKEISKELYEFCLDQGYADRNLIAKWKKPGYERLCCLRCIQTRDHNFATTCVCRVPKHLREEKVIECVHCGCKGCASGD

SEQ ID NO: 100708 - protein, 145 aa, Setaria italica
  misc_feature (64)..(64): Xaa can be any naturally occurring amino acid
  Transcript Sequence Number=SeqID_34734
  Gene Ontology: Mol. function=metal ion binding; Cellular component =nucleus; Biological process=regulation of transcription from RNA polymerase II promoter
  Homolog annotation: Hit_ID=Q94DE2; Match level="QueryCoverage=100%, HitCoverage=100%, E-value=1e-69, Identity=87%"; Hit description =Protein BUD31 homolog 1
  Pfam annotation: Domain name=G10; Domain location=1-143; Score=342.4; E_value=8.7e-100; Accession=PF01125.9; Description=G10 protein
MPKIKTSRVKYPEGWELIEPTLCDLEAKMREAENDPHDGKRKCEALWPIFRISHQKSRYLQSAXPWSKQNSKELYEFCLDQGYADRNLIAKWKKPGYERLCCLRCIQTRDHNFATTCVCRVPKHLREEKVIECVHCGCKGCASGD

SEQ ID NO: 100709 - protein, 136 aa, Setaria italica
  Transcript Sequence Number=SeqID_34735
AISFEIIFQPRDRKLLLIAAGTTLASAMDAFYHFLLPVGCLWGTLTSYVLFFFFFFFFLFFFCTNICKLNENSHLILQYIAQFEINRLHCVLNGDQIQRDISSEQRLRSDIIFQPRDGGNFNHCWHVSTPTPLHKL

SEQ ID NO: 100710 - protein, 44 aa, Setaria italica
  Transcript Sequence Number=SeqID_34736
SYCTYHMHEQCNLSNVDRFTNQARWEVGTKNILETLRCHQGATD

SEQ ID NO: 100711 - protein, 65 aa, Setaria italica
  misc_feature (6)..(6): Xaa can be any naturally occurring amino acid
  Transcript Sequence Number=SeqID_34737
  Gene Ontology: Mol. function=transcription factor activity; Cellular component=nucleus
  Homolog annotation: Hit_ID=B6SM21; Match level="QueryCoverage=80%, HitCoverage=16%, E-value=1e-10, Identity=66%"; Hit description =Nuclear transcription factor Y subunit A-2
AASPSXSGSEVSSIYDHEDVDHYHSFDHLRTPFFTPLPSIMDGEHGGNPFKWPTASEGCCDLLRA

SEQ ID NO: 100712 - protein, 53 aa, Setaria italica
  Transcript Sequence Number=SeqID_34738
  Gene Ontology: Mol. function=pantetheine-phosphate adenylyltransferase activity; Cellular component=cytoplasm; Biological process=coenzyme A biosynthetic process
  Homolog annotation: Hit_ID=B6SPK4; Match level="QueryCoverage=79%, HitCoverage=18%, E-value=3e-15, Identity=90%"; Hit description =Bifunctional coenzyme A synthase
IKKSSFSCQTRQAAAELARERIVIGVCDGPMLAKKQYADLIQPIEKRMENVKD

SEQ ID NO: 100713 - protein, 148 aa, Setaria italica
  misc_feature (92)..(92): Xaa can be any naturally occurring amino acid
  Transcript Sequence Number=SeqID_34739
  Gene Ontology: Mol. function=pantetheine-phosphate adenylyltransferase activity; Cellular component=cytoplasm; Biological process=coenzyme A biosynthetic process
  Homolog annotation: Hit_ID=B6SPK4; Match level="QueryCoverage=83%, HitCoverage=49%, E-value=1e-51, Identity=81%"; Hit description =Bifunctional coenzyme A synthase
  Pfam annotation: Domain name=CTP_transf_2; Domain location=23-140; Score=2.4; E_value=0.00077; Accession=PF01467.18; Description =Cytidylyltransferase
GPWRAPRREARRRGEAAGEVGSGGIFDRLHQGHHLFLKAAAELARERIVIGVCDGPMLAKKQYADLIQPIEKRMENVKDYIKSIKRHLEGFXTSSIKPDLEVHAEPIVDPYGPSIVDQGLEAIIVSKETFPGGLAVNRRRAERGLSQL

SEQ ID NO: 100714 - protein, 89 aa, Setaria italica
  Transcript Sequence Number=SeqID_34740
  Gene Ontology: Mol. function=pantetheine-phosphate adenylyltransferase activity; Cellular component=cytoplasm; Biological process=coenzyme A biosynthetic process
  Homolog annotation: Hit_ID=B6SPK4; Match level="QueryCoverage=87%, HitCoverage=34%, E-value=1e-31, Identity=84%"; Hit description =Bifunctional coenzyme A synthase
IKKSSFSCQTRQAAAELARERIVIGVCDGPMLAKKQYADLIQPIEKRMENVKDYIKSIKPDLEVHAEPIVDPYRPLHCDQGLEAIIVSK

SEQ ID NO: 100715 - protein, 241 aa, Setaria italica
  misc_feature (209)..(209): Xaa can be any naturally occurring amino acid
  Transcript Sequence Number=SeqID_34741
  Gene Ontology: Mol. function=pantetheine-phosphate adenylyltransferase activity; Cellular component=cytoplasm; Biological process=coenzyme A biosynthetic process
  Homolog annotation: Hit_ID=B6SPK4; Match level="QueryCoverage=78%, HitCoverage=86%, E-value=5e-82, Identity=79%"; Hit description =Bifunctional coenzyme A synthase
  Pfam annotation: Domain name=CTP_transf_2; Domain location=57-197; Score=50.5; E_value=6.5e-12; Accession=PF01467.18; Description =Cytidylyltransferase
MAMEEGSRGGEEEAAAVTTVADAAKAEDAAAVVPGSEGDDGKEVEERRRPAAYAAVVIGGTFDRLHQGHHLFLKAAAELARERIVIGVCDGPMLAKKQYADLIQPIEKRMENVKDYIKSIKPDLEVHAEPIVDPYGPSIVDQGLEAIIVSKETFPGGLAVNRRRAERGLSQLQIEAVELVPEEATGNKISSTAFRKLEAEKELRQQQEXTATGNSSIGVQNVAFQSLSRATRYHVLFLFAL

SEQ ID NO: 100716 - protein, 266 aa, Setaria italica
  Transcript Sequence Number=SeqID_34742
  Gene Ontology: Cellular component=integral to membrane
  Homolog annotation: Hit_ID=Q9SYG9; Match level="QueryCoverage=69%, HitCoverage=28%, E-value=4e-63, Identity=62%"; Hit description =Cation/calcium exchanger 4
  Pfam annotation: Domain name=Na_Ca_ex; Domain location=143-266; Score= 82.0; E_value=2.1e-21; Accession=PF01699.16; Description =Sodiumcalcium exchanger protein
  Subcellular localization annotation: CTP_CleavageSite=10; ConfidenceScore=5.03e-01
MIASQPRRVRPLAAVSLVLFLLLLYRRSDGGSARAPRLLVSGLRPVHRRFLSDADPAGPAPSGANLSEVATLKGEQPEDPSVACAGIARHEGFETQCDYLRAHPQCSSGGFVDYLGFFYCRCERFRLLGYAVLGVCLVALFYMLGNTAADYFCCSLEKMSALLRLPPTVAGVTLLPFGNGAPDVFASIAAFMGSGAGDVGLNSVLGGAVFVTCVVVGAVSLCVAEKNVQIDRRCFMRDIGFFLVTLFALSVVLIVGKVTVWGAMMF

SEQ ID NO: 100717 - protein, 92 aa, Setaria italica
  Transcript Sequence Number=SeqID_34743
  Gene Ontology: Mol. function=sugar binding
  Homolog annotation: Hit_ID=B6T6H0; Match level="QueryCoverage=98%, HitCoverage=43%, E-value=4e-20, Identity=55%"; Hit description =Agglutinin
RRMVASSKVIRVGPWGGHGGSPWDDGPHRGVRSITVTYGRFLESMRAEYADRNGRPVLGEKHGGGTGRSLSARIELDFPYEFVTGVSGSYCA

SEQ ID NO: 100718 - protein, 889 aa, Setaria italica
  Transcript Sequence Number=SeqID_34744
  Gene Ontology: Cellular component=chloroplast
  Homolog annotation: Hit_ID=Q9FZJ2; Match level="QueryCoverage=57%, HitCoverage=34%, E-value=6e-33, Identity=29%"; Hit description =F17L21.22
  Pfam annotation: Domain name=GYF; Domain location=487-542; Score =56.2; E_value=1.2e-13; Accession=PF02213.8; Description=GYF domain
MDATPDRANADLRRRLAVDAPPPPQIAREKQGLDTEIPLSPQWLMKVAENKDPTSQGVRSDVSKTSGSGEDPGYSAKKKDVFRASVLDGETGRRDRWRDDEREPNSTHRWSRWRETDKEHGDPRKVEKWSDDTSKYSVDSRRAPQERWGDSNNKEGNYEQRRENKWTARWGSNDKESENWRDRWGDSGKEGDASREKGFSHFTAHGKDGNNHEKDTERDDNVSRSWKSSYPVGRGRGDLSHHPSQTPQKSSATYGYGRGKPDNDFANFPSRGKFTSGTNAISSGSSRPFQLGLLSDRPGGPSGDRSAFKYSRMKLLDIYRSCDVTDFKIPVDCFEEVSVFLQENALEPLALSAPIAEEAAILKAIDKGDIVNSGVHQATKDGSVGKAGREDQQGGIEDYKGETFGSVRGVPGNADLPARGESLRPGTSTYVVPQRSQFVGEHRLGPSSEFVGHQMPNFLNQETKTVGMPGVDDFASMVQPHPNPESLSLFYKDPQGQIQGPFSGADIIGWFEAGYFGIDLLVRVVNAPPDIPFLMLGDVMPHLRAKRPPPGFATSKSSDMLVQETQPAGKFISSTSMQAGSAGIGMFDSGSSRKDTAVEAQNRFLESLMSNTVRNPSADTISITRGMNELGSSSFGNISVGGGEGGINMNYLLAQKGLLEKQNSLQNPVPYWSGDAVPISQAPNKDIAPEASILHSKLLPQMADPSRQSLQSQNVDLLAMLQSKEKPQVPTGNSGLPLWSNYPEVRNVNPNMHGVDLAQGALNMRQDLQNSQNIGMGVQQHSFMPQTRPALAHLPPEKLAEISQDPQLVNMLQQQYLLSQLQLQSQTPLTPQPQLSMLDKMLLLKQQQQQQQQQLQQLQLEQQQKLLLQQQQLLSHMAPHGHPNQQIDD

SEQ ID NO: 100719 - protein, 87 aa, Setaria italica
  Transcript Sequence Number=SeqID_34745
  Gene Ontology: Mol. function=nucleoside-triphosphatase activity; Cellular component=integral to membrane; Biological process=transport
  Homolog annotation: Hit_ID=Q8GU86; Match level="QueryCoverage=91%, HitCoverage=5%, E-value=9e-38, Identity=83%"; Hit description =Pleiotropic drug resistance protein 5
AGRSALLLAEARMNVDFAEIYANSALYRSNQELIKELSIPPPGYQDLSFPSKYAQNFLNQCMANTWKQFRSYWKNPPYNAMRYLMTL

SEQ ID NO: 100720 - protein, 189 aa, Setaria italica
  Transcript Sequence Number=SeqID_34746
  Gene Ontology: Mol. function=exonuclease activity; Cellular component= intracellular
  Homolog annotation: Hit_ID=B4FYY5; Match level="QueryCoverage=99%, HitCoverage=37%, E-value=1e-92, Identity=87%"; Hit description =Exonuclease
IDTLPLLTQRFGRRAGDMKMASLANYFGLGKQRHRSLDDVRMNLEVLKYCATVLFLEASLPEVLTVENLVERAMTRSRANGAASPEAPKPEANSSPDSSKRQRTVCPADGALPEGSNQGTSDPSTSRESVELVSHIEEMKLDTTTQLDASSSGYSGFLEPDDISTEYIKISVAPLHQFGRRLSVQHKDS

SEQ ID NO: 100721 - protein, 153 aa, Setaria italica
  misc_feature (9)..(9): Xaa can be any naturally occurring amino acid
  misc_feature (71)..(71): Xaa can be any naturally occurring amino acid
  misc_feature (89)..(89): Xaa can be any naturally occurring amino acid
  misc_feature (115)..(115): Xaa can be any naturally occurring amino acid
  misc_feature (137)..(137): Xaa can be any naturally occurring amino acid
  Transcript Sequence Number=SeqID_34747
  Gene Ontology: Mol. function=transferase activity, transferring phosphorus-containing groups; Cellular component=chloroplast; Biological process=phosphorylation
  Homolog annotation: Hit_ID=Q75KR1; Match level="QueryCoverage=98%, HitCoverage=17%, E-value=2e-77, Identity=90%"; Hit description =Pyruvate, phosphate dikinase 2
  Pfam annotation: Domain name=PPDK_N; Domain location=1-105; Score= -69.4; E_value=1.3e-08; Accession=PF01326.11; Description=Pyruvate phosphate dikinase, PEPpyruvate bi
LRNPSTGEXKLYGEFLVNAQGEDVVSGNRTPQELDAMKECMPEPYAELVENCKILEKHYKEMMDIEFTVQXNRLWMLQCRTGKRTGKGXVKIAVDMVNEGLIDHRSAIKMVEPRXLDQLLHPQFENPSSYKDKVIAXGLPASPGAAVGQIVFA

SEQ ID NO: 100722 - protein, 62 aa, Setaria italica
  Transcript Sequence Number=SeqID_34748
PLGALIMHPVTAAGVGVISDSGDCSNCSGSMLQTAVKGCESGKVMSTNIKHSSSYDQYWYVT

SEQ ID NO: 100723 - protein, 268 aa, Setaria italica
  Transcript Sequence Number=SeqID_34749
  Gene Ontology: Mol. function=binding; Cellular component=chloroplast; Biological process=regulation of transcription, DNA-dependent
  Homolog annotation: Hit_ID=Q6E438; Match level="QueryCoverage=60%, HitCoverage=17%, E-value=9e-25, Identity=33%"; Hit description =ACT11D09.4
  Pfam annotation: Domain name=PPR; Domain location=1-33; Score=9.3; E _value=0.71; Accession=PF01535.12; Description=PPR repeat
  Pfam annotation: Domain name=PPR; Domain location=107-141; Score =23.4; E_value=0.0009; Accession=PF01535.12; Description=PPR repeat
  Pfam annotation: Domain name=PPR; Domain location=34-68; Score=8.4; E_ value=0.91; Accession=PF01535.12; Description=PPR repeat
  Pfam annotation: Domain name=PPR; Domain location=72-106; Score=30.1; E_value=9e-06; Accession=PF01535.12; Description=PPR repeat
  Pfam module annotation: Pfam domain module=PPR::PPR::PPR::PPR; Domain location=1-33::107-141::34-68::72-106
FNNIIGKLCENGMLAEAEKLFEEMETKSVLPDVYTYTYLVDSCFKEARVEDTMQYFHKMADGREHGPKFNIGFFNLMFKGLTEAGRIDDALKVYGRMPDKEIKPNTTTFEILVKALCKAGDLDRARDLVMDMARGAVEPPQEFRESVIDIFKKSNRQEEIEKAFEEKPLPTPQPRTENQPRTEYRPHNAVGVSQGRQPGFSSASPVQLGFGYSQPQQPAFKDTTNQQPGFDSSRQWHSGFGAPQAQHPGYGAPQPVQAVVGPPQPPQA

SEQ ID NO: 100724 - protein, 73 aa, Setaria italica
  Transcript Sequence Number=SeqID_34750
EDCCPRSFLSQLLMPNSITHHHLPRTGEAHLYARIADVLFIATTDAQLYHPSSSPTNGEAHLYARIADARHIN

SEQ ID NO: 100725 - protein, 127 aa, Setaria italica
  Transcript Sequence Number=SeqID_34751
  Gene Ontology: Mol. function=inositol-1,3,4-trisphosphate 5/6-kinase activity; Cellular component=intracellular; Biological process =inositol trisphosphate metabolic process
  Homolog annotation: Hit_ID=B4FHJ7; Match level="QueryCoverage=97%, HitCoverage=36%, E-value=8e-34, Identity=62%"; Hit description =Inositol-tetrakisphosphate 1-kinase 3
  Pfam annotation: Domain name=Ins134_P3_kin; Domain location=1-110; Score=-64.8; E_value=1.4e-07; Accession=PF05770.3; Description =Inositol 1, 3, 4-trisphosphate 56-kinase
GCTRFSLPNVDEGDLSIMLGVFRVFQGVSCAAASADDADLDPCVAELPPRPLLEILARELRRRLGLRLFNIDMIREHGTRDRFYVIDMNYFPGYGKMPGYEHVFTDFLLSLSQKEYKRRPSYSSGEW

SEQ ID NO: 100726 - protein, 290 aa, Setaria italica
  misc_feature (21)..(21): Xaa can be any naturally occurring amino acid
  Transcript Sequence Number=SeqID_34752
  Gene Ontology: Mol. function=inositol-1,3,4-trisphosphate 5/6-kinase activity; Cellular component=intracellular; Biological process =inositol trisphosphate metabolic process
  Homolog annotation: Hit_ID=B6TDL1; Match level="QueryCoverage=95%, HitCoverage=81%, E-value=1e-124, Identity=81%"; Hit description =Inositol-tetrakisphosphate 1-kinase 3
  Pfam annotation: Domain name=Ins134_P3_kin; Domain location=1-285; Score=541.5; E_value=1e-159; Accession=PF05770.3; Description =Inositol 1, 3, 4-trisphosphate 56-kinase
LTSKKAKSFLQPKLRGLARKXGILFVAIDHKRPLSDQGPFDIVLHKLTGKGWQQLLEEYRETHPEVTVLDPPGAIAHLLDRQSMLQEVSELDLTDRYGKVRVPKQLFVNTDPLSIPAAVTRAGLSLPLVAKPLVAKSHELSLAYDPTSLTKLEPPLVLQEFVNHGGVMFKVYIVGDAIRVVRRFSLPNVDEGDLSNNAGVFRFPRVSCAAASADDADLDPCVAELPPRPLLEILARELRRRLGLRLFNIDMIREHGTRDRFYVIDMNYFPGMWSDIRTSLEHIVPILVYY

SEQ ID NO: 100727 - protein, 97 aa, Setaria italica
  Transcript Sequence Number=SeqID_34753
  Gene Ontology: Mol. function=protein kinase CK2 regulator activity; Cellular component=protein kinase CK2 complex
  Homolog annotation: Hit_ID=B6T9Z0; Match level="QueryCoverage=87%, HitCoverage=30%, E-value=2e-41, Identity=91%"; Hit description =Casein kinase II subunit beta-4
  Pfam annotation: Domain name=CK_II_beta; Domain location=2-97; Score =80.1; E_value=7.7e-21; Accession=PF01214.10; Description=Casein kinase II regulatory subunit
VLCKYTGDMFTEEQNELIESAAEMLYGLIHVRYIITSKGLAAMLDKYKNVDFGRCPRVNCSGQPCLPVGQSDIPRSSSVKIYCPRCEDIYNYQRIPK

SEQ ID NO: 100728 - protein, 279 aa, Setaria italica
  misc_feature (12)..(12): Xaa can be any naturally occurring amino acid
  Transcript Sequence Number=SeqID_34754
  Gene Ontology: Mol. function=protein kinase CK2 regulator activity; Cellular component=protein kinase CK2 complex; Biological process =Wnt receptor signaling pathway
  Homolog annotation: Hit_ID=B6T9Z0; Match level="QueryCoverage=100%, HitCoverage=100%, E-value=1e-132, Identity=82%"; Hit description =Casein kinase II subunit beta-4
  Pfam annotation: Domain name=CK_II_beta; Domain location=93-267; Score=439.1; E_value=6.6e-129; Accession=PF01214.10; Description =Casein kinase II regulatory subunit
MHRDRGAAAAAXAAGDRKRIGEPMDRSSPSTSWGFSGGREKERIVAGKQPEVPRSGSGSTAMSMSKLADEESGTDSEESDVDVSGSDGEDTSWISWFCSLRGNEFFCEVDEDYIQDDFNLCGLSNQVPYYDYALDLILDVESSHGDMFTEEQNELIESAAEMLYGLIHVRYIITSKGLAAMLDKYKNVDFGRCPRVNCSGQPCLPVGQSDIPRSSSVKIYCPRCEDIYTPRSKYLSNIDGTYFGTTFTHLFLMTYPHLKPQKPAQQYIPRVFGFKIHKP

SEQ ID NO: 100729 - protein, 102 aa, Setaria italica
  Transcript Sequence Number=SeqID_34755
  Subcellular localization annotation: CTP_CleavageSite=41; ConfidenceScore=5.68e-01
PPWPPCLQPTLSTARRATAFSFSRSRRSRLSSSSSIPASVCASPGDHTHEQQRDNEEQSLVVVGGGAAGVYASIRAKTLAPRLNVVVVEKGRFLSKVKVSGG

SEQ ID NO: 100730 - protein, 105 aa, Setaria italica
  Transcript Sequence Number=SeqID_34756
GGRGGRRTNPNAASRRAGAWAHGFPSESASGRDEAGARVKGGGGVCVVSQQRAEAALSQCMAWGGPRGGIQWRRPRRPLEGVGVLGEWRSCWAELDKQRRGRMRL

SEQ ID NO: 100731 - protein, 81 aa, Setaria italica
  Transcript Sequence Number=SeqID_34757
RVWESIWQAGWDGHPNSNSVGSNFLAELSNFGLEREMARLLESLALYISAILQPTVLLQVTCNTGWLKVKHQYSVVVDKKA

SEQ ID NO: 100732 - protein, 346 aa, Setaria italica
  misc_feature (200)..(200): Xaa can be any naturally occurring amino acid
  Transcript Sequence Number=SeqID_34758
  Gene Ontology: Mol. function=oxidoreductase activity; Biological process=oxidation reduction
  Homolog annotation: Hit_ID=B4FBV2; Match level="QueryCoverage=95%, HitCoverage=100%, E-value=1e-168, Identity=84%"; Hit description =Iron ion binding protein
  Pfam annotation: Domain name=2OG-FeII_Oxy; Domain location=189-297; Score=94.6; E_value=3.4e-25; Accession=PF03171.12; Description=2OG -Fe(II) oxygenase superfamily
MRDQSLMERVDRPSMESPISRTDLNCISLADPDIQNSVTLLKQACLDSGFFYVVDHGISQDFMDEVFAESKKFFDLPHSEKMKLLRDEKNRGYTPMLDEILDPENQVNGDYKEGYYIGVEVPADNPEANKPFYGPNQWPSEEVLPKWREVMEKYHSEALRVAKSVARIIALALDLDVDFFDRPEMLAKPIATLRLLHYEXGAGRVSNPAKGVYGAGAHSDYGLITLLATDDVVGLQICKDRNAQPQVWEYVAPVKGGFIVNLGDMLERWSNCIFRSTLHRVVLDGRERYSIAYFVEPSHDCIVECLPTCKSEANPPKFPPITCSAYLSQRYKDTHADLSAYSDGKA

SEQ ID NO: 100733 - protein, 39 aa, Setaria italica
  Transcript Sequence Number=SeqID_34759
NLPIPLYLICSCCKFQFEYQSLFIPTFICISCITSITPM

SEQ ID NO: 100734 - protein, 234 aa, Setaria italica
  misc_feature (92)..(92): Xaa can be any naturally occurring amino acid
  Transcript Sequence Number=SeqID_34760
  Gene Ontology: Mol. function=transferase activity, transferring glycosyl groups; Biological process=metabolic process
  Homolog annotation: Hit_ID=B6TCK9; Match level="QueryCoverage=93%, HitCoverage=45%, E-value=5e-61, Identity=56%"; Hit description =Anthocyanidin 5,3-O-glucosyltransferase
VAGYGEAKEKHECLAWLDGQPEHSVVFLCFGSTGAGNHSEEQLKEMAIGLEKSGHRFLWVVRAPAPDDLEKPFDPCADPDLDALLPKGFLEXASGRGLVVKLWVPQVEVLCHRATGAFVTHCGWNSVLEGITAGVPMLCWPLYAEQKMNKVFMVEEYGVGVEVVGWQQGMVRAEEMEAKVKLVMEAEEGKRLRARVSQHKEAAAVSWKDGGSSRIAFGQFLSDAGCLGQRLTRP

SEQ ID NO: 100735 - protein, 267 aa, Setaria italica
  Transcript Sequence Number=SeqID_34761
  Gene Ontology: Mol. function=transferase activity, transferring glycosyl groups; Biological process=metabolic process
  Homolog annotation: Hit_ID=Q5N946; Match level="QueryCoverage=97%, HitCoverage=82%, E-value=2e-85, Identity=60%"; Hit description =Putative glucosyltransferase-1
VCFTRIQESQGILANTFGSLEARAVGALGDPRVFPKMPPLYCVGPFVAGYGEAKEKHECLAWLDGQPEHSVVFLCFGSTGAGNHSEEQLKEMAAGLERSGHRFLWVVRAPLRAGPGRPSEPDVDALLPDGFLERTKGRGLVVKHWAPQVEVLHHNATGAFVTHCGWNSVLEGVKAGVPMLCWPLYSEQKMNKVFMVEEAGIGLEVVWCQQGLVEAGEVEAKVRLVMESEEGERLRSRVAALKDAAAMAWKDGGSSRAAFAQFLSVVN

SEQ ID NO: 100736 - protein, 64 aa, Setaria italica
  Transcript Sequence Number=SeqID_34762
  Gene Ontology: Mol. function=triacylglycerol lipase activity; Biological process=lipid metabolic process
  Homolog annotation: Hit_ID=B4FGY5; Match level="QueryCoverage=100%, HitCoverage=18%, E-value=5e-20, Identity=75%"; Hit description=Lipase
FVLFWSASDHLTYMGVKIEADDWSTCRIVLGQSVEQLGMSLASNIATSGHSVDVVIADHSVQVD

SEQ ID NO: 100737 - protein, 842 aa, Setaria italica
  misc_feature (22)..(22): Xaa can be any naturally occurring amino acid
  Transcript Sequence Number=SeqID_34763
  Gene Ontology: Mol. function=protein serine/threonine kinase activity; Biological process=protein amino acid phosphorylation
  Homolog annotation: Hit_ID=B9RCD5; Match level="QueryCoverage=98%, HitCoverage=92%, E-value=0.0, Identity=56%"; Hit description=ATP binding protein, putative
  Pfam annotation: Domain name=Pkinase; Domain location=359-615; Score =316.8; E_value=4.4e-92; Accession=PF00069.17; Description=Protein kinase domain
  Pfam annotation: Domain name=Pkinase_Tyr; Domain location=359-615; Score=135.3; E_value=2e-37; Accession=PF07714.9; Description=Protein tyrosine kinase
  Pfam module annotation: Pfam domain module=Pkinase::Pkinase_Tyr; Domain location=359-615::359-615
  Subcellular localization annotation: CTP_CleavageSite=27; ConfidenceScore=5.28e-01
GKDTAGDKGCWSTAQSRSTSPXKEVSRCQSFAVDRPHAQPLPLPGSRARVTRTISDITDSKSTLEKRGKGHLLPLPRPQKRPEATEPVAEEATASVSSNCSIDSDDPGDSRLQSPVGNETENATRITATNSSSVVHRELSSAITRKSTKDVAKPNNTFLSNQILSTSPRGTVADSYQSNLQGPRQITLESAPNSLMSSPTRSPRIICPDQIPTSAFWAVKPHADVTFLGSGQCSSPGSGQTSGHNSVGGDMLAQLFWQPSRGSPECSPIPSPRMTSPGPSSRVHSGSVSPLHPRAGGVAPESPTSRHAEGKKKQTHRLPLPPLSISNSSTFLPNNSTPTSPISRSPGRTENPPSPGSRWKKGKLIGRGTFGHVYVGFNSDKGEMCAMKEVTLFSDDPKSKESAKQLCQEISLLSRLQHPNIVRYYGSETVNDKLYIYLEYVSGGSIHKLLQEYGQFGEQAIRSYTKQILLGLAYLHAKNTVHRDIKGANILVDPNGRVKLADFGMAKHINGQQCPFSFKGSPYWMAPEVIKNSSGCNLAVDIWSLGCTVLEMATSKPPWSQYEGIAAMFKIGNSKELPPIPDHLSEEGKDFIRQCLQRDPSSRPTAVDLLQHPFVRNAPPLEKSAASDPLEQLTVMSCKTNSKVVGHARNMSSLGLEGQSIFQRRAAKFSLANSDIHIRSNISCPVSPCGSPLLRSRSPQHQNGRMSPSPISSPRTTSGASTPLTGGSGAIPLNHVRQPAYRNEGFTVTSRGLDDHLPSRPADPVHGRFVRVQHSAGIQERVVSEADILSSQFGKMIHANVWDSHDRPLPSERSSQQSFGDYVKLKPSLDLRSGPPGRNHGH

SEQ ID NO: 100738 - protein, 38 aa, Setaria italica
  Transcript Sequence Number=SeqID_34764
MDGPRWTEEVDDLVDAGDVDGAVALLESVVSNLSTSAA

SEQ ID NO: 100739 - protein, 94 aa, Setaria italica
  Transcript Sequence Number=SeqID_34765
MYIAAFDFYSDQERLLVEELAALNKAQNKPISGTTNIGNFQDRNHHPSARRKRSFWVGIWNLFREDKGDQRFASISAQPIIPGWTSCRGLILLF

SEQ ID NO: 100740 - protein, 78 aa, Setaria italica
  misc_feature (15)..(15): Xaa can be any naturally occurring amino acid
  misc_feature (25)..(25): Xaa can be any naturally occurring amino acid
  misc_feature (69)..(69): Xaa can be any naturally occurring amino acid
  Transcript Sequence Number=SeqID_34766
  Gene Ontology: Mol. function=heat shock protein binding; Cellular component=cytoplasm; Biological process=response to heat
  Homolog annotation: Hit_ID=B9RV92; Match level="QueryCoverage=98%, HitCoverage=16%, E-value=2e-14, Identity=44%"; Hit description =Chaperone protein DNAj, putative
ISSCLNCGGSGKVIXEHCTECHGSXKVQVERNIKVDIPGGIDDGSTIQVRGRRGASGDLYVYIRVHRKXGIHRDGLNC

SEQ ID NO: 100741 - protein, 341 aa, Setaria italica
  misc_feature (17)..(17): Xaa can be any naturally occurring amino acid
  Transcript Sequence Number=SeqID_34767
  Gene Ontology: Mol. function=heat shock protein binding; Cellular component=cytoplasm; Biological process=response to heat
  Homolog annotation: Hit_ID=B9SU82; Match level="QueryCoverage=81%, HitCoverage=64%, E-value=1e-80, Identity=53%"; Hit description =Chaperone protein DNAj, putative (Fragment)
  Pfam annotation: Domain name=DnaJ_C; Domain location=143-265; Score =131.5; E_value=2.7e-36; Accession=PF01556.10; Description=DnaJ C terminal region
  Pfam annotation: Domain name=DnaJ_CXXCXGXG; Domain location=46-130; Score=37.6; E_value=1.8e-09; Accession=PF00684.11; Description=DnaJ central domain (4 repeats)
  Pfam module annotation: Pfam domain module=DnaJ_C::DnaJ_CXXCXGXG; Domain location=143-265::46-130
FFGGSDKLFGDSMGPGXFHYSAKVNDNRGLDISYDLPISFEESMLGGKREINIFCHETCGTCHGTGAKSSNGIIECTRCRGQGRLMKTQRTHFGIVSQISSCLNCGGSGKVISEHCTECHGSRKVQVERNIKVDIPGGIDDGSTIQVRGGGSVDKQRGASGDLYVFIRVHEKQGIHRDGLNLYSDVSVDYTDAILGTTVKVETIEGLKDLHIPSGTQPGDNLKFSQLGVPDIKRPNVRGDHYFVIKVKIPKNISDQERLLVEELAALNKAQNKPISGTTNIGNFKTETIIHLQGGKDHSGWASGICSGKIKGIRDSLPSVHNLLFQDGLLAEGLILLFRCC

SEQ ID NO: 100742 - protein, 89 aa, Setaria italica
  Transcript Sequence Number=SeqID_34768
HHRLLPILLLCSSLLVATTNADNEPQYKGCPSDANYTRGSAFQANLDALLSSLPAAAASTSGFAENATGAAPGQQAYGLAQCRADVNAS

SEQ ID NO: 100743 - protein, 137 aa, Setaria italica
  misc_feature (131)..(131): Xaa can be any naturally occurring amino acid
  Transcript Sequence Number=SeqID_34769
  Gene Ontology: Mol. function=catalytic activity; Biological process =metabolic process
  Homolog annotation: Hit_ID=A4ZYX4; Match level="QueryCoverage=100%, HitCoverage=19%, E-value=2e-72, Identity=94%"; Hit description=1 -deoxy-D-xylulose 5-phosphate synthase
  Pfam annotation: Domain name=Transket_pyr; Domain location=18-137; Score=68.9; E_value=1.9e-17; Accession=PF02779.16; Description =Transketolase, pyrimidine binding dom
GVVKFDPATGRQFKSKSPTLPYTQYFAESLIREAEADDKVVAIHAAMGGGTGLNHFQKRFPERCFDVGIAEQHAVTFAAGLAAEGLKPFCAIYSSFLQRGYDQVVHDVDLQRLPVRFALDRAGLVGADGPXHCGAFD

SEQ ID NO: 100744 - protein, 86 aa, Setaria italica
  Transcript Sequence Number=SeqID_34770
MAHDGFLGRFHDLAWPVAHHAAVANAGGGGAPFVALQVHVQHELMGAGAGARSGWEHDAAMGSLVPSRSPSPSSLAAAASGAAAVD

SEQ ID NO: 100745 - protein, 114 aa, Setaria italica
  Transcript Sequence Number=SeqID_34771
  Homolog annotation: Hit_ID=B6T2A6; Match level="QueryCoverage=98%, HitCoverage=44%, E-value=7e-39, Identity=80%"; Hit description=Stem -specific protein TSJT1
MLAIFQKQVAHAPQELNSPRSGGECKPRNPDEILRDFHATHPANAFSTSFGGGAALACVGGSCPASGGYQRMFCGLDDIYCVFLGRLDNLSGLIRQYGLCNKSTNEALLVIRRS

SEQ ID NO: 100746 - protein, 126 aa, Setaria italica
  misc_feature (74)..(74): Xaa can be any naturally occurring amino acid
  Transcript Sequence Number=SeqID_34772
MEPPPAEGDVHDRQRRGGDPTDPTALARAPVVSLRPLGLADADAFMAWASDDRVMRFLKRPLCATREQAVAQIXRDTVLGHPWFRAVCVGDGGGRPVPVGQVSVWPYADEGGRRANLGYALARDHW

SEQ ID NO: 100747 - protein, 62 aa, Setaria italica
  Transcript Sequence Number=SeqID_34773
  Gene Ontology: Mol. function=protein serine/threonine kinase activity; Biological process=protein amino acid phosphorylation
  Homolog annotation: Hit_ID=Q6EQQ3; Match level="QueryCoverage=96%, HitCoverage=7%, E-value=2e-25, Identity=91%"; Hit description =Serine/threonine-specific receptor protein kinase-like
DDTEVAVKMRSESSSHGLDEFLSEVQSLTKVHHRNLVSLIGYCWEKDHLALVYEYMSHGSSF

SEQ ID NO: 100748 - protein, 40 aa, Setaria italica
  Transcript Sequence Number=SeqID_34774
  Gene Ontology: Mol. function=binding
SLSVDLLEYWADAPEIQRSADLYEDMIKCCVADAMSEVRA

SEQ ID NO: 100749 - protein, 58 aa, Setaria italica
  Transcript Sequence Number=SeqID_34775
  Gene Ontology: Mol. function=zinc ion binding; Cellular component =intracellular
EWRRGRGGEWKGKEAEEERRGSCRGISTPRGDHQSSSDMSSLEAEMKSASSFNGGRMP

SEQ ID NO: 100750 - protein, 131 aa, Setaria italica
  misc_feature (9)..(9): Xaa can be any naturally occurring amino acid
  misc_feature (112)..(112): Xaa can be any naturally occurring amino acid
  Transcript Sequence Number=SeqID_34776
  Gene Ontology: Mol. function=binding
  Subcellular localization annotation: CTP_CleavageSite=42; ConfidenceScore=5.21e-01
VSAIESLLXGANISGQNFSAARSTSLDLGVDPPSSRDPPVPLAAPASNVLSLQNSALLDSSLPSITAASSRNGGSRLLDTMTTQFAPKERSRSPYLSNMSSESMSGLSMPYXRRSTERLQKSRMDESYDIR

SEQ ID NO: 100751 - protein, 178 aa, Setaria italica
  misc_feature (14)..(14): Xaa can be any naturally occurring amino acid
  Transcript Sequence Number=SeqID_34777
  Gene Ontology: Mol. function=zinc ion binding; Cellular component =intracellular
  Homolog annotation: Hit_ID=Q5UDB8; Match level="QueryCoverage=99%, HitCoverage=29%, E-value=2e-22, Identity=45%"; Hit description =INDETERMINATE-related protein 10
  Subcellular localization annotation: CTP_CleavageSite=51; ConfidenceScore=5.50e-01
NFVGGGDHVPTPGXYGDQSTMLPQMSATALLQKAAQMGATSSANGAASMFRGFVGSSPHGRPATPHMEQSEANLNDLMNSLAGGGVGAAGIFGGSNGGGGGGGGAGMFDPRQLCDMEHHEVKFGQGGGDMTRDFLGVGGGGIVRGISTPRGDHQSSSDMSSLEAEMKSASSFNGGRMP

SEQ ID NO: 100752 - protein, 143 aa, Setaria italica
  Transcript Sequence Number=SeqID_34778
MAPAAPPPPPPPPAPTRRRRRSVEKLPRPEELEQEIAVEEVRNPMPPPTPAMFPPGTPPPPPPPPLPSTGSRSKKKRGGSVGGAKELASAIALFYQKKRKSITMKAKRRPHHHHHSDDHYSPPSSDASASPDSSVRTTNAAPP

SEQ ID NO: 100753 - protein, 85 aa, Setaria italica
  Transcript Sequence Number=SeqID_34779
  Subcellular localization annotation: CTP_CleavageSite=39; ConfidenceScore=5.62e-01
VPVSAYCKQHNPDSCITHNFHKSTQEVQSTMSASRFFVPCFNNRLTLLCPSQFFACTSDGLPCLVCLIATFQLTSVLRFYLHQRE

SEQ ID NO: 100754 - protein, 127 aa, Setaria italica
  Transcript Sequence Number=SeqID_34780
RTEAASSRHAGRAAVLAMNRSVIYYNSFCFELYLHTASNIIQIVALHKLCVMQLKKFNLQCLHPDSLYHVSTNRLTLLCPSQFFACTSDGLPCLVCLIATFQGKPSEVHAKNWLGQRSSISNVCIQI

SEQ ID NO: 100755 - protein, 123 aa, Setaria italica
  Transcript Sequence Number=SeqID_34781
KSTTWNMAIPVGLGEGWHRDCVIDVKDVNLEASDPCLSDLMAMLSSKTTRTWKELPVACPILSMDDDVVYLLSQTRPRYMDKLAVIFAIDVRKATLQGLAELDVQKSTIFFPNFCTSEICRGT

SEQ ID NO: 100756 - protein, 245 aa, Setaria italica
  misc_feature (29)..(29): Xaa can be any naturally occurring amino acid
  Transcript Sequence Number=SeqID_34782
  Gene Ontology: Mol. function=protein serine/threonine kinase activity; Biological process=protein amino acid phosphorylation
  Pfam annotation: Domain name=DUF1618; Domain location=28-192; Score= -34.6; E_value=0.021; Accession=PF07762.6; Description=Protein of unknown function (DUF1618)
DLFLLDKNNNSCCREFFSHSKVNGTVAWXDLWRGIFFCDVLKECPLLQDVPLPVPARGDWDCRLRHCNPSYLRDVTISRNKDSIKYVELEFLYREELNATPVSHTDWVCNNSRKSQVIRDGWKSTTWNMAIPVGLGEGWHRDCVIDVKDVNLEASDPCLSDLMAMLSSKTTRTWKELPVSCPILSMDDDVVYLLSQTRPRYMDKLAVIFAIDVRKATLQGLAELDVQKSTIFFPNFCTSEICRGT

SEQ ID NO: 100757 - protein, 382 aa, Setaria italica
  Transcript Sequence Number=SeqID_34783
  Gene Ontology: Mol. function=protein serine/threonine kinase activity; Biological process=protein amino acid phosphorylation
  Homolog annotation: Hit_ID=Q7FAD8; Match level="QueryCoverage=69%, HitCoverage=52%, E-value=2e-14, Identity=30%"; Hit description =OSJNBa0027G07.28 protein
  Pfam annotation: Domain name=DUF1618; Domain location=270-382; Score=- 27.9; E_value=0.0057; Accession=PF07762.6; Description=Protein of unknown function (DUF1618)
  Subcellular localization annotation: CTP_CleavageSite=47; ConfidenceScore=5.52e-01
PKVNPRSLAPNFVPKSRRLLPSHPIPLPLLGLDLFTSSASSPFTDMAASTVSSCVPPSLPESAAASGLVLLDRWCYIADLPNNTTAESTTSSGLPIKVTFRAARPPLLSHFCVHCPGLDFRKIGPKIVATDADLVLLRVPIDPNSTNRGLDWDYFVYRPRAQWLNLLPNPHPRVLDDSATALISREDGAWYVVAALGVRLPLYDGRALIRWDFDLHLYRSSDSKGWISKRLSVNEFERDKLIPLPRAVDRLYHETEKTITIGGEHGTVAWVDLWRGIFFCDVLKECPLLQDVPLPVPARGDWDCRLRHCNPSYLRDVTISRNKDSIKYVELEFLYREELNATPVSHTDWVCNNSRKSQVIRDGWKSTTWNIDRPTRTISKTK

SEQ ID NO: 100758 - protein, 139 aa, Setaria italica
  misc_feature (18)..(18): Xaa can be any naturally occurring amino acid
  Transcript Sequence Number=SeqID_34784
  Gene Ontology: Cellular component=integral to membrane
  Homolog annotation: Hit_ID=B6TET5; Match level="QueryCoverage=61%, HitCoverage=31%, E-value=7e-19, Identity=58%"; Hit description =Purine permease
  Pfam annotation: Domain name=TPT; Domain location=1-103; Score=-0.2; E_value=0.00065; Accession=PF03151.8; Description=Triose-phosphate Transporter family
HGVAVVAAAGLAAKGALXDVARWEGSTALYWVVVLTLVLTWQACFMGTAGVIYLTSSLHSGVCMTAVLVANVLGGVVVFGDAFGAEKGIATALCAWGLASYLYGEYTKKKEEDAAADLDGVQKSLTGCGAAGGGELEAV

SEQ ID NO: 100759 - protein, 40 aa, Setaria italica
  Transcript Sequence Number=SeqID_34785
MTKQAVVVPVTPEAAVAVPPNSAPLFPYPPRGRRAGAAVR

SEQ ID NO: 100760 - protein, 52 aa, Setaria italica
  Transcript Sequence Number=SeqID_34786
RLITRCLLKGSNLVNKPKGKHTHVFQMLPAMILRDNCLLIHSDQAKECARSY

SEQ ID NO: 100761 - protein, 100 aa, Setaria italica
  Transcript Sequence Number=SeqID_34787
  Gene Ontology: Mol. function=nucleic acid binding
  Homolog annotation: Hit_ID=B6EDB8; Match level="QueryCoverage=62%, HitCoverage=30%, E-value=1e-10, Identity=56%"; Hit description =Putative polypyrimidine tract-binding protein 2 (Fragment)
  Subcellular localization annotation: CTP_CleavageSite=67; ConfidenceScore=5.00e-01
MLIAACSNISFGIISTSLNVKVNNERGRDYTKGNVTTSSDQPSILGPQPIPNVGAVIPPPPHTSVPSAATSSVMPPGVPTPAMPGEASALPSHPTSVAHL

SEQ ID NO: 100762 - protein, 128 aa, Setaria italica
  misc_feature (14)..(14): Xaa can be any naturally occurring amino acid
  Transcript Sequence Number=SeqID_34788
  Gene Ontology: Mol. function=nucleic acid binding; Cellular component= nucleus; Biological process=mRNA processing
  Homolog annotation: Hit_ID=B9RIL3; Match level="QueryCoverage=99%, HitCoverage=56%, E-value=8e-48, Identity=65%"; Hit description =Polypyrimidine tract binding protein, putative
YASSAEPAQVRGKXNVYLQYSNRQEIVNTKTTGEGSGNVLLVGMEGVAPDSVSIDVLHVVFSAFGFVHKIATFEKASGYQALIQFSDAETATSAKAALDGRCIPSYLLPELDGACTLRISYSAHSVLN

SEQ ID NO: 100763 - protein, 89 aa, Setaria italica
  Transcript Sequence Number=SeqID_34789
  Subcellular localization annotation: CTP_CleavageSite=20; ConfidenceScore=5.24e-01
GNHLVPNTHGQRAVPFPGLSAQQLPPGPQMMQAPGYGGLPFSQGPRQPMPQFPMYGNQQFPPGMEPQMMPFSEQGGRQLPFAPRGPYSR

SEQ ID NO: 100764 - protein, 470 aa, Setaria italica
  Transcript Sequence Number=SeqID_34790
  Gene Ontology: Mol. function=nucleic acid binding; Cellular component= nucleus; Biological process=mRNA processing
  Homolog annotation: Hit_ID=B9RIL3; Match level="QueryCoverage=57%, HitCoverage=65%, E-value=7e-91, Identity=60%"; Hit description =Polypyrimidine tract binding protein, putative
  Pfam annotation: Domain name=RRM_1; Domain location=151-217; Score =5.4; E_value=0.063; Accession=PF00076.14; Description=RNA recognition motif. (a.k.a. RRM, RBD, o
DISQPLFGTSHLSSFHFPVIFHAFDFILPVVLWQAASGTHVFSAFGFVHKIATFEKASGYQALIQFSDAETATSAKAALDGRCIPSYLLPELDGACTLRISYSAHSVLNVKYQSHRSRDFTNPYLPFLDSAKDGSGADGRKQEPDSNILLASIENMQYVVTIDVLHEVFSAFGFVQKIAIFEKNGFQALIQYPDIQTAVAAKEALEGHSIYEGGYCKLHLAFSRHTELNVKVNNERGRDYTKGNVTTSSDQPSILGPQPIPNVGAVIPPPPHTSVPSAATSSVMPPGVPTPAMPGEASALPSHPTSEPHSQTAVVPLGGPSQYPGQAILPGPPGVPQQFPGYGSAQAPMLQPSGQGSQQMSNHVNYQLPPGSAQFMQYLGNGNHLVPNTHGPQAVPFPGLSAQQLPPGPQMMQAPGYGGLPFSQGPRQPMPQFPMYGNQQFPPGMEPQMMPFSEQGGRQLPFAPRGPYSR

SEQ ID NO: 100765 - protein, 146 aa, Setaria italica
  Transcript Sequence Number=SeqID_34791
  Gene Ontology: Mol. function=RNA-directed DNA polymerase activity; Cellular component=mitochondrion; Biological process=respiratory electron transport chain
  Homolog annotation: Hit_ID=B9T609; Match level="QueryCoverage=91%, HitCoverage=17%, E-value=3e-43, Identity=61%"; Hit description=RNA binding protein, putative
  Pfam annotation: Domain name=Intron_maturas2; Domain location=56-146; Score=-36.3; E_value=0.026; Accession=PF01348.13; Description=Type II intron maturase
LPCLLVGTSLLTNFQETLDRFFMPMRDRDMAEEEERLAEEEEEEEYEKRTVEDLTELKMRANAPIELVRPTVKLAGFTSSMGRPRPIKLLLCLDDSDIIKWYAGVGRRWLDFFCCCRNFKMVKTVVSYHLRFSCFLTLSEKHECTK

SEQ ID NO: 100766 - protein, 271 aa, Setaria italica
  Transcript Sequence Number=SeqID_34792
  Gene Ontology: Mol. function=transferase activity, transferring groups other than amino-acyl groups
  Homolog annotation: Hit_ID=Q9LGF6; Match level="QueryCoverage=100%, HitCoverage=63%, E-value=1e-117, Identity=78%"; Hit description=3'-N- debenzoyltaxol N-benzoyltransferase-like
  Pfam annotation: Domain name=Transferase; Domain location=5-269; Score=-89.2; E_value=1.4e-06; Accession=PF02458.7; Description =Transferase family
MAAAKSIERLAARRVVPAEPTPAGPLRLSWLDRYPTQMALIESLHVFKPAPDRAVADASASPARTIERALARALVHYYPLAGRLVLSEDGAQQAVDCSNAGVWFTEAAAACSLEDVDYLEAPLMIPKDEVLPPTPAAGEEDERALVLLVQVTSFACGGFVVGFRFSHAVADGPGAAQFMNAVGELARGGEVVSVEPQWGRDAIPDPAGAMVGGLPTPDGAKRLEYLAIDISADYINHFKAQYSAGGGWCSAFEVLIAKAWQSRTRAAGFEP

SEQ ID NO: 100767 - protein, 82 aa, Setaria italica
  Transcript Sequence Number=SeqID_34793
  Gene Ontology: Mol. function=transferase activity, transferring glycosyl groups; Biological process=metabolic process
  Homolog annotation: Hit_ID=C0LNQ9; Match level="QueryCoverage=100%, HitCoverage=17%, E-value=3e-18, Identity=63%"; Hit description=UDP -glucosyltransferase
IKEEMLDELVPDLEPLRVRDLIRVDGSDADALCGFIARVAGAVRSSASGVVVNTFEGIEAPELAKIRRELSLPVFAVGPLHL

SEQ ID NO: 100768 - protein, 156 aa, Setaria italica
  Transcript Sequence Number=SeqID_34794
  Gene Ontology: Mol. function=phosphoenolpyruvate carboxylase activity; Cellular component=cytoplasm; Biological process=carbon utilization by fixation of carbon dioxide
  Homolog annotation: Hit_ID=A8ASG2; Match level="QueryCoverage=58%, HitCoverage=9%, E-value=3e-25, Identity=61%"; Hit description =Phosphoenolpyruvate carboxylase
MVSLRLAPFTLLVELPASRRRLKLARCTVRRARSESASAAAKAVADADSLRALAEERRPVDAHPGRQSAPEKVPADDRLVGYETLLVARFLDILQGLHGGDFRQVVEECLRLSGEYHVGGDPARLDELGALLTSLDVGDAIMVASSFSHMLNLANI

SEQ ID NO: 100769 - protein, 100 aa, Setaria italica
  Transcript Sequence Number=SeqID_34795
  Gene Ontology: Mol. function=protein serine/threonine kinase activity; Cellular component=integral to membrane; Biological process=protein amino acid phosphorylation
  Homolog annotation: Hit_ID=UPI000034F0FA; Match level="QueryCoverage =100%, HitCoverage=7%, E-value=2e-34, Identity=65%"; Hit description =protein kinase family protein
LTIIHRDLKASNILLDGDMNPKISDFGLAKLFNIESSVGNTSHIAGTYGYMSPEYALHGIFSAKSDVFSYGVLVLEIVTGRRNTYTHASGPSEDLLTYVW

SEQ ID NO: 100770 - protein, 71 aa, Setaria italica
  Transcript Sequence Number=SeqID_34796
  Homolog annotation: Hit_ID=Q9ZNV6; Match level="QueryCoverage=95%, HitCoverage=7%, E-value=5e-14, Identity=49%"; Hit description=Pib
YIKSVKFEEGIMPKLELLQIIGEANNEIGFSGLEFLQSINEVQLSNNNGWLKKKIQELLAGNRNEPIVTVY

SEQ ID NO: 100771 - protein, 67 aa, Setaria italica
  Transcript Sequence Number=SeqID_34797
  Subcellular localization annotation: CTP_CleavageSite=37; ConfidenceScore=5.19e-01
TSVWMGLQIISWNSRHVPVSCPWSQNLEQHLSFRNPRESKHRRASLMLWRNSSPENPITFILSSPLL

SEQ ID NO: 100772 - protein, 79 aa, Setaria italica
  Transcript Sequence Number=SeqID_34798
TVKFEEGIMPKLELLQVIREANNDLLQVIGEANNEIGFSGLEFLQSINEVQLSNNNGWLKKKIQELLAGNRNEPIVTVY

SEQ ID NO: 100773 - protein, 192 aa, Setaria italica
  Transcript Sequence Number=SeqID_34799
  Gene Ontology: Mol. function=nucleotide binding; Biological process =defense response
  Homolog annotation: Hit_ID=Q9ZNV6; Match level="QueryCoverage=87%, HitCoverage=13%, E-value=7e-54, Identity=68%"; Hit description=Pib
RAAVSNLSRLESLSVRSAGKRGLRGCLDGISSPPENLQSLELYGNLETLPEWIKELPHLVKLKLVSTRLLEHDAAMEFLGKLSKLKILSLSWESFQGEELRFRSEQTGRAFGSLSVLMLANIGYIKSVKFEEGIMPKLELLQIIGEANNEIGFSGLEFLQSINEVQLSNNNGWLKKKIQELLAGNRNVTKVT

SEQ ID NO: 100774 - protein, 60 aa, Setaria italica
  Transcript Sequence Number=SeqID_34800
YFEIKVLNAFSSCRWSCPCCLGGQPILLFCLNEISPPSFSLLFHPNACTLCSVCNVIRGK

SEQ ID NO: 100775 - protein, 124 aa, Setaria italica
  Transcript Sequence Number=SeqID_34801
KRREKEGGLISFKQNNRIGWPPRQHGQLHLVPSVLLVLLDELGVLEVLLGEVGRHLGDEETGDGEAGEEGPVAAPLPAEEHRPRVESLHLRLRRLRSISFLLRLRLDGFWWGMDWGGKGVRLSR

SEQ ID NO: 100776 - protein, 93 aa, Setaria italica
  Transcript Sequence Number=SeqID_34802
MDGAAAAAGGSGEPAANGSKSEGQQFDPSRMIGIIKRKALIKDLAAAYHAECIASCKELLQLQRKWEEEQYVEVKMPEEPRLMTMKTSKRRKK

SEQ ID NO: 100777 - protein, 797 aa, Setaria italica
  Transcript Sequence Number=SeqID_34803
  Gene Ontology: Mol. function=protein serine/threonine kinase activity; Cellular component=plasma membrane; Biological process =protein amino acid phosphorylation
  Homolog annotation: Hit_ID=Q01L66; Match level="QueryCoverage=98%, HitCoverage=99%, E-value=0.0, Identity=80%"; Hit description =H0321H01.14 protein
  Pfam annotation: Domain name=Pkinase; Domain location=410-744; Score =236.5; E_value=6.8e-68; Accession=PF00069.17; Description=Protein kinase domain
  Pfam annotation: Domain name=Pkinase_Tyr; Domain location=410-720; Score=-54.2; E_value=4e-10; Accession=PF07714.9; Description=Protein tyrosine kinase
  Pfam module annotation: Pfam domain module=Pkinase::Pkinase_Tyr; Domain location=410-744::410-720
DKVRTAGATKGGCSSGCSEIVELVDEPKDARPGGVTHLRVRVKPVGQEHGARSCSVEDDLDRLIRSINVRTSARASGQTSTDRRLIALGKSPVSSSEIVESVSLKQALRKMCISQASEMAAMKRLSKPSGVSTPPDSGAIRKLYGSVAVQTNEEKDDKSKVEKVSVLPEKAAGSLLGKPVETSKGQSKSSTKKNSRSASPTAAKIHKTRIQDVISNKSSEAVDDPPAGTTLAKQRKGKPAKASSPRAVPVGGSRLVKPMFRNKTSTKKKVKPEPASVAASQKHCEAKGSNSHTGNQEALQEEPRTPAPTNKKATISSTCVEGADFGTKGCGVGAIHGSKVGELSRSKEKGECSQSSKSSIGDYSTSTSISEDSYGSFSANGTRPHMSKDVRWGAIRRLAIQQGCLGLKNFKLLKQLGCGDIGTVYLAELVGSDCLFALKVMDIEYLISRKKMLRAQTEREILQMLDHPFLPTLYSHFTTDNLSCLVMEFCPGGDLHVLRQKQPTRTFSEAAARFYVAEVLLALEYLHMLGVIYRDLKPENILVREDGHIMLSDFDLSLRCSVSPMLVRTSSVGRDEPSRPSGPCAQSCIDPLCIQPSWSNSSCFTPRLVSSTPSRTRRPRAEPLKKPSLPQLVVEPTDARSNSFVGTHEYLAPEIIRGDGHGSSVDWWTLGIFLYELLYGKTPFRGPGNEETLSNVISQGLKFPDNPAVSFHARDLIRGLLVKEPEYRLGSSRGAAEIKRHPFFEGLNWALIRWTAPPETPKSFDAAAATLATTRKKKEGKCLEFRLNGDDIEFELF

SEQ ID NO: 100778 - protein, 150 aa, Setaria italica
  Transcript Sequence Number=SeqID_34804
  Gene Ontology: Mol. function=protein kinase activity; Cellular component=plasma membrane; Biological process=protein amino acid phosphorylation
  Homolog annotation: Hit_ID=P93520; Match level="QueryCoverage=100%, HitCoverage=24%, E-value=7e-82, Identity=97%"; Hit description =Calcium/calmodulin-dependent protein kinase homolog|CaM kinase homolog|MCK1 protein
EDELLYLRLQFKLLEPRDGFVSLDNFRTALTRYLTDAMRESRVLEFLHALEPLAYRRMDFEEFCAAAISPYQLEALERWEEIAGTAFQHFEQEGNRVISVEDLAQELNLAPTHYSIVQDWIRKSDGKLNFLGFTKFLHGVTIRGSNTRRH

SEQ ID NO: 100779 - protein, 77 aa, Setaria italica
  Transcript Sequence Number=SeqID_34805
  Gene Ontology: Mol. function=catalytic activity; Biological process =metabolic process
  Homolog annotation: Hit_ID=B6TIJ1; Match level="QueryCoverage=100%, HitCoverage=22%, E-value=1e-33, Identity=93%"; Hit description=Mu -crystallin
MAAPPPHPFVYIDAAALHSLLPFPSLIPHLRAGLAHPELSAGIQCPQRVSFPVPTAPSAALLLMPSWCAHPSLPYLA

SEQ ID NO: 100780 - protein, 73 aa, Setaria italica
  Transcript Sequence Number=SeqID_34806
  Subcellular localization annotation: CTP_CleavageSite=31; ConfidenceScore=5.37e-01
TNGGHTVPPAIGLASSRGMSGPMSTVAGATTANASSSPPSLQMQHFMAQDYGLLQDMLPPPPFVHSNGGNIQP

SEQ ID NO: 100781 - protein, 442 aa, Setaria italica
  Transcript Sequence Number=SeqID_34807
  Homolog annotation: Hit_ID=Q68CZ6; Match level="QueryCoverage=95%, HitCoverage=68%, E-value=7e-11, Identity=21%"; Hit description=HAUS augmin-like complex subunit 3
FLENCGYTQELAHYHSGDEVITYLAYSDFHPYVVGDLACTKQLNKWFSKQFEKGPFRLVAEEGKSKCSWVSLDDITNCLIRGDSEKSHHHQRVAELQRLRSIFATSERQWIEAQVENAKQQAILSILKAQVSSDEAHIHRDIHSLRRKGSELAGELSTLSQKVQAFVSETIPCLCSELAQLQGTYILQGDYDLKVMRQEYYINRQKTFINHLVNQLARHQFLKIACQLERKNIASAYSLLRVIESELQSYLSAVNTRLGHYNSLIQAASDVREQGAIDDRDTFLHAVRDLLCIHSNVQATVPTYMSAHALVQQISALQSDLLSLQSELENTLPADRKRFINELCTLIQTVEQLLFASSTTAEPILTPWPLMRALDDMENANAQVEVSVEEVTKARTQKIKIFENRAHEVGRERQIFVDFFCNPERLKNQVRELTSRVKALQD

SEQ ID NO: 100782 - protein, 83 aa, Setaria italica
  Transcript Sequence Number=SeqID_34808
  Subcellular localization annotation: CTP_CleavageSite=46; ConfidenceScore=5.44e-01
QPQGRGQKSGSICCIRLVLRGRLQLPHQPCRRWTGSPRTRVPSNPSSATRSVRPPHPCPTGTFVVIGVRRLGLEDGDASGCGS

SEQ ID NO: 100783 - protein, 64 aa, Setaria italica
  Transcript Sequence Number=SeqID_34809
KQHRICRQQVINCSIIHRWHQWSVRSTNRGPIFRSAKGHLSCKLPLPISELYPKRLSFHAKSTL

SEQ ID NO: 100784 - protein, 100 aa, Setaria italica
  Transcript Sequence Number=SeqID_34810
  Homolog annotation: Hit_ID=B9T3T5; Match level="QueryCoverage=97%, HitCoverage=16%, E-value=7e-30, Identity=56%"; Hit description =Pentatricopeptide repeat-containing protein, putative
  Pfam annotation: Domain name=PPR; Domain location=17-51; Score=15.1; E_value=0.15; Accession=PF01535.12; Description=PPR repeat
  Pfam annotation: Domain name=PPR; Domain location=53-86; Score=4.6; E_ value=2.6; Accession=PF01535.12; Description=PPR repeat
  Pfam module annotation: Pfam domain module=PPR::PPR; Domain location =17-51::53-86
ISVFLEMKANNIRPDEVTLVGILSACSRAGFIDEGLKYFNSMEKEYSLKPVAEHYACMADMLGRAGRLNEAFELVQGMQIQPNAGVWGALLGACRLHKND

SEQ ID NO: 100785 - protein, 156 aa, Setaria italica
  misc_feature (74)..(74): Xaa can be any naturally occurring amino acid
  Transcript Sequence Number=SeqID_34811
  Gene Ontology: Cellular component=membrane
  Homolog annotation: Hit_ID=B6TRP3; Match level="QueryCoverage=96%, HitCoverage=36%, E-value=4e-69, Identity=84%"; Hit description =Nodulin-like protein
  Pfam annotation: Domain name=DUF6; Domain location=4-138; Score=53.7; E_value=7e-13; Accession=PF00892.12; Description=Integral membrane protein DUF6
TLQFGYAGMNVITKVSLNHGMSHYVLVVYRHAFATLSIAPFALVLERKVRPRMTPWVFLQIFVLALLGPVIDQXNFYYAGLKFTSPTFSCAMSNMLPAMTFIMAVLFRMEKVNLKKARCVAKVVGTLVTVAGAMLMTLYKGRVVEMVWTRATSTST

SEQ ID NO: 100786 - protein, 71 aa, Setaria italica
  Transcript Sequence Number=SeqID_34812
  Gene Ontology: Mol. function=ATPase activity, coupled to transmembrane movement of substances; Cellular component=integral to membrane; Biological process=transport
  Homolog annotation: Hit_ID=Q7FMW3; Match level="QueryCoverage=100%, HitCoverage=5%, E-value=5e-31, Identity=87%"; Hit description=MDR -like ABC transporter
SGGDVINILFAIMTGAMSLGNATPCMAAFAEGRSAAYRLFATIKRKPEIDPDDPSGKQLEDIKGDVDLKDV

SEQ ID NO: 100787 - protein, 307 aa, Setaria italica
  Transcript Sequence Number=SeqID_34813
  Homolog annotation: Hit_ID=Q9FKL6; Match level="QueryCoverage=74%, HitCoverage=35%, E-value=4e-62, Identity=49%"; Hit description =Calmodulin-binding protein
  Pfam annotation: Domain name=Calmodulin_bind; Domain location=1-244; Score=353.2; E_value=5e-103; Accession=PF07887.3; Description =Calmodulin binding protein-like
GDFPPDGREDWSPEEFQKGVMKEREGKRPLLTGEVALTMRDGRATVSELQFTDNSSWVRCRKFRIGVRVAPGSYDGSRIQEAMTDAFVVRDHRGELYRKHYPPHLVDDVWRLEKIGKEGAFHRKLRQNNVVSVQEFVRMLMVKPDELRAILGEGMTDRMWEVTTNHAKTCVDRDDKVYVYGTPHGTIYVDSVFKLVRVEIGGVEWPLQQLRGQAQVIVQQLMLEAYENRHSLQEAEAFMLPGHGHAANNVPLLQNAAHVALPAPGEAQLWYPNAPEIEFPVDDVVPPIPQPNNFGYQWPGQVFHMTG

SEQ ID NO: 100788 - protein, 84 aa, Setaria italica
  Transcript Sequence Number=SeqID_34814
  Gene Ontology: Mol. function=nucleotide binding; Biological process =defense response
  Homolog annotation: Hit_ID=Q8LSS5; Match level="QueryCoverage=94%, HitCoverage=12%, E-value=3e-10, Identity=46%"; Hit description =Putative NBS-LRR type resistance protein
LRELQLSELSNLTSVENFPSVVELDVFDCPKLKRISSLSRLHKIRIVRCPKLEVLQGVPVLDSMWLRDATMETLPGYLQAVHPR

SEQ ID NO: 100789 - protein, 107 aa, Setaria italica
  Transcript Sequence Number=SeqID_34815
  Gene Ontology: Mol. function=nucleotide binding; Biological process =defense response
  Homolog annotation: Hit_ID=Q8LSS3; Match level="QueryCoverage=74%, HitCoverage=19%, E-value=4e-16, Identity=57%"; Hit description =Putative NBS-LRR type resistance protein
GSNPEPRMLTSAERSIQKMTSEFDESAIVGEKIEQDTRELAQLLITGGLHDIKVVSIVGTGGMGKTTLTQKIFNEVTIQENFKVKVWLSITQHFDEIELLKTAIEHA

SEQ ID NO: 100790 - protein, 104 aa, Setaria italica
  Transcript Sequence Number=SeqID_34816
  Gene Ontology: Mol. function=nucleotide binding; Biological process =defense response
  Homolog annotation: Hit_ID=A7YAU2; Match level="QueryCoverage=52%, HitCoverage=41%, E-value=4e-09, Identity=52%"; Hit description =Putative NB-ARC domain-containing protein (Fragment)
RETARISSKEHLEYMELRWTCSGFMELRDESKKQQQQEVVEEVLEKLCPPPRIHDLHIQGYFGRTLPNWMMVVEACAFKSLSILRLQDLPCCTKLPDGLCRLPS

SEQ ID NO: 100791 - protein, 137 aa, Setaria italica
  Transcript Sequence Number=SeqID_34817
  Gene Ontology: Mol. function=nucleotide binding; Biological process =defense response
  Homolog annotation: Hit_ID=Q6AVJ8; Match level="QueryCoverage=90%, HitCoverage=12%, E-value=1e-11, Identity=40%"; Hit description=NB -ARC domain containing protein
  Subcellular localization annotation: CTP_CleavageSite=23; ConfidenceScore=5.13e-01
SGSNDSLVRRLSIGPTSLVSGLAALQKQSVRTLFINSKIDFELSDSLNSFSMLRVLSIIHGGDCDRLLDSLSQLRHLRYLGLEGTNISRLPDNINNMKFLQHIVLPDSVHLENLPRTIIQMVHLRTLNMYHSNANMV

SEQ ID NO: 100792 - protein, 77 aa, Setaria italica
  Transcript Sequence Number=SeqID_34818
GEGLGVSDPLRPGSGEAETRREGSSVSDPSRPRVGRGGTLLDGMRSGLGGSGASYPLTRGRAKLAEVTVAGGGPRPL

SEQ ID NO: 100793 - protein, 89 aa, Setaria italica
  misc_feature (59)..(59): Xaa can be any naturally occurring amino acid
  misc_feature (62)..(62): Xaa can be any naturally occurring amino acid
  Transcript Sequence Number=SeqID_34819
VVIEHLLLCQVRDQLLDVGCHGIHDGRHGSGVQSEFPGRNCLCSLPLLLGLFSSGALAXFFXIWLGRQCKSLSDFLRMHAVVKNMGGIY

SEQ ID NO: 100794 - protein, 213 aa, Setaria italica
  Transcript Sequence Number=SeqID_34820
  Gene Ontology: Mol. function=nucleotide binding; Biological process =defense response
  Homolog annotation: Hit_ID=Q8LSS5; Match level="QueryCoverage=69%, HitCoverage=23%, E-value=6e-16, Identity=37%"; Hit description =Putative NBS-LRR type resistance protein
CSLEEIGPLSKLQRLMLHGLEDVSASSLAETAKISSKEHLEYIELQWTCSGFMELRDEIKKQQQQEVAEEVLEKLCPPPRIHDLHIRRYFGRTLPNWMMVVQACAFKSLSILSLVYLPCCTKLPDGLRRLPSLERLAIIDAPAIKSIGSEFQASSSSSTVGGGVTESTSSAAFPNLTHLSLLGLCEWEEWEWEEQTVDVTAGAMAMHALERLE

SEQ ID NO: 100795 - protein, 86 aa, Setaria italica
  Transcript Sequence Number=SeqID_34821
GSEGPKAESRDSQCVTMFAVVPVCSSDDPAVTQLTTLCFTIRCPSASVPGQTIAFLPERIGYLSIKTCSLQSSSEYSCDAAHSEVI

SEQ ID NO: 100796 - protein, 70 aa, Setaria italica
  Transcript Sequence Number=SeqID_34822
KTIRDYDTCRCFKAHNNNVCSCACLRSSDHPAVTQPTTLCFTIRCPSASVPGQTKAFLPVDGTNIWHSSN

SEQ ID NO: 100797 - protein, 340 aa, Setaria italica
  misc_feature (92)..(92): Xaa can be any naturally occurring amino acid
  misc_feature (152)..(152): Xaa can be any naturally occurring amino acid
  Transcript Sequence Number=SeqID_34823
  Gene Ontology: Mol. function=nucleotide binding; Biological process =defense response
  Homolog annotation: Hit_ID=Q8LSS3; Match level="QueryCoverage=100%, HitCoverage=84%, E-value=2e-59, Identity=41%"; Hit description =Putative NBS-LRR type resistance protein
  Pfam annotation: Domain name=NB-ARC; Domain location=184-340; Score= -89.6; E_value=0.00083; Accession=PF00931.14; Description=NB-ARC domain
MAAVLDAMAPYVLKLITDMAKEEVSMLRGVSGEITRLEDNMKGIKAFLEDAERRRLTDQSVQRWVRKLKDAMYDATDIIDECQLEADKRRGXTEDGSSVKKKVSEGCFQSLLFCMRNPVLAHKIGSRIRDLNKRLDGIHKEADRFKFSINLXSNPEPRKLTDAERSMQKMTSEFDESAIVGEKIEQDTRELAQLLITGGLHDIKVVSIVGTGGMGKTTLAQKIFNEVTIQEHFKVKVWLSITQNFDEIELLRTAIEHAGGVHGGTQDKTLLTRTLTNTLSTGRFLLVMDDVWSDQAWSHVLSVPIRNASQKQQGNWVLISTRLEDLAQRMGASFYQHHVS

SEQ ID NO: 100798 - protein, 209 aa, Setaria italica
  misc_feature (42)..(42): Xaa can be any naturally occurring amino acid
  Transcript Sequence Number=SeqID_34824
  Gene Ontology: Mol. function=nucleotide binding; Biological process =defense response
  Homolog annotation: Hit_ID=Q8LSS3; Match level="QueryCoverage=44%, HitCoverage=24%, E-value=2e-16, Identity=44%"; Hit description =Putative NBS-LRR type resistance protein
MAAVMDAMAPYVKKLITDLAQEEVFMLLGVSGEITRLEDNMXGIKAFLADAERRRITDQSVQRWVKKLKDAMYDATDILDLCLLKADECRFKFSINLGSNPELRMLTDAERSRQKMMSEFDESAIVGEKIAQLLITSGKHNIKEVSTVDTGSIGKTTLCGPYRCCIFITIDSILDHISTRKMTSSTILVTPSSTGCATGIEKLVLERGL

SEQ ID NO: 100799 - protein, 355 aa, Setaria italica
  misc_feature (182)..(182): Xaa can be any naturally occurring amino acid
  misc_feature (193)..(193): Xaa can be any naturally occurring amino acid
  misc_feature (255)..(255): Xaa can be any naturally occurring amino acid
  Transcript Sequence Number=SeqID_34825
  Gene Ontology: Mol. function=nucleotide binding; Biological process =defense response
  Homolog annotation: Hit_ID=Q8LSS3; Match level="QueryCoverage=98%, HitCoverage=88%, E-value=2e-59, Identity=40%"; Hit description =Putative NBS-LRR type resistance protein
  Pfam annotation: Domain name=NACHT; Domain location=204-351; Score= -26.3; E_value=0.0086; Accession=PF05729.4; Description=NACHT domain
  Pfam annotation: Domain name=NB-ARC; Domain location=184-355; Score= -81.8; E_value=0.00028; Accession=PF00931.14; Description=NB-ARC domain
  Pfam module annotation: Pfam domain module=NACHT::NB-ARC; Domain location=204-351::184-355
MAAVLDAMAAYVKKLITDMAEEEVSMLLGVSGEIEKLEGNMEGIRAFLADAERRRIPDQSVQRWVSKLKDAMYDATDIIDECQLEADKRRGSTEDGSSVKKKVSAGCFQPLLFCLRNPVFAHKIGSCIKELNQRLDGIHNEADKFKFSINLGSNPEPRKLTDAERSMQKMTSEFDESAIVGXKIEQDTRELAXLLITGGLHDIKVVSIVGTGGMGKTTLAQKIVKEVTIQEHFKVKVSPRHGRNFDEIELLVESXGGTQDKMLLTRILTNTLSTGRFLLVMDDVWSDQAWSHVLSVPIRNASQKQQGNWVLISTRLEDLAQRMGASFYQHHVRPLNEEDAWSLLTKQLPPAPNQI

SEQ ID NO: 100800 - protein, 301 aa, Setaria italica
  Transcript Sequence Number=SeqID_34826
  Gene Ontology: Mol. function=nucleotide binding; Biological process =defense response
  Homolog annotation: Hit_ID=Q6AVJ8; Match level="QueryCoverage=82%, HitCoverage=26%, E-value=2e-52, Identity=43%"; Hit description=NB -ARC domain containing protein
  Pfam annotation: Domain name=NACHT; Domain location=34-188; Score= -33.4; E_value=0.03; Accession=PF05729.4; Description=NACHT domain
  Pfam annotation: Domain name=NB-ARC; Domain location=14-297; Score =206.7; E_value=6.3e-59; Accession=PF00931.14; Description=NB-ARC domain
  Pfam module annotation: Pfam domain module=NACHT::NB-ARC; Domain location=34-188::14-297
FCIVVRSYLFGEKIEQDTRELAQLLNTGGLHDIKVVSIVGTGGMGKTTLTQKIFNEVTIQENFKVKVWLSITQHFDEIELLKTAIEHAGGVHGGTQDKTLLTRKLTNTLSTGRFLLVLDDVWSDQVWSHVLSVPVKNASKKQQGNWVLITTRLENLAQRMVASFYQHRVSPLNEEDAWSLLTKQLPPSPNQVDYLRDVGMKIVRKCDGLPLAVKVMGGLLSTRSRSEREWEAVLNHHAWSVAGLPKELDSRIYLSYEDLSSQLKQCFLYCSLFPKGTIISWINVIPMWISEVSSNLTRTEV

SEQ ID NO: 100801 - protein, 406 aa, Setaria italica
  Transcript Sequence Number=SeqID_34827
  Gene Ontology: Mol. function=nucleotide binding; Biological process =defense response
  Homolog annotation: Hit_ID=Q2QZS0; Match level="QueryCoverage=99%, HitCoverage=37%, E-value=1e-61, Identity=33%"; Hit description=NB -ARC domain containing protein, expressed
  Pfam annotation: Domain name=NACHT; Domain location=83-237; Score= -27.2; E_value=0.01; Accession=PF05729.4; Description=NACHT domain
  Pfam annotation: Domain name=NB-ARC; Domain location=63-351; Score =212.4; E_value=1.2e-60; Accession=PF00931.14; Description=NB-ARC domain
  Pfam module annotation: Pfam domain module=NACHT::NB-ARC; Domain location=83-237::63-351
HKIGIRIKELNQRLDDIHKEADRFKFSINLGSNLEPRKLTDAERSMQKTTSEFNESAIVGEKIEQDTRELAQLLITGGLHDIKVVSIVGTGGMGKTTLAQKIFNEVTIQEHFKVKVWLSITQHFDEIELLKTAIEHAGGVHGGTQDKTLLTRTLTNTLSTGRFLLVLDDLWCNQAWSHVLSVPVKNASQKQQGNWVLITTRLEDLAQRMGASFYQHRVSPLNEEDAWSLLTKQLPPSPNQVVGPDYLRDVGMKILRKCDGLPLAVKVMGGLLSTRSRSEREWEAVLNHHAWSVAGLPKELDSRVYLSYEDLSSQQKQCFLYCSLFPKGTLILLRHVIPMWISEGFIQPHADRSSSDDDQLEEIATEYYQELITRNLIERDPPSHLYTCKMHDVVRSFAEFYCKRRV

SEQ ID NO: 100802 - protein, 493 aa, Setaria italica
  Transcript Sequence Number=SeqID_34828
  Gene Ontology: Mol. function=nucleotide binding; Biological process =defense response
  Homolog annotation: Hit_ID=Q8LSS5; Match level="QueryCoverage=87%, HitCoverage=69%, E-value=8e-71, Identity=40%"; Hit description =Putative NBS-LRR type resistance protein
  Pfam annotation: Domain name=LRR_1; Domain location=239-261; Score =0.7; E_value=2.3e+02; Accession=PF00560.25; Description=Leucine Rich Repeat
  Pfam annotation: Domain name=LRR_1; Domain location=263-285; Score =0.7; E_value=2.2e+02; Accession=PF00560.25; Description=Leucine Rich Repeat
  Pfam annotation: Domain name=LRR_1; Domain location=334-355; Score =2.7; E_value=92; Accession=PF00560.25; Description=Leucine Rich Repeat
  Pfam annotation: Domain name=LRR_1; Domain location=379-400; Score =4.2; E_value=47; Accession=PF00560.25; Description=Leucine Rich Repeat
  Pfam annotation: Domain name=LRR_1; Domain location=419-440; Score =0.2; E_value=2.8e+02; Accession=PF00560.25; Description=Leucine Rich Repeat
  Pfam annotation: Domain name=LRR_1; Domain location=45-66; Score =10.8; E_value=2.7; Accession=PF00560.25; Description=Leucine Rich Repeat
  Pfam annotation: Domain name=LRR_1; Domain location=68-91; Score=3.9; E_value=55; Accession=PF00560.25; Description=Leucine Rich Repeat
  Pfam annotation: Domain name=LRR_1; Domain location=92-114; Score =2.9; E_value=86; Accession=PF00560.25; Description=Leucine Rich Repeat
  Pfam module annotation: Pfam domain module=LRR_1::LRR_1::LRR_1::LRR _1::LRR_1::LRR_1::LRR_1::LRR_1; Domain location=239-261::263-285::334- 355::379-400::419-440::45-66::68-91::92-114
LTLFINSKIEFELIDLWNSFSMLRVLSIHGGDCRRLVGSLCQLRHLRYLGLEETNISRLPDDIDNMKFLQHIVLEGSVHLENLPRTIIQLLHLRTLDMYRSNANVIIPKEFGGLRNLRMLAGFRVHMDMDGSWCSLEEIGPLSKLRKLSLHGLENVSASSLAETARISSKEHLEYLELHWSSSGCVELRDGIEQQQQVVEEVLEKLCPPPRIHNLYIKGYFGHTLPNWMMVVEACAFKSLSILILQDLPCCTKLPDGLCQLPSLKALSIVDAPAIKSVGSEFQASSSSSTVGGGVTASTSAAFPNLTHLALKGLCEWEEWDWEEQTAGTMAMHALEFLEIIKCKLSCFPLGLANNKRHALRELALSELNNLASVENFPSVVKLDVFDCPELKRISGLSRLHKIRIFHCPNVEVLQGLPSLDSIEVNDGTLERLPGYLPCVNPRFLKLTCSKELHDSIISGSSSECEKISHITKHDINYVKVSDAASHEYSDED

SEQ ID NO: 100803 - protein, 60 aa, Setaria italica
  Transcript Sequence Number=SeqID_34829
ARDVTEELIGEIRGRRGGRGAGEHCTGYRDGASGVCYLFARKFAPDTLEPLLRLAPKVMG

SEQ ID NO: 100804 - protein, 61 aa, Setaria italica
  Transcript Sequence Number=SeqID_34830
VSVSSICLRCTIYSVVSDLYFYGVLLDRYRQIVPLVCISFYKETLKLLRNLLWLKIMGIVI

SEQ ID NO: 100805 - protein, 60 aa, Setaria italica
  Transcript Sequence Number=SeqID_34831
QYTLNNRKENKQNKNSPELYPRYIFSLSSINAKLISHKFQTEQYYLKLPDVSKHMPSPFP

SEQ ID NO: 100806 - protein, 157 aa, Setaria italica
  misc_feature (81)..(81): Xaa can be any naturally occurring amino acid
  Transcript Sequence Number=SeqID_34832
  Gene Ontology: Mol. function=calcium ion binding; Cellular component =integral to membrane
  Homolog annotation: Hit_ID=Q0IKM2; Match level="QueryCoverage=91%, HitCoverage=18%, E-value=2e-49, Identity=69%"; Hit description=Ca2+ binding protein cbp1
KEQCSVNLIKKDLLGLGNGFLRRPAHVISLSHHGIGRNEFGLPMGARSLLQSVRTASTATAGQPKMDMDDEQSEDQKQNKXEKEASPEECDQAVEGLSTAKAKAKAKQVQESLKAGQSVMQKFWARILGIGPALRAVASMSKGLELGTRQKDLKTIR

SEQ ID NO: 100807 - protein, 53 aa, Setaria italica
  Transcript Sequence Number=SeqID_34833
LLTSRESGTNQNIALVVVHIGGSRLTKGRPFQHGHRLVALARWVSEKRVRFVM

SEQ ID NO: 100808 - protein, 250 aa, Setaria italica
  misc_feature (165)..(165): Xaa can be any naturally occurring amino acid
  Transcript Sequence Number=SeqID_34834
  Gene Ontology: Mol. function=catalytic activity; Biological process =cellular metabolic process
  Homolog annotation: Hit_ID=B0CFL1; Match level="QueryCoverage=66%, HitCoverage=51%, E-value=1e-21, Identity=38%"; Hit description=PRC -barrel domain protein
PSSFDFLALKRELELEEEEGAVVAVEADEERGAVSEGDGEREAERSAGGTRQRRRRRQMARRSALLAKQVISVSSARSLGFVSQLWVDAASWIVALVEVRPSLLSGEAEKFLFEDICQVGDVVLVEDESVIENEYNLVGLHSLVGYNVVTSRRRNVGKVSPCGLXREVRGFTFDINSGAMESLELDSFGFSIIPSSLVSTYCLFVEDVLDILFDTIVVHEDAVSRVQRLTQGILGTQNIRGPGGGEMDGY

SEQ ID NO: 100809 - protein, 197 aa, Setaria italica
  Transcript Sequence Number=SeqID_34835
  Gene Ontology: Mol. function=catalytic activity; Biological process =cellular metabolic process
  Homolog annotation: Hit_ID=C1E2W8; Match level="QueryCoverage=72%, HitCoverage=33%, E-value=8e-20, Identity=36%"; Hit description =Dehydrogenase
  Pfam annotation: Domain name=PRC; Domain location=59-140; Score=11.4; E_value=0.028; Accession=PF05239.8; Description=PRC-barrel domain
YHLFFIQSHSIFFQSWIVALVEVRPSLLSGEAEKFLFEDICQVGDVVLVEDESVIENEYNLVGLHSLVGYNVVTSRRRNVGKVRGFTFDINSGAMESLELDSFGFSIIPSSLVSTYCLFVEDVLDILFDTIVVHEDAVSRVQRLTQGILGTQNIRGPGGGEMDGYRRSGRRTNSQGGRKIHRKAKDPEDEFELPMDY

SEQ ID NO: 100810 - protein, 90 aa, Setaria italica
  Transcript Sequence Number=SeqID_34836
  Gene Ontology: Mol. function=strictosidine synthase activity; Cellular component=plasma membrane; Biological process=biosynthetic process
  Homolog annotation: Hit_ID=B6TVA9; Match level="QueryCoverage=100%, HitCoverage=26%, E-value=1e-44, Identity=95%"; Hit description =Strictosidine synthase 1
FHLPLPSGVTGAESLAFDGKGEGPYAGVSDGRVLKWGGSAAGWTTFAHSANYRKIPLCTAGVVPSEETESMCGRPLGLQFHAKTGDLYIA

SEQ ID NO: 100811 - protein, 99 aa, Setaria italica
  Transcript Sequence Number=SeqID_34837
  Gene Ontology: Mol. function=hydrolase activity, hydrolyzing O -glycosyl compounds; Biological process=carbohydrate metabolic process
  Homolog annotation: Hit_ID=B9R6T2; Match level="QueryCoverage=98%, HitCoverage=15%, E-value=2e-16, Identity=49%"; Hit description =Hydrolase, hydrolyzing O-glycosyl compounds, putative
CCHAYVASQWSGFLDGIRGNSGENYAVVSKRTEHWQGLEQDITNRVSTGTAYVVSAVVRVDGNVQGQVEVKGTLRLQNTDGSTHYNPVGSVLASKEKWN

SEQ ID NO: 100812 - protein, 66 aa, Setaria italica
  Transcript Sequence Number=SeqID_34838
AKGPGCHQIGFGNKNLHVNLYSKGSFVLISYQYVIDMFPKFNLYSFCDMQVGTFHRICGSLCSTHG

SEQ ID NO: 100813 - protein, 109 aa, Setaria italica
  Transcript Sequence Number=SeqID_34839
  Subcellular localization annotation: CTP_CleavageSite=56; ConfidenceScore=5.29e-01
ETVQKSPSPMKGKKVGLKVEAGKQRSPSVLKEVKATPPTPQRFPSPSPNRIKNVKSGGMAAAGLPLKKPLKDKGTLTKDLESKKDAVRQPFGVKDMNNTRACDAGRELR

SEQ ID NO: 100814 - protein, 217 aa, Setaria italica
  Transcript Sequence Number=SeqID_34840
  Gene Ontology: Mol. function=phosphatidylinositol phosphate kinase activity; Biological process=phosphatidylinositol metabolic process
  Homolog annotation: Hit_ID=Q94LF4; Match level="QueryCoverage=97%, HitCoverage=12%, E-value=1e-82, Identity=69%"; Hit description =Putative phosphoinositide kinase
KFYCGKKGMHFGDYHDGSTRSRGKTIVMDSASTLSCYRHSTVEACTNIASSYIKESLEGSYALPNVKTISKNNAVIVQPVSSAAPQNQETNQGDGSTSNNDEVVASDHQSILVSLSTRCVWKGTICERSQLLRIKYYGNFDKPLGRFLRDYLFDQGYQCRSCDKPPEAHVHCYTHRQGSLTISVRKLTEIVLSGERDGKIWMWHRCLKCPWSNGFPP

SEQ ID NO: 100815 - protein, 55 aa, Setaria italica
  Transcript Sequence Number=SeqID_34841
MASRCFFPRDAAADARHQSKAAAAALEQLNHGGRLLSREDVGGAVRVKIVVSKRE

SEQ ID NO: 100816 - protein, 102 aa, Setaria italica
  Transcript Sequence Number=SeqID_34842
RLLKKLAYILPKIDKSDNMQNLQSQQKRSLYRLCNEINNLQLKNRIRKIPHIKLPILYPCSYAHHWPIKHLHLVSGSQPETYFQSGAFTTPEKFSCIRKDLP

SEQ ID NO: 100817 - protein, 82 aa, Setaria italica
  Transcript Sequence Number=SeqID_34843
  Gene Ontology: Mol. function=flavin-containing monooxygenase activity; Cellular component=intrinsic to endoplasmic reticulum membrane
  Homolog annotation: Hit_ID=B6U2L7; Match level="QueryCoverage=70%, HitCoverage=15%, E-value=1e-12, Identity=55%"; Hit description =Monooxygenase/ oxidoreductase
MNHKKENVFRDLLAPCTRHSLQAWLISKVTEAYYKKAIPMREHGMEPELGFAGSISSCNIGMLPDAFYDKVRGGSIVIRRSG

SEQ ID NO: 100818 - protein, 523 aa, Setaria italica
  Transcript Sequence Number=SeqID_34844
  Gene Ontology: Mol. function=flavin-containing monooxygenase activity; Cellular component=intrinsic to endoplasmic reticulum membrane; Biological process=oxidation reduction
  Homolog annotation: Hit_ID=B6SWP3; Match level="QueryCoverage=96%, HitCoverage=94%, E-value=1e-143, Identity=50%"; Hit description =Monooxygenase/ oxidoreductase
  Pfam annotation: Domain name=DAO; Domain location=8-387; Score=-45.9; E_value=0.011; Accession=PF01266.16; Description=FAD dependent oxidoreductase
  Pfam annotation: Domain name=FMO-like; Domain location=6-520; Score= -346.3; E_value=4e-09; Accession=PF00743.11; Description=Flavin -binding monooxygenase-like
  Pfam annotation: Domain name=Pyr_redox_2; Domain location=8-384; Score=-24.5; E_value=5.8e-05; Accession=PF07992.6; Description =Pyridine nucleotide-disulphide oxidore
  Pfam module annotation: Pfam domain module=DAO::FMO-like::Pyr_redox _2; Domain location=8-387::6-520::8-384
  Subcellular localization annotation: CTP_CleavageSite=34; ConfidenceScore=5.19e-01
MDHKAAKRVAIVGAGTSGLAASKHLLARGFRPVVFEAGAAVGGLWTRTLATTRLQSPNQGYRFSDFPWPEDADAFPRHDQVVAYLAAYARRFGVEDCVRFRSKVVAAEFVGTDDGANAELWAGNGEAFGGDGAGRWRLTVRHGDSDATQTYEFDFLILCIGRFSGVPNIPEFPPGVGPDAFRGRVLHSMDFSDMNDADAAALVRGKRVAVVGSGKSAFDIAAECADANGAERPCTMVCRSPQWLLHDVNVWGKLNLGYLYMNRFAQLMVRKPGAGLASTLLATLLTPLVRLISKVTEAYYKKAIPMREHGMEPELGFAGSISSCNIGMLPDAFYDKVRGGSIVIRRSGAFSFCEDGLVLDGADRRVVPADLVILATGFCGDQKLRDMFVSPRVKDIVAGSSDTTVPLYRECVHPRIPQMAVIGYSESLTNIFSIEMMAKWVARFLDGAFRLPGVARMEQSVAEWGGYMRRSNGERFRRSCLGAVNIWYNDELCRDMGYDPRRKKGLLAEWFQPYGAVDYADIQ

SEQ ID NO: 100819 - protein, 167 aa, Setaria italica
  Transcript Sequence Number=SeqID_34845
MQRLVGVGERLLAIGTNRRAASYSHPSNRSGYYTAVRDNGLSTRRKIPAVFSRMFSHYKVIIRKNRGEDHKCRTRMSRGYRTLSVAVANSSATQQAQLAWKRLSHMYSYRGPRFPLMSRAACAVSLSFTRFHIIPGVMALAFGKMALAPPVLADSRSFMPRMDGSSQ

SEQ ID NO: 100820 - protein, 100 aa, Setaria italica
  Transcript Sequence Number=SeqID_34846
  Gene Ontology: Cellular component=mitochondrion
  Homolog annotation: Hit_ID=B9T3D5; Match level="QueryCoverage=76%, HitCoverage=10%, E-value=9e-12, Identity=44%"; Hit description =Pentatricopeptide repeat-containing protein, putative
  Pfam annotation: Domain name=PPR; Domain location=42-76; Score=30.7; E_value=5.9e-06; Accession=PF01535.12; Description=PPR repeat
  Pfam annotation: Domain name=PPR; Domain location=7-41; Score=45.7; E_ value=1.8e-10; Accession=PF01535.12; Description=PPR repeat
  Pfam module annotation: Pfam domain module=PPR::PPR; Domain location =42-76::7-41
GFFPDCISYSTIINELCKMGDTNKAFELWNEMLYKGLKPDIVAYNILIRWCSIHGEFCKGLGIYSGMLKNGVQPNWDTYGALFIGASLITRKGKTLLLTT

SEQ ID NO: 100821 - protein, 72 aa, Setaria italica
  Transcript Sequence Number=SeqID_34847
  Gene Ontology: Mol. function=transferase activity, transferring phosphorus-containing groups; Cellular component=membrane; Biological process=two-component signal transduction system (phosphorelay)
  Homolog annotation: Hit_ID=Q2ACC1; Match level="QueryCoverage=100%, HitCoverage=7%, E-value=3e-21, Identity=67%"; Hit description =Histidine kinase
MGGKYCGARKKRGWRGLVAAAWVLLAVACSAAMHWHLRRESLDRAEERLVSMCEERARMLQEQFGVTVNHVH

SEQ ID NO: 100822 - protein, 127 aa, Setaria italica
  Transcript Sequence Number=SeqID_34848
  Gene Ontology: Mol. function=protein serine/threonine kinase activity; Biological process=protein amino acid phosphorylation
  Homolog annotation: Hit_ID=B6THU2; Match level="QueryCoverage=99%, HitCoverage=19%, E-value=5e-35, Identity=57%"; Hit description =Receptor-like protein kinase RK20-1
  Pfam annotation: Domain name=DUF26; Domain location=1-37; Score=9.8; E_value=0.011; Accession=PF01657.9; Description=Domain of unknown function DUF26
GSCLAQAFRDVQNDCPYSKDATIYYDPCTLHYSDVHTLAGDDDTGPTTDDYGITNHGNVTSDPPRFNALLVALLNATADYAAFNSTRRFATGQADFFDKNFPKVYSLAQCPPDQPPARCRKCLAGII

SEQ ID NO: 100823 - protein, 61 aa, Setaria italica
  Transcript Sequence Number=SeqID_34849
IAELYHSTGYLKATSPLGGSGLVWLGYTNKDPSHSCFYSPMLNQGSEIYLYPCYQKELNLH

SEQ ID NO: 100824 - protein, 98 aa, Setaria italica
  Transcript Sequence Number=SeqID_34850
  Subcellular localization annotation: CTP_CleavageSite=9; ConfidenceScore=5.33e-01
NVVCYSFLSCLSLTSTVVACSDSLHNFPRRTASGVNPLQPQQQQPEDQQAIPQSSNQSGQNSAPMTGVQPSASANGDVTSNNSLSCAPSTSAPSPSVV

SEQ ID NO: 100825 - protein, 35 aa, Setaria italica
  Transcript Sequence Number=SeqID_34851
LLISDEDIPSNDTTIPTMQQGPMTRACARELNHES

SEQ ID NO: 100826 - protein, 653 aa, Setaria italica
  Transcript Sequence Number=SeqID_34852
  Gene Ontology: Mol. function=protein binding; Cellular component =nucleus; Biological process=regulation of transcription, DNA -dependent
  Homolog annotation: Hit_ID=B9S2M5; Match level="QueryCoverage=87%, HitCoverage=64%, E-value=1e-144, Identity=49%"; Hit description =Transcriptional corepressor SEUSS, putative
  Pfam annotation: Domain name=LIM_bind; Domain location=71-487; Score=- 177.7; E_value=0.0092; Accession=PF01803.8; Description=LIM-domain binding protein
FETLYQWTNAIANSQAAAAAQLSLLQQQRLLHMQQQQQQHQILKNLPLQRNQLQQQQQQQQQQQHQQLLRQQSLNMRTQGKSPPYEPGTCAKRLTHYMYHQQNRPQDNNIEYWRNFVNEYFAPNAKKRWCVSLYGSGRQTTGVFPQDVWHCEICNRKPGRGFETTVEVLPRLCQIKYASGTLEELLYIDMPRESQNASGQIILDYTKAIQESVFEQLRVVREGHLRIVFNSDLKIASWEFCARRHEELIPRRSIIPQVSNLGAVVQKYQAAAQNSTSLSAQDMQNNCNSFVACARQLAKALEVPLVNDLGYTKRYVRCLQIAEVVNCMKDLIDHSRNTGSGPIDSLHNFPRRTASGVNPLQPQQQQPEDQQAIPQSSNQSGQNSAPMTGVQPSASANGDVTSNNSLSCAPSTSAPSPSVVGLLQSSMNSRQDHPMSSTNGGPYNGGGNAAIPKVNSTSSLQSNPSTSFPSPVPTASNNNMMPAPQNTNQLTSPTTSSSIPPMQPPATRPQEAEPSESQSSVQKILQDLLSSQMNGVGQSGNDMKRPNGLNPGVNGVNCLVGNAVTNNPGMGGMGFGAMGGFGHGMRTAMTNNPMAMGARMGMNHSAHDLSQLGQLHQQQQQQQQQHDIGNQLLGGLRQANSFNNIQYDWKPSQ

SEQ ID NO: 100827 - protein, 144 aa, Setaria italica
  Transcript Sequence Number=SeqID_34853
KRIKDAHVKQNDRTNGKFLFFEAAGSKAPTHVYLSRIRIEPRPLIKRGILCCCTRIPFTSCASYLAVEDLKRASQRLHPRCVRRNDSEQKRLLGTHTFCPLHFAFTSRNSISAGPQKNVCASRQVPQVQKLALSRLSDNRSPAR

SEQ ID NO: 100828 - protein, 82 aa, Setaria italica
  Transcript Sequence Number=SeqID_34854
TALSADGATAVCGGGVQRELVGAGSRSEAKSGENTDEAMGERNGRARARRRVWFTREQRLIQTGAIFSRSVRVTAAKPRRAC

SEQ ID NO: 100829 - protein, 94 aa, Setaria italica
  Transcript Sequence Number=SeqID_34855
YDRSSCRNATSTFDETDSRPRRKENAGRDLLARLKERVNSSRKHSLSGGSSPCLSSQHTSNSGSTSSSRSISRSICRQASRMRKDEGRITEAVR

SEQ ID NO: 100830 - protein, 57 aa, Setaria italica
  Transcript Sequence Number=SeqID_34856
EYVTIMHCVAILPLGHSSKNVHNIGSHCDTAIVFHIEISFLLSNSRYCNCLFLSPIY

SEQ ID NO: 100831 - protein, 49 aa, Setaria italica
  Transcript Sequence Number=SeqID_34857
FCFLTVRLFLLAFSIDLFSRHELGFLVVAISSEFRFYIHIFSFRFQGIQ

SEQ ID NO: 100832 - protein, 85 aa, Setaria italica
  Transcript Sequence Number=SeqID_34858
LLSVPISKTDIMKDFPSLETPYHPTKTLLPFASSICSHLNCWLLPHNSKSMDMVTTYYSLVGFQHFPSFFVANNDGYWSSLEAFK

SEQ ID NO: 100833 - protein, 62 aa, Setaria italica
  Transcript Sequence Number=SeqID_34859
  Subcellular localization annotation: CTP_CleavageSite=47; ConfidenceScore=5.08e-01
VGPRQPGTRPRQHTAHARFLVCTRAAMPLCCSTICPTRTYLLPAQTSCSAAAQTTMDATQRQ

SEQ ID NO: 100834 - protein, 181 aa, Setaria italica
  Transcript Sequence Number=SeqID_34860
  Gene Ontology: Mol. function=oxidoreductase activity, acting on the CH-OH group of donors, NAD or NADP as acceptor; Cellular component =nucleus; Biological process=oxidation reduction
  Homolog annotation: Hit_ID=Q53RP5; Match level="QueryCoverage=92%, HitCoverage=14%, E-value=1e-58, Identity=65%"; Hit description=Malic enzyme (Fragment)
  Pfam annotation: Domain name=FAR1; Domain location=36-126; Score =101.4; E_value=3.1e-27; Accession=PF03101.7; Description=FAR1 family
MEEEVKTVPHDSNIETLPSLAPYVGMEFRNSDEAWAFWLSYGGQKGFEVRKRYTNKRPSDGTVTSCRFVCAKEGHRLQDKRDHLIKRHRIETRTDCEVHMSLKMDRNKGNYKVTELVLEHNHILHLPEILRLMMSQKKTSDLQVAGDARIEPKAVDDAEIGPKVAHELASCQVGGSLSLSS

SEQ ID NO: 100835 - protein, 194 aa, Setaria italica
  Transcript Sequence Number=SeqID_34861
  Homolog annotation: Hit_ID=O64533; Match level="QueryCoverage=89%, HitCoverage=12%, E-value=8e-49, Identity=54%"; Hit description =YUP8H12R.20
AQIRIASDAVLRALAAAGGHCSVGQFVVANADYIVDSLCRQLRHLDMNPHVPDVLASMLCYIGASHDILPFLEEPMRAVSSELEVLGRHDHPHLTVPFLKAVSEIAKACKHESTSLPDDAQSFYLKVSSEGQEVKNMIEKRMESSATSERMNADAQLDFMSLEYWEDLLCKLNEMRRYRRIVGSLTGSCLSAAT

SEQ ID NO: 100836 - protein, 49 aa, Setaria italica
  Transcript Sequence Number=SeqID_34862
TNSTPCLVSFYSHPSDRYDCSGWCSCGRWNIQLLCSCSSLQRTDIPTNT

SEQ ID NO: 100837 - protein, 130 aa, Setaria italica
  misc_feature (6)..(6): Xaa can be any naturally occurring amino acid
  Transcript Sequence Number=SeqID_34863
CFDSFXSFHQEAVQAVTDIEAIQAATSMAAAVASDEQPEDAPPVLQEIAQNRSVVRRRGIGGGVSKSVSFAPGTLDPRQDDGGGKTVRSSSASRKCLAMDKIGEDGGDEKRSSSSAPPSATATATAHSAL

SEQ ID NO: 100838 - protein, 269 aa, Setaria italica
  misc_feature (224)..(224): Xaa can be any naturally occurring amino acid
  Transcript Sequence Number=SeqID_34864
  Gene Ontology: Mol. function=protein serine/threonine kinase activity; Biological process=protein amino acid phosphorylation
  Homolog annotation: Hit_ID=Q8RV02; Match level="QueryCoverage=88%, HitCoverage=62%, E-value=6e-62, Identity=36%"; Hit description =Leucine Rich Repeat family protein, expressed
  Pfam annotation: Domain name=LRRNT_2; Domain location=27-67; Score =48.1; E_value=3.4e-11; Accession=PF08263.4; Description=Leucine rich repeat N-terminal domain
  Pfam annotation: Domain name=LRR_1; Domain location=119-141; Score =11.4; E_value=2; Accession=PF00560.25; Description=Leucine Rich Repeat
  Pfam annotation: Domain name=LRR_1; Domain location=143-165; Score =12.7; E_value=1.1; Accession=PF00560.25; Description=Leucine Rich Repeat
  Pfam annotation: Domain name=LRR_1; Domain location=167-190; Score =11.4; E_value=2; Accession=PF00560.25; Description=Leucine Rich Repeat
  Pfam annotation: Domain name=LRR_1; Domain location=192-214; Score =14.1; E_value=0.57; Accession=PF00560.25; Description=Leucine Rich Repeat
  Pfam annotation: Domain name=LRR_1; Domain location=216-238; Score =12.3; E_value=1.3; Accession=PF00560.25; Description=Leucine Rich Repeat
  Pfam annotation: Domain name=LRR_1; Domain location=240-263; Score =6.5; E_value=17; Accession=PF00560.25; Description=Leucine Rich Repeat
  Pfam annotation: Domain name=LRR_1; Domain location=71-93; Score=4.2; E_value=48; Accession=PF00560.25; Description=Leucine Rich Repeat
  Pfam annotation: Domain name=LRR_1; Domain location=95-117; Score =7.1; E_value=13; Accession=PF00560.25; Description=Leucine Rich Repeat
  Pfam module annotation: Pfam domain module=LRRNT_2::LRR_1::LRR_1::LRR_ 1::LRR_1::LRR_1::LRR_1::LRR_1::LRR_1; Domain location=27-67::119 -141::143-165::167-190::192-214::216-238::240-263::71-93::95-117
  Subcellular localization annotation: CTP_CleavageSite=65; ConfidenceScore=5.17e-01
MAFFFIRVVLLFLLSTTCASALTPTSNTTDLAALLAFKAQLKDPFGVLASNWTATASFCSWAGVSCDRSQRVTGLEFSDVPLQGSIAPQLGNLSFLSTIVLSNTSIMGTVPNELGSLPWLQTLNLSYNSLSGTIPHILGNLTRLDTLDLARNNFLGGIPHELQKLHSLISLILQFNELSGPIPQGLFNNSTNLSEINLGSNWLTGAIPDSFSSLLKLEMLVLQXNLLSGPIPPSLFNMSQLQALAVGWNNLSGPIPGNESFHLPMLQVL

SEQ ID NO: 100839 - protein, 105 aa, Setaria italica
  Transcript Sequence Number=SeqID_34865
  Gene Ontology: Mol. function=nucleotidyltransferase activity; Cellular component=endoplasmic reticulum; Biological process =biosynthetic process
  Homolog annotation: Hit_ID=B4F7T8; Match level="QueryCoverage=97%, HitCoverage=31%, E-value=1e-53, Identity=99%"; Hit description =Choline-phosphate cytidylyltransferase B
MRIVKDYNEYVMRNLARGYTRKDLGVSYVKEKRLRVNMGLKNLRDKVKQHQEKVGEKWSTVAKLQEEWVENADRWVAGFLEKFEEGCHSMGTAIKERIQERLKAI

SEQ ID NO: 100840 - protein, 319 aa, Setaria italica
  Transcript Sequence Number=SeqID_34866
  Gene Ontology: Mol. function=nucleotidyltransferase activity; Cellular component=endoplasmic reticulum; Biological process =biosynthetic process
  Homolog annotation: Hit_ID=B4F7T8; Match level="QueryCoverage=89%, HitCoverage=88%, E-value=1e-153, Identity=91%"; Hit description =Choline-phosphate cytidylyltransferase B
  Pfam annotation: Domain name=CTP_transf_2; Domain location=56-186; Score=145.5; E_value=1.7e-40; Accession=PF01467.18; Description =Cytidylyltransferase
MADDAKAEAARPRPESSQEEEEDWKEAEGDVAEVDRAAPNGAGEAQVPTDRPIRVYADGIYDLFHFGHARSLEQAKKLFPNTYLLVGCCNDELTHKYKGRTVMTEDERYESLRHCKWVDEVIPDAPWVVSEEFLDKHNIDFVAHDSLPYADASGAGKDVYEHVKKLGKFKETQRTDGISTSDIIMRIVKDYNEYVMRNLARGYTRKDLGVSYVKEKRLRVNMGLKNLRDKVKQHQEKVGEKWSTVAKLQEEWVENADRWVAGFLEKFEEGCHSMGTAIKERIQERLKAQSRDFGSLLQYESDDYEEEDDEDEHFEDVKE

SEQ ID NO: 100841 - protein, 217 aa, Setaria italica
  misc_feature (56)..(56): Xaa can be any naturally occurring amino acid
  misc_feature (126)..(126): Xaa can be any naturally occurring amino acid
  Transcript Sequence Number=SeqID_34867
  Homolog annotation: Hit_ID=Q6K987; Match level="QueryCoverage=97%, HitCoverage=33%, E-value=5e-75, Identity=61%"; Hit description =Endoribonuclease L-PSP family protein-like
TTGLEEVVCSRLGLVSLAYLWKQDQTLLLRGNDKKGIVAITVKVAALGLKPSSHLXNARIILDDYEVILHSADSIASVGILHPRVFHLQHKPDSSDRIGDGSVTQEISSCVYEVDEVITHTDMEKXQTLSPGVDAYTDIDLCISKTGKNLRSIGCWIQDRSRASEGLKADLIAVLNRIDNQLKEEGLGWVNVLYVHLYISNMKEFGLANEVYVSFIT

SEQ ID NO: 100842 - protein, 263 aa, Setaria italica
  misc_feature (161)..(161): Xaa can be any naturally occurring amino acid
  Transcript Sequence Number=SeqID_34868
  Gene Ontology: Mol. function=nucleotide binding; Cellular component =cytoplasm; Biological process=meiosis
  Homolog annotation: Hit_ID=Q6K987; Match level="QueryCoverage=93%, HitCoverage=33%, E-value=1e-104, Identity=76%"; Hit description =Endoribonuclease L-PSP family protein-like
  Pfam annotation: Domain name=Ribonuc_L-PSP; Domain location=172-254; Score=-21.1; E_value=0.0025; Accession=PF01042.13; Description =Endoribonuclease L-PSP
DSSDRIGDGSVTQEISSCVYEVDEVITHTDMEEKQTLSPGVDAYTDIDLCISKTGKNLRSIGCWIQDRSRASEGLKADLIAVLNRIDNQLKEEGLGWVNVLYVHLYISNMKEFGLANEVYVSFITEKKCYLGVPSRSTIELPLVQVGLGKAYVEVLVSKVXAFRFLHVQSISCWAPSCIGPYSQATLYGEILYMAGQLGLDPPTMKLCPDGPTAELELALQNSEAVANAFSCSIYSSAIHFLVYCSAMSVRLLPSHQMSTCCL

SEQ ID NO: 100843 - protein, 614 aa, Setaria italica
  Transcript Sequence Number=SeqID_34869
  Gene Ontology: Mol. function=nucleotide binding; Cellular component =cytoplasm; Biological process=meiosis
  Homolog annotation: Hit_ID=Q6K987; Match level="QueryCoverage=98%, HitCoverage=83%, E-value=0.0, Identity=78%"; Hit description =Endoribonuclease L-PSP family protein-like
  Pfam annotation: Domain name=ATP_bind_4; Domain location=1-129; Score= -43.2; E_value=1.1e-05; Accession=PF01902.9; Description=ATP-binding region
  Pfam annotation: Domain name=Ribonuc_L-PSP; Domain location=303-433; Score=15.1; E_value=1.3e-06; Accession=PF01042.13; Description =Endoribonuclease L-PSP
  Pfam module annotation: Pfam domain module=ATP_bind_4::Ribonuc_L-PSP; Domain location=1-129::303-433
GAIASDYQRLRVESVCSRLGLVSLAYLWKQDQTLLLEEMIRRGIVAITVKVAALGLKPSSHLGKELAELKCHLLRMNENYGINVCGEGGEYETLTLDCPLFRNARIILDDYEVILHSADSIASVGILHPRVFHLQHKPDSSDRIGDGSVTQEISSCVYEVDEVITHTDMEEKQTLSPGVDAYTDIDLCISKTGKNLRSIGCWIQDRSRASEAVLNRIDNQLKEEGLGWVNVLYVHLYISNMKEFGLANEVYVSFITEKKCYLGVPSRSTIELPLVQVGLGKAYVEVLVSNELKKRVLHVQSISCWAPSCIGPYSQATLYGEILYMAGQLGLDPPTMKLCPDGPTAELELALQNSEAVANAFSCSIYSSAIHFLVYCSAQLTSDEKEEVEQTLQSSYITRLDCSKTGSYPTVLYVFAPDLPKGARVEIKPILYVPTNDDGVATEETETGMTQSAPSQAWSAQYSDLHDSCCQIHTIGGRICSAVVSVTTDIATKICSTAGQLYYTEENLKAMARFCAFQITKILADNNFSWDSTTMLRFYYSVDNSVAADAMSRAFSEAFAELAEDNSSSRTDESPFYNIVPVSGSGCSACTNDIITCELLASKPSLHTHLNCSP

SEQ ID NO: 100844 - protein, 103 aa, Setaria italica
  Transcript Sequence Number=SeqID_34870
ARCIPGQLLVLCRHPKDTEGHSRADMVRVCNLLTGEVFHLPDLPYKPPDHYALIVADDNSLDGRMTQSFQLIAIWIIKGKSFTYVYYCSKTKEWWRPAGFPEL

SEQ ID NO: 100845 - protein, 56 aa, Setaria italica
  Transcript Sequence Number=SeqID_34871
  Homolog annotation: Hit_ID=B6UBY7; Match level="QueryCoverage=96%, HitCoverage=31%, E-value=2e-13, Identity=74%"; Hit description =Lachrymatory-factor synthase
MDHGTDGAAAPAVWRGSVRAVASGPSPDAAWALLRDFFSLDRWVSTVRTCRRVEGL

SEQ ID NO: 100846 - protein, 92 aa, Setaria italica
  Transcript Sequence Number=SeqID_34872
  Homolog annotation: Hit_ID=Q9SFC8; Match level="QueryCoverage=61%, HitCoverage=24%, E-value=5e-16, Identity=59%"; Hit description =F17A17.20 protein
TVKDLKLAIRKKINEMEQEQMGHRHISWKHVWDNYCLTHHNEKMIDDSSTLSSHDVRNNSKVCFSPHIMSRVHRKHSRRRKHRFFHGLNKKL

SEQ ID NO: 100847 - protein, 286 aa, Setaria italica
  misc_feature (238)..(238): Xaa can be any naturally occurring amino acid
  Transcript Sequence Number=SeqID_34873
PEHSAAVEARALVTGHASAALREPKQERAAVPAPAPAPAGTDIVGSLIEKGKPLIVCRKRSSIAKAAAAARKEESSTKAEADAAEEGLSVSSEKKAAAAVTATKDKAWGLRTKKGRGGAVRNPAGLGPRPTKGADGDAATTTTGGAKKADKKGAGGAAAGGPAKKRNAVDFLKRLNQSPSRKRGSPLGNTTRKRSASAAAAAAEQESTTTTRRRGAGRKEGTGRGGSRRGGRGTGTKXRRRAAAETGPGSSHAAALQAGQDEHPIGEAVGNGEAWRETTGRVMTDE

SEQ ID NO: 100848 - protein, 78 aa, Setaria italica
  Transcript Sequence Number=SeqID_34874
  Subcellular localization annotation: CTP_CleavageSite=58; ConfidenceScore=5.60e-01
AGKVKCIQSQCVSHTVFGYGLHPFPSLPLPLPGALPSTSPTLSPTPGSAVTPTVVLSSCAASSSPLVPREPLLTPIAP

SEQ ID NO: 100849 - protein, 100 aa, Setaria italica
  Transcript Sequence Number=SeqID_34875
QVEGQDAEPGDMKLADKISSDGSCSKSASSEVKQASYLCEVCNLDLKSESRLADHCNGEEHLEKQKLLNFCEVCNLQCNSRKMLDHHRTGKKHRSNVAFF

SEQ ID NO: 100850 - protein, 283 aa, Setaria italica
  Transcript Sequence Number=SeqID_34876
  Homolog annotation: Hit_ID=B6TB01; Match level="QueryCoverage=50%, HitCoverage=51%, E-value=5e-74, Identity=93%"; Hit description =Receptor expression-enhancing protein 3
  Pfam annotation: Domain name=TB2_DP1_HVA22; Domain location=3-98; Score=64.4; E_value=4.1e-16; Accession=PF03134.11; Description =TB2DP1, HVA22 family
MIGSIITGALTLVLGYAYPAYDCYKTVELNRPEVEQLRFWCQYWILLSVLTVLERVGENFVSWLPMYSEAKLVFIVYLWYPKTRGTAYVYESFFKPYIAKHETEIDRNLLELRTRAGDMAVLYFQKVANYVQTRSYEILQYIASQSQSQRPRSQGQQQQQRPPPPRTRQVNPGPPPVPAPSAPPMPPQPAQAQVPPAPPRAPVPVAPPGAVPPAQPQPPPAPGAATTNGPQNTEAMQVDPPRASTSAAPPSLPSEETLIEEAIRLTRGRLRRRMAGGSGPPPS

SEQ ID NO: 100851 - protein, 112 aa, Setaria italica
  Transcript Sequence Number=SeqID_34877
  Gene Ontology: Mol. function=transcription factor activity; Cellular component=nucleus; Biological process=regulation of transcription, DNA-dependent
  Homolog annotation: Hit_ID=Q8GZQ2; Match level="QueryCoverage=100%, HitCoverage=44%, E-value=2e-25, Identity=64%"; Hit description=CBF3 -like protein
LEAVADFQRRFEAAASGAAVDEVTSRVSAPPPLPDIVSGSAATSLEQVPVKADEPAALDVEAFEPDWFGDMDLDTYYASLAEGLLMEPPPPAAAWEHGDFGDGGADVALWSY

SEQ ID NO: 100852 - protein, 42 aa, Setaria italica
  Transcript Sequence Number=SeqID_34878
FASEQAMRDAIEGMNGKELDGRSITVNEASTAPPSSPLDVII

SEQ ID NO: 100853 - protein, 44 aa, Setaria italica
  Transcript Sequence Number=SeqID_34879
  Homolog annotation: Hit_ID=Q0J8G4; Match level="QueryCoverage=81%, HitCoverage=10%, E-value=2e-12, Identity=100%"; Hit description =Fructokinase-2
EERADEGITGAGDAFVGSLLVNVAKDDSIFHNEEKLREALKFSN

SEQ ID NO: 100854 - protein, 48 aa, Setaria italica
  Transcript Sequence Number=SeqID_34880
FFFFFFFFHGIKKFHTTDNPNLLVLQHALVDTLHIYKQSGHVRQEALH

SEQ ID NO: 100855 - protein, 108 aa, Setaria italica
  Transcript Sequence Number=SeqID_34881
  Gene Ontology: Mol. function=fructokinase activity; Cellular component=chloroplast; Biological process=carbohydrate metabolic process
  Homolog annotation: Hit_ID=Q0J8G4; Match level="QueryCoverage=87%, HitCoverage=28%, E-value=3e-44, Identity=89%"; Hit description =Fructokinase-2
VVGITLCEEGDLIIADGDKGCRYFTKDFKGSVPGYKVNTIDTTGAGDAFVGSLLVNVAKDDSIFHNEEKLREALKFSNACGAICTTQKGAIPALPTVAAAHELIAKGN

SEQ ID NO: 100856 - protein, 212 aa, Setaria italica
  misc_feature (128)..(128): Xaa can be any naturally occurring amino acid
  misc_feature (153)..(153): Xaa can be any naturally occurring amino acid
  Transcript Sequence Number=SeqID_34882
  Gene Ontology: Mol. function=fructokinase activity; Cellular component=chloroplast; Biological process=carbohydrate metabolic process
  Homolog annotation: Hit_ID=Q0J8G4; Match level="QueryCoverage=90%, HitCoverage=55%, E-value=9e-77, Identity=77%"; Hit description =Fructokinase-2
GFFVLVSYLVYVVVYGRLGPFVTLKKNGEREFMFYRQTPRRPNMLLTEAELNLDLIRRAKIFHYGSISLISEPCRSAHMAAMRAAKAAGILCSYDPNVRLPLWPSEDAARAGILSIWKEADFIKVSEXNRRYAFLTQGDANDEKNVLSLLGYXGLKLLIVTDGDKGCRYFTKDFKGSVPGYKVNTIDTTGAGDAFVGSLLVNVAKDDSIFHV

SEQ ID NO: 100857 - protein, 265 aa, Setaria italica
  misc_feature (9)..(9): Xaa can be any naturally occurring amino acid
  Transcript Sequence Number=SeqID_34883
  Gene Ontology: Mol. function=SNAP receptor activity; Cellular component=late endosome membrane; Biological process=intracellular protein transport
  Homolog annotation: Hit_ID=B6ST94; Match level="QueryCoverage=82%, HitCoverage=76%, E-value=1e-121, Identity=98%"; Hit description =Syntaxin 23
  Pfam annotation: Domain name=SNARE; Domain location=177-239; Score =92.4; E_value=1.6e-24; Accession=PF05739.11; Description=SNARE domain
  Pfam annotation: Domain name=Synaptobrevin; Domain location=178-264; Score=-3.4; E_value=0.059; Accession=PF00957.13; Description =Synaptobrevin
  Pfam annotation: Domain name=Syntaxin; Domain location=9-108; Score =43.6; E_value=7.7e-10; Accession=PF00804.17; Description=Syntaxin
  Pfam module annotation: Pfam domain module=SNARE::Synaptobrevin::Synta xin; Domain location=177-239::178-264::9-108
  Subcellular localization annotation: CTP_CleavageSite=21; ConfidenceScore=5.03e-01
GRRNGRGGXAAAGGAGASQAVASGVFQINTAVATFQRLVNTLGTPKDTPDLRDRIHKTRQHITQLVKDTSDKLKQASEADHRVEVSATKKIADAKLAKDFQAVLKEFQKAQRLAVEREAAYAPFISQAGLPQSYNSSEVNNGADKLAEQRTQLLESRRQELVFLDNEIVFNEAIIEERDQGIQEIQHQITEVNEIFKDLAVLVHDQGAMIDDIDSHIENAVVSTSQAKGQLSKAAKTQKSNSSLICLLLVIFGVVLLIVIIVLAA

SEQ ID NO: 100858 - protein, 338 aa, Setaria italica
  misc_feature (16)..(16): Xaa can be any naturally occurring amino acid
  misc_feature (191)..(191): Xaa can be any naturally occurring amino acid
  misc_feature (317)..(317): Xaa can be any naturally occurring amino acid
  Transcript Sequence Number=SeqID_34884
  Gene Ontology: Mol. function=fructokinase activity; Cellular component=chloroplast; Biological process=carbohydrate metabolic process
  Homolog annotation: Hit_ID=Q0J8G4; Match level="QueryCoverage=99%, HitCoverage=99%, E-value=1e-163, Identity=85%"; Hit description =Fructokinase-2
  Pfam annotation: Domain name=PfkB; Domain location=16-327; Score =327.5; E_value=2.7e-95; Accession=PF00294.16; Description=pfkB family carbohydrate kinase
MAPLGDGAAAAASSAXPSLVSFGEMLIDFVPDVAGLSLAESGGFVKAPGGAPANVACAVSKLGGASAFLGKFGDDEFGHMLVNILKQNGVNSEGCLFDQHARTALAFVTLKKNGEREFMFYRNPSADMLLTEAELNLDLIRRAKIFHYGSISLISEPCRSAHMAAMRAAKAVRSIPSCSYDPNVRLPLWPXSEEAARAGILSIWKEADFIKVSDDEVAFLTQGDANDEKNVLSLWFDGLKLLIVTDGDKGCRYFTKDFKGSVPGYKVNTIDTTGAGDAFVGSLLVNVAKDDSIFHNEEKLREALKFSNACGAICTTXRGAIPALPTVAAAHELIAKGN

SEQ ID NO: 100859 - protein, 93 aa, Setaria italica
  Transcript Sequence Number=SeqID_34885
  Gene Ontology: Mol. function=G-protein coupled photoreceptor activity; Cellular component=membrane; Biological process=regulation of transcription, DNA-dependent
  Homolog annotation: Hit_ID=Q2I7K6; Match level="QueryCoverage=95%, HitCoverage=11%, E-value=4e-37, Identity=85%"; Hit description =Phytochrome B (Fragment)
FCFSLCNSSLVLEKGEFSLGSVMNAVVSQAMILLRERDIQLIRDIPDEIKDASAYGDQYRIQQVLSEFLLSMVQFAPAENGWVEIQVRPNSKN

SEQ ID NO: 100860 - protein, 84 aa, Setaria italica
  Transcript Sequence Number=SeqID_34886
  Gene Ontology: Mol. function=G-protein coupled photoreceptor activity; Cellular component=membrane; Biological process=regulation of transcription, DNA-dependent
  Homolog annotation: Hit_ID=P93527; Match level="QueryCoverage=92%, HitCoverage=6%, E-value=3e-33, Identity=87%"; Hit description =Phytochrome B
VIFFLTLYFCRFACPGEGLPPDIVQDMFSNSRWSTHEGIGLSTCRKILKLMGGEVQYIRESERSFFLIVLELPQPRPAARREIS

SEQ ID NO: 100861 - protein, 186 aa, Setaria italica
  misc_feature (106)..(106): Xaa can be any naturally occurring amino acid
  Transcript Sequence Number=SeqID_34887
  Homolog annotation: Hit_ID=B6TQU2; Match level="QueryCoverage=100%, HitCoverage=75%, E-value=3e-59, Identity=63%"; Hit description =Uncharacterized BCR, COG1963 family protein
  Pfam annotation: Domain name=DUF212; Domain location=19-186; Score =51.4; E_value=3.6e-12; Accession=PF02681.6; Description=Divergent PAP2 family
RAIAATASLHLGPGEVAELARNKVLIAATMASAIGQLSKPFTSGKNGGTGSGLDLKTVFRSGGMPSTHSASVVAVATSLGLERGFADSVFGMSVVFAAIVMYDAQXKVPQDSELDMASEFVSVTEEVISSNRSNASPSPRRSSRAESPRLNRLRSSEPDVTDLTEVNSSYIEEGYLLSESVGHTEL

SEQ ID NO: 100862 - protein, 38 aa, Setaria italica
  Transcript Sequence Number=SeqID_34888
  Gene Ontology: Mol. function=protein binding; Cellular component =cytoplasm; Biological process=multicellular organismal development
  Homolog annotation: Hit_ID=Q3V810; Match level="QueryCoverage=100%, HitCoverage=10%, E-value=3e-14, Identity=97%"; Hit description =Anthocyanin biosynthetic gene regulator PAC1
DPVLVYDAGAEINQLQWSAAHPDWMAIAFENKVQLLRV

SEQ ID NO: 100863 - protein, 70 aa, Setaria italica
  Transcript Sequence Number=SeqID_34889
RKLNSVEVEPSALYAACAGRPVDMFGTPLTPESAILLSYGNSFCFRKPPIWPARNEPAVLNLSKSYMSFL

SEQ ID NO: 100864 - protein, 60 aa, Setaria italica
  Transcript Sequence Number=SeqID_34890
LLTADDLRQELVPAHLDPARPRLPRPHHLLPPAGVSNISFPSAGGARRRRHRSPDRPCAS

SEQ ID NO: 100865 - protein, 83 aa, Setaria italica
  Transcript Sequence Number=SeqID_34891
  Subcellular localization annotation: CTP_CleavageSite=40; ConfidenceScore=5.44e-01
QGSSSDLAVLISMAGKALSSAILLSFVILAAGSRSPAGVRQVQAVAPLQSSSATTADDYECVYTVYVQTGSIWLRHVTLDDQG

SEQ ID NO: 100866 - protein, 188 aa, Setaria italica
  misc_feature (126)..(126): Xaa can be any naturally occurring amino acid
  Transcript Sequence Number=SeqID_34892
  Homolog annotation: Hit_ID=B9RS71; Match level="QueryCoverage=98%, HitCoverage=35%, E-value=9e-48, Identity=50%"; Hit description =Pentatricopeptide repeat-containing protein, putative
  Pfam annotation: Domain name=PPR; Domain location=143-177; Score =10.5; E_value=0.51; Accession=PF01535.12; Description=PPR repeat
  Pfam annotation: Domain name=PPR; Domain location=40-73; Score=6.7; E_ value=1.4; Accession=PF01535.12; Description=PPR repeat
  Pfam annotation: Domain name=PPR; Domain location=5-39; Score=29.0; E_ value=2e-05; Accession=PF01535.12; Description=PPR repeat
  Pfam annotation: Domain name=PPR; Domain location=76-109; Score=4.7; E_value=2.5; Accession=PF01535.12; Description=PPR repeat
  Pfam module annotation: Pfam domain module=PPR::PPR::PPR::PPR; Domain location=143-177::40-73::5-39::76-109
ERSVVTWNVMIVGLGTHGYGLDAVTLFHRMEAERAPMDDLSVLAVLTACTHAGLVSEGLGIFHRMKKDFRIDPKVEHYGALVDLLGRAGRLDQARHAIETMPMEPTPELWGSLLAACRSHRCIELXAELSVERLANLGADDSGVYVLLSNIYADEGMWADVLRIRKLMSDEGMKKDIGRSVIDVDGEI

SEQ ID NO: 100867 - protein, 79 aa, Setaria italica
  misc_feature (4)..(4): Xaa can be any naturally occurring amino acid
  misc_feature (7)..(7): Xaa can be any naturally occurring amino acid
  Transcript Sequence Number=SeqID_34893
  Gene Ontology: Mol. function=zinc ion binding
  Homolog annotation: Hit_ID=B9RYP2; Match level="QueryCoverage=100%, HitCoverage=7%, E-value=2e-26, Identity=68%"; Hit description =Transcription factor, putative
PEWXPNXVQYYSITEYARLNHAISYNVHGTVALPVFDPSTKSCIAVVELIMTSKKVNYANEVGKVCKALEAVSLKSTEV

SEQ ID NO: 100868 - protein, 465 aa, Setaria italica
  misc_feature (204)..(204): Xaa can be any naturally occurring amino acid
  Transcript Sequence Number=SeqID_34894
  Gene Ontology: Mol. function=zinc ion binding; Cellular component =cytoplasm; Biological process=cellular response to starvation
  Homolog annotation: Hit_ID=B9SR86; Match level="QueryCoverage=99%, HitCoverage=91%, E-value=0.0, Identity=68%"; Hit description=Zinc finger protein, putative
  Pfam annotation: Domain name=zf-ZPR1; Domain location=259-420; Score =207.8; E_value=2.9e-59; Accession=PF03367.5; Description=ZPR1 zinc -finger domain
  Pfam annotation: Domain name=zf-ZPR1; Domain location=4-165; Score =260.0; E_value=5.6e-75; Accession=PF03367.5; Description=ZPR1 zinc -finger domain
  Pfam module annotation: Pfam domain module=zf-ZPR1::zf-ZPR1; Domain location=259-420::4-165
HEIESLCMRCGENGTTRLLLTLIPNFREVVLMAFECPHCGERNNEIQFAGQLQPKGCCYRLEVPSGQSEILNRQVVKSDSATIKIPELDFEIPPEAQRGKCSTVEGIIMRAVDELQALQDERKKVDPQKAEAIDQFLLKLRSLGSGEAAFTFILDDPAGNSYIENPHAPSSDPLLSVRFYERTREQQAALGFLAEPEQPGEAVXLPVSAVGSNSGGLQAEPHGAVGALAGRRAIAQGNPDEVAAALCRYAAPEEVDVLPSSCGACGAECVTRFFATKIPYFREVIVMATTCDICGYRNSELKPGGEIPAKGKKTTLRVQNVKDLTRDVIKSDSASVKVPELELELTSGTLGGMVTTVEGLIVKICEALERIHGFHLGDSTLEWKKKKWDDFKDRLSKLLSLQEPWTLILDDGLAASFVAPATDSLEDDKQLTIEEYQRSWEQNEELGLNDMDTSSADHAYNTTST

SEQ ID NO: 100869 - protein, 41 aa, Setaria italica
  Transcript Sequence Number=SeqID_34895
CSRSWYVFMATPRQLDSPARPWLRLSSDSGGRLKNSGSSAT

SEQ ID NO: 100870 - protein, 102 aa, Setaria italica
  Transcript Sequence Number=SeqID_34896
  Subcellular localization annotation: CTP_CleavageSite=59; ConfidenceScore=5.56e-01
LLFQSSRPKIHRNRTKDTTFFNITIVTSSWSSHASRKLSLNSQHQRNPPNAVRIRIDVSSARTGSILTRALLGSTSRVAIHFFTYSNADTSGNNVYSDQPLT

SEQ ID NO: 100871 - protein, 97 aa, Setaria italica
  misc_feature (11)..(11): Xaa can be any naturally occurring amino acid
  misc_feature (30)..(30): Xaa can be any naturally occurring amino acid
  Transcript Sequence Number=SeqID_34897
  Subcellular localization annotation: CTP_CleavageSite=20; ConfidenceScore=5.15e-01
QAFPAGVMRRXRRRRRRHVSAARSGRRRRXAEPASPSGSSGKAMIGAASSPLETEEEEAAAAVSEFEREIMSSRFYGAGFWRTVSSGSSSSASMRHQ

SEQ ID NO: 100872 - protein, 341 aa, Setaria italica
  misc_feature (332)..(332): Xaa can be any naturally occurring amino acid
  Transcript Sequence Number=SeqID_34898
  Gene Ontology: Mol. function=catalytic activity; Biological process =metabolic process
  Homolog annotation: Hit_ID=Q7F1V2; Match level="QueryCoverage=97%, HitCoverage=39%, E-value=1e-160, Identity=83%"; Hit description =Putative Cycloartenol Synthase
  Pfam annotation: Domain name=Prenyltrans; Domain location=165-207; Score=45.9; E_value=1.6e-10; Accession=PF00432.13; Description =Prenyltransferase and squalene oxidase re
  Pfam annotation: Domain name=Prenyltrans; Domain location=214-269; Score=24.0; E_value=0.0006; Accession=PF00432.13; Description =Prenyltransferase and squalene oxidase re
  Pfam module annotation: Pfam domain module=Prenyltrans::Prenyltrans; Domain location=165-207::214-269
QAILACNIAEEYINTLKKAHNFIKASQIMDNPSGDFSRKYRHISKGGWAFQVADQGWQVSDCTAEALKALLLLSKFSSDVAGDQIETGRLHDAVNILLSLQNPNGGYGTWELARTYPWMEIFNMTEIYADIMVEHQYVECTSSVIQALALFREKYPGHRKDEIDQCIRNATEFIEKLQNDDGSWFGSWGICFTYGTWFAIEGLSAVGQSYGNSTGIRKACKFLLSKQLHNGGWGESHLSSRTKAYTNLDGEKSHIVNTAWAMLALMKAGQVERDPTPLHKAAKLIMNMQLGNGDFPQEEMIGSFLKNGPLCYMAYRNIFPIWAIGEYQKLVXQCDLQWPTF

SEQ ID NO: 100873 - protein, 51 aa, Setaria italica
  Transcript Sequence Number=SeqID_34899
  Homolog annotation: Hit_ID=B6SWW8; Match level="QueryCoverage=56%, HitCoverage=4%, E-value=6e-10, Identity=100%"; Hit description=LysM receptor-like kinase
FGLTKLTEVGNTSLPTRGIVGTFGYMPPECVPSMFHMPSCICANCRVTLSL

SEQ ID NO: 100874 - protein, 296 aa, Setaria italica
  Transcript Sequence Number=SeqID_34900
  Gene Ontology: Mol. function=protein serine/threonine kinase activity; Biological process=protein amino acid phosphorylation
  Homolog annotation: Hit_ID=B6SWW8; Match level="QueryCoverage=91%, HitCoverage=43%, E-value=7e-84, Identity=61%"; Hit description=LysM receptor-like kinase
  Pfam annotation: Domain name=Adeno_E3_CR2; Domain location=232-267; Score=10.5; E_value=0.046; Accession=PF02439.7; Description =Adenovirus E3 region protein CR2
  Pfam annotation: Domain name=LysM; Domain location=39-84; Score=17.6; E_value=0.0084; Accession=PF01476.12; Description=LysM domain
  Pfam annotation: Domain name=SKG6; Domain location=225-263; Score =13.9; E_value=0.019; Accession=PF08693.2; Description=Transmembrane alpha-helix domain
  Pfam module annotation: Pfam domain module=Adeno_E3_CR2::LysM::SKG6; Domain location=232-267::39-84::225-263
MALHALLTRLLLLSAAASAAAAAGDDNCRLSGCDALASYLIARDQNLTYIASLFGFSDYRALKTYNPGVSNMDYIQAGQSVNISFRCGCQTLAKSPFSSYLAGSFPYKVASGEIYSSIAGHFNGLTTTDWLDKANSYPTNNIPDTGTVNVTVNCSCGNPGISKEYGLFLTYPLNGQTLASVAANYSFNSREQLDLLKKYNPGMDTNTSGLVFIPVRDANGSYHPLTSPEKGGSVGAIAGGVVGGVAALLLGVVLYIMFYRRRKAKKAALLPSSEESTQLAATSSMDKTALSSSQAD

SEQ ID NO: 100875 - protein, 95 aa, Setaria italica
  Transcript Sequence Number=SeqID_34901
FFFFISYLQRIIYLHSRVKSEILQVTHVLWTQLTRLSKSKNEETNTRHKHSRPTEEIKCEYLQWRWTWCPPLWRHKSALNVQLQGQAGNLQLQEG

SEQ ID NO: 100876 - protein, 143 aa, Setaria italica
  Transcript Sequence Number=SeqID_34902
  Gene Ontology: Mol. function=protein serine/threonine kinase activity; Biological process=protein amino acid phosphorylation
  Homolog annotation: Hit_ID=B6SWW8; Match level="QueryCoverage=96%, HitCoverage=22%, E-value=7e-73, Identity=95%"; Hit description=LysM receptor-like kinase
NKETNRAKVADFGLTKLTEVGNTSLPTRGIVGTFGYMPPEYARYGDVSPKVDVYAFGVVLYELISAKEAIVRSTESSSDSKGLVYLFEEALNEPDPKEGLQRMIDPALGEDYPIDSILKMTSLARACTQEDPKSRPTMRSVVV

SEQ ID NO: 100877 - protein, 92 aa, Setaria italica
  misc_feature (41)..(41): Xaa can be any naturally occurring amino acid
  Transcript Sequence Number=SeqID_34903
  Gene Ontology: Mol. function=protein serine/threonine kinase activity; Biological process=protein amino acid phosphorylation
  Homolog annotation: Hit_ID=B6SWW8; Match level="QueryCoverage=96%, HitCoverage=14%, E-value=6e-40, Identity=86%"; Hit description=LysM receptor-like kinase
KLQFEEALNEPDPKEGLQRMIDPALGEDYPIDSILKARIPXLARACTQEDPKSRPTMRSVVVALMTLSSTSEFWDMNALQDNQGLVNLMSGR

SEQ ID NO: 100878 - protein, 368 aa, Setaria italica
  Transcript Sequence Number=SeqID_34904
  Gene Ontology: Mol. function=protein serine/threonine kinase activity; Biological process=protein amino acid phosphorylation
  Homolog annotation: Hit_ID=B6SWW8; Match level="QueryCoverage=80%, HitCoverage=48%, E-value=1e-155, Identity=89%"; Hit description=LysM receptor-like kinase
  Pfam annotation: Domain name=Adeno_E3_CR2; Domain location=25-60; Score=10.5; E_value=0.046; Accession=PF02439.7; Description =Adenovirus E3 region protein CR2
  Pfam annotation: Domain name=Pkinase; Domain location=117-361; Score =117.6; E_value=4.2e-32; Accession=PF00069.17; Description=Protein kinase domain
  Pfam annotation: Domain name=Pkinase_Tyr; Domain location=117-341; Score=88.7; E_value=2e-23; Accession=PF07714.9; Description=Protein tyrosine kinase
  Pfam annotation: Domain name=SKG6; Domain location=22-56; Score=9.0; E_value=0.068; Accession=PF08693.2; Description=Transmembrane alpha -helix domain
  Pfam module annotation: Pfam domain module=Adeno_E3_CR2::Pkinase::Pkin ase_Tyr::SKG6; Domain location=25-60::117-361::117-341::22-56
EKKSSDFTFFYYICQSHPLGPEKGGSVGAIAGGVVGGVAALLLGVVLYIMFYRRRKAKKAALLPSSEESTQLAATSSMDKTALSSSQADSASAVPGITVDKSVEFSYQELFNATEGFSMINKIGQGGFGAVYYAELRGEKAAIKKMDMQATNEFLAELKVLTHVHHLNLVRLIGYCIESSLFLVYEFIENGNLSQHLRGTGYQPLSWAARVQIALDSARGLEYIHEHTVPVYIHRDIKSANILIDKNYRAKVADFGLTKLTEVGNTSLPTRGIVGTFGYMPPEYARYGDVSPKVDVYAFGVVLYELISAKEAIVRSTESSSDSKGLVYLFEEALNEPDPKEGRQKKSNVNTYSGAGHGVLLSGGTNQP

SEQ ID NO: 100879 - protein, 124 aa, Setaria italica
  Transcript Sequence Number=SeqID_34905
DISNGANQLPLWMHMSPLCLCGRKKLIRKIRANYLVRGSVLKGFQYMATFNPLLHVDQTSFKNRCIAKHQGRCYLIYYDDMINLTASKLSLYYRRMMLRTAGHLYMFSCRKCKSKNINNLSAKT

SEQ ID NO: 100880 - protein, 219 aa, Setaria italica
  misc_feature (115)..(115): Xaa can be any naturally occurring amino acid
  misc_feature (165)..(165): Xaa can be any naturally occurring amino acid
  misc_feature (201)..(201): Xaa can be any naturally occurring amino acid
  misc_feature (213)..(213): Xaa can be any naturally occurring amino acid
  Transcript Sequence Number=SeqID_34906
  Homolog annotation: Hit_ID=B6SZ68; Match level="QueryCoverage=99%, HitCoverage=25%, E-value=3e-44, Identity=48%"; Hit description=Actin binding protein
SAGAADLNAGTNKVSFEPGPGMFYLDAIKPYLDDAGREGGGKAAPGMAGPKEEEPKCDDEEGGGACSDDGAGSVHSSCCFHSSHFSYSELTKSGQADGVSPSPSVRSKRWGSAPXTPLDKSKAARPYSPLGPRTPSSEDRGRRAQSPSSSASVLTSQSLNDHELXGTAQSVRSLRFQSSSACHAKEAEAVADTMSSDAASXKTVPPPPPPPPXPVMVKQ

SEQ ID NO: 100881 - protein, 47 aa, Setaria italica
  Transcript Sequence Number=SeqID_34907
ILLVIDCCHIVTHEQCLKQPKSESQLYARLYKTELTFGYITEDIINS

SEQ ID NO: 100882 - protein, 292 aa, Setaria italica
  misc_feature (89)..(89): Xaa can be any naturally occurring amino acid
  Transcript Sequence Number=SeqID_34908
  Gene Ontology: Cellular component=mitochondrial matrix
  Homolog annotation: Hit_ID=B6T540; Match level="QueryCoverage=82%, HitCoverage=89%, E-value=2e-87, Identity=69%"; Hit description =Mitochondrial glycoprotein
  Pfam annotation: Domain name=MAM33; Domain location=96-290; Score =60.9; E_value=4.8e-15; Accession=PF02330.8; Description =Mitochondrial glycoprotein
  Subcellular localization annotation: CTP_CleavageSite=42; ConfidenceScore=5.61e-01
PLFFLALSPLLLAAHLPIAMAFVSATASAFSTFLISVPSAARAGAGAGSCPQPGRAILAPLHAAKGSNSEPVVLESKVKGKKKKGSGAXGTLPGALDVEIREAQEYLDSDEQEPVPENFPFEILDEEGMSVVILKRDYKDEKIEVIVSMPNLEGGPEFDDEEGEGNGESAGKDDEEEQDDDESAGDSSISLKVVVSKASDPKLEFTCTAFREEITIDDMLIVEKTDEDGEKFPYEGPEFTELPVNVQKGLFKYLEQRGITLSATNFMHDYMVSKQAQEYIRWMRKLKDFVKE

SEQ ID NO: 100883 - protein, 62 aa, Setaria italica
  Transcript Sequence Number=SeqID_34909
APDSCRACIGAAIVRYVHPSVKPILTSHFGKVGRETATQIALFRLGDEIAVDPLSAINCPSL

SEQ ID NO: 100884 - protein, 102 aa, Setaria italica
  Transcript Sequence Number=SeqID_34910
LTANDVCQGIWRHKIARTYLKCLQDTLRWYSLLMVEFTHRDGAARIDLGFLIHEESRNCIIEGHKFAMGKRVSDPNRISKAHKHPIPRYSHNCTNSPISTPT

SEQ ID NO: 100885 - protein, 49 aa, Setaria italica
  Transcript Sequence Number=SeqID_34911
ILNFKHCLQSFSSIIFYSSGFVLSSENVFVELPSSVRLFPRYFFLAPMF

SEQ ID NO: 100886 - protein, 112 aa, Setaria italica
  Transcript Sequence Number=SeqID_34912
  Subcellular localization annotation: CTP_CleavageSite=33; ConfidenceScore=5.04e-01
ESFSKSSIKARFSRNRSVSTPKLRPQEKELPARAPAFPGTNSVSTYPAKEAVDNIEEDSHAENCSREINSENCSREINELIANGKLPNSRYNEYAFTSTESIPTGDIFLLPV

SEQ ID NO: 100887 - protein, 264 aa, Setaria italica
  Transcript Sequence Number=SeqID_34913
  Gene Ontology: Mol. function=catalytic activity; Cellular component =plasma membrane
  Homolog annotation: Hit_ID=B6U289; Match level="QueryCoverage=82%, HitCoverage=57%, E-value=1e-98, Identity=84%"; Hit description =Catalytic/ protein phosphatase type 2C
  Pfam annotation: Domain name=PP2C; Domain location=3-220; Score=77.9; E_value=3.6e-20; Accession=PF00481.13; Description=Protein phosphatase 2C
PPERAPPGASSSTDGSGGGSSPSPAQLLDEWREACANAFEAMDRELKLQPNMDCNFSGTTAVCAIKQGRDLILANLGDSRAVLATMSDAGYLRAVQLTADHKPGVAQEAERIKRCGGRVFALKDEPSVQRVWLPGEDCPGLAMARSLGDHRLKPHGVVSEPEVAHRRVGRGDLFIVLATDGVWDVLSNEEVVSIVCATPRKQHASKAVAEAAAQRWRTRYPLSRVDDCSAVCLFLRDQDWGGTVAAARAKAAAAAAAGAPHGPC

SEQ ID NO: 100888 - protein, 196 aa, Setaria italica
  misc_feature (154)..(154): Xaa can be any naturally occurring amino acid
  misc_feature (186)..(186): Xaa can be any naturally occurring amino acid
  Transcript Sequence Number=SeqID_34914
  Gene Ontology: Mol. function=transferase activity
  Homolog annotation: Hit_ID=B6SS11; Match level="QueryCoverage=99%, HitCoverage=36%, E-value=4e-77, Identity=76%"; Hit description =Glycosyltransferase
  Pfam annotation: Domain name=DUF563; Domain location=38-196; Score =108.5; E_value=2.3e-29; Accession=PF04577.6; Description=Protein of unknown function (DUF563)
LPGSPISAAMDELLQLGRRTRPDEEAAALCADVANGTVCCDRSALRTDVCVMRGDVRTQAASNSLFLLLRPNSSRAAAAEERIRPYTRKWESSIMSTIDELRLRSAPDRDAAAPAHCDVCHDVPAVVFSTGGYTGNVYHEFNDGIIPLYITTRXDTKKVVFVMVEYHDWWMTKYGHIVEQLSDYPXPIDFANDRRT

SEQ ID NO: 100889 - protein, 238 aa, Setaria italica
  misc_feature (101)..(101): Xaa can be any naturally occurring amino acid
  Transcript Sequence Number=SeqID_34915
  Gene Ontology: Biological process=protein localization
  Homolog annotation: Hit_ID=B9RXC4; Match level="QueryCoverage=86%, HitCoverage=6%, E-value=5e-25, Identity=32%"; Hit description =Vacuolar protein sorting-associated protein, putative
NHTRNHMAGTPASFTVQMSTHHEADDIQYRERKGCKFVTLTFESKHFVVMSGDSCMNFKCDLERMKIMLEMIQENKGTSVPFLHISKVKSSGYIHQSAKGXEHVSVDLQAEYMDASFSHQIFSFWRNMELKFPAASSAPSFCSVTFKAGLRKGSLLLNDGRWSSHGPVIETLLKNLTVQFSQMKDQTEVSAFVDLLVNYNNIDKVMWEPFIEPSRFQLNMLRKCADCALDISPSTDVC

SEQ ID NO: 100890 - protein, 357 aa, Setaria italica
  Transcript Sequence Number=SeqID_34916
  Homolog annotation: Hit_ID=Q65XS5; Match level="QueryCoverage=88%, HitCoverage=79%, E-value=1e-170, Identity=89%"; Hit description=BC10 protein
  Pfam annotation: Domain name=DUF266; Domain location=21-349; Score =573.1; E_value=3.1e-169; Accession=PF03267.6; Description =Arabidopsis protein of unknown function, DUF266
FCLCLSSAFLILLHGSSAPLEEKAAAGARVAEATAEVEEAPLPPGNTKVAFLFIARNRLPLELVWDAFFRGDKEGKFSIFVHSRPGFVLTRATSRSRFFYNRQVNNSIQVDWGEASMITAERILLSHALKDPLNERFVFVSDSCVPLYNFSYTYEYIMSSSTSFVDSFADTKAGRYNPRMDPIIPVENWRKGSQWAVLIKKHAEVVVEDEVVLPEFQKHCRRRPLPEFWRDWDRPIPAEAWKAHNCIPDEHYVQTLLAQTGLEEELTRRSVTHSAWDLSASKDRERRGWHPVTYKVSDATPALIKSIKGIDNIYYETENRREWCTSNGKPAPCFLFARKFTRGAGLKLLDSSLIAAK

SEQ ID NO: 100891 - protein, 218 aa, Setaria italica
  Transcript Sequence Number=SeqID_34917
  Gene Ontology: Mol. function=DNA binding; Cellular component =intracellular; Biological process=regulation of transcription, DNA -dependent
  Homolog annotation: Hit_ID=B9SKD5; Match level="QueryCoverage=84%, HitCoverage=31%, E-value=3e-56, Identity=57%"; Hit description =Bromodomain-containing protein, putative
  Pfam annotation: Domain name=Bromodomain; Domain location=64-149; Score=74.5; E_value=3.9e-19; Accession=PF00439.17; Description =Bromodomain
ASIGNNTPDRKADPVDEPPPSKQEAVSESKGTEETVEPRSSQELEEKQSTPERQRDEKELSAALEAIKKVMKMDAAEPFNIPVDPVALGIPDYFDIIDTPMDFGTICKNLERGDKYMNSEDVYKDVQFIWDNCTKYNSKGDYIIELMKRVKKGFMKNWLAAGLYSDVPDSGGNDNTGDEDAKGHSKSKSKNKRRRPGNDRHKSDCICAVCQVTRRKKE

SEQ ID NO: 100892 - protein, 78 aa, Setaria italica
  Transcript Sequence Number=SeqID_34918
HILRHLCCVFANDLLQLLSSGESMENALRACCKGIKIGKILIHREGDNGQQVCLFDFCRMLLFIPTYLCTGLHYFSCG

SEQ ID NO: 100893 - protein, 121 aa, Setaria italica
  misc_feature (12)..(12): Xaa can be any naturally occurring amino acid
  Transcript Sequence Number=SeqID_34919
  Gene Ontology: Mol. function=phosphotransferase activity, alcohol group as acceptor; Biological process=nucleoside metabolic process
  Homolog annotation: Hit_ID=A3CAB2; Match level="QueryCoverage=98%, HitCoverage=22%, E-value=7e-59, Identity=93%"; Hit description =Uridine kinase
LVFIYHNLPKDXIANRHVLLLDPILGTGNSAVQAISLLLKKGVQEANIIFLNLISAPQGVHVVSKRFPRVKIVTSEIEFGLNDDFRVIPGMGEFGDRYFGTDDYQSSTPLFCEDKNRVRLL

SEQ ID NO: 100894 - protein, 500 aa, Setaria italica
  Transcript Sequence Number=SeqID_34920
  Gene Ontology: Mol. function=phosphotransferase activity, alcohol group as acceptor; Cellular component=endoplasmic reticulum; Biological process=nucleoside metabolic process
  Homolog annotation: Hit_ID=A3CAB2; Match level="QueryCoverage=98%, HitCoverage=96%, E-value=0.0, Identity=90%"; Hit description=Uridine kinase
  Pfam annotation: Domain name=PRK; Domain location=64-250; Score =206.5; E_value=7.2e-59; Accession=PF00485.10; Description =Phosphoribulokinase  Uridine kinase family
  Pfam annotation: Domain name=Pribosyltran; Domain location=297-431; Score=12.5; E_value=0.00066; Accession=PF00156.19; Description =Phosphoribosyl transferase domain
  Pfam module annotation: Pfam domain module=PRK::Pribosyltran; Domain location=64-250::297-431
RRCAGPSLRRYMGSKSVDQVLDAAAAGVHYSALRLDDLSLQGSMSAEEQPTTSGLENGHQEPFVIGVAGGASSGKSTVCKMIIDQLRDQRVVVVTQESFYYGLTDEELIHVHDYNFDHPDAFDTELLLSCMKNLKHGKAVDIPNYNFKTYKSVPNARKVNPSDVIILEGILVFHDSRLRDLMNMKIFVDTDADVRLTRRIRRDTIEKGRDIKTVLDQYSKFVKPAFEDFILPTKKYADIIIPRGGDNDVAIDLIVQHIRTKLGQHDLCKIHPNLYVIQTTYQIRGMHTIIRDAATATHDFIFYADRLIRLVVEHGLGHLPFQEKQVITPTGSVYTGVEFSKRLCGISVIRSGESMENALRACCKGIKIGKILIHREGDNGQQLIYHNLPKDIANRHVLLLDPILGTGNSAVQAISLLLKKGVQEANIIFLNLISAPQGVHVVSKRFPRVKIVTSEIEFGLNDDFRVIPGMGEFGDRYFGTDDYQSSTPLFCEDKNRVRLL

SEQ ID NO: 100895 - protein, 288 aa, Setaria italica
  Transcript Sequence Number=SeqID_34921
  Gene Ontology: Mol. function=specific transcriptional repressor activity; Cellular component=membrane; Biological process=regulation of transcription, DNA-dependent
  Homolog annotation: Hit_ID=Q9M586; Match level="QueryCoverage=99%, HitCoverage=99%, E-value=1e-148, Identity=90%"; Hit description =Prohibitin
  Pfam annotation: Domain name=Band_7; Domain location=37-216; Score =133.6; E_value=6.2e-37; Accession=PF01145.17; Description=SPFH domain  Band 7 family
MSFKGAKMPSAPAGGSALVKVALVGGAGLYAVLNSFYNVEGGHRAIVFNRIEGIKDKVYPEGTHLMIPWIERPIIYDVRARPNLVESTSGSRDLQMVRIGLRVLTRPMPDQLPKIYRNLGENFNERVLPSIIHETLKAVVAQYNASQLITQREAVSREIRKILTERANNFNIALDDVSITSLSFGKEFTHAIEAKQVAAQEAERAKFIVEKAEQDKQSAIIRAQGEAKSAELIGQAIANNPAFLALRQIEAAREISHTMASSNNRVFLDSNDLLLGLQQLSVSGKQKK

SEQ ID NO: 100896 - protein, 38 aa, Setaria italica
  Transcript Sequence Number=SeqID_34922
SLLTNTSVQDLRTTHETPLICQVLLATSILFLKWIMKN

SEQ ID NO: 100897 - protein, 55 aa, Setaria italica
  Transcript Sequence Number=SeqID_34923
SVQVPLLWEDIQSKTWSDVSWAVKQNPGGGGTSTRIQTEILKRARTEEYDINNLL

SEQ ID NO: 100898 - protein, 147 aa, Setaria italica
  Transcript Sequence Number=SeqID_34924
  Gene Ontology: Mol. function=catalytic activity; Biological process =metabolic process
GLLVHVTFFVVCQKEEHQRKEPFTVQTLENKFEVQTAPISDGILPGIIRQIVIEVCNDIGIPVREISPSWSKHELWQEAFVTSGLRLVQHVESVQVPLLWEDIQSKTWSDVSWAVKQFQGAGCITTRIQTEILKRARTEEYDINNLL

SEQ ID NO: 100899 - protein, 210 aa, Setaria italica
  misc_feature (44)..(44): Xaa can be any naturally occurring amino acid
  misc_feature (160)..(160): Xaa can be any naturally occurring amino acid
  Transcript Sequence Number=SeqID_34925
  Gene Ontology: Mol. function=hydrolase activity, hydrolyzing O -glycosyl compounds; Biological process=carbohydrate metabolic process
  Homolog annotation: Hit_ID=Q10F03; Match level="QueryCoverage=100%, HitCoverage=39%, E-value=6e-92, Identity=79%"; Hit description =Isoamylase N-terminal domain containing protein, expressed
QNDFHRSSNGVAVSDYPSDGVDSERDEIHSRLQTLELDLSAALXTLRSRFAKVLSNMSNNNGATVLDDISDDWEFEETKVLQAQEELRSIRAKIAVLEGKMALEIIERNKIIEDKQRRLDEVEKALSELRTVCIMWANPASEVLLVGSFDGWTSQRKLEXSSERGMFSLNLRLYPGRYEIKFIVDGVWKNDPLRPTVYNNGHENNLLVVT

SEQ ID NO: 100900 - protein, 307 aa, Setaria italica
  Transcript Sequence Number=SeqID_34926
  Gene Ontology: Mol. function=intramolecular transferase activity, phosphotransferases; Cellular component=chloroplast; Biological process=carbohydrate metabolic process
  Homolog annotation: Hit_ID=B9T3D2; Match level="QueryCoverage=98%, HitCoverage=49%, E-value=1e-80, Identity=52%"; Hit description =Phosphoglucomutase, putative
  Pfam annotation: Domain name=PGM_PMM_I; Domain location=92-245; Score= 123.4; E_value=7.5e-34; Accession=PF02878.8; Description =Phosphoglucomutasephosphomannomutase, alphabetaalpha domain I
  Subcellular localization annotation: CTP_CleavageSite=37; ConfidenceScore=5.23e-01
MAALSAKTIQNAFLAQHHPRTRHGTRYPSDFCSLKTRGMHSFQECRLTVADSSAKWLNTTSTPWTSFNKQAISCNAAQGGSVVSSSEKVDFLKLQNGSDIRGVAVAGVEGEPVNLTEPATEAIAAAFAAWLLNKKEADGLRRLRISVGHDSRISAHKLQNAVTHGITAAGHDILQFGLASTPAMFNSTLTEDERNHLPVDGAIMITASHLPYNRNGLKFFTSDGGLNKADIKDILERASKIYEESAHGKLKEWEDASRGVVNSVDYMSIYASDLVQAVRKSAGDKDKPLEGLHIVVDAGNGAGGFCG

SEQ ID NO: 100901 - protein, 464 aa, Setaria italica
  Transcript Sequence Number=SeqID_34927
  Gene Ontology: Mol. function=intramolecular transferase activity, phosphotransferases; Cellular component=chloroplast; Biological process=carbohydrate metabolic process
  Homolog annotation: Hit_ID=B9T3D2; Match level="QueryCoverage=95%, HitCoverage=72%, E-value=0.0, Identity=75%"; Hit description =Phosphoglucomutase, putative
  Pfam annotation: Domain name=PGM_PMM_I; Domain location=1-93; Score= -26.5; E_value=0.014; Accession=PF02878.8; Description=Phosphoglucomut asephosphomannomutase, alphabetaalpha domain I
  Pfam annotation: Domain name=PGM_PMM_II; Domain location=116-225; Score=74.0; E_value=5.5e-19; Accession=PF02879.8; Description =Phosphoglucomutasephosphomannomutase, alphabetaalpha domain II
  Pfam annotation: Domain name=PGM_PMM_III; Domain location=227-343; Score=3.8; E_value=0.0068; Accession=PF02880.8; Description =Phosphoglucomutasephosphomannomutase, alphabetaalpha domain III
  Pfam annotation: Domain name=PGM_PMM_IV; Domain location=379-449; Score=-0.2; E_value=0.073; Accession=PF00408.12; Description =Phosphoglucomutasephosphomannomutase
  Pfam module annotation: Pfam domain module=PGM_PMM_I::PGM_PMM_II::PGM_ PMM_III::PGM_PMM_IV; Domain location=1-93::116-225::227-343::379-449
FSFRFCLFCFLGLIWFVLRFGSQFGLASTPAMFNSTLTEDERNHLPVDGAIMITASHLPYNRNGLKFFTSDGGLNKADIKDILERASKIYEESAHGKLKEWEDASRGVVNSVDYMSIYASDLVQAVRKSAGDKDKPLEGLHIVVDAGNGAGGFFVDKVLKPLGAVTTGSQFLEPDGLFPNHIPNPEDKTAMKAITQAVLDNKADLGIIFDTDVDRSAAVDSSGRELNRNRLIALMAAIVLEEHPGTTVVTDSVTSDGLTVFIENKLGGKHHRFKRGYKNVIDEAIRLNSIGEESHLAMETSGHGALKENHWLDDGAYLMVKLLNKLAAARTLGSSIGSKVLTDLVEGLEEAAVTVEIRLKIDQNHADLKGGPFRDYGEAVLRHLENAIGKDPNLHKAPKNYEGVRVSGYGGWFLLRLSLHDPVLPLNIEAPSNDDAIKLGLAVLAAVNEFSALDVTALNKFVQQ

SEQ ID NO: 100902 - protein, 41 aa, Setaria italica
  Transcript Sequence Number=SeqID_34928
SSAGRFSSEQRSTVSSSCAESLGGDVVVSPSSTTDLRRWLR

SEQ ID NO: 100903 - protein, 40 aa, Setaria italica
  Transcript Sequence Number=SeqID_34929
  Homolog annotation: Hit_ID=B9S1P0; Match level="QueryCoverage=97%, HitCoverage=8%, E-value=2e-10, Identity=76%"; Hit description =Flotillin-1, putative
KELAGVYKMLPPLLTTVHEQTGMLPPAWMGTLTGGPSTSS

SEQ ID NO: 100904 - protein, 873 aa, Setaria italica
  Transcript Sequence Number=SeqID_34930
  Homolog annotation: Hit_ID=Q53JH6; Match level="QueryCoverage=99%, HitCoverage=82%, E-value=1e-138, Identity=54%"; Hit description =Coiled-coil protein, putative, expressed
  Pfam annotation: Domain name=DUF869; Domain location=1-793; Score =86.9; E_value=7.2e-23; Accession=PF05911.3; Description=Plant protein of unknown function (DUF869)
  Pfam annotation: Domain name=M; Domain location=280-300; Score=2.0; E_ value=79; Accession=PF02370.8; Description=M protein repeat
  Pfam annotation: Domain name=M; Domain location=415-435; Score=4.8; E_ value=34; Accession=PF02370.8; Description=M protein repeat
  Pfam annotation: Domain name=M; Domain location=469-489; Score=4.2; E_ value=41; Accession=PF02370.8; Description=M protein repeat
  Pfam annotation: Domain name=M; Domain location=525-545; Score=8.4; E_ value=11; Accession=PF02370.8; Description=M protein repeat
  Pfam annotation: Domain name=M; Domain location=583-603; Score=3.0; E_ value=59; Accession=PF02370.8; Description=M protein repeat
  Pfam annotation: Domain name=Pox_A_type_inc; Domain location=259-281; Score=7.9; E_value=6.6; Accession=PF04508.4; Description=Viral A-type inclusion protein repeat
  Pfam annotation: Domain name=Pox_A_type_inc; Domain location=31-53; Score=6.9; E_value=9.3; Accession=PF04508.4; Description=Viral A -type inclusion protein repeat
  Pfam annotation: Domain name=Pox_A_type_inc; Domain location=443-465; Score=2.2; E_value=44; Accession=PF04508.4; Description=Viral A-type inclusion protein repeat
  Pfam annotation: Domain name=Pox_A_type_inc; Domain location=553-575; Score=3.2; E_value=32; Accession=PF04508.4; Description=Viral A-type inclusion protein repeat
  Pfam annotation: Domain name=Pox_A_type_inc; Domain location=649-668; Score=4.6; E_value=20; Accession=PF04508.4; Description=Viral A-type inclusion protein repeat
  Pfam annotation: Domain name=Pox_A_type_inc; Domain location=695-717; Score=0.5; E_value=80; Accession=PF04508.4; Description=Viral A-type inclusion protein repeat
  Pfam module annotation: Pfam domain module=DUF869::M::M::M::M::M::Pox_ A_type_inc::Pox_A_type_inc::Pox_A_type_inc::Pox_A_type_inc::Pox_A _type_inc::Pox_A_type_inc; Domain location=1-793::280-300::415 -435::469-489::525-545:...
  Pfam module annotation: Domain location=:583-603::259-281::31-53::443- 465::553-575::649-668::695-717
KECVRQLRLAREEQEDKIREIVSKKSQVPQSENSELQNHITELKKRLEVTRSEASSSMLLQHNLQEKLQVIEKENLDLKAKLQATEKENMDLKAKLLVQSKDLKILMLERDLSNKAAETASKQHLESVKKIARVEAECRRLHHLTRKPTLINDSRPTQNNGCMESLTDSQSDHGEHMVAVDNDLRNSDSWASALIAELDQFKNGKDGSRNLVNNPVEIDIMDDFLEMERLAALPESDRTSSNFETDSDTSVARSFSLKVETEELQNQVTDLQEKFDAIESEKRELEMTLMEVRNQLDISCDALVAAKNRLVEMQMQLDSENNSKLAALEDVERLDSERKALELQLESKSVEVEELLMAVTSMEENAGQKELESQLELMSAEATELRLTVASLEERIQAERALSVQHKEKEEATWNAKEDLEAQLSSANTEMGKLHDIVKALENEVKREKTLHEELTAQLQVKMEAAVCAVKESLEAQLCSANTEAGKLRGIVKELENEVEKEKALHEELAAQIEVKTEAARTAKAAKESLEAKLCSANAEIQKLQDITKALQSELEKEKALYEELSTQLEMKIEAERTRSVESAKESLEEQLQLVNSEAANLRDMVTALEHDVEKEKIFSAELQMQLEALEAIKKVLESEAESALQDARNLNQKVESLEAKLEDQMSSAEEFTAKAEALQSEKMAMEHKLKTADRELIKLTNKVSLLHREIEQERLLSEEYEQKCQKLEAQLSRDSRDAKLWRLANSNGDLKAKKEKELANAAGKLAECQKTIASLEHQLKSLTDLDSVVLEPERLESSRDMHIPLPLDFRNGDAEFAMFADDLYDFDLPNSNTSCFSPLPSIQPSSPPSEMSVFAGGLSTLSSYRSKRASRR

SEQ ID NO: 100905 - protein, 359 aa, Setaria italica
  Transcript Sequence Number=SeqID_34931
  Gene Ontology: Mol. function=microtubule motor activity; Cellular component=microtubule associated complex; Biological process =microtubule-based movement
  Homolog annotation: Hit_ID=Q75LL2; Match level="QueryCoverage=97%, HitCoverage=27%, E-value=1e-110, Identity=61%"; Hit description =Kinesin-like protein
NNVVKAVELQEQGEAGLHNLSDAQIELKTLVDAISSASQREAEAHETAIGLAKENEELRMQLKVLIEDNKRLFDLYEHAIVNVEANQDGNCPTIPGNEHASGQQGSHPFGENLVNEDLPNAPPAGPSDLHAHNSSSMEEESKIADEKCINEDNLSRNTSAELCLQLEEMHEENDRLMGLYEKAMQERDEYKRKILEQSNSETVKEIRSDEKDDEMSEAADPKSLEVKHVHDSTILALKEVLQLVRTKLELVQDKVVSAQDAVKYFELLERVSRKAEELSASIQLRRLDVQHGQEETKALKSALSESQDKKDTFEGKYFLPAASCWNLDLKTKAIASSKFDSNFALMNEKKEQLNLLLSR

SEQ ID NO: 100906 - protein, 181 aa, Setaria italica
  Transcript Sequence Number=SeqID_34932
  Gene Ontology: Mol. function=protein binding
  Homolog annotation: Hit_ID=Q01K92; Match level="QueryCoverage=98%, HitCoverage=48%, E-value=3e-83, Identity=79%"; Hit description =OSIGBa0148A10.6 protein
  Pfam annotation: Domain name=BTB; Domain location=1-110; Score=98.2; E_value=2.9e-26; Accession=PF00651.23; Description=BTBPOZ domain
MLKDGEGADVTFTVDGQLFRAHRCVLAYRSPVFRAELFGPLKEKATSCIRIDDMEPSIFEALLHFIYTDRLPDSCNDGRNAAMQHLLVAADRYGVERLRLMCESKLSEAIDVETVATTLALAEQHNCSQLRRACIGFMASPNMLGPIMETDGFNHLVASCPLVLKEILDKVSCIWSDNQHR

SEQ ID NO: 100907 - protein, 76 aa, Setaria italica
  Transcript Sequence Number=SeqID_34933
MSSLGTSKGILEIAKFGVYVSVPVALTYLVATDSKTLKKLMGLRPYVVYPPEGPRPPPPEELRERAREIARKRQQS

SEQ ID NO: 100908 - protein, 61 aa, Setaria italica
  Transcript Sequence Number=SeqID_34934
YCCEVFQEKFEVSLFTPPLGITRSCHRTLTHRPSGRKLAGTRARRQNCHPFKHVRYRYRWG

SEQ ID NO: 100909 - protein, 107 aa, Setaria italica
  Transcript Sequence Number=SeqID_34935
RKSDILLSDLFSSFFQLFFVHDANNRHKHERLHIWIEIFLSLISALIVPPGKKGRREKRLSVFVEQSPLLQNPLIFFGVCLVLDSSTSQEALSKDVIIRGCCKKNVS

SEQ ID NO: 100910 - protein, 109 aa, Setaria italica
  Transcript Sequence Number=SeqID_34936
GQWNHYPRNFSACRVKIFTRELSDASSSSIPSRDQEFRNIPCSGPRHTGDSTLYQKSTCPVAARMAEPIDEPPAARHRSRRRMLDGQQHKDESGREGTEVQYTVQASQE

SEQ ID NO: 100911 - protein, 352 aa, Setaria italica
  Transcript Sequence Number=SeqID_34937
  Gene Ontology: Mol. function=mismatched DNA binding; Cellular component=MutSalpha complex; Biological process=response to DNA damage stimulus
  Homolog annotation: Hit_ID=Q9XGC9; Match level="QueryCoverage=100%, HitCoverage=37%, E-value=0.0, Identity=88%"; Hit description=DNA mismatch repair protein MSH2
  Pfam annotation: Domain name=MutS_II; Domain location=26-168; Score =100.2; E_value=7.1e-27; Accession=PF05188.9; Description=MutS domain II
  Pfam annotation: Domain name=MutS_III; Domain location=175-352; Score= 166.5; E_value=7.6e-47; Accession=PF05192.10; Description=MutS domain III
  Pfam module annotation: Pfam domain module=MutS_II::MutS_III; Domain location=26-168::175-352
TKSGTPGNIGSFEDILFANNDMQDSPVIVALFPVFREGQLYVGLSFLDMTNRKLGLAEFPEDSRFTNVESALVALGCKECLLPADCEKSIDLNPLQDAISNCNVLLTEKKKVDFKSRDLAQDLGRIIRGSVEPVRDLLSQFDYALGALGALLSYAELLADDTNYGSYTIEKYNLNCYMRLDSAAVRALNITEGKTDMNKNFSLFGLMNRTCTVGMGKRLLNRWLKQPLLDINEINNRLDMVQAIVEDPELRQGLRQQLKRISDIDRLTHSLRKKSANLQPVVKLYQSCSRISYVKGVLQQYNGQFSTLIKTEFLDPLEEWMTENRFGRFASLVETAIDLDQLDNGEYRISPL

SEQ ID NO: 100912 - protein, 61 aa, Setaria italica
  Transcript Sequence Number=SeqID_34938
EFIRFQIDEVHLHMNFGALSIPVLLGLFCNYCQIFSLRFMSRLAYVQNFSSIFGSRGSCKL

SEQ ID NO: 100913 - protein, 117 aa, Setaria italica
  Transcript Sequence Number=SeqID_34939
  Gene Ontology: Mol. function=actin binding; Cellular component =integral to membrane; Biological process=actin cytoskeleton organization and biogenesis
  Homolog annotation: Hit_ID=A3AB67; Match level="QueryCoverage=99%, HitCoverage=13%, E-value=4e-45, Identity=75%"; Hit description =Formin-like protein 16
RLAINRNYSIRRSGSLARSGHEGSSSAAGQGPSREERQNEYMNLGLPIVGGLSTEFANVKRAAMVDYDAVVSECSILGSRLTDIKRLLETCSDDGLARGLRGFVKAAEQELKSLRGE

SEQ ID NO: 100914 - protein, 196 aa, Setaria italica
  Transcript Sequence Number=SeqID_34940
  Gene Ontology: Mol. function=transposase activity; Biological process= transposition, DNA-mediated
PPCPKIAVKSSYVLSPYLIHVDHNMDLGEGNTTTRIKRAKATNWPRVMSKFLLDWYLEKKRGMPPKTKFKKMHHVWCTSAVNAKFRTSYSVDQVHRHFRRFKEIWIVVTRYANETGSRFNNKHKMLILPAAIMASLPIAERAILAKPIPFFDHLLQLFNDGELDAACMRDPIMDDDSHEELETQIAMNIIAQGADT

SEQ ID NO: 100915 - protein, 194 aa, Setaria italica
  misc_feature (124)..(124): Xaa can be any naturally occurring amino acid
  Transcript Sequence Number=SeqID_34941
  Gene Ontology: Mol. function=protein serine/threonine kinase activity; Cellular component=cytoplasm; Biological process=protein amino acid phosphorylation
  Homolog annotation: Hit_ID=Q6L5F7; Match level="QueryCoverage=99%, HitCoverage=33%, E-value=1e-98, Identity=89%"; Hit description =Mitogen-activated protein kinase 17
  Pfam annotation: Domain name=Pkinase; Domain location=1-161; Score= -41.5; E_value=5.1e-06; Accession=PF00069.17; Description=Protein kinase domain
IILANADCKLKICDFGLARVSFCETPSAIFWTDYVATRWYRAPELCGSFFSKYTPAIDIWSVGCIFAELLTGKPLFPGKNVVHQLDLMTDLLGTPSAESISKIRNEKARRYLSNMRKKPKVPFXKKFPGVDPMALHLLERLLAFDPKERPSAAEALTDPYFNGLANSEREPIAQPISKLEFEFEKRKLGKDDVR

SEQ ID NO: 100916 - protein, 80 aa, Setaria italica
  Transcript Sequence Number=SeqID_34942
MEPPGFGKRLMSVLRAVYHMLRRGLCRKRLMMDLHLLFGRGKLAGKALRNLVAAAHHHPHAAAHHLQVASRAGAGAGSAA

SEQ ID NO: 100917 - protein, 86 aa, Setaria italica
  Transcript Sequence Number=SeqID_34943
CNGKYKRNGTSNTENEVMQVADGGHLFTCQQNDWTLCVSINIHMTVLSIQGNNHNQRIQQGNILNGKFQRSNNAFDYSRRKVVPNC

SEQ ID NO: 100918 - protein, 205 aa, Setaria italica
  misc_feature (163)..(163): Xaa can be any naturally occurring amino acid
  Transcript Sequence Number=SeqID_34944
  Gene Ontology: Mol. function=peptidase activity; Cellular component =plasma membrane; Biological process=lipid transport
  Homolog annotation: Hit_ID=B6UAB8; Match level="QueryCoverage=52%, HitCoverage=53%, E-value=3e-46, Identity=84%"; Hit description=Non -specific lipid-transfer protein
  Pfam annotation: Domain name=Tryp_alpha_amyl; Domain location=35-112; Score=40.3; E_value=7.7e-09; Accession=PF00234.14; Description =Protease inhibitorseed storageLTP f
MDPRAAASVLALFVAAAMSPAVVVVGDFAADRAECSDKLVGLATCLTYVQDEASAPTPDCCAGLKTVLQSSRKCLCVLVKDKDDPNLGLKLNVTKALGLPAVCNAPANISDCPRLLNLAPNSKEAQVFEQYAKQAAAQGTTPSATGGGSAATAAGAQKSGAAXVITAGRWLGVGTVGDGGARAVVLALLAAAAPLAAPFLVLLLG

SEQ ID NO: 100919 - protein, 247 aa, Setaria italica
  misc_feature (37)..(37): Xaa can be any naturally occurring amino acid
  Transcript Sequence Number=SeqID_34945
  Gene Ontology: Mol. function=hydrolase activity
  Homolog annotation: Hit_ID=B6TIY2; Match level="QueryCoverage=100%, HitCoverage=75%, E-value=1e-107, Identity=79%"; Hit description =Transposon protein
  Pfam annotation: Domain name=Asparaginase_2; Domain location=1-247; Score=279.2; E_value=9.1e-81; Accession=PF01112.10; Description =Asparaginase
MGWALVLHDGAGDVPRTLPPETREPRLVALCRCLDRXALDVVKLVVWELEDCPHFNAGRGSVLTADGTVEMEACIMEGATLRCGAVAGLSTVANAVSLARLVMEKTPHIYLAFDGAEAFAREQGVETKDPSHFITEQNIERLRQAKEANRVQIDYTQPMKGSQQAPQDTPAPADDNSQTGTVGCVAVDAAGNLATATSTGGLVNKMAGRIGDTPVVGAGTYANALCAVSATGKGEEIMRHTVARDVA

SEQ ID NO: 100920 - protein, 100 aa, Setaria italica
  Transcript Sequence Number=SeqID_34946
  Gene Ontology: Mol. function=nucleic acid binding
  Homolog annotation: Hit_ID=Q01K45; Match level="QueryCoverage=94%, HitCoverage=17%, E-value=1e-12, Identity=48%"; Hit description =OSIGBa0158F13.2 protein
ILKIPSVLQQLCQVTVFVCKNLQVIENKAPSISSFTLTGEVSTLSLGEASQKMKVLGLDHANAVHYARAKLPAIMPNLERLYLCCNEVYCTVVIPLCDGV

SEQ ID NO: 100921 - protein, 78 aa, Setaria italica
  Transcript Sequence Number=SeqID_34947
FLLLLCVWKLCHLKEASKMTMPVAKLQVYRNQPQMALCHWMPQMALQKCDYGICRWLPSQSVHPNTAGMTGEVMARTC

SEQ ID NO: 100922 - protein, 83 aa, Setaria italica
  Transcript Sequence Number=SeqID_34948
LKEDMMLTYRLTSVQGTSLPGHEIKPGRQETCMVNSDRFDRGSLRKEVAQDMVPKNTESLLFMPYLHSLQSSDAEGGLRTESS

SEQ ID NO: 100923 - protein, 127 aa, Setaria italica
  Transcript Sequence Number=SeqID_34949
  Gene Ontology: Mol. function=binding
  Subcellular localization annotation: CTP_CleavageSite=66; ConfidenceScore=5.06e-01
ELPKDEAEAIFKKLGLDGSFKLDTNQAVPPTPAARSVRPPAPSRRRARRAPSSSDESDTDGEVNLPAASVSRVPTTPSMTATRSQRASKTAALSKMSAKPAPVAASSDESDDQSDVTSDEDSCEESS

SEQ ID NO: 100924 - protein, 87 aa, Setaria italica
  Transcript Sequence Number=SeqID_34950
CLLPSATISLEIFMMLCMGLNPGACRLCDYLPKRVQYSPPLRQSQGNVSHHGQVFVFCVCRLSDVKFKHFQCILNYCVCHVGKIRLE

SEQ ID NO: 100925 - protein, 149 aa, Setaria italica
  misc_feature (8)..(8): Xaa can be any naturally occurring amino acid
  Transcript Sequence Number=SeqID_34951
  Gene Ontology: Mol. function=single-stranded DNA binding; Cellular component=nucleus; Biological process=nucleotide-excision repair
PVFVFDGXTPALKRRTLAARRRHRDAAQAKVRKTAEKLLLSHLKSRKLEELAEQIRSDRAKHDAKGKQVGSSRDGENENKNQDQNQNGDTNNSEGTIASINQEKMDEMLAASLAAEEETGFTGEGKHFTSVPLQEGAEIDDDDDDDDEG

SEQ ID NO: 100926 - protein, 122 aa, Setaria italica
  Transcript Sequence Number=SeqID_34952
LIGLTLLIQHTHAKQCNCQLVTEPHNSEQFSSAHTHSSSPINWLRRHRLEKLQIIYGLILVVYVIMEGRPILLSLLSIDQMARTRPGSDLCARSARRLCHRHLGPADEEAEEGRRRRKTRRP

SEQ ID NO: 100927 - protein, 108 aa, Setaria italica
  Transcript Sequence Number=SeqID_34953
  Homolog annotation: Hit_ID=Q5VQ37; Match level="QueryCoverage=100%, HitCoverage=25%, E-value=2e-45, Identity=80%"; Hit description=Leaf senescence protein-like
ARNHKDSLICLLTRAAEPTPSWPSSKHTVYYYGEYNFTVANFWAPYLVRHEQIDEDGPAHTGLWNLFLDEPDAVWAAHVAEFDYAVVSASSWFYRPSMLYEAGGLVGC

SEQ ID NO: 100928 - protein, 385 aa, Setaria italica
  misc_feature (66)..(66): Xaa can be any naturally occurring amino acid
  misc_feature (87)..(87): Xaa can be any naturally occurring amino acid
  misc_feature (364)..(364): Xaa can be any naturally occurring amino acid
  misc_feature (382)..(382): Xaa can be any naturally occurring amino acid
  Transcript Sequence Number=SeqID_34954
  Gene Ontology: Mol. function=protein binding; Cellular component =cytoplasm; Biological process=biological_process
  Homolog annotation: Hit_ID=B6TDM9; Match level="QueryCoverage=99%, HitCoverage=83%, E-value=1e-132, Identity=66%"; Hit description =Leucine Rich Repeat family protein
  Pfam annotation: Domain name=LRR_1; Domain location=100-120; Score =7.6; E_value=11; Accession=PF00560.25; Description=Leucine Rich Repeat
  Pfam annotation: Domain name=LRR_1; Domain location=122-143; Score =3.7; E_value=60; Accession=PF00560.25; Description=Leucine Rich Repeat
  Pfam annotation: Domain name=LRR_1; Domain location=145-166; Score =10.6; E_value=2.9; Accession=PF00560.25; Description=Leucine Rich Repeat
  Pfam annotation: Domain name=LRR_1; Domain location=168-189; Score =17.8; E_value=0.046; Accession=PF00560.25; Description=Leucine Rich Repeat
  Pfam annotation: Domain name=LRR_1; Domain location=191-214; Score =6.4; E_value=19; Accession=PF00560.25; Description=Leucine Rich Repeat
  Pfam annotation: Domain name=LRR_1; Domain location=216-240; Score =7.7; E_value=10; Accession=PF00560.25; Description=Leucine Rich Repeat
  Pfam annotation: Domain name=LRR_1; Domain location=35-55; Score =10.4; E_value=3.1; Accession=PF00560.25; Description=Leucine Rich Repeat
  Pfam module annotation: Pfam domain module=LRR_1::LRR_1::LRR_1::LRR _1::LRR_1::LRR_1::LRR_1; Domain location=100-120::122-143::145 -166::168-189::191-214::216-240::35-55
EQAAREAGSDGTGATALNLSHRALSDVSCLSSFNKLERLDLGYNCLVTLEGLSSCANLKWLSVIEXLVSLKGVEGLSKLQVLNAGKXKLTKMDEVASLTSLGALILNDNNISSICKLDRLQQLNTLVLSKNPIFAIGNALAKAKSMKKLSLSHCQIENIGSSLAACVELKELRLSHNKITTIPSDLAKNVKMLNLDLGNNLIERSSDLEVLSELRYLRNLNLQGNPISEKDSHVKKVKKLVPTLRILNAKPLEASSKSDNRYEKENDPVEVDRKKKDKKLQSKQQLKVPEEPEVKTVSLGVTTSALGKSEVLDGKERKKGRKEAKKKPEVEEHANDSKSKRKDDVDDTGRKDKKAKRKKFVIEXDIDAEGIDNTEISFADLXFSK

SEQ ID NO: 100929 - protein, 137 aa, Setaria italica
  Transcript Sequence Number=SeqID_34955
  Gene Ontology: Mol. function=transcription factor activity; Cellular component=nucleus; Biological process=regulation of transcription, DNA-dependent
  Homolog annotation: Hit_ID=B6SSL7; Match level="QueryCoverage=100%, HitCoverage=20%, E-value=6e-65, Identity=90%"; Hit description =Protein BABY BOOM 1
TFSTEEEAAEAYDIAAIKFRGLNAVTNFDMSRYDVKSILESSTLPVGGAARRLKDAVDHVEAGATIWRADMDAGVISQLADAGMGAYASYGHHGWPTIAFQQPSPLTVHYPYGQPSRGWCKPEQDAAVAAAAHSLQD

SEQ ID NO: 100930 - protein, 132 aa, Setaria italica
  misc_feature (19)..(19): Xaa can be any naturally occurring amino acid
  Transcript Sequence Number=SeqID_34956
  Gene Ontology: Mol. function=hydrolase activity; Biological process =lipid catabolic process
  Homolog annotation: Hit_ID=Q69VY8; Match level="QueryCoverage=90%, HitCoverage=8%, E-value=8e-44, Identity=76%"; Hit description =Putative calcium-independent phospholipase A2
  Pfam annotation: Domain name=LRR_1; Domain location=2-24; Score=11.5; E_value=1.9; Accession=PF00560.25; Description=Leucine Rich Repeat
  Pfam annotation: Domain name=LRR_1; Domain location=26-47; Score=6.1; E_value=21; Accession=PF00560.25; Description=Leucine Rich Repeat
  Pfam annotation: Domain name=LRR_1; Domain location=49-70; Score=8.6; E_value=6.8; Accession=PF00560.25; Description=Leucine Rich Repeat
  Pfam annotation: Domain name=LRR_1; Domain location=72-92; Score =10.4; E_value=3.1; Accession=PF00560.25; Description=Leucine Rich Repeat
  Pfam annotation: Domain name=LRR_1; Domain location=94-114; Score =4.0; E_value=53; Accession=PF00560.25; Description=Leucine Rich Repeat
  Pfam module annotation: Pfam domain module=LRR_1::LRR_1::LRR_1::LRR _1::LRR_1; Domain location=2-24::26-47::49-70::72-92::94-114
PLLEKLYLNNNKLSVLPPXEVGALKNMKVMSVNNNMLVSVPVELRQCVMLEELSLEHNKLVRPLLDFRSMPKLRILRLFGNPLEFLPEILPLHNLRHLTLANIRIEAVESLKSVTVQIETENSSYFIATRHK

SEQ ID NO: 100931 - protein, 82 aa, Setaria italica
  misc_feature (72)..(72): Xaa can be any naturally occurring amino acid
  Transcript Sequence Number=SeqID_34957
SRLRPVGAAAAWAGVGAEVVAARAAAELTMYIAREASKVSPRFDLVWRKVTVEISVELQLLREKWGLLLAGXIFQYIHGLAA

SEQ ID NO: 100932 - protein, 348 aa, Setaria italica
  Transcript Sequence Number=SeqID_34958
  Homolog annotation: Hit_ID=C5LU78; Match level="QueryCoverage=67%, HitCoverage=24%, E-value=5e-19, Identity=29%"; Hit description=Heat shock protein 70kD, putative
SRLRPVGAAAAWAGVGAEVVAARAAAELTMYIAREASKVWRKVTVEISVELQLLREKWGLLLAGLIFQYIHGLAARGVHYLHRPGPLLQDLGFMALPELGQDKGYLSESIFSSIFISFVLWTFHPFIYHSKRFYTVLIWRRVLAFLVASQFLRIITFYSTQLPGPNYHCREGSKLATLPPPNSVLEVLLINFPRGVLFGCGDLIFSSHMIFTLVFVRTYHKYGSKRFIKFLAWFMAIIQSLLIIASRKHYSVDVVVAWYTVNLVVFFVDNKLPEMPDRTNGVPLLPLSTKEKEIRLKEEKDSKLKDEFHKLLNGNHGDPTDRRQRAQMNGRHDEDINHALSEATANGT

SEQ ID NO: 100933 - protein, 94 aa, Setaria italica
  Transcript Sequence Number=SeqID_34959
  Subcellular localization annotation: CTP_CleavageSite=39; ConfidenceScore=5.57e-01
PGSCNGNRSCVTNKYSIPKTPTTTTLSLFSGFRTISNFQAMSTRYVCPPVTKEHHCEINSLRCQFFFTTNFYYNTYETYYSNKIMKILFLINLT

SEQ ID NO: 100934 - protein, 65 aa, Setaria italica
  Transcript Sequence Number=SeqID_34960
  Gene Ontology: Mol. function=binding
SGSSITSAKRRSPLSINKIALNNAANMHRLKSGDWRVEVSVPKQNMMPLVDIDEKGSSKVCILKD

SEQ ID NO: 100935 - protein, 51 aa, Setaria italica
  Transcript Sequence Number=SeqID_34961
KTRTLQKWSEWGIKGIATPIFQYSTSLLNIECPFSINPEMISKQSVLDGRG

SEQ ID NO: 100936 - protein, 102 aa, Setaria italica
  Transcript Sequence Number=SeqID_34962
  Gene Ontology: Mol. function=kinase activity
NGDGEKFSTENCILVRNKTSIHSDNHIDPFVRSENENGVDNSGEGNADSSSEEKCQRGSGNFAQGKILKGEYPLGIISQTHLLHSGSIDTLDKKYDYNDQGS

SEQ ID NO: 100937 - protein, 213 aa, Setaria italica
  misc_feature (93)..(93): Xaa can be any naturally occurring amino acid
  Transcript Sequence Number=SeqID_34963
  Gene Ontology: Mol. function=kinase activity
KGEYPLGIISQTHLLHSGSIDTLDKKYDYNDQGSSTEASKLLVEVAEGNTGDGNAFTGSSVVQEERIGDSKLQNIYGQISPFASSDLNTLKEXDPLEESLLAEATRFSGPDKTLNSQHTNEAKSVEELPNQGGHLNGPQKFESLNKCSQVVAPKEDGCISLGHVDNIQDMKNRINADAYSSDVRDGTSLCVPAGDSEETEVLYCQVSKILTDS

SEQ ID NO: 100938 - protein, 229 aa, Setaria italica
  Transcript Sequence Number=SeqID_34964
  Gene Ontology: Cellular component=integral to membrane
  Homolog annotation: Hit_ID=Q5ZA60; Match level="QueryCoverage=84%, HitCoverage=20%, E-value=7e-17, Identity=31%"; Hit description =Embryogenesis transmembrane protein-like
MATPGGAGDSWEYSLRKYLLLLASLVATVTYGAAFNPPGGVWQDDDPAKGRIAGDPIIQQTNHPRYLVFFYGNATAFASSLVVIVLILILSILHDRGGISLAPVLAILRLVMVLDLLSLMVAYAAGTFRDVFTAVYSLLLLAGVVAYLLLHLAPGKGEDESPEHAGESEAERADKSALLRLRKVLMLLATFAVSVTYVAGLSAPGGFWDNDDGGQRPGRAILKGGRHDA

SEQ ID NO: 100939 - protein, 68 aa, Setaria italica
  Transcript Sequence Number=SeqID_34965
NAPATYPCLSLYMYPETTLLRVVNQKQIIWANNWYLEPNSFPNNPLLSLSLSLVLSHAPPTPKPAATA

SEQ ID NO: 100940 - protein, 100 aa, Setaria italica
  misc_feature (72)..(72): Xaa can be any naturally occurring amino acid
  Transcript Sequence Number=SeqID_34966
  Gene Ontology: Mol. function=serine-type peptidase activity; Cellular component=membrane; Biological process=proteolysis
  Homolog annotation: Hit_ID=Q9FNF6; Match level="QueryCoverage=46%, HitCoverage=6%, E-value=5e-10, Identity=60%"; Hit description =Dipeptidyl peptidase IV-like protein
VEAAAGADCSGMAVEEIVQHPLPGYGAPVALSFCPDDRRVAYLYSPDGTLHRKVYIFDTAHQRQELLFGPPXGGGLEEGNLSAEERLRRERARERGLGVT

SEQ ID NO: 100941 - protein, 236 aa, Setaria italica
  Transcript Sequence Number=SeqID_34967
  Homolog annotation: Hit_ID=B6U646; Match level="QueryCoverage=42%, HitCoverage=24%, E-value=2e-22, Identity=60%"; Hit description =Pherophorin like protein
PTDRARAPPQVAELLRAIELLQEREARLRVELLEQKILKETVAIVPFLEAELAAKKTELERCRETADRLEAENARLCAELDAAALEVTSRKQRIVEMEKEMAELRRQHEAAAAADDCSSSASASNEHLESSSAAPHHASSAQPGAERPYIPPPPPAPPTPFKSKSYFSASSTPSPASSSPPSPSSSTSTSPSYSRSSSDTATAPRPRVPDLSKLPPIPPPPPPCPPPPPPPPRSTS

SEQ ID NO: 100942 - protein, 91 aa, Setaria italica
  Transcript Sequence Number=SeqID_34968
SGYGPYGGGYAQAGGQGGGGGGGQYGGSGQGSGSGSGYGQAGGYGPYGGGYAQAGGQGGGGGGGQSGPGGSGYGNGSGSGPGSAGSGGGYP

SEQ ID NO: 100943 - protein, 105 aa, Setaria italica
  misc_feature (39)..(39): Xaa can be any naturally occurring amino acid
  misc_feature (56)..(56): Xaa can be any naturally occurring amino acid
  misc_feature (96)..(96): Xaa can be any naturally occurring amino acid
  Transcript Sequence Number=SeqID_34969
  Gene Ontology: Mol. function=extracellular-glutamate-gated ion channel activity; Cellular component=integral to membrane; Biological process=ion transport
  Homolog annotation: Hit_ID=B9RNQ3; Match level="QueryCoverage=100%, HitCoverage=10%, E-value=1e-15, Identity=47%"; Hit description =Glutamate receptor 2 plant, putative
AVPVKPSVNPFVNVKKNVATGKFDVTGYCIDIFEAVMAXMPYAVPYEYVPVVDPNXPPNITLSYSEICYQVSLKKYNAMVGDTTIIINRSKLVDFXTLPYTESGV

SEQ ID NO: 100944 - protein, 86 aa, Setaria italica
  Transcript Sequence Number=SeqID_34970
RDQACWGLMDKFVFFETLMDKFVVAANGYPCFFFPFLFLFSDCPKKGTCRFTTTNRYCIFHLFLVLQTESYKLWYISLQRIKKKKK

SEQ ID NO: 100945 - protein, 54 aa, Setaria italica
  Transcript Sequence Number=SeqID_34971
MSGNDDKSQAAADRIKAAALSAAKGLSRAQAERAAAAAARNVNAYGQKEEGPSR

SEQ ID NO: 100946 - protein, 269 aa, Setaria italica
  Transcript Sequence Number=SeqID_34972
  Gene Ontology: Mol. function=nucleic acid binding
  Homolog annotation: Hit_ID=B6TKA1; Match level="QueryCoverage=53%, HitCoverage=53%, E-value=1e-54, Identity=73%"; Hit description=Zinc finger CCHC domain-containing protein 10
  Pfam annotation: Domain name=zf-CCHC; Domain location=93-110; Score =10.0; E_value=0.015; Accession=PF00098.15; Description=Zinc knuckle
MSGNDDKSQAAADRIKAAALSAAKGLSRAQAERAAAAAARNVNAYGQKEEGPSRWQERKEAKRQMYLMSTEKAAILGTVKPKASEASSGGAYTQCQKCFQHGHWTYECKNERVYMSRPSRTQQLKNPKLKKSVPVSYQFENPDLIKEREAEKKLMKEKRKKERSERRKGKSKRKHRSPSDSDSNSSDASVFDSESESSGTGSDYSSGSSSSYSSSDSEDKKQQHRRKQKKRRHRRDSTSSASSESESASDSDSDDKGSRRKSKRRSSRR

SEQ ID NO: 100947 - protein, 250 aa, Setaria italica
  Transcript Sequence Number=SeqID_34973
  Homolog annotation: Hit_ID=B4F841; Match level="QueryCoverage=100%, HitCoverage=77%, E-value=1e-116, Identity=83%"; Hit description =Lipid binding protein
  Pfam annotation: Domain name=DUF1336; Domain location=1-189; Score =248.2; E_value=2e-71; Accession=PF07059.4; Description=Protein of unknown function (DUF1336)
WLLRPAGVDWLRSHARLDHVLARDDNRVAAAFRRARLRKDPTAHFLLAVNLQVPGRPDAYSAVFYFAAEAPIPPDSLLGRFVHGDDAYRNARFKIANRIVKGPWLVRATVGNYAACLLGRALTCRYHKGDDYLEIDVDIGSSAIASAILHLALGAVTSVTIDMGFLVESQSEEELPERLFGAVRIAQMEMSAAKYVELPPDEAMPETAGRAGAGFRVSSAKVVNHSRQQEHAGGKVGRSMSCPGRDSGGK

SEQ ID NO: 100948 - protein, 62 aa, Setaria italica
  Transcript Sequence Number=SeqID_34974
GNEELCQINARLMSCGASDMQLHINPGGTLPTQVINPRRISIKPYRKGTNQRTSNQASNQIE

SEQ ID NO: 100949 - protein, 143 aa, Setaria italica
  misc_feature (11)..(11): Xaa can be any naturally occurring amino acid
  misc_feature (86)..(86): Xaa can be any naturally occurring amino acid
  Transcript Sequence Number=SeqID_34975
  Gene Ontology: Biological process=response to stress
  Homolog annotation: Hit_ID=B6SNQ1; Match level="QueryCoverage=100%, HitCoverage=85%, E-value=7e-61, Identity=80%"; Hit description =Universal stress protein
  Pfam annotation: Domain name=Usp; Domain location=20-139; Score=53.6; E_value=7.6e-13; Accession=PF00582.18; Description=Universal stress protein family
SVHALTWCLAXNVVSPAGGDTLVLVHARRSRPVYAAMDSAGYIMTSDVLASVERHATAVSAAAVDKAKRICAEHPHLAVETLVESXGDPRDVICDATDKVGADLLVMGSHGYGFIQRAFLGSVSNHCAQNCKCPVLIVKRPKE

SEQ ID NO: 100950 - protein, 37 aa, Setaria italica
  Transcript Sequence Number=SeqID_34976
HKYFYVEIHSAVCTSKCKVTWNHLRRFGQHLLISRLN

SEQ ID NO: 100951 - protein, 156 aa, Setaria italica
  misc_feature (12)..(12): Xaa can be any naturally occurring amino acid
  misc_feature (116)..(116): Xaa can be any naturally occurring amino acid
  Transcript Sequence Number=SeqID_34977
  Gene Ontology: Mol. function=nucleotide binding; Biological process =defense response
  Homolog annotation: Hit_ID=Q8H6R6; Match level="QueryCoverage=93%, HitCoverage=15%, E-value=3e-26, Identity=43%"; Hit description=NBS -LRR type disease resistance protein
LALVTVGRAMSXKRTPDEWADALDALKASQLSGTPGSEKGTHALVKFCYDNLESDTARECFLTCALWPEDHNISKDELVQSWIGLGLLPDRGDVDEAHRLGHSVIAVLEGARLLEXRGDNHRYNMFPSDTHVRLHDVVRDAALRFAPGRWLVRAGA

SEQ ID NO: 100952 - protein, 122 aa, Setaria italica
  misc_feature (93)..(93): Xaa can be any naturally occurring amino acid
  Transcript Sequence Number=SeqID_34978
  Homolog annotation: Hit_ID=Q98B88; Match level="QueryCoverage=68%, HitCoverage=72%, E-value=6e-10, Identity=39%"; Hit description =Mll5682 protein
  Pfam annotation: Domain name=DUF952; Domain location=16-113; Score =116.8; E_value=7.2e-32; Accession=PF06108.4; Description=Protein of unknown function (DUF952)
MANQAGPAPPAFVYRISTADEWAELQRAGATLGGDLDRSTGCIHLSDLNQVKMTLKNFFLGRNDLYLLQIDTSKLADGLIYEASDDNNYFPHXYGPGRSFVPLKLDAVIKADKIELENNDFT

SEQ ID NO: 100953 - protein, 89 aa, Setaria italica
  misc_feature (61)..(61): Xaa can be any naturally occurring amino acid
  Transcript Sequence Number=SeqID_34979
  Pfam annotation: Domain name=DUF952; Domain location=1-69; Score =14.4; E_value=1.9e-06; Accession=PF06108.4; Description=Protein of unknown function (DUF952)
SLDLVKVKMTLKNFFLGRNDLYLLQIDTSKLADGLIYEASDDNNYFPHFYGPGRSFVPLKXDAVIKADKIELENNDFTCSLLDRINLPS

SEQ ID NO: 100954 - protein, 48 aa, Setaria italica
  Transcript Sequence Number=SeqID_34980
SKQPEGTYIELKLMILNPLRSQGHPGILVSNSPSTCDQKMIKQAQCSY

SEQ ID NO: 100955 - protein, 113 aa, Setaria italica
  Transcript Sequence Number=SeqID_34981
SVSCAHRMSQDEDNIYKHGRRKPVMQIMHTYYLSDSITRRDEGTYGFTDVRVTFGAAVWKRAWPRILGLLPWMISSCGAEGPGRPAPPACGRRRLAAHSTLPPTNARPACHRR

SEQ ID NO: 100956 - protein, 88 aa, Setaria italica
  Transcript Sequence Number=SeqID_34982
  Gene Ontology: Mol. function=chorismate mutase activity; Cellular component=chloroplast; Biological process=aromatic amino acid family biosynthetic process
  Homolog annotation: Hit_ID=B4FUP5; Match level="QueryCoverage=79%, HitCoverage=27%, E-value=7e-30, Identity=87%"; Hit description =Chorismate mutase
TVNDAIWKMYFDELLPLFTVDGDDGSYAETVALDFACLQVLSRRVHIGKYVAEVKFKDAPHDYSPLIQAKVNLLNITLAASLNYLIRT

SEQ ID NO: 100957 - protein, 156 aa, Setaria italica
  Transcript Sequence Number=SeqID_34983
  Gene Ontology: Mol. function=chorismate mutase activity; Cellular component=chloroplast; Biological process=aromatic amino acid family biosynthetic process
  Homolog annotation: Hit_ID=B4FUP5; Match level="QueryCoverage=100%, HitCoverage=59%, E-value=2e-64, Identity=79%"; Hit description =Chorismate mutase
SLVTVNDAIWKMYFDELLPLFTVDGDDGSYAETVALDFACLQVLSRRVHIGKYVAEVKFKDAPHDYSPLIQAKDSNSLMDLLTFKAVEEKVKKRVEKKARTFGQNVTLEDNAGKQEVTAGDSECKVDPKVLSKLYDQWVMPLTKDVEVEYLLRRLD

SEQ ID NO: 100958 - protein, 245 aa, Setaria italica
  misc_feature (161)..(161): Xaa can be any naturally occurring amino acid
  Transcript Sequence Number=SeqID_34984
  Gene Ontology: Mol. function=chorismate mutase activity; Cellular component=chloroplast; Biological process=aromatic amino acid family biosynthetic process
  Homolog annotation: Hit_ID=B4FUP5; Match level="QueryCoverage=98%, HitCoverage=98%, E-value=1e-100, Identity=77%"; Hit description =Chorismate mutase
TRWGPEQLSLAAVRDALVRLEDSVVFALLERARHPHNAPAYAPAGGGGGGGRSLVEFFVREAEALNAKAGHYQKPEDVPFFPQDLPSPLFPTKSSPKVLHPLASLVTVNDAIWKMYFDELLPLFTVDGDDGSYAETVALDFACLQVLSRRVHIGKYVAEVXKDSNSLMDLLTFKAVEEKVKKRVEKKARTFGQNVTLEDNAGKQEVTAGDSECKVDPKVLSKLYDQWVMPLTKDVEVEYLLRRLD

SEQ ID NO: 100959 - protein, 95 aa, Setaria italica
  Transcript Sequence Number=SeqID_34985
NFSSVELSIRYCFKVAVYAEFRRDWPEALKFYEEGVRVLREMIGTSTRLPPTQRLVEIKAVAEQFHFKISTLLLHAGKVVEAIMWFRKHIRSYER

SEQ ID NO: 100960 - protein, 54 aa, Setaria italica
  Transcript Sequence Number=SeqID_34986
SLSLIIYSKRRILIYSVDLVAALIVMKPNIDDKFICIVFTSRLKYLFCYLVTAF

SEQ ID NO: 100961 - protein, 40 aa, Setaria italica
  Transcript Sequence Number=SeqID_34987
CIRRCFGSNLLRGTSDHFLLWQSTVVDLVVCSNRFQVFRT

SEQ ID NO: 100962 - protein, 185 aa, Setaria italica
  Transcript Sequence Number=SeqID_34988
  Gene Ontology: Mol. function=calcium ion binding
EPWIDDGARDSGHVYWVVHDWGMDYEHILVLDLQTKKFSTINLPCSGMCDKYNRNIKVMRSEGDRDLRVVAMAWSRCALHFWRHDRSRSAKGRWLKEDVVKFSGVDGLLDLRMAGGSGNSYLIRIVDAGEGFVFIKHYEAPWVFVLNLKEMTMQKLPNRERFCGHALPYRMALSPHLPNFREGNH

SEQ ID NO: 100963 - protein, 93 aa, Setaria italica
  Transcript Sequence Number=SeqID_34989
GAGYYRTQLCMYAEFPFLDNCQKKSSCPPCNVSSSILYFTFKFIIVLFEQIGDTNFLNHRTILVESALNWNLLTCHCVNPHFLPFQEKGSLNH

SEQ ID NO: 100964 - protein, 131 aa, Setaria italica
  Transcript Sequence Number=SeqID_34990
SKSAADLMNQGKGFKPTGLRRPTPKIGYFDAEKSIDQNIGVQVQLQPMKIQCLLPATPKSQPPIQNMNAASCTFDQQELKLNAAPRKENDSSKSEAMKTLPLNVAQMEVEPFKVAEPEACTLQTDPVVLNL

SEQ ID NO: 100965 - protein, 212 aa, Setaria italica
  misc_feature (8)..(8): Xaa can be any naturally occurring amino acid
  Transcript Sequence Number=SeqID_34991
  Gene Ontology: Mol. function=nucleoside-triphosphatase activity; Biological process=protein transport
  Homolog annotation: Hit_ID=B9S1U1; Match level="QueryCoverage=98%, HitCoverage=30%, E-value=2e-70, Identity=64%"; Hit description=ATP -dependent clp protease ATP-binding subunit clpx, putative
  Pfam annotation: Domain name=AAA; Domain location=1-193; Score=-39.9; E_value=0.079; Accession=PF00004.21; Description=ATPase family associated with various cellular activities (AAA)
  Pfam annotation: Domain name=AAA_2; Domain location=1-194; Score =174.7; E_value=2.7e-49; Accession=PF07724.6; Description=ATPase family associated with various
  Pfam module annotation: Pfam domain module=AAA::AAA_2; Domain location=1-193::1-194
GSGKTLLXKTLARYVNVPFVIADATAITQAGYSGEDVESVIYKLLVAADFNVEAAERGIVYIDEVDKLTKKAECREDRRDVSGEGVQQALLKIFEGTVINVPRKRNQDNVPHGYVEVDTRNILFICGGAFFGLEKIISERNQHCPVGFGIPICHELRNRGWTTLQESCYIDAVENDDLIAYGLIPEFIGRLPIIVSLTNLSEEQLVQVVKLF

SEQ ID NO: 100966 - protein, 171 aa, Setaria italica
  misc_feature (19)..(19): Xaa can be any naturally occurring amino acid
  misc_feature (140)..(140): Xaa can be any naturally occurring amino acid
  Transcript Sequence Number=SeqID_34992
  Gene Ontology: Mol. function=nucleoside-triphosphatase activity; Biological process=protein transport
  Homolog annotation: Hit_ID=B6SSC5; Match level="QueryCoverage=78%, HitCoverage=24%, E-value=6e-39, Identity=61%"; Hit description=ATP -dependent Clp protease ATP-binding subunit clpX
  Pfam annotation: Domain name=ClpB_D2-small; Domain location=5-95; Score=50.6; E_value=6e-12; Accession=PF10431.1; Description=C -terminal, D2-small domain, of ClpB pr
SLTNLSEEQLVQVLREPKXAIGKQYKKLFKMNNVKLHFTENALHLIAKKASAKETGARGLRSIMEDILTEAMFEIPEAREGKEKIIAVLVDEESVGPLHHRGCGAKIFQDDGALEMYVYQNNIKLPGLIQSNPSRRRISXCLLVALSATKLWIYQTFPCFSSIYEWIVLML

SEQ ID NO: 100967 - protein, 94 aa, Setaria italica
  Transcript Sequence Number=SeqID_34993
  Gene Ontology: Mol. function=nucleoside-triphosphatase activity; Biological process=protein transport
  Homolog annotation: Hit_ID=Q6Z7F0; Match level="QueryCoverage=89%, HitCoverage=12%, E-value=3e-19, Identity=56%"; Hit description =Putative ATP-dependent Clp protease ATP-binding subunit ClpX1 (CLPX)
MFLNILLYYARNQHCPVGFGIPICHELRNRGWTTLQESCYIDAVENDDLIAYGLIPEFIGRLPIIVSLTNLSEEQLVQVVLREPKNAIGKQYKK

SEQ ID NO: 100968 - protein, 62 aa, Setaria italica
  Transcript Sequence Number=SeqID_34994
MKSRKGYGQQQGHLLSPVGSPPSDNESGAAAAAAAAWCGSSAGYCGGDSPAKEQDRFLPIAN

SEQ ID NO: 100969 - protein, 220 aa, Setaria italica
  misc_feature (208)..(208): Xaa can be any naturally occurring amino acid
  Transcript Sequence Number=SeqID_34995
  Gene Ontology: Mol. function=protein serine/threonine kinase activity; Cellular component=ubiquitin ligase complex; Biological process=protein amino acid phosphorylation
  Homolog annotation: Hit_ID=B9T790; Match level="QueryCoverage=100%, HitCoverage=32%, E-value=1e-70, Identity=58%"; Hit description =Receptor protein kinase, putative
  Pfam annotation: Domain name=Pkinase; Domain location=1-206; Score =8.4; E_value=5.4e-09; Accession=PF00069.17; Description=Protein kinase domain
  Pfam annotation: Domain name=Pkinase_Tyr; Domain location=1-206; Score=-59.5; E_value=9e-10; Accession=PF07714.9; Description=Protein tyrosine kinase
  Pfam module annotation: Pfam domain module=Pkinase::Pkinase_Tyr; Domain location=1-206::1-206
SIESVKQFQQEVCILGRVRHPHILTLVGACPEALCLVYEYLPNESLHDRLFSRCNSHWLTWKIRARVVAEISGALLFLHSCKPQMIIHGNLKLENILLDSEFHCKIADFGISRVFTDNTTDYPSFVEGSELKGSFPDTDPEYKRSKVMTQKSDIYNFGMVILQLLTGKQELEGLAGEVRRAISCGKLSSILDPTAGRWPTEVAGRLAXFGLSCSETSSRD

SEQ ID NO: 100970 - protein, 92 aa, Setaria italica
  Transcript Sequence Number=SeqID_34996
  Homolog annotation: Hit_ID=B6TEB6; Match level="QueryCoverage=72%, HitCoverage=20%, E-value=1e-22, Identity=74%"; Hit description =Thaumatin-like protein 1
  Pfam annotation: Domain name=Thaumatin; Domain location=1-89; Score= -22.3; E_value=1.9e-06; Accession=PF00314.9; Description=Thaumatin family
DGGGGREWEDGAAPAPATTTVACRSACEAFGTPEYCCTGAHGGPNTCGPTKYSRLFKAACPAAYSYAYDDPTSTFTCGTGAQYLITFCPGHQ

SEQ ID NO: 100971 - protein, 160 aa, Setaria italica
  Transcript Sequence Number=SeqID_34997
  Homolog annotation: Hit_ID=B6D435; Match level="QueryCoverage=88%, HitCoverage=8%, E-value=1e-31, Identity=51%"; Hit description =Shortage in chiasmata (Fragment)
DLPFSVKTDSTNLGRLSAPEVVIVVNTGNHGKHMLFSRRSSYQQILALEKEGMQIVERDVDLPVDLILSATVCLLWYDTGTFGSSELTISADASSITNFIEDIATNILMSLSFCFSGCIMVFEVENHFLSAVMEASDSLYASAASLDMNLQLVFTSQPKS

SEQ ID NO: 100972 - protein, 83 aa, Setaria italica
  Transcript Sequence Number=SeqID_34998
FSLLVCVWILFVFPSCLRLRMVLIGGCDDQKIPTYFLNPDERIQWILLSLQYLRDFSLIVLFFGLLCIFFRIGFMQRGRILSG

SEQ ID NO: 100973 - protein, 101 aa, Setaria italica
  Transcript Sequence Number=SeqID_34999
QGGHFSLISHTRLQKITKQQMREDRSIHLYTKFRRNAPMRLCLGQFILDKLVQTEKGLSLHLGSASYHGSRKKRLLMLNIRADCSLRCIACCHGWLRHDKL

SEQ ID NO: 100974 - protein, 694 aa, Setaria italica
  Transcript Sequence Number=SeqID_35000
  Homolog annotation: Hit_ID=Q9SF22; Match level="QueryCoverage=89%, HitCoverage=86%, E-value=1e-165, Identity=50%"; Hit description =F26K24.5 protein
ALGSLRRAAVRRNRTREEAEAAWEEEFESVVTLAAASQREGAAFQPWELAFCVFSDINIGAKNKPSILGTASLNLADYASAAEEVIEIILPLSVPGGEPESAPSLHLTLSMVELRAVQETSDASQRPAATFPLSPSSGDSLPGGKDEVSVIKAGLRKVKILTDLVATRRSKKTCQDDEGGEDKFCVNSDGAEYPCDTESLDDDLDDRVQEDEIGDSTIRKSFSYGSLQSVNYVGGLVYAHAKIDGEHEDWIYYSHRKSDVGYHVEKMLPSTTEETVLPTAKRSILPWRKRKLSLRSLKAKGEPLLKKAYGEEGGDDIDYDRRLLTSSDQSVSEGSRAEDGSANGMVSEFGDDNFIVGNWEFKEIISRDGHMKLSSQVFFASIDQRSERAAGESACTALVAVIADWFQANRNMMPIQSQFDSLIREGSLEWRNLCENETYRERFPDKHFDLETVLHAKIRPLTVSPSKSFIGFFQPEGDEDMGGFDFLNGAMSFDSIWDEITQAAEFSSSDNPNLYIVSWNDHFFLLKVEHDAYYIIDTLGERLHEGCSQAYILKFDNTTTIHKVQAEKKPSSPDSSGPSKDSSGPESSSTDQDSENDIGEDILVSKGKESCKEYIKSFLAAIPIRELQVDIKKGLMASTPLHHRLQIEFHYTQSSPKEIASAPQLLATDAPFEFSWPEATPTMEVALTPVVSVV

SEQ ID NO: 100975 - protein, 125 aa, Setaria italica
  misc_feature (41)..(41): Xaa can be any naturally occurring amino acid
  Transcript Sequence Number=SeqID_35001
  Pfam annotation: Domain name=KxDL; Domain location=18-105; Score =154.9; E_value=2.5e-43; Accession=PF10241.1; Description =Uncharacterized conserved protein
MEKSPPAPAPAAAAEEVAARFRSLVDPDDVASIRQTQHLIXGRLQDSNAVLTHFNEYSEQCFAEVSSDFASKTRLLKSMKADLEHIFTKLRAMKARLAATYPDAFPDGAMSKTIDQRPDLESPLD

SEQ ID NO: 100976 - protein, 301 aa, Setaria italica
  Transcript Sequence Number=SeqID_35002
  Gene Ontology: Mol. function=metal ion binding; Cellular component =plasma membrane
  Homolog annotation: Hit_ID=B9S675; Match level="QueryCoverage=97%, HitCoverage=48%, E-value=1e-119, Identity=65%"; Hit description=S -adenosylmethionine-dependent methyltransferase, putative
  Pfam annotation: Domain name=DUF248; Domain location=1-291; Score =219.5; E_value=8.6e-63; Accession=PF03141.8; Description=Putative methyltransferase
VVSPEAYAQDPFNRKIWRRMSDLARRMCWRVASKKNQTVIWAKPLANGCYMRREPGTRPPMCERDDDPDAAWNVPMKACLTPYSKRVNKVKGSELLPWPQRLTAPPPRLEELGISSNNFSEDNEIWHSRVTQYWKHMKSEIQKDPFRNVMDMSANLGGFAASLRKKDVWVMNVVPFTESGKLKVIYDRGLMGTIHNWCESFSTYPRTYDLLHAWLLFSEIEKQGCSLEDLLIEMDRILRPQGYAIIRDKAAVINYIKKLLPALRWDDWTFEVKAKKDALSSGDERVLIVRKKLWNQTLQDL

SEQ ID NO: 100977 - protein, 157 aa, Setaria italica
  Transcript Sequence Number=SeqID_35003
RRWALDPVTHKPLQPVPDTGSSPEDEAKAVAAAITPPPCAGNEAFCVDEVRMARLLDDIVIPDGDVVDAPPAANDSGTSTAYSPESSSSSSSSSGGSSIVDGEWLEWPQMVEWPESMWLDVVTGPTPWEFEDPLLTDQRIALFEHQETWNNSRIELF

SEQ ID NO: 100978 - protein, 75 aa, Setaria italica
  Transcript Sequence Number=SeqID_35004
RSGGGGRREWEWYPLGFEVSTEPMPEIPDPETPDFWEGPQWEALGFFVQYMWAFGVVFGVSTSSSSIGPHVIHTH

SEQ ID NO: 100979 - protein, 185 aa, Setaria italica
  Transcript Sequence Number=SeqID_35005
  Subcellular localization annotation: CTP_CleavageSite=64; ConfidenceScore=5.34e-01
MSLLTSPTPFGVAVVHRRAAALPLLPASGRAALHVALARRGGVSSRTQRRLEERGGKKRRGGVVAPDVDEDAAEAGAAEWEGEPLGFEVSTEPMPEIPDPETPDFWEGPQWEALGFFVQYMWAFGVVFGLIACGVAVATYNDGATDFKDTPAYKESQTQEFPEESESSSADVFEGNPTEVAPALE

SEQ ID NO: 100980 - protein, 177 aa, Setaria italica
  Transcript Sequence Number=SeqID_35006
  Gene Ontology: Mol. function=nutrient reservoir activity
  Homolog annotation: Hit_ID=B6UH16; Match level="QueryCoverage=85%, HitCoverage=87%, E-value=3e-40, Identity=60%"; Hit description =Globulin
  Pfam annotation: Domain name=Tryp_alpha_amyl; Domain location=50-168; Score=38.3; E_value=3e-08; Accession=PF00234.14; Description=Protease inhibitorseed storageLTP f
MAKFVVAAATAALCLAALVAMAAGQSGFERQRLRDLRCQREVEENPLWACRQVLDRQLTGGMRYGVGPFRWGTGLRMRCCQQLQDVSRECRCSAVRRMVRGYEEAMPPLEEGPYGYGGEQGEGYYGGGEGGEGYLPFPPRRIGRVRLTKARQYAAGLPMMCRLEPQECSVFSGDQYK

SEQ ID NO: 100981 - protein, 100 aa, Setaria italica
  Transcript Sequence Number=SeqID_35007
KCFLEELNARCREVSTSLNTAKLVDVPYVGEEFVANRKEMSVLCSLEILEFIDKHDTAEIVVDSAGSDFEIPEVPSSDDSAHHGILNEHRKDVNQEQSIA

SEQ ID NO: 100982 - protein, 163 aa, Setaria italica
  Transcript Sequence Number=SeqID_35008
  Gene Ontology: Mol. function=DNA-directed DNA polymerase activity; Cellular component=nucleus; Biological process=nucleobase, nucleoside, nucleotide and nucleic acid metabolic process
  Homolog annotation: Hit_ID=B9FUS4; Match level="QueryCoverage=99%, HitCoverage=9%, E-value=2e-69, Identity=78%"; Hit description=DNA polymerase
VLAESRGELRPDPRFDAINAVSLAIEDDADNTVEVHVFIRDNSDISCRRRNLDGIAGCNVDVFPEERDLLNNLISAVCSIDPDILVGWEIQLGSLGFLAERAAYLGIGLLKRISRTLPHELNHPRKVPVDDSSQMLAEASSADDVGDVSENNWSHTHASGIHA

SEQ ID NO: 100983 - protein, 198 aa, Setaria italica
  misc_feature (192)..(192): Xaa can be any naturally occurring amino acid
  Transcript Sequence Number=SeqID_35009
  Gene Ontology: Mol. function=DNA-directed DNA polymerase activity; Cellular component=nucleus; Biological process=nucleobase, nucleoside, nucleotide and nucleic acid metabolic process
  Homolog annotation: Hit_ID=B9FUS4; Match level="QueryCoverage=94%, HitCoverage=10%, E-value=4e-85, Identity=80%"; Hit description=DNA polymerase
GRRLHYSQQYHPDILVGWEIQLGSLGFLAERAAYLGIGLLKRISRTLPHELNHPRKVPVDDSSQMLAEASSADDVGDVSENNWSHTHASGIHAVGRIVLNLWRLMRAEVKLNNYSLEAVADEVLRRKIPLIPNGILNRWFATGPGRGRHRCIEYISTRARINLEIMNQLDLVNRTSELARVFGIDFFSVLSXGSQYRV

SEQ ID NO: 100984 - protein, 139 aa, Setaria italica
  misc_feature (73)..(73): Xaa can be any naturally occurring amino acid
  misc_feature (93)..(93): Xaa can be any naturally occurring amino acid
  Transcript Sequence Number=SeqID_35010
  Subcellular localization annotation: CTP_CleavageSite=62; ConfidenceScore=5.47e-01
SLLSYSLSLFLTDEAFSRFVRTGSSPPSPSPPPFMLSLLLFDVRGDPPLLPSPPSPPSPLPPQLEGGGPTAPXSFWQSSLPAPAAQPPLSHPXPPPPPPPTFPLPLVPPPSATAMASLPLPVSLPTQRPATAFSLSLRP

SEQ ID NO: 100985 - protein, 147 aa, Setaria italica
  misc_feature (7)..(7): Xaa can be any naturally occurring amino acid
  Transcript Sequence Number=SeqID_35011
  Gene Ontology: Mol. function=voltage-gated potassium channel activity; Cellular component=integral to membrane; Biological process=potassium ion transport
  Homolog annotation: Hit_ID=Q5EEQ2; Match level="QueryCoverage=98%, HitCoverage=18%, E-value=3e-71, Identity=92%"; Hit description =Potassium outward rectifying channel (Fragment)
  Pfam annotation: Domain name=Ank; Domain location=115-147; Score =25.3; E_value=0.00025; Accession=PF00023.22; Description=Ankyrin repeat
  Pfam annotation: Domain name=Ank; Domain location=49-81; Score=0.4; E_ value=32; Accession=PF00023.22; Description=Ankyrin repeat
  Pfam annotation: Domain name=Ank; Domain location=82-114; Score=47.6; E_value=4.8e-11; Accession=PF00023.22; Description=Ankyrin repeat
  Pfam module annotation: Pfam domain module=Ank::Ank::Ank; Domain location=115-147::49-81::82-114
QSFTNIXEIYFVDGRRILSNLSESGSEYGGRVKQLESDITFHIGKQEAELTLRVNSAAFYGDLQQLKSLIRAGADPKNTDYDGRTPLHLAASRGYEDVVQFLIGEGVDINLTDHFGNTPLLEAVKQGHERVAALLYAKGAKLSLKTP

SEQ ID NO: 100986 - protein, 69 aa, Setaria italica
  Transcript Sequence Number=SeqID_35012
LSPVCLAYPLRVSVVVIQAASVYNFTFQDYIGDVGQSERKGMLIYLVLYRLTDHPILLREHIPSNLHHF

SEQ ID NO: 100987 - protein, 69 aa, Setaria italica
  Transcript Sequence Number=SeqID_35013
  Gene Ontology: Mol. function=catalytic activity; Biological process =metabolic process
  Homolog annotation: Hit_ID=B6SU17; Match level="QueryCoverage=100%, HitCoverage=24%, E-value=2e-30, Identity=91%"; Hit description =Phosphoglycerate mutase-like protein
MEPGAGTALYPLHRCKTIYLVRHAQGIHNVAGEKDFNAYKSHDLFDAQLTPLGWSQVDGLREHVKKSGL

SEQ ID NO: 100988 - protein, 55 aa, Setaria italica
  Transcript Sequence Number=SeqID_35014
  Gene Ontology: Mol. function=4-alpha-glucanotransferase activity; Biological process=carbohydrate metabolic process
  Homolog annotation: Hit_ID=C0L7E0; Match level="QueryCoverage=98%, HitCoverage=5%, E-value=2e-14, Identity=66%"; Hit description =Disproportionating enzyme 2
MASSGPTSGKKSLNKVTLLFKLPYYTQWGQSLLIAGSEPALGSWNVKQGLSLSPV

SEQ ID NO: 100989 - protein, 83 aa, Setaria italica
  Transcript Sequence Number=SeqID_35015
PITEPSGHRSRFFRFNREPVRFFSMALGQGRRESRFLLWQIHRPLGQNLCRSPWMSNQPIPQAASAAHFRAQRTLQLTALLCT

SEQ ID NO: 100990 - protein, 50 aa, Setaria italica
  Transcript Sequence Number=SeqID_35016
GGLEVIDDAKSQLEAVCPGVVSCADILALAARDAVDLVRTCYTLTILLFY

SEQ ID NO: 100991 - protein, 240 aa, Setaria italica
  Transcript Sequence Number=SeqID_35017
  Gene Ontology: Mol. function=electron carrier activity; Cellular component=extracellular region; Biological process=response to oxidative stress
  Homolog annotation: Hit_ID=Q5VR15; Match level="QueryCoverage=100%, HitCoverage=73%, E-value=1e-117, Identity=86%"; Hit description =Class III peroxidase 1
  Pfam annotation: Domain name=peroxidase; Domain location=1-199; Score= 278.5; E_value=1.5e-80; Accession=PF00141.15; Description=Peroxidase
RSAPQNFGLRGFEVIDDAKSQLEAVCPGVVSCADILALAARDAVDLTGGPSWSVPLGRRDGRISLASGAKALPSPADPVSVQRQKFADQGLSDHDLVTLVGAHTIGQTDCQFFSYRLFNFTATGNADPTISPAFLAQLRALCPPNGDPGRRVALDRDSPGAFDVAFFKNVRDGNAVLESDQRLWSDAATQGAVQKYAGNVRGLLGLRFAYEFPKAMVRMSSVAVKTGGQGEIRRRCSRIN

SEQ ID NO: 100992 - protein, 63 aa, Setaria italica
  Transcript Sequence Number=SeqID_35018
SSIRRYSFVYYQDTITNRSLFFSNGMMGSSLAILEIKKIGYLLISTYSVYIASLILRISHFSP

SEQ ID NO: 100993 - protein, 173 aa, Setaria italica
  Transcript Sequence Number=SeqID_35019
  Gene Ontology: Mol. function=aspartic-type endopeptidase activity; Biological process=proteolysis
  Homolog annotation: Hit_ID=B6SJT4; Match level="QueryCoverage=78%, HitCoverage=30%, E-value=2e-55, Identity=76%"; Hit description =Aspartic proteinase nepenthesin-2
VATEAAHHHPLSRLAAASLARASHLRRPAPAHHKAQGGSTALYPHSYGGYAFTASLGTPPQPLPVLLDTGSHLTWVPCTSNYQCRNCPTAAAPVFHPKNSSTSRLVGCRNPACLWVHSAAHLANNCTAGTVCPPYAVVYGSGSTAGLLIADTLRAPGRRAVTNFVAGCSLVSV

SEQ ID NO: 100994 - protein, 113 aa, Setaria italica
  Transcript Sequence Number=SeqID_35020
  Gene Ontology: Mol. function=electron carrier activity; Biological process=oxidation reduction
  Homolog annotation: Hit_ID=B6SXJ1; Match level="QueryCoverage=100%, HitCoverage=21%, E-value=6e-46, Identity=79%"; Hit description =Flavonoid 3-monooxygenase
RRRREGEEFAAMDMVDLLLELADDPNLEVPIERDGVKGFTLDLIVGGTDTSSVTIEWAMSELLRNPDALAKATEELDRVIGRERLVTEGDIPNLPYMEAVVKEAMRLHPVTPL

SEQ ID NO: 100995 - protein, 50 aa, Setaria italica
  Transcript Sequence Number=SeqID_35021
  Gene Ontology: Mol. function=metal ion binding; Cellular component =integral to membrane; Biological process=ubiquitin-dependent protein catabolic process
  Homolog annotation: Hit_ID=Q8GT74; Match level="QueryCoverage=84%, HitCoverage=17%, E-value=6e-13, Identity=66%"; Hit description=RING -H2 finger protein ATL2B
  Pfam annotation: Domain name=zf-C3HC4; Domain location=10-46; Score =16.4; E_value=0.0013; Accession=PF00097.17; Description=Zinc finger, C3HC4 type (RING finger)
LLTIYLLRVQEFEAGESARSLPVCRHTFHLPCIDGWLLRHASCPLCRRAV

SEQ ID NO: 100996 - protein, 89 aa, Setaria italica
  Transcript Sequence Number=SeqID_35022
  Gene Ontology: Mol. function=protein serine/threonine kinase activity
  Homolog annotation: Hit_ID=Q6ASW0; Match level="QueryCoverage=100%, HitCoverage=8%, E-value=5e-35, Identity=84%"; Hit description =Protein kinase, putative, expressed
MSENIDLVLEFLRKNRFAKAEAALRGELTGRGDSNGPTTQRRVAEPKEDEERDDSVGSNVGPKGATSVRSADSSREFIVKEIDVGALPN

SEQ ID NO: 100997 - protein, 154 aa, Setaria italica
  Transcript Sequence Number=SeqID_35023
  Gene Ontology: Mol. function=nucleic acid binding
  Homolog annotation: Hit_ID=B9MYG3; Match level="QueryCoverage=100%, HitCoverage=23%, E-value=1e-59, Identity=59%"; Hit description =Chromatin remodeling complex subunit
ERFVQVADARKKHLVSVLRKFLLRRTKEETIGHLMLGKEDNIVFCKMSDVQKRVYRRMLQQPDIQILINKDLRCSCGSPLPQISNHLELIKPNPKDEVEKQKKDAELAAAVFGADVDLVGGSAKSENFMGLSDAEHCGKMRALERLLSLWTQQG

SEQ ID NO: 100998 - protein, 93 aa, Setaria italica
  misc_feature (9)..(9): Xaa can be any naturally occurring amino acid
  Transcript Sequence Number=SeqID_35024
IARPSAEYXDLLSSLPPVLVARPEALKELAAAMCATAAESIRGAGMHVPPWRRTRYVLAKWSARFERVEAPAPTAAAGPLPEAGARAAAHARR

SEQ ID NO: 100999 - protein, 90 aa, Setaria italica
  Transcript Sequence Number=SeqID_35025
YAMTKRLKVKVGIDKERPLNLRLKEQLGDFSWCWISVVGLWRIYFFNLKGICCLGSVSYEIYCVLCIIHSFILVVNPSNHLPYIFNVHGE

SEQ ID NO: 101000 - protein, 64 aa, Setaria italica
  Transcript Sequence Number=SeqID_35026
LQHKCLPIGLCIMCLGLICYPDGNNSACGMNRSQYLAPFAHFVSYIHTYLADHLRMENYIVRIL

SEQ ID NO: 101001 - protein, 62 aa, Setaria italica
  Transcript Sequence Number=SeqID_35027
QPKHQKITFCLSLSQGCTSETPAQGNNFAGISETTAWCLNCQQKDTYVHFSCFERNRISEHF

SEQ ID NO: 101002 - protein, 52 aa, Setaria italica
  Transcript Sequence Number=SeqID_35028
VDTFRVPCHFRWCLTCHERFDPLCGVWGPLFLPLSVYMSTSWQAMPVGFLIS

SEQ ID NO: 101003 - protein, 120 aa, Setaria italica
  Transcript Sequence Number=SeqID_35029
  Gene Ontology: Mol. function=3'-5'-exoribonuclease activity; Cellular component=exosome (RNase complex); Biological process=RNA processing
  Homolog annotation: Hit_ID=B4FDY3; Match level="QueryCoverage=83%, HitCoverage=32%, E-value=2e-46, Identity=93%"; Hit description =Exosome complex exonuclease RRP43
MAAETEPAAAAASGLAGEMEVEAYRRLFPLAFLERHLGESVRPDARRLCEARPTTVALGAVSSAHGSALVRLGDTAMLASVKLEVMSPPAESPDEGSLAVEFHMPPICSPLVRPGRPVDV

SEQ ID NO: 101004 - protein, 136 aa, Setaria italica
  Transcript Sequence Number=SeqID_35030
  Gene Ontology: Mol. function=binding; Cellular component=integral to membrane; Biological process=transport
  Homolog annotation: Hit_ID=B6T2V1; Match level="QueryCoverage=100%, HitCoverage=37%, E-value=4e-63, Identity=91%"; Hit description =Mitochondrial carrier YMR166C
  Pfam annotation: Domain name=Mito_carr; Domain location=5-82; Score =20.8; E_value=3.7e-05; Accession=PF00153.19; Description =Mitochondrial carrier protein
MQVQGTQKSWASAAAKGSISQAHGAQMYGYYNGMLHAGCSIWRDHGLKGLYAGYWSTLARDVPFAGLMVTFYEAMKELTEYGKTKYLPHSDLDVSNSFEGLVLGGLAGGCSAYLTTPLDVIKTRLQVQGPTSRYNG

SEQ ID NO: 101005 - protein, 62 aa, Setaria italica
  Transcript Sequence Number=SeqID_35031
  Subcellular localization annotation: CTP_CleavageSite=21; ConfidenceScore=5.47e-01
RRCSFSPSRLATRLVSPIKARLSLGRSRDSGVGAGGGPMSGLKQRPGVNMTVRTVSSRISSR

SEQ ID NO: 101006 - protein, 248 aa, Setaria italica
  Transcript Sequence Number=SeqID_35032
GVLLPDEFLDDDFFSEEEKAAVAAKSESDEEEGLDGLSRRMAGILVGGGKGDDDSSPAKAEVMAGSPQSILCGLAASGEDSPNGVASQVSSPPSSPLEQQPADPWDVLHEAAGQVACLRSNSIPVPKNAAAHRGHAVVPPAKKPSAPAPAPKAACADHYQPNILLEQRRKVAQFNALKQQQMLKHQQQQELAAATAAAWGTRICGPKRTAGSGFGAAPHALNPSAWPPLQKAQQPAPSAAGMRAVFLT

SEQ ID NO: 101007 - protein, 56 aa, Setaria italica
  misc_feature (55)..(55): Xaa can be any naturally occurring amino acid
  Transcript Sequence Number=SeqID_35033
NLLQFSKITRWSALIILECRFNSESSACEKVGRKINYPPRCLKDMNKKLSLPINXP

SEQ ID NO: 101008 - protein, 534 aa, Setaria italica
  Transcript Sequence Number=SeqID_35034
  Homolog annotation: Hit_ID=C3SAF6; Match level="QueryCoverage=76%, HitCoverage=57%, E-value=1e-144, Identity=58%"; Hit description=Gene X-like protein (Fragment)
  Pfam annotation: Domain name=XH; Domain location=401-534; Score =249.3; E_value=9.1e-72; Accession=PF03469.6; Description=XH domain
  Pfam annotation: Domain name=XS; Domain location=22-131; Score=116.2; E_value=1.1e-31; Accession=PF03468.6; Description=XS domain
  Pfam module annotation: Pfam domain module=XH::XS; Domain location =401-534::22-131
AIACSGGNVAIALSNPPKSVKDEEVFVWPWMGILTNVPAEQTQGGGAILMKQLADFKPLQYTAVYGANGYTGCGIVLFSKDWIGFKNALAFQNFFKSQRLGKMDWKETRRHGNYVFGWLAGEEDYKSDDPVGMFLSANGDLKTVSDLEQEMSSKTDNLIANLTQQMSAQSKYVQELECKWNQMNLSLQRAMEESDLLHKRYNEEMRNMQSAAREHTQRVFQETDKLRTQLVEKERYIQRRSRQLNELVAQTDMERRKLEEERKKNADQNDSLNMARIEQQKADERALQLLEKHKKEKEAAFNKILQLERQVDEKQKLELDIEQLKGKLEVVKHMEGEGVDVKKRSEELTAELNERIEEMEDLESLNQTLVIKERMTNNEIQDAKKELISGLAELLGPRSNIGIKRMGELDGKPFLVACKQRYGDDADMKAAKLCSSWQEQLKDPNWHPFKIVTTGPTAEQVIDDKDEKLVGLKQQLGEEVYKAVTTALLEINEYNASGSYVVSELWNNKENRKANITEAIQHVLKQWKALKRRR

SEQ ID NO: 101009 - protein, 79 aa, Setaria italica
  Transcript Sequence Number=SeqID_35035
  Gene Ontology: Mol. function=hydrolase activity, acting on acid anhydrides, catalyzing transmembrane movement of substances; Cellular component=integral to membrane; Biological process=calcium ion transport
  Homolog annotation: Hit_ID=Q65X71; Match level="QueryCoverage=98%, HitCoverage=7%, E-value=5e-31, Identity=83%"; Hit description =Probable calcium-transporting ATPase 6, plasma membrane-type
LNWSANDALTIVNYFAIAVTIIVVAVPEGLPLAVTLSLAFAMKKLMNDKALVRHLAACETMGSATCICTDKTGTLTTNT

SEQ ID NO: 101010 - protein, 163 aa, Setaria italica
  misc_feature (41)..(41): Xaa can be any naturally occurring amino acid
  Transcript Sequence Number=SeqID_35036
  Gene Ontology: Mol. function=RNA-directed DNA polymerase activity; Biological process=RNA-dependent DNA replication
  Homolog annotation: Hit_ID=Q7XBD9; Match level="QueryCoverage=96%, HitCoverage=8%, E-value=9e-51, Identity=55%"; Hit description =Putative gag-pol
MKCVTREDGQEILEEIHRGICGNHASSRTLIGQAFRAGFYXPMALADAKQLVQKCKVCQFFTKQQHVPAYKLVTIPPTWPFACWGLDMISPLPTALGGFNRVLMAIDKFTKWIEVKPVTCPKADRVLDFLDEIVHRYGFPNRIITDLGSNFNNHDFLGIICRS

SEQ ID NO: 101011 - protein, 117 aa, Setaria italica
  Transcript Sequence Number=SeqID_35037
SCYSFFSFFFNERRRFNFATPKLESKQGLSHESLLACVFVPCCWQILSPIATWPLGRELSSYLQTGWSPDPTTRTSELRLLSHSRHCRLHRLAGGRQSARCKRGRQLAAVSFWVGGR

SEQ ID NO: 101012 - protein, 127 aa, Setaria italica
  misc_feature (94)..(94): Xaa can be any naturally occurring amino acid
  Transcript Sequence Number=SeqID_35038
  Gene Ontology: Mol. function=metal ion binding
LCRCNITFVTVGVVSPEPEPERRGTREEHRRDNTELVLTIDDYSEQARDEPQNQNAASGNGGGGGGGSQEAPKDCPGRSEEASGIVEIREDGAXPVRASSSLSDTHREGRMSIADVLQASLEDELMM

SEQ ID NO: 101013 - protein, 198 aa, Setaria italica
  misc_feature (171)..(171): Xaa can be any naturally occurring amino acid
  misc_feature (188)..(188): Xaa can be any naturally occurring amino acid
  Transcript Sequence Number=SeqID_35039
  Gene Ontology: Mol. function=monooxygenase activity; Cellular component=intrinsic to endoplasmic reticulum membrane; Biological process=oxidation reduction
  Homolog annotation: Hit_ID=Q69SQ2; Match level="QueryCoverage=90%, HitCoverage=61%, E-value=1e-54, Identity=62%"; Hit description =Flavin-containing monooxygenase-like
GIDIVAQCAEANGSKYPCTLVYRTANWTMDPNLKWGAFFEKMMTSRLAELMVHKPGEGFVLSLLATVLTPMRWLIARATETYYKALMPMRKHGMVPDHSFSAAMLGWRISVLPDRFYDAVDEGGIVLKRCDSFSFCAGGVVLDGTGERVDADVVILATGFDADRLLSGVLXSPWFREIIVAEPSDTMXLPLYRHCVHP

SEQ ID NO: 101014 - protein, 177 aa, Setaria italica
  misc_feature (120)..(120): Xaa can be any naturally occurring amino acid
  misc_feature (144)..(144): Xaa can be any naturally occurring amino acid
  Transcript Sequence Number=SeqID_35040
  Gene Ontology: Mol. function=nucleotide binding; Cellular component =plasma membrane; Biological process=small GTPase mediated signal transduction
  Homolog annotation: Hit_ID=Q40787; Match level="QueryCoverage=96%, HitCoverage=85%, E-value=1e-78, Identity=84%"; Hit description=Ras -related protein Rab7
  Pfam annotation: Domain name=Arf; Domain location=1-170; Score=-86.0; E_value=0.0059; Accession=PF00025.13; Description=ADP-ribosylation factor family
  Pfam annotation: Domain name=GTP_EFTU; Domain location=6-169; Score= -95.6; E_value=0.079; Accession=PF00009.19; Description=Elongation factor Tu GTP binding domain
  Pfam annotation: Domain name=MMR_HSR1; Domain location=9-128; Score =13.5; E_value=5.6e-05; Accession=PF01926.15; Description=GTPase of unknown function
  Pfam annotation: Domain name=Miro; Domain location=10-128; Score =52.4; E_value=1.7e-12; Accession=PF08477.5; Description=Miro-like protein
  Pfam annotation: Domain name=Ras; Domain location=10-172; Score =244.1; E_value=3.5e-70; Accession=PF00071.14; Description=Ras family
  Pfam module annotation: Pfam domain module=Arf::GTP_EFTU::MMR _HSR1::Miro::Ras; Domain location=1-170::6-169::9-128::10-128::10-172
MASRRRTLLKVIILGDSGVGKTSLMNQYVNKKFSNQYKATIGADFLTKEVQFEDRLFTLQIWDTAGQERFQSLGVAFYRGADCCVLVYDVNSMKSFDNLNNWREEFLIQASPSDPDNPFXVLLGNKVDVDGGSRVVSGAAWCAXNIPYFETSAKDGTNVEDAFQCIVRSGETKKERN

SEQ ID NO: 101015 - protein, 52 aa, Setaria italica
  Transcript Sequence Number=SeqID_35041
VYLPFRMQHNLLYLQLRRNFALTLKLFHEGTCLTLLMWWVATGPKGHQAAVR

SEQ ID NO: 101016 - protein, 206 aa, Setaria italica
  Transcript Sequence Number=SeqID_35042
  Gene Ontology: Mol. function=nucleotide binding; Cellular component =plasma membrane; Biological process=small GTPase mediated signal transduction
  Homolog annotation: Hit_ID=Q40787; Match level="QueryCoverage=100%, HitCoverage=100%, E-value=1e-118, Identity=99%"; Hit description=Ras- related protein Rab7
  Pfam annotation: Domain name=Arf; Domain location=1-176; Score=-66.5; E_value=0.0002; Accession=PF00025.13; Description=ADP-ribosylation factor family
  Pfam annotation: Domain name=GTP_EFTU; Domain location=6-178; Score= -84.3; E_value=0.0094; Accession=PF00009.19; Description=Elongation factor Tu GTP binding domain
  Pfam annotation: Domain name=MMR_HSR1; Domain location=9-128; Score =19.3; E_value=1.6e-05; Accession=PF01926.15; Description=GTPase of unknown function
  Pfam annotation: Domain name=Miro; Domain location=10-128; Score =59.4; E_value=1.3e-14; Accession=PF08477.5; Description=Miro-like protein
  Pfam annotation: Domain name=Ras; Domain location=10-178; Score =293.4; E_value=5e-85; Accession=PF00071.14; Description=Ras family
  Pfam module annotation: Pfam domain module=Arf::GTP_EFTU::MMR _HSR1::Miro::Ras; Domain location=1-176::6-178::9-128::10-128::10-178
MASRRRTLLKVIILGDSGVGKTSLMNQYVNKKFSNQYKATIGADFLTKEVQFEDRLFTLQIWDTAGQERFQSLGVAFYRGADCCVLVYDVNSMKSFDNLNNWREEFLIQASPSDPDNFPFVLLGNKVDIDGGNSRVVSEKKAKAWCASKGNIPYFETSAKEGTNVEDAFQCIVKNALKNEPEEELYVPDTVDVVGGNRAQRSSGCC

SEQ ID NO: 101017 - protein, 224 aa, Setaria italica
  Transcript Sequence Number=SeqID_35043
  Gene Ontology: Mol. function=nucleotide binding; Cellular component =plasma membrane; Biological process=small GTPase mediated signal transduction
  Homolog annotation: Hit_ID=Q40787; Match level="QueryCoverage=90%, HitCoverage=98%, E-value=1e-113, Identity=98%"; Hit description=Ras -related protein Rab7
  Pfam annotation: Domain name=Arf; Domain location=15-194; Score= -61.5; E_value=8.4e-05; Accession=PF00025.13; Description=ADP -ribosylation factor family
  Pfam annotation: Domain name=GTP_EFTU; Domain location=24-196; Score=- 86.3; E_value=0.014; Accession=PF00009.19; Description=Elongation factor Tu GTP binding domain
  Pfam annotation: Domain name=MMR_HSR1; Domain location=27-146; Score =19.3; E_value=1.6e-05; Accession=PF01926.15; Description=GTPase of unknown function
  Pfam annotation: Domain name=Miro; Domain location=28-146; Score =59.4; E_value=1.3e-14; Accession=PF08477.5; Description=Miro-like protein
  Pfam annotation: Domain name=Ras; Domain location=28-196; Score =294.4; E_value=2.4e-85; Accession=PF00071.14; Description=Ras family
  Pfam module annotation: Pfam domain module=Arf::GTP_EFTU::MMR _HSR1::Miro::Ras; Domain location=15-194::24-196::27-146::28-146::28 -196
LNFCDFSPSRWLLLLVSSFVFFKPTLLKVIILGDSGVGKTSLMNQYVNKKFSNQYKATIGADFLTKEVQFEDRLFTLQIWDTAGQERFQSLGVAFYRGADCCVLVYDVNSMKSFDNLNNWREEFLIQASPSDPDNFPFVLLGNKVDVDGGNSRVVSEKKAKAWCASKGNIPYFETSAKDGTNVEDAFQCIVKNALKNEPEEELYVPDTVDVVGGNRAQRSSGCC

SEQ ID NO: 101018 - protein, 54 aa, Setaria italica
  Transcript Sequence Number=SeqID_35044
LTMYCMTDHKIRKKEFPERIKFFTASTRPPAGAGTSSRTPAAWPAPVVARGTTG

SEQ ID NO: 101019 - protein, 140 aa, Setaria italica
  Transcript Sequence Number=SeqID_35045
  Gene Ontology: Mol. function=nucleoside-triphosphatase activity; Cellular component=membrane; Biological process=transport
  Homolog annotation: Hit_ID=Q8GU82; Match level="QueryCoverage=100%, HitCoverage=10%, E-value=2e-55, Identity=73%"; Hit description=PDR -like ABC transporter
FFLYLVMSFMYYTLYGMMTVALTPNIEIAMGLSFLIFIFWNVFSGFIISRELMPLWWRWVYWADPASWTVYGLMFTQLGDRTEQILVPGVGMQTVREFLEGYLGLQDRYFELVTCLHLAIIGLFAFLFFLAIKHLNFQRR

SEQ ID NO: 101020 - protein, 274 aa, Setaria italica
  Transcript Sequence Number=SeqID_35046
  Gene Ontology: Mol. function=protein serine/threonine kinase activity; Biological process=protein amino acid phosphorylation
  Homolog annotation: Hit_ID=B6SWU9; Match level="QueryCoverage=90%, HitCoverage=36%, E-value=1e-98, Identity=67%"; Hit description =Lectin-like receptor kinase 7
  Pfam annotation: Domain name=Pkinase; Domain location=1-221; Score =20.7; E_value=1e-09; Accession=PF00069.17; Description=Protein kinase domain
  Pfam annotation: Domain name=Pkinase_Tyr; Domain location=1-221; Score=-30.9; E_value=1.1e-11; Accession=PF07714.9; Description =Protein tyrosine kinase
  Pfam module annotation: Pfam domain module=Pkinase::Pkinase_Tyr; Domain location=1-221::1-221
RHRNLVQLLGYCRRNDELLLAYEYMANGSLEKHLYGVGGEPGPTLIWAQRFQVIKGVASGLLYLHEEWEQAVVHRDVKASNILLDSEMNARLGDFGLARLQNHDAELHTTVVAGTFGYIAPELALTGKASPLTDVFAFGAFLLEVVTGRRPVEDSTDGHRVMLVDWVLEHWRNESLAEAVGPRIQGGYDVDEVSLALRVGLMCSHPLAGVRPSMRQVMQYLAGDTPLPELTPAHMGMSMLALLQNQGLDSFVMANSSSSSASVRSFDTSLSRGR

SEQ ID NO: 101021 - protein, 163 aa, Setaria italica
  Transcript Sequence Number=SeqID_35047
  Gene Ontology: Cellular component=chloroplast
  Homolog annotation: Hit_ID=Q338A4; Match level="QueryCoverage=98%, HitCoverage=86%, E-value=1e-75, Identity=45%"; Hit description =Pentatricopeptide, putative, expressed
  Pfam annotation: Domain name=PPR; Domain location=111-145; Score =37.3; E_value=6e-08; Accession=PF01535.12; Description=PPR repeat
  Pfam annotation: Domain name=PPR; Domain location=6-40; Score=8.6; E _value=0.86; Accession=PF01535.12; Description=PPR repeat
  Pfam annotation: Domain name=PPR; Domain location=76-110; Score=33.4; E_value=9e-07; Accession=PF01535.12; Description=PPR repeat
  Pfam module annotation: Pfam domain module=PPR::PPR::PPR; Domain location=111-145::6-40::76-110
AVHTTESCNYMLELMRAHGRVGDMAQVFDLMQRQIVKTNVGTFATIFSGVGVEGGLRSAPAALPVMREAGMSLNAYSYNGLIYFLVKSGCDREAMEVYKAMVEDGIVPSVRTYSVLMLAFGKKRDVDTVLWLLSEMETRGIKPNVYSYTICIRVLGQAARFEE

SEQ ID NO: 101022 - protein, 45 aa, Setaria italica
  Transcript Sequence Number=SeqID_35048
NKSTTPYREAMIFRTDTILHFVAVSNRYDHGLQLQVAQISCQLQF

SEQ ID NO: 101023 - protein, 69 aa, Setaria italica
  Transcript Sequence Number=SeqID_35049
GGAIIAKMPSSNLTSPFPPAIAMSSSSEDEENDHSEPLMVDVDRNCHDQSSDEMKLQSEPSELETEADN

SEQ ID NO: 101024 - protein, 143 aa, Setaria italica
  Transcript Sequence Number=SeqID_35050
SSLGFYTSLLITTVLDSFFHTSVFGFDFNVFGLHDCLIKQMHLKYVAYWGCSLSISVQILVKHIVLVTDLLSWVEYNVRYPYYCILPDLVDGLQSPFAFYSNLNKLPWMFTHLNYMLGAVKNNLLWMFLSCLFCLVVPHWHPT

SEQ ID NO: 101025 - protein, 135 aa, Setaria italica
  Transcript Sequence Number=SeqID_35051
VSKENFERPSIFRNSKVQHMAAEAAGLLSKEDSDLRNHCASIDSFDLSAKGQDSSLESEGDYDNEDDDETGGELGHFSSSELANKTAANDGECLTQEEIVGSSGNQKPLSSLDFTTGGDMASSSVQHASVRTSGS

SEQ ID NO: 101026 - protein, 68 aa, Setaria italica
  Transcript Sequence Number=SeqID_35052
REAAEEEKRRPAAAATEYYGGGGEDEESDEEEQHFKRRPSSSSRREHEQEAQEEQPRHSRRSRDHKRR

SEQ ID NO: 101027 - protein, 227 aa, Setaria italica
  Transcript Sequence Number=SeqID_35053
  Gene Ontology: Mol. function=serine-type endopeptidase activity; Cellular component=cytoplasm; Biological process=proteolysis
  Homolog annotation: Hit_ID=Q5VQ13; Match level="QueryCoverage=100%, HitCoverage=76%, E-value=1e-126, Identity=94%"; Hit description=ATP -dependent Clp protease proteolytic subunit
  Pfam annotation: Domain name=CLP_protease; Domain location=24-207; Score=263.0; E_value=7.1e-76; Accession=PF00574.15; Description=Clp protease
NKKATRARISMMPIGTPRVPYRTPGEGTWQWLDIWNALYRERIIFIGDNIDEEFSNQVLASMLYLDSIDNTKKILLYINGPGGDLTPCMALYDTMLSLKSPIGTHCLGFAFNLAGFILAAGEKGSRTGMPLCRISLQSPAGAARGQADDIENEANELIRIKNYLYGKLAEHTGHSVEKIHEDLSRVKRFDAEGALEYGIIDRIIRPSRIKKEGSTGHRKDMRNLGLG

SEQ ID NO: 101028 - protein, 165 aa, Setaria italica
  Transcript Sequence Number=SeqID_35054
  Gene Ontology: Mol. function=ATP-dependent helicase activity; Cellular component=intracellular
  Homolog annotation: Hit_ID=Q10CV6; Match level="QueryCoverage=97%, HitCoverage=14%, E-value=1e-69, Identity=80%"; Hit description =Helicase associated domain family protein, expressed
KRSKRVSTERGENLGESVGYKVRLEGMKGKDTHLLFCTSGILLRRLLSDRNLNGVTHVFVDEIHERGMNEDFLLIVLKDLLSRRRDLRLILMSATLNAELFSSYFGGAPTIHIPGFTHPVRAHFLEDILERSGYKLTSSNQLDDYGQDKVWKTQRQLLPRKRKIK

SEQ ID NO: 101029 - protein, 130 aa, Setaria italica
  Transcript Sequence Number=SeqID_35055
  Homolog annotation: Hit_ID=B6TM56; Match level="QueryCoverage=73%, HitCoverage=85%, E-value=4e-26, Identity=70%"; Hit description =Chloroplast outer envelope 24 kD protein
GVCRWCDRIEYSKREEARPWGNAGSAPEQAKNSADGASDAEARRAPPSTVRFFPDAERQKARQPPPIKLEEEEGAPPPPATEEEMAPRNLWQVYALGAFIVLRWAWAKWKENQDRKDSPDDDGGAPDGST

SEQ ID NO: 101030 - protein, 114 aa, Setaria italica
  Transcript Sequence Number=SeqID_35056
  Gene Ontology: Mol. function=structural constituent of ribosome; Cellular component=intracellular; Biological process=translation
  Homolog annotation: Hit_ID=B9RFC9; Match level="QueryCoverage=100%, HitCoverage=100%, E-value=2e-37, Identity=68%"; Hit description=50S ribosomal protein L18, putative
  Pfam annotation: Domain name=Ribosomal_L18p; Domain location=4-113; Score=45.7; E_value=1.8e-10; Accession=PF00861.14; Description =Ribosomal L18pL5e family
MVIPPPERAARVTRFLKPYLLRMHFSNKYVSAQVIHSPTATVACSASSQEKLLRPDMGSTRDVAAAAKIGKLLGERLLLKGIPAVSIHMKREQKYHGKVKAVIDSVREAGVKLL

SEQ ID NO: 101031 - protein, 96 aa, Setaria italica
  Transcript Sequence Number=SeqID_35057
  Subcellular localization annotation: CTP_CleavageSite=59; ConfidenceScore=5.31e-01
VGPLDRVLIGDAQPTTGRRTPVTQRYKRRKVGAEAQHTNLTTATNPPNNPRRPLRSWARCSDGKHRRPCRRPLDSTGPYCIAAPTVTFSYSTSPAK

SEQ ID NO: 101032 - protein, 397 aa, Setaria italica
  Transcript Sequence Number=SeqID_35058
  Gene Ontology: Mol. function=oxidoreductase activity; Cellular component=peroxisome; Biological process=metabolic process
  Homolog annotation: Hit_ID=B6TAL4; Match level="QueryCoverage=100%, HitCoverage=100%, E-value=0.0, Identity=93%"; Hit description=12 -oxophytodienoate reductase 3
  Pfam annotation: Domain name=Oxidored_FMN; Domain location=18-368; Score=293.0; E_value=6.5e-85; Accession=PF00724.12; Description =NADH:flavin oxidoreductase  NADH oxidas
  Subcellular localization annotation: CTP_CleavageSite=41; ConfidenceScore=5.30e-01
MASADRSPAAEDPRPRPTLFSPYQTPRFRLAHRVVLAPMTRCRAPRAVPGPALEEYYAQRSTEGGLLISEGTIISPAGPGFPRVPGIYNQEQIDAWKKVVDAVHAKGAIFFCQLWHVGRASHQVYQPGGAAPISSTDKPISSRWRILMPDGSYGKYPTPRRLATSEIPEIVEQYRQSAINAIKAGFDGIEIHGAHGYLIDQFLKDGINDRTDEYGGSLSNRCRFLLEVTRAVVSAIGADRVAVRVSPAIDHLDASDSNPLQLGLAVVDRLNALQQEAGRLAYLHVTQPRYTAYGQTESGQHGSAEEESRMMRALRGAYRGTFMCSGGYTRELGVEAVESGDADLVSFGRLFIANPDLVERFRRDAPLNRYVRKTFYTPDPVVGYTDYPFLGQPKARM

SEQ ID NO: 101033 - protein, 89 aa, Setaria italica
  Transcript Sequence Number=SeqID_35059
  Gene Ontology: Mol. function=isomerase activity
  Homolog annotation: Hit_ID=Q53LS7; Match level="QueryCoverage=98%, HitCoverage=22%, E-value=1e-35, Identity=81%"; Hit description =ProFAR isomerase associated family protein, expressed
ISSVEEGVKVYRKFYTEERENSYGVLAISVSKPSAQPYIIMTDILAGLGYDGLGRLLAMAKTAGTVPDGLPPRRSALISSCMRLHQPNE

SEQ ID NO: 101034 - protein, 264 aa, Setaria italica
  Transcript Sequence Number=SeqID_35060
  Homolog annotation: Hit_ID=B5UA05; Match level="QueryCoverage=28%, HitCoverage=31%, E-value=7e-15, Identity=61%"; Hit description=Pi21 protein
MAILVISVDLECCRCRAKITKVLDCLKEEFCIEKVEFEEKLNKVIVRGKFSGEQLSKKIWCKAGRIIKEIKIVEVWPPPPPKPDPPKEDPKPEPPKEEPKPPKEEPKPDPPKEDPKPPKEDPKPPKEEPKPPPPPKPEVKWVPYPYPLPYPWSPSQSWPCSCPPQRPCQCPPPRPLPWPPLPPHCTCSKNDDKHDRCSTCGGERPDPPAKPPCQCGGRPPWPPCSCGPNKQPFWWPPPPPPPGVVYPPPWCNIVTEDNPGCSIM

SEQ ID NO: 101035 - protein, 143 aa, Setaria italica
  misc_feature (8)..(8): Xaa can be any naturally occurring amino acid
  misc_feature (39)..(39): Xaa can be any naturally occurring amino acid
  Transcript Sequence Number=SeqID_35061
  Gene Ontology: Cellular component=integral to membrane; Biological process=photosynthesis
  Homolog annotation: Hit_ID=P0C515; Match level="QueryCoverage=100%, HitCoverage=76%, E-value=9e-72, Identity=93%"; Hit description =Photosystem I assembly protein ycf4
  Pfam annotation: Domain name=Ycf4; Domain location=1-143; Score =247.2; E_value=4.1e-71; Accession=PF02392.8; Description=Ycf4
  Subcellular localization annotation: CTP_CleavageSite=19; ConfidenceScore=5.05e-01
NFFWACIXFLGSLGFLAVGASSYLGKNMISVLPSQQILXFFPQGVVMSFYGIAGLFISSYLWCTILWNVGSGYDRFDRKEGIVCIFRWGFPGIKRRIFLRFLVRDIQSIRIQVKEGLYPRRILYMEIRGQGVIPLTRTDEKFF

SEQ ID NO: 101036 - protein, 78 aa, Setaria italica
  misc_feature (69)..(78): Xaa can be any naturally occurring amino acid
  Transcript Sequence Number=SeqID_35062
DVYYWNVLIVSSASSPQHPVEFPERSVHISYFQIKIGFIMVFVYSLYLFIMDLTAYTSTRIGHKDPVNXXXXXXXXXX

SEQ ID NO: 101037 - protein, 44 aa, Setaria italica
  Transcript Sequence Number=SeqID_35063
RLFPKGQVVFVEGSTCKKKVIKHYFLLPLYQLNSVNYNSIRVFL

SEQ ID NO: 101038 - protein, 91 aa, Setaria italica
  Transcript Sequence Number=SeqID_35064
VLGRLLLQLKSTRVLDAIYPFFPFDFFLSCNCHLTLAACAGWAADGEPAMVLWPASCGAVMGTKAHCVLQEQAVLHLRLWHQLLDSDNLSF

SEQ ID NO: 101039 - protein, 81 aa, Setaria italica
  Transcript Sequence Number=SeqID_35065
  Gene Ontology: Mol. function=peptidase activity; Cellular component =extracellular region; Biological process=defense response
  Homolog annotation: Hit_ID=B6SJ49; Match level="QueryCoverage=76%, HitCoverage=77%, E-value=1e-16, Identity=70%"; Hit description =Flower-specific gamma-thionin
  Pfam annotation: Domain name=Gamma-thionin; Domain location=33-79; Score=86.3; E_value=1.1e-22; Accession=PF00304.12; Description=Gamma- thionins family
MELSRKLFSAVLLVLLLLVATEVGGPVGVAEARTCLSQSHKFRGPCVRRANCANVCRTEGFPDGKCRGFRRRCFCTTHCRE

SEQ ID NO: 101040 - protein, 59 aa, Setaria italica
  Transcript Sequence Number=SeqID_35066
ILCTHWLLELKREMISCSSVHCNVLKTLYSSPRFYLHLRSPFNMSALIGFPSSPYYHFP

SEQ ID NO: 101041 - protein, 125 aa, Setaria italica
  misc_feature (8)..(8): Xaa can be any naturally occurring amino acid
  misc_feature (23)..(23): Xaa can be any naturally occurring amino acid
  Transcript Sequence Number=SeqID_35067
  Gene Ontology: Mol. function=GTP binding; Cellular component =intracellular
  Homolog annotation: Hit_ID=Q6ATJ0; Match level="QueryCoverage=55%, HitCoverage=19%, E-value=1e-14, Identity=60%"; Hit description =Putative GTP-binding protein
TFGPSGEXAEVVSARGRGSGGRXGFMSGAGETELQLQRRRIQERRVKLLTQIEHVRRTRAIQRSGRKRHGGSFGQELVTVAVVGYTNAGNASTSCIGKSEMKPTVSLRSAFLPDGRITLRKRGST

SEQ ID NO: 101042 - protein, 270 aa, Setaria italica
  Transcript Sequence Number=SeqID_35068
  Gene Ontology: Mol. function=GTP binding; Cellular component =intracellular
  Homolog annotation: Hit_ID=B9SX85; Match level="QueryCoverage=99%, HitCoverage=44%, E-value=4e-60, Identity=51%"; Hit description=GTP -binding protein hflx, putative
  Pfam annotation: Domain name=MMR_HSR1; Domain location=1-111; Score =51.4; E_value=3.4e-12; Accession=PF01926.15; Description=GTPase of unknown function
LVSALSETALYSDDRLFATVDPRLRSVILPSGRKALLSDTVGFISDLPIQLVEAFHATLEEVVEADMLVHVLDSSAPNLEEHRSTVLQVLQQIGVSQEKINNMIEVWNKIDLVDENAASDGVEDEIFLTEGEEEDDMFSEDGVPSEQSSLDSLDDGADSEYLSEEKFEDNNDEVSSKESSEMKAMNPDLSSKECFGELCVPDAIGHPLTQQMPSCHVKTSAVTGVGLQELLALIDRKLTEQQNVVQRSYGPFDRKWRPSSSMDGEKAAEQ

SEQ ID NO: 101043 - protein, 89 aa, Setaria italica
  Transcript Sequence Number=SeqID_35069
  Subcellular localization annotation: CTP_CleavageSite=16; ConfidenceScore=5.33e-01
MAGSLVNAAASSINYVSSSVSSILESSNSFCLPAYVPNLAFNKKQQAWLRELENSGVVADLKVIDCSTHSAFESTTTDCPRLTRQHDLL

SEQ ID NO: 101044 - protein, 415 aa, Setaria italica
  misc_feature (65)..(65): Xaa can be any naturally occurring amino acid
  Transcript Sequence Number=SeqID_35070
  Gene Ontology: Mol. function=phosphotransferase activity, alcohol group as acceptor; Cellular component=cytoplasm; Biological process =metabolic process
  Homolog annotation: Hit_ID=B9SPS4; Match level="QueryCoverage=98%, HitCoverage=42%, E-value=1e-169, Identity=67%"; Hit description =Galactokinase, putative
  Pfam annotation: Domain name=GalKase_gal_bdg; Domain location=292 -344; Score=3.0; E_value=0.00052; Accession=PF10509.1; Description =Galactokinase galactose-binding signa
MPMPAFRNVIDVPLIVRGLRKSRSEVRKELGLEENAKVLIIKYIFYPAGWKLKQEWLPDGWICLXCGASDSQEVPPNFIKLAKDAYTPDVIAASDCMLGKIGYGAASEVLAYKLPLVFVHRDYFNEEPFLRNLLEHYQNSIEMIRSDFLAGHWKPYLLHALTLQPCYNGPINGGEVVAQILQDTAIGKECISDKFNGARRLQDAIVSGYKLQRATGRDVSIPDWYSLSETETSAGLTSKNVATKETAAFCFEDFEILHGDLQGLTDTMEFLKSLSELDGNNLESPEKQQQERTAASVLFDWQKEIYIARAPGRLDVMGGIADYSGSLVLQMPLREACHVAVQRNHPSNQKLWKHTQARQLENAGLAPVIQIVSFGSELSNRAPTFDMDLSDFLDGEKPISYEKAREFFLSESIPK

SEQ ID NO: 101045 - protein, 151 aa, Setaria italica
  Transcript Sequence Number=SeqID_35071
  Homolog annotation: Hit_ID=Q25A44; Match level="QueryCoverage=63%, HitCoverage=32%, E-value=1e-32, Identity=75%"; Hit description =H0303G06.15 protein
  Subcellular localization annotation: CTP_CleavageSite=64; ConfidenceScore=5.49e-01
FRSLLYYFVLSNSSVLLLSCFVLGKIVCRAPQEQPRRPRRRAAPSSSNTSSRLRPGALAATDVCSSADSRAHEAVNQLFQPVNLTLEQLVRHKLSEGRRVTCRLLGVILEETTPEELQNHVTVRPSVMEVLLEIAKFCDVYLMERVLDDES

SEQ ID NO: 101046 - protein, 153 aa, Setaria italica
  misc_feature (72)..(72): Xaa can be any naturally occurring amino acid
  Transcript Sequence Number=SeqID_35072
  Homolog annotation: Hit_ID=Q7XN71; Match level="QueryCoverage=77%, HitCoverage=70%, E-value=8e-54, Identity=86%"; Hit description =OSJNBa0089N06.11 protein
KLSEGRRVTCRLLGVILEETTPEELQNHVTVRPSVMEVLLEIAKFCDVYLMERVLDDESEEKVLSALSEAGXFANGALINDKVLFCSTENGRTSFVRQLEPDWHIDTSPEIVHQLSRFIKYQLHISPQQPERIASNVFSSPSLEQYFGGLDQR

SEQ ID NO: 101047 - protein, 287 aa, Setaria italica
  Transcript Sequence Number=SeqID_35073
  Homolog annotation: Hit_ID=Q25A44; Match level="QueryCoverage=83%, HitCoverage=90%, E-value=3e-90, Identity=71%"; Hit description =H0303G06.15 protein
MASASAPAPAAGAGAGGGKDDELADLVRRLVDALARYADRLPFDLDRQKLRSLTTLAAISVTLLFAWKMLRAPQEQPRRPRRRAAPSSSNTSSRLRPGALAATDACSSADSRAHEAVNQLFQPVNLTLEQLVRHKLSEGRRVTCRLLGVILEETTPEELQNHVTVRPSVMEVLLEIAKFCDVYLMERVLDDESEEKVLSALSEAGLFANGALINDKVLFCSTENGRTSFVRQLEPDWHIDTSPEIVHQLSRFIKYQLHISPQQPERIASNVFSSPSLEQYFGGLDQR

SEQ ID NO: 101048 - protein, 227 aa, Setaria italica
  Transcript Sequence Number=SeqID_35074
  Gene Ontology: Mol. function=catalytic activity; Cellular component =membrane; Biological process=protein amino acid N-linked glycosylation
  Homolog annotation: Hit_ID=B6UB05; Match level="QueryCoverage=100%, HitCoverage=100%, E-value=1e-104, Identity=82%"; Hit description =Dolichyldiphosphatase 1
  Pfam annotation: Domain name=PAP2; Domain location=64-183; Score =77.8; E_value=4e-20; Accession=PF01569.13; Description=PAP2 superfamily
MSGAGDYQEMAASVPPSLKAITLTHVRYRPGDHLGLFLAWVSLIPVFISLGGFVSHFLFRRELQGLCFAAGLLVSQALNELIKHSVAQSRPAYCEFLEACDSHGWPSSHSQYMFFFATYLSLLSLRRSTARRVIAAVPWPLAFLTMLSRVYLGYHTVAQVFAGAVVGLVFGAIWYWIVNTMLVDYFPMIEESAIGRWLYIKDTSHIPDVLKFEYDNARAARKKVATD

SEQ ID NO: 101049 - protein, 137 aa, Setaria italica
  misc_feature (14)..(14): Xaa can be any naturally occurring amino acid
  misc_feature (128)..(128): Xaa can be any naturally occurring amino acid
  Transcript Sequence Number=SeqID_35075
RTVSTYEPYDTAFXFLHRARSFLASLPPPHRIPLSEAGKLHHELGFPRGRKVARSAARHPLLFHLPVVDSVPHLALTPLMCSLLEEERRIHDELLPSRVRAVRKLLMLTAHRRVPLAKLHHCRAVLGXPDDFRDRVR

SEQ ID NO: 101050 - protein, 328 aa, Setaria italica
  Transcript Sequence Number=SeqID_35076
  Gene Ontology: Mol. function=catalytic activity; Cellular component =plasma membrane
  Homolog annotation: Hit_ID=B6TWB0; Match level="QueryCoverage=96%, HitCoverage=90%, E-value=1e-159, Identity=86%"; Hit description =Catalytic/ protein phosphatase type 2C
  Pfam annotation: Domain name=PP2C; Domain location=33-309; Score =136.8; E_value=6.6e-38; Accession=PF00481.13; Description=Protein phosphatase 2C
EGEERDGGGGEGKAAAPAVLRSSGTVWGEGSETFAAVCSRRGEKGTNQDCSIVWEGFGCQEDTIFCGIFDGHGPWGHYVAKAVRDSLPPSLLCHWQEALTLASLIDGEKRLSDCRFDLWKQSYVAACAAVDDELRRSRRLDAVYSGCTALSVVKQGDLMVIANVGDSRAVLATTSDDGTVAAVQLTVDFKPNLPQEKERIRRCNGQVYCLADEPGVYRVWKPTQDSPGLAMSRAFGDYSVKDYGVISAPEVTQRRISSRDQFAILATDGVWDVLSNEEAVQIVAGTPERGKAAKRLVECAVRAWRRKRRGIAVDDCSAICLFFHSPPS

SEQ ID NO: 101051 - protein, 105 aa, Setaria italica
  Transcript Sequence Number=SeqID_35077
TCRLGRDKRRKGRTEQRWQEPCRRWHFFPPASATTSSTPRTPVSRRGGLHARGEYLNIYRSHLIRLPCRQFHRNEQSTTVAPPPADSTAPPLLSSIPSARSSAST

SEQ ID NO: 101052 - protein, 161 aa, Setaria italica
  Transcript Sequence Number=SeqID_35078
  Gene Ontology: Mol. function=serine-type peptidase activity; Cellular component=integral to membrane; Biological process=proteolysis
  Homolog annotation: Hit_ID=B6UIG2; Match level="QueryCoverage=80%, HitCoverage=76%, E-value=1e-44, Identity=65%"; Hit description =Mitochondrial inner membrane protease subunit 2
  Pfam annotation: Domain name=Peptidase_S24; Domain location=32-106; Score=48.7; E_value=2.2e-11; Accession=PF00717.15; Description =Peptidase family S24
  Pfam annotation: Domain name=Peptidase_S26; Domain location=57-141; Score=-30.2; E_value=0.011; Accession=PF10502.1; Description=Signal peptidase I
  Pfam module annotation: Pfam domain module=Peptidase_S24::Peptidase _S26; Domain location=32-106::57-141
MARAAVWPFVKACVTGSLLGRTFADWCASVIAVDGRSMYPTLDAQQGERALVEKRCLYRYDLSRGDVVVFRSPRNHREMVVKRLIALPGDWIQVPEKQEIRQIPQGHCWVEGDNAGLSLDSRTYGPVPLGLMQGRVTHVVWPPNRIGRVDRKIPEGRIMPL

SEQ ID NO: 101053 - protein, 193 aa, Setaria italica
  misc_feature (62)..(62): Xaa can be any naturally occurring amino acid
  misc_feature (72)..(72): Xaa can be any naturally occurring amino acid
  Transcript Sequence Number=SeqID_35079
  Gene Ontology: Mol. function=cysteine-type endopeptidase activity; Cellular component=vacuole; Biological process=proteolysis
  Homolog annotation: Hit_ID=B6TGM9; Match level="QueryCoverage=60%, HitCoverage=24%, E-value=1e-54, Identity=87%"; Hit description =Cysteine protease 1
  Pfam annotation: Domain name=Peptidase_C1; Domain location=7-174; Score=129.8; E_value=8.5e-36; Accession=PF00112.15; Description =Papain family cysteine protease
FHCFISELNRVTDESNSKVSNNYRAVELECSATSLNCNTDGLVCNGLLQTLLAVHRYPYKAXDNRCDVNRKXNAKVVTIDSYEDVPVNSEKSLQKAVAHQPVSVAIEASGRAFQLYSSGIFTGTCGTALDHGVTAVGYGTENGKDYWIVKNSWGGSWGEKGYIRMERNVKSSKTDKVDGQYDRRKTLRNPTRK

SEQ ID NO: 101054 - protein, 236 aa, Setaria italica
  misc_feature (26)..(26): Xaa can be any naturally occurring amino acid
  misc_feature (174)..(174): Xaa can be any naturally occurring amino acid
  Transcript Sequence Number=SeqID_35080
  Gene Ontology: Mol. function=cysteine-type endopeptidase activity; Cellular component=vacuole; Biological process=proteolysis
  Homolog annotation: Hit_ID=B6TGM9; Match level="QueryCoverage=96%, HitCoverage=48%, E-value=1e-102, Identity=79%"; Hit description =Cysteine protease 1
  Pfam annotation: Domain name=Granulin; Domain location=191-236; Score= 11.8; E_value=0.00072; Accession=PF00396.10; Description=Granulin
  Pfam annotation: Domain name=Peptidase_C1; Domain location=1-157; Score=138.3; E_value=2.4e-38; Accession=PF00112.15; Description =Papain family cysteine protease
  Pfam module annotation: Pfam domain module=Granulin::Peptidase_C1; Domain location=191-236::1-157
LVGSCIGTYAFQFIINNGGIEQQEGXELTLNKAKDNRCDVNRKNAKVVTIDSYEDVPVNSEKSLQKAVAHQPVSVAIEASGRAFQLYSSGIFTGTCGTALDHGVTAVGYGTENGKDYWIVKNSWGGSWGEKGYIRMERNVKSSSGKCGIAVEPLVPSEEGRQPPNPGPTPPSPXPPTVCDNYYSCPESTTCCCIYEYGKYCFAWGCCPLEGATCCDDHYSCCPHDYPVCNVQQGTC

SEQ ID NO: 101055 - protein, 224 aa, Setaria italica
  misc_feature (30)..(30): Xaa can be any naturally occurring amino acid
  misc_feature (186)..(186): Xaa can be any naturally occurring amino acid
  misc_feature (211)..(211): Xaa can be any naturally occurring amino acid
  Transcript Sequence Number=SeqID_35081
  Gene Ontology: Mol. function=cysteine-type endopeptidase activity; Cellular component=vacuole; Biological process=proteolysis
  Homolog annotation: Hit_ID=B6TGM9; Match level="QueryCoverage=100%, HitCoverage=47%, E-value=4e-96, Identity=79%"; Hit description =Cysteine protease 1
  Pfam annotation: Domain name=Granulin; Domain location=178-224; Score= 2.1; E_value=0.011; Accession=PF00396.10; Description=Granulin
  Pfam annotation: Domain name=Peptidase_C1; Domain location=1-143; Score=146.5; E_value=8.3e-41; Accession=PF00112.15; Description =Papain family cysteine protease
  Pfam module annotation: Pfam domain module=Granulin::Peptidase_C1; Domain location=178-224::1-143
FIINNGGIDTEEDYPYKAKDNRCDVNRKNXAKVVTIDSYEDVPVNSEKSLQKAVAHQPVSVAIEASGRAFQLYSSGIFTGTCGTALDHGVTAVGYGTENGKDYWIVKNSWGGSWGEKCYIRMERNVKSSSGKCGIAVEPSYPLKKGANPPNPGPTPPSPTPPPTVCDNYYSCPESTTCCCIYEYGXKYCFAWGCCPLEGATCCDDHYSCCXHDYPVCNVQQGTC

SEQ ID NO: 101056 - protein, 270 aa, Setaria italica
  misc_feature (147)..(147): Xaa can be any naturally occurring amino acid
  misc_feature (163)..(163): Xaa can be any naturally occurring amino acid
  misc_feature (218)..(218): Xaa can be any naturally occurring amino acid
  Transcript Sequence Number=SeqID_35082
  Gene Ontology: Mol. function=cysteine-type endopeptidase activity; Cellular component=vacuole; Biological process=proteolysis
  Homolog annotation: Hit_ID=B6TGM9; Match level="QueryCoverage=100%, HitCoverage=57%, E-value=1e-126, Identity=82%"; Hit description =Cysteine protease 1
  Pfam annotation: Domain name=Granulin; Domain location=187-234; Score= 18.2; E_value=0.00012; Accession=PF00396.10; Description=Granulin
  Pfam annotation: Domain name=Peptidase_C1; Domain location=1-151; Score=186.1; E_value=9.7e-53; Accession=PF00112.15; Description =Papain family cysteine protease
  Pfam module annotation: Pfam domain module=Granulin::Peptidase_C1; Domain location=187-234::1-151
GLMDYAFQFIINNGGIDTEEDYPYKAKDNRCDVNRKNAKVVTIDSYEDVPVNSEKSLQKAVAHQPVSVAIEASGRAFQLYSSGIFTGTCGTALDHGVTAVGYGTENGKDYWIVKNSWGGSWGEKGYIRMERNVKSSSGKCGIAVEPXSYPLKKGANPPNPGPXTPPSPTPPPTVCDNYYSCPESTTCCCIYEYGKYCFAWGCCPLEGATCCDDHYSCXPHDYPVCNVQQGTCLTSKDSPLSVKALKRTLAKPHLGFSSWSNSADGMKSSA

SEQ ID NO: 101057 - protein, 339 aa, Setaria italica
  Transcript Sequence Number=SeqID_35083
  Gene Ontology: Mol. function=DNA-directed RNA polymerase activity; Cellular component=chloroplast; Biological process=transcription, DNA-dependent
  Homolog annotation: Hit_ID=A1E9V6; Match level="QueryCoverage=100%, HitCoverage=100%, E-value=0.0, Identity=97%"; Hit description=DNA -directed RNA polymerase subunit alpha
  Pfam annotation: Domain name=RNA_pol_A_CTD; Domain location=259-326; Score=129.3; E_value=1.3e-35; Accession=PF03118.7; Description =Bacterial RNA polymerase, alpha chain C terminal domain
  Pfam annotation: Domain name=RNA_pol_A_bac; Domain location=65-177; Score=85.7; E_value=1.7e-22; Accession=PF01000.18; Description=RNA polymerase Rpb3RpoA insert domain
  Pfam annotation: Domain name=RNA_pol_L; Domain location=23-231; Score= 88.5; E_value=2.4e-23; Accession=PF01193.16; Description=RNA polymerases L  13 to 16 kDa subunit
  Pfam module annotation: Pfam domain module=RNA_pol_A_CTD::RNA_pol_A _bac::RNA_pol_L; Domain location=259-326::65-177::23-231
MVREEVTGSTQTLEWKCVESRVDSKRLYYGRFILSPLRKGQADTVGIALRRALLGEIEGTCITRAKFGNVPHEYSTIVGIEESIQEILLNLKEIVLRSNLYGVRDASICVKGPRYITAQDIILPPSVEIVDTTQPIANLREPIDFYIELQIKRDRGYHTELRKNSQDGSYPIDAVFMPVRNVNYSIFSCGNGNEKHEILFLEIWTNGSLTPKEALYEASRNLIDLFLPFLHAEEEGTSFEENKNRFTPPLLTFQKRFTNLKKNKKGIPLNCIFIDQLELPSRTYNCLKRANIHTLLDLLSKTEEDLMRIESFRMEDGKLIWDTLEKHLPIDLLKNKFSL

SEQ ID NO: 101058 - protein, 123 aa, Setaria italica
  Transcript Sequence Number=SeqID_35084
TNHNADGTHPETPCRLATERFHVKHVAINSIPFCITLYQPRQSATIHRRAPARSSRFHSRRRNSSYGSVLGGADRTREEPDEKAKTGEEERGRSGDPPGAEEEAGGGEEPRDGAPVPALAQVR

SEQ ID NO: 101059 - protein, 57 aa, Setaria italica
  Transcript Sequence Number=SeqID_35085
RFVAISYIATIYGGCENAYAVAICLGHITTNTQALLYAKSQLQRNLCRRYMPKDYRN

SEQ ID NO: 101060 - protein, 54 aa, Setaria italica
  Transcript Sequence Number=SeqID_35086
MAPLLLLFILGGLCALFSLTTSSRSTAAKKCVGDVKCGDAGKGSASEGEEEEAA

SEQ ID NO: 101061 - protein, 62 aa, Setaria italica
  Transcript Sequence Number=SeqID_35087
HEPSPYLNLLFRKYERNLILLHKVSFGSSCIFPLWNSQNICSIIFTTFRKKQLPRMLVTWQL

SEQ ID NO: 101062 - protein, 102 aa, Setaria italica
  misc_feature (67)..(67): Xaa can be any naturally occurring amino acid
  Transcript Sequence Number=SeqID_35088
  Gene Ontology: Mol. function=methyltransferase activity; Cellular component=nucleus; Biological process=chromatin modification
  Homolog annotation: Hit_ID=B9SBI4; Match level="QueryCoverage=88%, HitCoverage=8%, E-value=2e-33, Identity=65%"; Hit description =Trithorax, putative
  Pfam annotation: Domain name=PWWP; Domain location=16-95; Score=12.2; E_value=0.00083; Accession=PF00855.9; Description=PWWP domain
KRDVIEKKEDLYWPEDFVLGDVVWAKSGKKCPAWPALVIDPLLHAPEVVLNSCVADALCVMFFGYSXGGHNRDYGWVKQGMIFPFVDYLDRFQGQPLYKSSS

SEQ ID NO: 101063 - protein, 427 aa, Setaria italica
  Transcript Sequence Number=SeqID_35089
  Homolog annotation: Hit_ID=Q53NA2; Match level="QueryCoverage=59%, HitCoverage=60%, E-value=3e-54, Identity=44%"; Hit description =D8Ertd354e protein, putative
  Pfam annotation: Domain name=DUF1624; Domain location=37-233; Score= -122.1; E_value=0.038; Accession=PF07786.4; Description=Protein of unknown function (DUF1624)
  Pfam annotation: Domain name=DUF2261; Domain location=37-395; Score =10.4; E_value=2.5e-14; Accession=PF10019.1; Description =Uncharacterized conserved protein (DU
  Pfam module annotation: Pfam domain module=DUF1624::DUF2261; Domain location=37-233::37-395
  Subcellular localization annotation: CTP_CleavageSite=28; ConfidenceScore=5.38e-01
AVDLEAGGGGFPKSSGGPPKRAAAGTSPASTAPARQRLVSLDVFRGITVLLMIIVDDAGAFIPAMNHSPWDGVTVADFVMPFFLFIVGVALALAYKRVPDKLDATKKAVLRALKLFCLGLVLQGGFFHGVRSLTFGVDLQEIRLMGILQRIAIAYLLTALCEIWLKGDEDVDYGFDLLKRYRYQLFVGAIVAITYMALLYGTYVPDWEYQTSGPGSTEKSFLVKCGVRGDTSPGCNAVGMIDRKILGIEHLYGRPVYARSKQCSINSPQNGPLPPDAPSWCQAPFDPEGLLSSVMAIVTCLIGLQYGHVIVHFQKHRERIMNWLIPSFSMLVLGFAMDFFGMHMNKPLYTLSYTLATAGAAGLLFAGIYTLVDLYGYRRPTVAMEWMGMHALMIYVLIACNILPIFIHGFYWKEPKNNLLKFVGIGA

SEQ ID NO: 101064 - protein, 74 aa, Setaria italica
  misc_feature (40)..(74): Xaa can be any naturally occurring amino acid
  Transcript Sequence Number=SeqID_35090
EIWITCLFLSEVWIHTGLHSSVASVCDLSYLDRQFIQVEXXXXXXXXXXXXXXXXXXXXXXXXXXXXXXXXXXX

SEQ ID NO: 101065 - protein, 206 aa, Setaria italica
  Transcript Sequence Number=SeqID_35091
  Gene Ontology: Mol. function=protein binding; Cellular component =cytoskeleton; Biological process=microtubule cytoskeleton organization and biogenesis
  Homolog annotation: Hit_ID=B9SHQ0; Match level="QueryCoverage=99%, HitCoverage=39%, E-value=9e-53, Identity=49%"; Hit description =Tubulin-specific chaperone E, putative
  Pfam annotation: Domain name=LRR_1; Domain location=144-167; Score =8.3; E_value=8; Accession=PF00560.25; Description=Leucine Rich Repeat
  Pfam annotation: Domain name=LRR_1; Domain location=169-196; Score =6.3; E_value=19; Accession=PF00560.25; Description=Leucine Rich Repeat
  Pfam annotation: Domain name=LRR_1; Domain location=17-37; Score=0.5; E_value=2.5e+02; Accession=PF00560.25; Description=Leucine Rich Repeat
  Pfam annotation: Domain name=LRR_1; Domain location=43-67; Score=8.8; E_value=6.2; Accession=PF00560.25; Description=Leucine Rich Repeat
  Pfam annotation: Domain name=LRR_1; Domain location=69-93; Score=6.2; E_value=20; Accession=PF00560.25; Description=Leucine Rich Repeat
  Pfam module annotation: Pfam domain module=LRR_1::LRR_1::LRR_1::LRR _1::LRR_1; Domain location=144-167::169-196::17-37::43-67::69-93
KFVGQNKVQEKLKNFNDLTSASVSYMGVSSIGPLDELKNLVPNLRLLDLTGNLFSQWQDISALCHALASLEVLNLTNNTMENDVIESPMLENIHILVLNNCGVTWELVEKIKVSFTCLNELHLMSNKLKTIMTPDGNFVQGFNTLRLLNLEDNHIDSWDEIVKLSYLKSLEQLHLNKNRIKHVKYPSNLPSALDDASAVPFENLQV

SEQ ID NO: 101066 - protein, 146 aa, Setaria italica
  Transcript Sequence Number=SeqID_35092
  Homolog annotation: Hit_ID=B9SHQ0; Match level="QueryCoverage=95%, HitCoverage=25%, E-value=1e-47, Identity=68%"; Hit description =Tubulin-specific chaperone E, putative
YLWCNVTCRYIRLVMGKTQSNDIEEIKRLHPRFAELKAFHCIEDEKPTSSTSGPQKMASGLISITLKCVGPSMGEKQPLTKKLPATTTVGKLKSLCESFFKLKDIRVKLFVEEEGCPLPQLLEEDTASLMELGIGSGASIVVDEES

SEQ ID NO: 101067 - protein, 284 aa, Setaria italica
  Transcript Sequence Number=SeqID_35093
  Gene Ontology: Mol. function=protein binding; Cellular component =cytoskeleton; Biological process=protein modification process
  Homolog annotation: Hit_ID=B9SHQ0; Match level="QueryCoverage=96%, HitCoverage=52%, E-value=7e-88, Identity=60%"; Hit description =Tubulin-specific chaperone E, putative
  Pfam annotation: Domain name=LRR_1; Domain location=12-35; Score=8.3; E_value=8; Accession=PF00560.25; Description=Leucine Rich Repeat
  Pfam annotation: Domain name=LRR_1; Domain location=37-64; Score=6.3; E_value=19; Accession=PF00560.25; Description=Leucine Rich Repeat
  Pfam annotation: Domain name=LRR_1; Domain location=71-91; Score=7.9; E_value=9.5; Accession=PF00560.25; Description=Leucine Rich Repeat
  Pfam annotation: Domain name=LRR_1; Domain location=96-118; Score =6.0; E_value=21; Accession=PF00560.25; Description=Leucine Rich Repeat
  Pfam module annotation: Pfam domain module=LRR_1::LRR_1::LRR_1::LRR _1; Domain location=12-35::37-64::71-91::96-118
NFFSLVLKVFNTLRLLNLEDNHIDSWDEIVKLSYLKSLEQLHLNKNRIKHVKYPSNLPSALDDASAVPFENLQVLLLGSNEIDDFSSVDSLNLFPSLRDVRLSDNPIADPAKGGAPRFVLIARLGKVKILNGSEVSPRERRESEIRYIRLVMGKTQSNDIEEIKRLHPRFAELKAFHCIEDEKPTSSTSGPQKMASGLISITLKCVGPSMGEKQPLTKKLPATTTVGKLKSLCESFFKLKDIRVKLFVEEEGCPLPQLLEEDTASLMELGIGSGASMLSHLFVG

SEQ ID NO: 101068 - protein, 82 aa, Setaria italica
  Transcript Sequence Number=SeqID_35094
  Subcellular localization annotation: CTP_CleavageSite=73; ConfidenceScore=5.71e-01
LLSTRDRFFKTFSARPLMLSQSFPFCSTLSDAFSIASTASIMSLSVAISIQSSMDTLQICWLASQALASSTLLSSYEWSSIR

SEQ ID NO: 101069 - protein, 73 aa, Setaria italica
  Transcript Sequence Number=SeqID_35095
  Subcellular localization annotation: CTP_CleavageSite=68; ConfidenceScore=5.03e-01
MASVPLSASSQAGLLLLPLPLLQPPGAGAGAGACLRYCLPRLPPGLASVRKGGLMTLPLPLPLLAPPRARRGR

SEQ ID NO: 101070 - protein, 1067 aa, Setaria italica
  Transcript Sequence Number=SeqID_35096
  Gene Ontology: Mol. function=protein kinase activity; Cellular component=cellular_component; Biological process=protein amino acid phosphorylation
  Homolog annotation: Hit_ID=Q6KAK1; Match level="QueryCoverage=100%, HitCoverage=69%, E-value=0.0, Identity=70%"; Hit description=Protein kinase-like
  Pfam annotation: Domain name=HEAT; Domain location=122-158; Score =19.5; E_value=0.014; Accession=PF02985.14; Description=HEAT repeat
  Pfam annotation: Domain name=HEAT; Domain location=167-203; Score =5.8; E_value=9.5; Accession=PF02985.14; Description=HEAT repeat
  Pfam annotation: Domain name=HEAT; Domain location=287-323; Score =3.7; E_value=17; Accession=PF02985.14; Description=HEAT repeat
  Pfam annotation: Domain name=HEAT; Domain location=326-362; Score =20.7; E_value=0.006; Accession=PF02985.14; Description=HEAT repeat
  Pfam annotation: Domain name=HEAT; Domain location=366-402; Score =6.1; E_value=8.9; Accession=PF02985.14; Description=HEAT repeat
  Pfam annotation: Domain name=WD40; Domain location=1028-1067; Score =19.2; E_value=0.017; Accession=PF00400.24; Description=WD domain, G -beta repeat
  Pfam annotation: Domain name=WD40; Domain location=636-674; Score =39.5; E_value=1.3e-08; Accession=PF00400.24; Description=WD domain, G-beta repeat
  Pfam annotation: Domain name=WD40; Domain location=684-722; Score =5.1; E_value=10; Accession=PF00400.24; Description=WD domain, G-beta repeat
  Pfam annotation: Domain name=WD40; Domain location=786-824; Score =7.1; E_value=5.7; Accession=PF00400.24; Description=WD domain, G -beta repeat
  Pfam annotation: Domain name=WD40; Domain location=924-960; Score =2.3; E_value=21; Accession=PF00400.24; Description=WD domain, G-beta repeat
  Pfam module annotation: Pfam domain module=HEAT::HEAT::HEAT::HEAT::HEA T::WD40::WD40::WD40::WD40::WD40; Domain location=122-158::167 -203::287-323::326-362::366-402::1028-1067::636-674::684-722::786 -824::924-960
  Subcellular localization annotation: CTP_CleavageSite=20; ConfidenceScore=5.27e-01
NRSNSTSTKITKDMDQDHIRSSQLVNPAGRGTGSGLTTRNNVVSHVQKISKSNLCSLVAGYDGQSDTYSFDIFQQIDSKESCEGMVLLASLLCSCIRSVKKPELRRASLILLKFSSTYIDDDNRLQLVVPYVIAMLSDPAAIVRCAALETLCDVLCLVQDFPISDAVIFPEYILPMLSLLPDDTEESVRVCYASNIHKLALTAYRFLLRSRSIADIGPLDESVVAPRSQSADSPAKKQDQFYAQLAELRKNIYEIVQDLAMGQKQTPNVRRALLQDIGYLCYFFGHKQSNDFLLPILPAFLNDHDEQLRAVFFGQIVFVCYFIGSRSVEEYLLPYLEQALSDGMEAVLVNALDCLTMMCKSGYLRKRVIVGLLGKVLPLLRYPINWVKRSAVRFVAACSESLGAVDTYVYLSPHLRQFLHREPPSLSSEPALLSCLKPPLPKSIFYQALEDAQDMGDILLKGGGKKELTVLGGRYPGIAQSGSSINLEDVARLKGPNISSNMPFDVKDSVSSDKSLYSGFALHASAGNSSFYDGLSKGIPSYSVCTDKRGLGETQPLPDSSVYKASIRLPWLEPNRPGVHTRDDYFSSKRRELSINDSIKSSSSLQGDSIPNSDTGGLPSFSRSAVNLETGWKPRGILVAHLQEHRLSVNDIAVSNDNTFFVTASDDSSIKIWDTRKLEKDIAFRSRLTYSMGTSRALCTTMVRGTSQVAVGASDGTLHLFSVDCARGVGSVVERYSGIVDVKRNDIKEGAILSAVNCSSDSFSPTVLFSTEHCGIHKWDTRTNSESWSFKSSPEEGYISALVVGQCGNWFISGSSRGALTLWDNRFLLPVNSWYYSTVSPIEKLCLLIPPPSSISSAGRPLVFVAAGCNEVSLWNAENGSCHQVFRTASTENEAVMPKTPSRPLNKSTTKDVRRPGNYKYRIDELNDPPVRHPGIRSLLPLPGGDLLTGGTDLKIRYWDQARPEQSFCIAGPSAKEVRSAKGDILEKAVGNNECYDIRSSFGVQVVQEMYKQTTTVSGLTPKTQLALAAADSAGCHRDTILALASFNLSSQRLISASRDGAVKVWK

SEQ ID NO: 101071 - protein, 82 aa, Setaria italica
  Transcript Sequence Number=SeqID_35097
NRAYKRCITLLRSLYAALRFLPAYRAFRTLCASGQVYNYEMGHRVGSFAAPFSRAEEAAMRTNRFAPVETQLGRLVVSVQYR

SEQ ID NO: 101072 - protein, 138 aa, Setaria italica
  Transcript Sequence Number=SeqID_35098
  Gene Ontology: Cellular component=membrane
  Homolog annotation: Hit_ID=O81060; Match level="QueryCoverage=100%, HitCoverage=7%, E-value=2e-38, Identity=54%"; Hit description =Similar to late embryogenesis abundant proteins
KAFWTSKSLSARSLRDFDGAISMVSHGFYTLDDFYSENSTRLSIARVKIPLLFIQSDDGTVPLLSVPRSSISENPFTSLLLCSCAHSSIFTFQRYTVFWCQNLALEWLSAVEFALLKGRHPLIKDVDITINPSKGLAF

SEQ ID NO: 101073 - protein, 103 aa, Setaria italica
  Transcript Sequence Number=SeqID_35099
  Subcellular localization annotation: CTP_CleavageSite=59; ConfidenceScore=5.87e-01
MAAAAAGGARRALAALRSGSPPTLSATLSRQAASRSTGLAAASLPRASRRRLAISRVPVAALGGVQGSLMPMHSATASALLTSMLGLKPGSWGWLSEGFATPL

SEQ ID NO: 101074 - protein, 150 aa, Setaria italica
  Transcript Sequence Number=SeqID_35100
  Homolog annotation: Hit_ID=B6TPU9; Match level="QueryCoverage=98%, HitCoverage=72%, E-value=2e-63, Identity=81%"; Hit description=RAN guanine nucleotide release factor
LSYLKGEVDDAGSALWFLRDIANEQDAADNLVVEHSGTLELAGLRLGEAPAVAGTSVGQLAVSKGRQGREAQNIVRLYLANIRIKNAATDVLITAYEPLLINPLSESATAVAAGPAIPAEQAGCLPMSEIFKLAVMNFNVHDWNLFNGGP

SEQ ID NO: 101075 - protein, 122 aa, Setaria italica
  Transcript Sequence Number=SeqID_35101
  Gene Ontology: Mol. function=molecular_function; Cellular component =integral to membrane; Biological process=retrograde vesicle-mediated transport, Golgi to ER
  Homolog annotation: Hit_ID=B6TRU3; Match level="QueryCoverage=95%, HitCoverage=57%, E-value=1e-56, Identity=93%"; Hit description=RER1A protein
  Pfam annotation: Domain name=Rer1; Domain location=4-122; Score =209.1; E_value=1.1e-59; Accession=PF03248.5; Description=Rer1 family
RTYGNTNLPTNLLIGFLSPMVDPELDPSAAAEGPALPTRGSDEFKPFIRRLPEFKFWYAITKAFVIAFVMTFFSVFDVPVFWPILLCYWVVLFVLTMKRQIVHMIKYKYVPFSIGKQVSTTV

SEQ ID NO: 101076 - protein, 199 aa, Setaria italica
  Transcript Sequence Number=SeqID_35102
  Gene Ontology: Mol. function=molecular_function; Cellular component =integral to membrane; Biological process=retrograde vesicle-mediated transport, Golgi to ER
  Homolog annotation: Hit_ID=B6TRU3; Match level="QueryCoverage=79%, HitCoverage=79%, E-value=5e-75, Identity=87%"; Hit description=RER1A protein
  Pfam annotation: Domain name=Rer1; Domain location=4-188; Score =458.7; E_value=8.5e-135; Accession=PF03248.5; Description=Rer1 family
MDGGDSSAAGAGGAVAAAAKWRSDASRAFQYYLDRSTPHATGRWLGTLAAAAIYALRVYMVQGFYIVTYGLGIYLLNLLIGFLSPMVDPELDPSAAAEGPALPTRGSDEFKPFIRRLPEFKFWYAITKAFVIAFVMTFFSVFDVPVFWPILLCYWVVLFVLTMKRQIVHMIKYKYVPFSIGKQKYGGKKSGSSSSSPRD

SEQ ID NO: 101077 - protein, 195 aa, Setaria italica
  misc_feature (38)..(38): Xaa can be any naturally occurring amino acid
  Transcript Sequence Number=SeqID_35103
  Subcellular localization annotation: CTP_CleavageSite=65; ConfidenceScore=5.32e-01
PSFARALRRPSRRRVLSVAVAALSLVCHVPSPSVILAXIPFASGFLSSTEHSATARHATRSRRARAAAFALAAAILSVPALVGLSFFGDTDTSDGLDGAVPIGPLWLVLLNAAFFGMALGRQQEHDGGSGRPSVDFAMTFLCTLVLQLVYYPKLPLPGFLISGFLLWIASREQAPAGYVELGSKDVSGSVYEAVM

SEQ ID NO: 101078 - protein, 393 aa, Setaria italica
  misc_feature (222)..(222): Xaa can be any naturally occurring amino acid
  Transcript Sequence Number=SeqID_35104
  Gene Ontology: Mol. function=transferase activity
  Homolog annotation: Hit_ID=B9T4W4; Match level="QueryCoverage=69%, HitCoverage=68%, E-value=1e-58, Identity=42%"; Hit description =Pentatricopeptide repeat-containing protein, putative
  Pfam annotation: Domain name=PPR; Domain location=111-145; Score=3.4; E_value=3.5; Accession=PF01535.12; Description=PPR repeat
  Pfam annotation: Domain name=PPR; Domain location=146-180; Score=0.8; E_value=7.1; Accession=PF01535.12; Description=PPR repeat
  Pfam annotation: Domain name=PPR; Domain location=250-284; Score =24.7; E_value=0.00038; Accession=PF01535.12; Description=PPR repeat
  Pfam annotation: Domain name=PPR; Domain location=285-319; Score =33.8; E_value=7e-07; Accession=PF01535.12; Description=PPR repeat
  Pfam annotation: Domain name=PPR; Domain location=320-353; Score =35.2; E_value=2.6e-07; Accession=PF01535.12; Description=PPR repeat
  Pfam module annotation: Pfam domain module=PPR::PPR::PPR::PPR::PPR; Domain location=111-145::146-180::250-284::285-319::320-353
  Subcellular localization annotation: CTP_CleavageSite=57; ConfidenceScore=5.37e-01
MPARPRRMASAARGRRGPARLLFPFRCGRLPPAAALRLLRRSLGATARLSVPGCLVRALLHEEQHTARANPHMTVRYLQWCGSDDDDDDEAIEAFKHDCSITASSSASDASASTAYIDKLSRSGNLVDAVRVLRHLHHQQIHVGLDTFNVLLQQAAEADGFDLFAKVFRYLLLSKLAPDSTSYMNVAKALQKLDECELILKFVREILEITQNRDPTVMNRIXFATAKYGDIDKSLIIFEELKKDRTLDVVTFNTILDMLGKAGRVDQMLHEVKLMEELGHYPDIVTYNTVINCLRRLGRLGLCKRFAGEMLERGINPDLRTYTALIDSFGRAGHITEALEMLDKMKMSHKPSVYVYRALISDVKKAGQFELAQKLSEEMNSSASDLLGPEDFK

SEQ ID NO: 101079 - protein, 115 aa, Setaria italica
  Transcript Sequence Number=SeqID_35105
  Gene Ontology: Mol. function=nucleotide binding; Biological process =apoptosis
  Homolog annotation: Hit_ID=B9S054; Match level="QueryCoverage=90%, HitCoverage=8%, E-value=5e-18, Identity=42%"; Hit description =Leucine-rich repeat containing protein, putative
PRNLRNGQLTDLVDIGKDIAQRCSGVPLVAKALGYVMQKQCTREEWLEIKNSNILDIKDDDKGILKGLLLSYYHMPPQLQLCFMYCSIFPRNHDIDHDCLIQQWIALGFIQDTNG

SEQ ID NO: 101080 - protein, 218 aa, Setaria italica
  misc_feature (37)..(37): Xaa can be any naturally occurring amino acid
  Transcript Sequence Number=SeqID_35106
  Gene Ontology: Mol. function=nucleotide binding; Cellular component =nucleus; Biological process=defense response
  Homolog annotation: Hit_ID=Q84KC4; Match level="QueryCoverage=99%, HitCoverage=23%, E-value=2e-26, Identity=38%"; Hit description=NBS -LRR disease resistance protein homologue (Fragment)
SYLNELVNRSMIIQHVKYGARGDRIIYRVHDMVLDLXILSKSTEENFLCAVENLQAISTRQRQYKARRLSLQFQDRSLVESAGRVSLPHVRSLIIFGWPHGSLELLELKFIRALYIERATNELDLTLISKLFQLRCLCVRGNYKRLQLPEEIIGLQHLEAVIILSDLSNVPRDIVSLPALLYLQFPPAASYPIGIGNMKCLHTLRSFDPSKQSVANTW

SEQ ID NO: 101081 - protein, 134 aa, Setaria italica
  Transcript Sequence Number=SeqID_35107
  Gene Ontology: Mol. function=transferase activity, transferring glycosyl groups; Cellular component=integral to membrane; Biological process=cell wall organization and biogenesis
  Homolog annotation: Hit_ID=Q94GM9; Match level="QueryCoverage=99%, HitCoverage=15%, E-value=3e-24, Identity=46%"; Hit description =Probable mixed-linked glucan synthase 7
  Subcellular localization annotation: CTP_CleavageSite=40; ConfidenceScore=5.22e-01
TLYPLTSMFLILYCVFPAIPLLSSGNATAGALLSLGTPPSATYVAFLTALMLTLAMVAVLEVRWSGITLGEWWRNEQFWMVSATSAYLAAVLQVALKVVAGKEISFKLTSKKTATTSSGVSVKERFAELYAVRC

SEQ ID NO: 101082 - protein, 51 aa, Setaria italica
  misc_feature (41)..(41): Xaa can be any naturally occurring amino acid
  Transcript Sequence Number=SeqID_35108
MLPRRQSIFHLGEEGGAAVHHHRVGVVGAAAMAGANGRRAXERERLVVGLQ

SEQ ID NO: 101083 - protein, 226 aa, Setaria italica
  Transcript Sequence Number=SeqID_35109
  Gene Ontology: Mol. function=protein tyrosine kinase activity; Biological process=protein amino acid phosphorylation
  Homolog annotation: Hit_ID=B6SY76; Match level="QueryCoverage=100%, HitCoverage=38%, E-value=1e-120, Identity=93%"; Hit description=ATP binding protein
MAAALECWSGRPSTDEEMVEQVLMKPHGRSDDSLPTCADSAYTGEPTSAPAPPKKWQKLGRNFAGAIAAFKNTLSLDGGGLPRDPSPRAEKPPPLLLRGLAQLYSRGNSNQQLPEKLVADLRRHFDALPNSYAQAGFDMKDVLLHARLVEQATGEDQPAVNIEEIHGRGGGDEGTTFQLTFACVAPLSWQSMSGSLDSPLFCCKKIQIFEKRGLTLGVVMILVQSG

SEQ ID NO: 101084 - protein, 216 aa, Setaria italica
  Transcript Sequence Number=SeqID_35110
  Gene Ontology: Mol. function=amino acid binding; Biological process =metabolic process
  Homolog annotation: Hit_ID=B6U9J2; Match level="QueryCoverage=99%, HitCoverage=46%, E-value=2e-95, Identity=82%"; Hit description=ACR4
  Pfam annotation: Domain name=ACT; Domain location=17-89; Score=20.2; E_value=0.0086; Accession=PF01842.17; Description=ACT domain
  Pfam annotation: Domain name=ACT; Domain location=96-162; Score=44.7; E_value=3.6e-10; Accession=PF01842.17; Description=ACT domain
  Pfam module annotation: Pfam domain module=ACT::ACT; Domain location =17-89::96-162
PARTEVSVTACAERGYSAVVVRCRDRPKLLFDTVCTITDMEYVVHHGTVSAEPGGGAYQEYYIRRVDGHAVRCEAERRRLVRCLEAAIERRTAEGLELEVRTGDRAGLLSDITRIFRENGLTIRRAEISSAGGEAVDTFYLSDTQGHPVEAKTIEAIRAQIGEATLRVKNNPFAAGDDAARKDADVAGAGTTAFIFGNLFKFYRPFQGFSLVKLYS

SEQ ID NO: 101085 - protein, 40 aa, Setaria italica
  Transcript Sequence Number=SeqID_35111
SVNFIVSAAEYHSKTSIDALLCIGQEDYHDVLFECSITVL

SEQ ID NO: 101086 - protein, 182 aa, Setaria italica
  Transcript Sequence Number=SeqID_35112
  Gene Ontology: Mol. function=aspartic-type endopeptidase activity; Biological process=xylan catabolic process
  Homolog annotation: Hit_ID=A7UME4; Match level="QueryCoverage=82%, HitCoverage=37%, E-value=5e-45, Identity=63%"; Hit description =Xylanase inhibitor 602OS
ASSPHRGWICHGGARPSLLLAVSALVLAWPASCAEPVLFPVAKDAATSLYTIPVRDGANHVIDLAGPLLWSTCAADHLPANITCQDPVCKLANAYRQPGCRDAGQTCKHRCTAYPYNPVTGRCAAASLIHTRLVANTTDGKNPLRQVSVRAMAACAPKKLLARLPRDASGVAGLAASGPWSF

SEQ ID NO: 101087 - protein, 76 aa, Setaria italica
  Transcript Sequence Number=SeqID_35113
PHDHHPVHRLLPLQGHRRDPNAGRETVACIRDMTGDASMRVSVLRVSVCVRVDRVYRLYYIVKMVFTVGGGHDLKF

SEQ ID NO: 101088 - protein, 155 aa, Setaria italica
  Transcript Sequence Number=SeqID_35114
  Gene Ontology: Mol. function=oxidoreductase activity, acting on CH-OH group of donors
  Homolog annotation: Hit_ID=Q8W5N7; Match level="QueryCoverage=100%, HitCoverage=20%, E-value=3e-67, Identity=82%"; Hit description =Putative alcohol oxidase
  Pfam annotation: Domain name=GMC_oxred_C; Domain location=28-155; Score=-52.0; E_value=0.0087; Accession=PF05199.5; Description=GMC oxidoreductase
ERMRRYSRTAHAFALVRDRGAGFVDGEGRVRFTPSREDVEELRNGLRRVLRILVAAGAAEVGTHRSDGLRLRCKGLRDEDLEAFLDEVTIEKGPMHSTADKWALHCSAHQMGSCRMGSSPRDGAVDGRGESWEAEGLYVCDGSLLPTAVGVNPMI

SEQ ID NO: 101089 - protein, 99 aa, Setaria italica
  Transcript Sequence Number=SeqID_35115
  Gene Ontology: Mol. function=oxidoreductase activity, acting on CH-OH group of donors
  Homolog annotation: Hit_ID=Q8W5N7; Match level="QueryCoverage=96%, HitCoverage=12%, E-value=2e-36, Identity=77%"; Hit description =Putative alcohol oxidase
RRAFVNEVTVAKGPMIPGSDTWALLCSAHQMGSCRMGSRPRDGAVDGRGESWEAEGLYVCDGSLLPTAVGVNPMITIQSTAYYVSKGIAESLAARVKKP

SEQ ID NO: 101090 - protein, 203 aa, Setaria italica
  Transcript Sequence Number=SeqID_35116
  Gene Ontology: Cellular component=chloroplast; Biological process =response to stress
  Homolog annotation: Hit_ID=B2FH48; Match level="QueryCoverage=87%, HitCoverage=84%, E-value=3e-40, Identity=50%"; Hit description=22.7 kDa heat-shock protein
  Pfam annotation: Domain name=HSP20; Domain location=105-201; Score =83.1; E_value=1e-21; Accession=PF00011.13; Description=Hsp20alpha crystallin family
GVPARTGLKDLPVLPSVSVPRNSDFSARRLLNTKGHYDDDESTTTEEPSGADYSRRALSFSVPKLFSGDALDVFREPMKLTQLLSLMENGGAASRTGYSGHGWWVSKEDDDALQLKVVMPGLGKEHVKVSAEKNILVVKGEGDKNPEDGDDKGLAKYSRRFQLPAEAFKMDQIKAEMNNGVLKVTIPKIKDEERKDVFQIKVE

SEQ ID NO: 101091 - protein, 65 aa, Setaria italica
  misc_feature (10)..(10): Xaa can be any naturally occurring amino acid
  Transcript Sequence Number=SeqID_35117
  Gene Ontology: Mol. function=structural constituent of ribosome; Cellular component=intracellular; Biological process=protein modification process
  Homolog annotation: Hit_ID=Q3KN73; Match level="QueryCoverage=96%, HitCoverage=48%, E-value=3e-27, Identity=98%"; Hit description =Ubiquitin-60S ribosomal L40 fusion protein
  Pfam annotation: Domain name=ubiquitin; Domain location=9-65; Score =76.2; E_value=1.2e-19; Accession=PF00240.15; Description=Ubiquitin family
SQMQIFVKTXLTGKTITLEVESSDTIDNVKAKIQDKEGIPPDQQRLIFAGKQLEDGRTLADYNIQ

SEQ ID NO: 101092 - protein, 82 aa, Setaria italica
  Transcript Sequence Number=SeqID_35118
  Gene Ontology: Mol. function=serine-type endopeptidase activity; Cellular component=plasma membrane; Biological process=protein modification process
  Homolog annotation: Hit_ID=O64955; Match level="QueryCoverage=100%, HitCoverage=100%, E-value=2e-40, Identity=99%"; Hit description =Polyubiquitin (Fragment)
  Pfam annotation: Domain name=ubiquitin; Domain location=6-74; Score =138.0; E_value=2.9e-38; Accession=PF00240.15; Description=Ubiquitin family
MQIFVKTLTGKTITLEVESSDTIDNVKAKIQDKEGIPPDQQRLIFAGKQLEDGRTLADYNIQKESTLHLVLRLRGGMQIFVK

SEQ ID NO: 101093 - protein, 61 aa, Setaria italica
  misc_feature (58)..(58): Xaa can be any naturally occurring amino acid
  Transcript Sequence Number=SeqID_35119
LLFLCYVSIWEAVLCAVADAVLYLGSWRDIARLNLGSIFAIWFSVWSNFDFIGLTRPXCVP

SEQ ID NO: 101094 - protein, 78 aa, Setaria italica
  Transcript Sequence Number=SeqID_35120
LCSFRFVCSFDSRICSDLINLNETSWTESSDECVEFSVLGGDATSWVLCVLVIPYWFDCDIKPNPMSWTRSRLYSSNM

SEQ ID NO: 101095 - protein, 57 aa, Setaria italica
  Transcript Sequence Number=SeqID_35121
  Gene Ontology: Mol. function=protein serine/threonine kinase activity; Cellular component=plasma membrane; Biological process =protein amino acid phosphorylation
  Homolog annotation: Hit_ID=B6T161; Match level="QueryCoverage=92%, HitCoverage=11%, E-value=6e-18, Identity=79%"; Hit description =Phytosulfokine receptor
DINPSGTVGYVAPEYLLDGQLTEKSDVYAFGVVLFELLLGRKPVEMIGESHCQSIVS

SEQ ID NO: 101096 - protein, 156 aa, Setaria italica
  Transcript Sequence Number=SeqID_35122
  Gene Ontology: Mol. function=protein serine/threonine kinase activity; Biological process=protein amino acid phosphorylation
  Homolog annotation: Hit_ID=B6T161; Match level="QueryCoverage=99%, HitCoverage=34%, E-value=2e-69, Identity=80%"; Hit description =Phytosulfokine receptor
  Pfam annotation: Domain name=Pkinase; Domain location=2-153; Score= -88.6; E_value=0.0032; Accession=PF00069.17; Description=Protein kinase domain
  Pfam annotation: Domain name=Pkinase_Tyr; Domain location=1-153; Score=-145.0; E_value=0.00044; Accession=PF07714.9; Description =Protein tyrosine kinase
  Pfam module annotation: Pfam domain module=Pkinase::Pkinase_Tyr; Domain location=2-153::1-153
LPMIIHRDIKSSNILLDSDFNAKISDFGLAIYGGNHNKDDINPSGTVGYVAPEYLLDGQLTEKSDVYAFGVVLFELLLGRKPVEMIGESHCQSIVSWAMPQITDRTKLPSIIDPAIRNTMDLRHLYQVAAVAVLCVQPEPSYRPLITDVLHSLVPL

SEQ ID NO: 101097 - protein, 69 aa, Setaria italica
  Transcript Sequence Number=SeqID_35123
FILHHIGCAVKQSCNYFYTYFPYLSSKGAFTPSEVCNHVRSCALLCFHHMKPIAVPYFPPYLYFDAIFS

SEQ ID NO: 101098 - protein, 79 aa, Setaria italica
  Transcript Sequence Number=SeqID_35124
SLTILRAASYKREIKVFKFITPHLMTTLQVTMHRILTIYRNQGYKKTASIDIIGSKFPRLDRHMADCSARPDSHMIAHK

SEQ ID NO: 101099 - protein, 77 aa, Setaria italica
  Transcript Sequence Number=SeqID_35125
  Subcellular localization annotation: CTP_CleavageSite=21; ConfidenceScore=5.25e-01
YHQAILWVSLSTQPAAISVPPAAAVTTGTGHRHRMPCRPVYTKEVYRKNFIFRRALIRRLDISCISLSSVPWNRDIA

SEQ ID NO: 101100 - protein, 77 aa, Setaria italica
  Transcript Sequence Number=SeqID_35126
PIKDHMEVTKLSDRHHIVLDSQDITLAPSNPQHPHKKDGGKKEMVHPSWNSFIEALEISGGDKHKNPLTVLAPPLGY

SEQ ID NO: 101101 - protein, 80 aa, Setaria italica
  Transcript Sequence Number=SeqID_35127
GGGGRIPEEEGECCFGELVFRGFIRPARFSDAGTVKSCVMEKPVREFILSITGSENFEVSLPAHLDRQVRIREIVRRLPP

SEQ ID NO: 101102 - protein, 60 aa, Setaria italica
  Transcript Sequence Number=SeqID_35128
  Gene Ontology: Mol. function=oxidoreductase activity, acting on the CH-OH group of donors, NAD or NADP as acceptor; Cellular component =glyoxysome; Biological process=cellular carbohydrate metabolic process
  Homolog annotation: Hit_ID=P19446; Match level="QueryCoverage=88%, HitCoverage=14%, E-value=6e-20, Identity=88%"; Hit description =Malate dehydrogenase, glyoxysomal
PRDVSVPVVGGHAGVTILPLLSQVNPPSSFTQEEIKYLTNRIQNGGTEVVEVQRYFNVLP

SEQ ID NO: 101103 - protein, 356 aa, Setaria italica
  misc_feature (102)..(102): Xaa can be any naturally occurring amino acid
  Transcript Sequence Number=SeqID_35129
  Gene Ontology: Mol. function=oxidoreductase activity, acting on the CH-OH group of donors, NAD or NADP as acceptor; Cellular component =glyoxysome; Biological process=cellular carbohydrate metabolic process
  Homolog annotation: Hit_ID=B6T3Y0; Match level="QueryCoverage=100%, HitCoverage=100%, E-value=0.0, Identity=93%"; Hit description=Malate dehydrogenase
  Pfam annotation: Domain name=Ldh_1_C; Domain location=190-354; Score =278.3; E_value=1.8e-80; Accession=PF02866.10; Description =lactatemalate dehydrogenase, alphabeta C-t
  Pfam annotation: Domain name=Ldh_1_N; Domain location=44-188; Score =238.2; E_value=2.1e-68; Accession=PF00056.15; Description =lactatemalate dehydrogenase, NAD bin
  Pfam module annotation: Pfam domain module=Ldh_1_C::Ldh_1_N; Domain location=190-354::44-188
MQPDANAPSHRLARVAAHLNPQMEEGAPALRPAACRAKGGAPGFKVAILGAAGGIGQPLSLLMKMNPLVSVLHLYDVVNTPGVTADVSHMDTSAVVRGFLGXAQQLDAALTGMDLVIIPAGLPRKPGMTRDDLFNKNAGIVRTLCEGVARCCPDAIVNLISNPVNSTVPIAAEVFKKAGTYNPKRLLGVTTLDVVRANTFVAEVLGVDPRDVSVPVVGGHAGVTILPLLSQVNPPSSFTQEEIKYLTNRIQNGGTEVVEAKAGAGSATLSMAFAAAKFGDACLRAMRGEAGIIECSYVASEVTELPFFATKVRLGRGGAEEILPLGPLNDFERVGLEAAKKELNESIQKGIAFMKK

SEQ ID NO: 101104 - protein, 60 aa, Setaria italica
  Transcript Sequence Number=SeqID_35130
  Homolog annotation: Hit_ID=B9RK77; Match level="QueryCoverage=100%, HitCoverage=19%, E-value=7e-18, Identity=68%"; Hit description =Valacyclovir hydrolase, putative
ISNQHGEKLVGLLHQTCSKKLVILCHGFRATKASLILVDLAVAITMEGISAFRFDFSGNG

SEQ ID NO: 101105 - protein, 279 aa, Setaria italica
  misc_feature (74)..(74): Xaa can be any naturally occurring amino acid
  Transcript Sequence Number=SeqID_35131
  Gene Ontology: Mol. function=hydrolase activity
  Homolog annotation: Hit_ID=B9RRQ9; Match level="QueryCoverage=88%, HitCoverage=86%, E-value=4e-84, Identity=59%"; Hit description =Valacyclovir hydrolase, putative
  Pfam annotation: Domain name=Abhydrolase_1; Domain location=72-263; Score=1.7; E_value=0.0042; Accession=PF00561.12; Description =alphabeta hydrolase fold
  Pfam annotation: Domain name=BAAT_C; Domain location=105-271; Score= -68.3; E_value=0.0051; Accession=PF08840.3; Description=BAAT  Acyl -CoA thioester hydrolase C t
  Pfam annotation: Domain name=DUF1749; Domain location=31-265; Score= -197.2; E_value=0.082; Accession=PF08538.2; Description=Protein of unknown function (DUF1749)
  Pfam annotation: Domain name=Peptidase_S9; Domain location=59-272; Score=-78.9; E_value=0.08; Accession=PF00326.13; Description=Prolyl oligopeptidase family
  Pfam module annotation: Pfam domain module=Abhydrolase_1::BAAT _C::DUF1749::Peptidase_S9; Domain location=72-263::105-271::31 -265::59-272
LTTQLTLYGLISCIPYLHEQRVLISNQHGEKLVGLLHQTCSKKLVILCHGFRATKDDSILVDLAVAITMEGISXFRFDFSGNGESEGEFQYGSYRKEAADLRSVVLYFSKQKYDIIALIGHSKGGNAVLLYASKYHDVPIIVNISGRFALERGIDGRLGKNFMQRINKDGYIDVKNKKGEFEYRVSKASLEDRLSTDTLLSSRAISKDCRVLTVHGARDEIVPAEDARQFAAYIPNHELRILAEANHRYAGHEQELTSLVLGFVRRSHLQSTSPLRPKL

SEQ ID NO: 101106 - protein, 73 aa, Setaria italica
  Transcript Sequence Number=SeqID_35132
MKAKKACAGGGCDIEARGISYRIAVSTGRSRHHPPLKVWSRSDDDAAQDHHQQLNGGGVRQVLRNVTCRAPPG

SEQ ID NO: 101107 - protein, 81 aa, Setaria italica
  Transcript Sequence Number=SeqID_35133
LDRIKLLGEMAFLNSSLSRNYLAGCTQNCCCSKFAALLFLWIRDNDSPFVLVCINSWHDLEEQDVAVESYDFPWQYFLLVR

SEQ ID NO: 101108 - protein, 137 aa, Setaria italica
  misc_feature (122)..(122): Xaa can be any naturally occurring amino acid
  Transcript Sequence Number=SeqID_35134
  Gene Ontology: Mol. function=protein dimerization activity; Cellular component=endoplasmic reticulum lumen; Biological process=proteolysis
  Homolog annotation: Hit_ID=B6T417; Match level="QueryCoverage=85%, HitCoverage=26%, E-value=3e-50, Identity=79%"; Hit description=IAA -amino acid hydrolase ILR1
  Pfam annotation: Domain name=Peptidase_M20; Domain location=19-137; Score=74.9; E_value=3e-19; Accession=PF01546.20; Description =Peptidase family M20M25M40
RTGVLATIAGGGGAGPVVALRADMDALPVQEMVDWEYKSQEDGKMHACGHDAHVTMLLGAARLLQSRKDDLKGTIKLVFQPAEEGYAGAYFVLKEGVLENVSAIFGLHVIPDLPVGVVASRXGPFLSAAARFTATLT

SEQ ID NO: 101109 - protein, 130 aa, Setaria italica
  Transcript Sequence Number=SeqID_35135
NAFDPLPLPSGVPVPMCFCGDPCKVAKSDEHATYRQRYWICYNFAFEPTLRQGCINMLTPPPLCDFEQWINTEINHEDKEFLECMMRWDAERKEVYEKRLREEAAEKENKEEEERRRVAANREREKKLRL

SEQ ID NO: 101110 - protein, 68 aa, Setaria italica
  misc_feature (54)..(54): Xaa can be any naturally occurring amino acid
  Transcript Sequence Number=SeqID_35136
  Gene Ontology: Mol. function=protein serine/threonine kinase activity; Biological process=protein amino acid phosphorylation
  Homolog annotation: Hit_ID=Q65X94; Match level="QueryCoverage=98%, HitCoverage=7%, E-value=2e-15, Identity=59%"; Hit description =Putative receptor like protein kinase
TPGYVANMHFSELQRLPANAGRQFYINLNGKPWYPKAYKPIYLISDAIYNHNPXRGFPHYNISINSTA

SEQ ID NO: 101111 - protein, 54 aa, Setaria italica
  Transcript Sequence Number=SeqID_35137
  Gene Ontology: Mol. function=hydrolase activity; Biological process =glutamine metabolic process
  Homolog annotation: Hit_ID=B9RSP8; Match level="QueryCoverage=94%, HitCoverage=11%, E-value=2e-18, Identity=84%"; Hit description=Gamma- glutamyl-gamma-aminobutyrate hydrolase, putative
MSSSPDLARVLPRVLIVSRRTVRKNKFVDFVGEYHLDLIVGYGAVPVIVPRVAG

SEQ ID NO: 101112 - protein, 166 aa, Setaria italica
  Transcript Sequence Number=SeqID_35138
  Subcellular localization annotation: CTP_CleavageSite=91; ConfidenceScore=5.41e-01
PEHRVSKGVCPYCLRDRLAHLSASSSATTTTRASSSSATTSPYSSGGGCSPPPHHAALSADVSSVHVVGGAASDGASFVNVAAFSQPLMPTAARKQAAGRQESAKGSNNKGEVKTKKKSGKKKKIGRFLSRLGRAEKRRQPGDGDGGELFHSKTMKEKTASKWVFF

SEQ ID NO: 101113 - protein, 89 aa, Setaria italica
  Transcript Sequence Number=SeqID_35139
  Gene Ontology: Mol. function=oxidoreductase activity; Biological process=oxidation reduction
  Homolog annotation: Hit_ID=B9RA50; Match level="QueryCoverage=69%, HitCoverage=18%, E-value=9e-13, Identity=58%"; Hit description =Carbonyl reductase, putative
KKGKEAARERREQRRREVTLLRALPYEPHQRWWDHLEPRAVAVVTGANRGMGFEAARQLALHGLHVVLTSRDAAKGQDAAGRIMAEAPG

SEQ ID NO: 101114 - protein, 117 aa, Setaria italica
  misc_feature (92)..(92): Xaa can be any naturally occurring amino acid
  Transcript Sequence Number=SeqID_35140
  Gene Ontology: Mol. function=nucleic acid binding
  Homolog annotation: Hit_ID=B9T820; Match level="QueryCoverage=77%, HitCoverage=28%, E-value=3e-21, Identity=58%"; Hit description=RNA binding protein, putative
  Subcellular localization annotation: CTP_CleavageSite=35; ConfidenceScore=5.03e-01
PSFRDFPGYVSSHLRTGKSSQAYAFAVFADQPSALAALNATNGMVFDLEKNCSLHVDLAKSNSRSKRLRSDDASPYSPEKRTRKPMGFPDSXYTNLESSTSVRKDPSTFAPQNNPPC

SEQ ID NO: 101115 - protein, 166 aa, Setaria italica
  Transcript Sequence Number=SeqID_35141
  Gene Ontology: Mol. function=nuclease activity; Cellular component =Mre11 complex; Biological process=response to DNA damage stimulus
  Homolog annotation: Hit_ID=A8IE00; Match level="QueryCoverage=99%, HitCoverage=12%, E-value=1e-52, Identity=61%"; Hit description=DNA repair protein Rad50
  Pfam annotation: Domain name=Rad50_zn_hook; Domain location=74-127; Score=30.6; E_value=6.4e-06; Accession=PF04423.6; Description=Rad50 zinc hook motif
IKSQEAEQEFKLAQSKVSDAREQLTKLRKDLDGNRRFLDSKLQSISQISADIDMFPKVLQDAKDKRDEQKRLEIYANGMRQMFVPFEQVARDRHVCPCCERAFTPDEEDEFVKKQRMQNASTAERVKALAMEYSEAETFFQLLDKLRTVYDDYMKLVEETIPLAEK

SEQ ID NO: 101116 - protein, 101 aa, Setaria italica
  Transcript Sequence Number=SeqID_35142
  Gene Ontology: Mol. function=nucleic acid binding; Cellular component= nucleus; Biological process=response to stress
  Homolog annotation: Hit_ID=Q99070; Match level="QueryCoverage=74%, HitCoverage=44%, E-value=9e-32, Identity=85%"; Hit description =Glycine-rich RNA-binding protein 2
  Pfam annotation: Domain name=RRM_1; Domain location=10-80; Score =85.3; E_value=2.1e-22; Accession=PF00076.14; Description=RNA recognition motif. (a.k.a. RRM, RBD, o
MAAADVEYRCFVGGLAWATDSESLQLAFASYGDVVDSKVITDRETGRSRGFGFVTFSTEQSMLEAIENMNGKELDGGSPPPPWPPPPPSTEMGSPPSRPVL

SEQ ID NO: 101117 - protein, 73 aa, Setaria italica
  Transcript Sequence Number=SeqID_35143
  Gene Ontology: Mol. function=hydrolase activity, acting on acid anhydrides, catalyzing transmembrane movement of substances; Cellular component=integral to membrane; Biological process =metabolic process
  Homolog annotation: Hit_ID=A6MH06; Match level="QueryCoverage=100%, HitCoverage=38%, E-value=4e-27, Identity=80%"; Hit description =Plasma membrane H+ ATPase (Fragment)
TAQRTLHGLQTPELAGILNERSSYRELSEIAEQAKRRAEVARLRELSTLKGQVESVVKLKGLDMEGIQQHYTV

SEQ ID NO: 101118 - protein, 137 aa, Setaria italica
  Transcript Sequence Number=SeqID_35144
  Gene Ontology: Mol. function=DNA binding; Cellular component=nucleus; Biological process=regulation of transcription
  Homolog annotation: Hit_ID=Q6H7C6; Match level="QueryCoverage=86%, HitCoverage=37%, E-value=1e-62, Identity=94%"; Hit description =ATMYB4-like protein
  Pfam annotation: Domain name=Myb_DNA-binding; Domain location=15-62; Score=48.3; E_value=2.9e-11; Accession=PF00249.23; Description=Myb -like DNA-binding domain
  Pfam annotation: Domain name=Myb_DNA-binding; Domain location=68-113; Score=49.8; E_value=1.1e-11; Accession=PF00249.23; Description=Myb -like DNA-binding domain
  Pfam module annotation: Pfam domain module=Myb_DNA-binding::Myb_DNA -binding; Domain location=15-62::68-113
MGCKACDKPKPNYRKGLWSPEEDQKLRDYILRHGHGCWSALPAKAGLHRNGKSCRLRWINYLRPGLKHGMFSPEEEETVMSLHATLGNKWSRIARHLPGRTDNEVKNYWNSYLKKRVEGKEAPSTAATSSGAESEDS

SEQ ID NO: 101119 - protein, 189 aa, Setaria italica
  Transcript Sequence Number=SeqID_35145
  Gene Ontology: Mol. function=DNA binding; Cellular component=nucleus; Biological process=regulation of transcription
  Homolog annotation: Hit_ID=Q6H7C6; Match level="QueryCoverage=87%, HitCoverage=54%, E-value=5e-17, Identity=41%"; Hit description =ATMYB4-like protein
SPPTEKTTGAAWLGLLTPIFGLYCRWSRIARHLPGRTDNEVKNYWNSYLKKRVEGKEAPSTAATSSGADSEDSQCAKPGDGAAQEAPADSGSSEPRESSSADSSCLTGPPAACRPHAPVAPPKVMFADWLDMDMDCIVGGPVAAAPGLDAAARTNHGPSTGGDRNHRHHQVMSQGSVQVDGPSGVDDVS

SEQ ID NO: 101120 - protein, 117 aa, Setaria italica
  Transcript Sequence Number=SeqID_35146
GTQVQATHFWSSLRQHASACCLNCTHAPPPKTASATTSRHQHVQRVDDPRYVPQYGQQQVDPELHAAAVAQEDADRRQEDGEEHFHERRRRHGSLPMLPSSPLSLSLSLSLSLSLSY

SEQ ID NO: 101121 - protein, 93 aa, Setaria italica
  misc_feature (17)..(17): Xaa can be any naturally occurring amino acid
  Transcript Sequence Number=SeqID_35147
  Gene Ontology: Mol. function=acetylglucosaminyltransferase activity; Cellular component=membrane
  Homolog annotation: Hit_ID=B6Z261; Match level="QueryCoverage=94%, HitCoverage=20%, E-value=8e-14, Identity=51%"; Hit description=Beta -1-3-galactosyl-o-glycosyl-glycoprotein
  Subcellular localization annotation: CTP_CleavageSite=34; ConfidenceScore=5.09e-01
STPSSALFVEHKLSPTXPPSPAGASLPRIAFLISGSAKDASALRRVLLALYHPRNRYILHLDAEAPDSDRRDLAAALAAHPVIAAADNVRVVD

SEQ ID NO: 101122 - protein, 239 aa, Setaria italica
  Transcript Sequence Number=SeqID_35148
  Gene Ontology: Mol. function=protein serine/threonine kinase activity; Biological process=protein amino acid phosphorylation
  Homolog annotation: Hit_ID=Q10NU7; Match level="QueryCoverage=82%, HitCoverage=65%, E-value=2e-25, Identity=38%"; Hit description =Protein kinase domain containing protein, expressed
  Pfam annotation: Domain name=Lectin_legB; Domain location=32-211; Score=172.6; E_value=1.2e-48; Accession=PF00139.11; Description =Legume lectin domain
MLHHPCFLHLQYLILVLLLLSVCWATDAAVADGGEFIVDGFSSYDYLTMDGDASVADGLLMLTSGRLAHSKGHAFYPYPLHFTDVSNGSSLASFSTTFLFSIMGPYIDISSDGLAFVLCSNKDFFSASPAQYLGLLNPLNNGNATNHIVAIEIDTIQNDELQDIDSNHIGVDINGLISVGSATAGTEAHAGFSSATGPIPSRHYILGWSFKLNGEPAALNYPALSIKTIQELAAQLQYQ

SEQ ID NO: 101123 - protein, 206 aa, Setaria italica
  Transcript Sequence Number=SeqID_35149
  Gene Ontology: Cellular component=integral to membrane
  Homolog annotation: Hit_ID=Q7X791; Match level="QueryCoverage=92%, HitCoverage=39%, E-value=4e-72, Identity=68%"; Hit description =OSJNBa0076N16.13 protein
KVMKKATAVSVVVTTVIYLLCGCVGYAAFGRTAPDNMLTGFGFYEPFWLLDVANAFVVVHLVGTYQVMTQPVFAYVERRAAAAWPGSALVRERDVRVGRTMAFSVSPIRLAWRTAYVCVTTAVAMLLPFFGSVVGFIGAVSFWPLTVYFPVEMYIAQRRVPRRSTRWLLLHALSAGCLVVSIAAAAGSIAGVVEELKAHNPFCWSC

SEQ ID NO: 101124 - protein, 182 aa, Setaria italica
  Transcript Sequence Number=SeqID_35150
  Gene Ontology: Mol. function=electron carrier activity
  Homolog annotation: Hit_ID=Q7XSQ6; Match level="QueryCoverage=82%, HitCoverage=28%, E-value=1e-57, Identity=70%"; Hit description =OSJNBa0084K11.8 protein
MCGCSALVAGGRLPLLAIPRRLRRRRGSSVRAEASPGGESQRKKVAVAGAGWAGLAAAHHLVKQGYDVTLLAAESGPTEEVGLRGFWYPYRNIFALVDELGISPFTGWNRAAYYSPEGLSVEFPIFHNQPRLPAPFGVFAYPEFPNLPLIDRLTSIPVIAAVIDFDNTDTAWRKYDAMTDKE

SEQ ID NO: 101125 - protein, 385 aa, Setaria italica
  Transcript Sequence Number=SeqID_35151
  Homolog annotation: Hit_ID=B6U2H4; Match level="QueryCoverage=92%, HitCoverage=87%, E-value=1e-171, Identity=82%"; Hit description =Cyclin-like F-box
  Pfam annotation: Domain name=F-box; Domain location=70-117; Score =42.7; E_value=1.5e-09; Accession=PF00646.25; Description=F-box domain
ARDMRLCLASLCQQLALSLLGFLAGLRLIGGVAAASAASETMPLMPSFKRKRAVATVENVEAAGGGGGEPSVLDLPELAIDCILERLPPAELRNMAAVCRSMRERCRGDHLWERHMSEKWGRVLGHAARDEWRAHLASASESGGAGSATGGGGKRRRWLAALSCVCPVVSWMRPKADGAKSSGPVLDDSIMSWYLSMESGKFWFPAQVYNREHGHVGFMMSCYDAELSYDFHTDTFRARYPPHGRRTVVLEDGVQWDRVRAPPVDTLAHDLHASDCLHELRPGDHIEIQWRRNKEFPYGWWYGVVGHLESCDGNEHFCRCHLSDTVLLEFNQYTPGSRWRQALVNRKDHREEGNEGDGFYGGIRKLRSKDDISKWRQLWPTDILE

SEQ ID NO: 101126 - protein, 139 aa, Setaria italica
  misc_feature (14)..(14): Xaa can be any naturally occurring amino acid
  misc_feature (35)..(35): Xaa can be any naturally occurring amino acid
  Transcript Sequence Number=SeqID_35152
  Gene Ontology: Mol. function=aspartic-type endopeptidase activity; Biological process=DNA integration
  Homolog annotation: Hit_ID=Q6AUV8; Match level="QueryCoverage=97%, HitCoverage=10%, E-value=4e-29, Identity=54%"; Hit description =Integrase core domain containing protein
  Pfam annotation: Domain name=zf-CCHC; Domain location=96-113; Score =27.7; E_value=1.4e-05; Accession=PF00098.15; Description=Zinc knuckle
KNAGTIIAKLPPSXRDFATSLKHKRTEISISDLIXSLDVEEKARAKDGRSNAVEGQTSANMVHQSHHNGNGGKGKGKNNKPKQSTTFKKKKNKENEGCFVCGSTDHWAKKCPNRKGRKPPQQKSVSMVTSTGDENSGCT

SEQ ID NO: 101127 - protein, 74 aa, Setaria italica
  misc_feature (7)..(7): Xaa can be any naturally occurring amino acid
  Transcript Sequence Number=SeqID_35153
  Homolog annotation: Hit_ID=B6TZJ3; Match level="QueryCoverage=64%, HitCoverage=17%, E-value=3e-16, Identity=85%"; Hit description =Hsp20/alpha crystallin family protein
KPRGARXIEAARARVAEAKAKAERERQCEHWKERAVEEGLKLADAVSKKKEVIATAVAAFTLGVFVSHKLFSRS

SEQ ID NO: 101128 - protein, 108 aa, Setaria italica
  misc_feature (7)..(7): Xaa can be any naturally occurring amino acid
  Transcript Sequence Number=SeqID_35154
  Gene Ontology: Mol. function=protein serine/threonine kinase activity; Cellular component=plasma membrane; Biological process =protein amino acid phosphorylation
  Homolog annotation: Hit_ID=Q2L3U3; Match level="QueryCoverage=91%, HitCoverage=9%, E-value=5e-35, Identity=75%"; Hit description =CLAVATA-like kinase
IIHGEGXWEVTLYQKLDITMDDVLRGLTSANVIGTGSSGVVYKVDTPSGYTLAVKKMWSSPDDEAASAAFRSEIAALGSIRHRNIVRLLGWAANGGTRLLVSYGLTFP

SEQ ID NO: 101129 - protein, 107 aa, Setaria italica
  Transcript Sequence Number=SeqID_35155
  Gene Ontology: Mol. function=ATPase activity, coupled to transmembrane movement of ions, phosphorylative mechanism; Cellular component=membrane; Biological process=transport
  Homolog annotation: Hit_ID=B9RL26; Match level="QueryCoverage=100%, HitCoverage=8%, E-value=4e-30, Identity=62%"; Hit description =Phospholipid-transporting atpase, putative
WRRHRSDRAENGRLAAVLSPGRQFLPTKWKDVRVGDVVRVVSDESLPADMVLLATSETTGVAYVQTLNLDGESNLKTRYAKQETLSTPPERLAGAVIRCERPSRNIY

SEQ ID NO: 101130 - protein, 135 aa, Setaria italica
  misc_feature (85)..(85): Xaa can be any naturally occurring amino acid
  misc_feature (130)..(130): Xaa can be any naturally occurring amino acid
  Transcript Sequence Number=SeqID_35156
  Gene Ontology: Mol. function=catalytic activity; Cellular component =ribosome; Biological process=metabolic process
  Homolog annotation: Hit_ID=Q6K1V9; Match level="QueryCoverage=97%, HitCoverage=14%, E-value=3e-38, Identity=61%"; Hit description =Ribosomal protein-like
  Pfam annotation: Domain name=Plant_tran; Domain location=1-86; Score =132.8; E_value=1.1e-36; Accession=PF04827.6; Description=Plant transposon protein
IYPSWSTFVKIISKPQGNKRVYFAQAQEAARMDIERAFGVLQPRFAIVRMPARFWDQKTLWRIMTACVIMHNMITEDERGQPEDXYEHVGTTVDPEKDKDRIKRFLEVHRKIEDRETHDQLRDDLVEHLXQRLGQ

SEQ ID NO: 101131 - protein, 79 aa, Setaria italica
  Transcript Sequence Number=SeqID_35157
  Gene Ontology: Mol. function=double-stranded RNA binding; Cellular component=intracellular
  Homolog annotation: Hit_ID=A9TDF6; Match level="QueryCoverage=100%, HitCoverage=7%, E-value=1e-26, Identity=70%"; Hit description=Double- stranded RNA binding protein
  Pfam annotation: Domain name=dsrm; Domain location=2-68; Score=65.6; E_value=1.9e-16; Accession=PF00035.17; Description=Double-stranded RNA binding motif
MYKNQLQELAQRSCFNLPAYTCLREGPDHAPRFKAAVNFNGEQFESPGFFTTLRQAEHAAAEVALAALARRGPSYSLAA

SEQ ID NO: 101132 - protein, 59 aa, Setaria italica
  Transcript Sequence Number=SeqID_35158
KFVVENYCYSYISSLLRSIHLWRQWMVMCSNFIPLGCKSTVEWLGFKTLPPSCALRTCS

SEQ ID NO: 101133 - protein, 112 aa, Setaria italica
  Transcript Sequence Number=SeqID_35159
ICRQRISAAKTGGRSSGKLFLAGSLDLPIKKFLERGRKVRDISEIQLTWLLQGICVLLALSCMSGECSPAQPGKSSVSFGLNGAPQAIWAGTLEGFHTEKDRNENLNKVQFA

SEQ ID NO: 101134 - protein, 160 aa, Setaria italica
  misc_feature (55)..(55): Xaa can be any naturally occurring amino acid
  misc_feature (114)..(114): Xaa can be any naturally occurring amino acid
  Transcript Sequence Number=SeqID_35160
APLLARVPERKHPHDIRANPKVQLAQANRFATGVLEHYNKKKIKFELLDAKPVIXYIPEQRCCYTHINFSARPIKEGLQEQLFFAEIYHCGKRRAPSGFIVTCCEPLGSGTKIXELDGTSVVRKNADFKYCFACTKRMLHPKGGNCVAVHCNIPRVCDNA

SEQ ID NO: 101135 - protein, 87 aa, Setaria italica
  Transcript Sequence Number=SeqID_35161
MPMNAGLRAYREVLRLVRRLPAETRPYYAKYARENFVNYRDLSADDDLAALLRRAYTHSSWVLSKYSIDGEKAAARLKDLGGGHPAG

SEQ ID NO: 101136 - protein, 104 aa, Setaria italica
  Transcript Sequence Number=SeqID_35162
  Gene Ontology: Mol. function=aspartic-type endopeptidase activity; Biological process=proteolysis
  Homolog annotation: Hit_ID=Q9LTW4; Match level="QueryCoverage=93%, HitCoverage=20%, E-value=3e-12, Identity=40%"; Hit description =Chloroplast nucleoid DNA binding protein-like
  Subcellular localization annotation: CTP_CleavageSite=33; ConfidenceScore=5.26e-01
ADTGSDLTWVKCRRGAAAGSPPSAQPAREFRPAASKSWSPIACSSDTCTSYVPFSLANCSSPASPCAYDYRYKDGSAARGVVGTDSATIALSASGRVGGGADSS

SEQ ID NO: 101137 - protein, 456 aa, Setaria italica
  Transcript Sequence Number=SeqID_35163
  Gene Ontology: Mol. function=aspartic-type endopeptidase activity; Cellular component=apoplast; Biological process=proteolysis
  Homolog annotation: Hit_ID=B6TP02; Match level="QueryCoverage=96%, HitCoverage=96%, E-value=0.0, Identity=76%"; Hit description =Aspartic proteinase nepenthesin-1
  Pfam annotation: Domain name=Asp; Domain location=118-453; Score= -55.4; E_value=2.8e-10; Accession=PF00026.15; Description=Eukaryotic aspartyl protease
MALLLRLLALSLLLAVATPIRDVTDACSSQVKDFPHLNSSGIHLTLHHPRSPCSPAPLPADLPFSAVLTHDDARIASLAARLAKTPSSRPTALDESSSPDESLASVPLGPGTSVGVGNYVTRMGLGTPAKSYVMVVDTGSSLTWLQCSPCVVSCHRQSGPVFNPKASSSYASVSCSEPQCSDLTSATLNPAACSTSNVCVYQASYGDSSFSMGYLSKDTVSLGSSSMPNFYYGCGQDNEGLFGRSAGLIGLARNKLSLLYQLAPTLGYSFSYCLPTSSSSSGYLSIGSYNPGQYSYTPMASNSLDDSLYFIKLTGITVAGKPLSVSSSAYSSLPTIIDSGTVITRLPTGVYSALSKAVAAAMKGTPRASAFSILDTCFQGQASRLRAPAVSMAFAGGAALKLAAPNLLVDVDSATTCLAFAPARSAAIIGNTQQQTFSVVYDVKSKRIGFAAGGCS

SEQ ID NO: 101138 - protein, 251 aa, Setaria italica
  Transcript Sequence Number=SeqID_35164
  Homolog annotation: Hit_ID=Q7XSV3; Match level="QueryCoverage=99%, HitCoverage=56%, E-value=1e-75, Identity=62%"; Hit description =OSJNBa0039K24.3 protein
  Pfam annotation: Domain name=DUF793; Domain location=1-244; Score =290.3; E_value=4.1e-84; Accession=PF05633.3; Description=Protein of unknown function (DUF793)
RKALTDLTILMLDDRDGGGGVVGQRNRSFGRASKDARPHGHGQGHHRRSSSGGSSGSGSGSHLRSLSWSVSRAWSAARQLQAIGGGLPVPRPQDITATGGLASAVYTMGAVLFIVSFALVAAIPCQDRGLQAHFSVPRNFPWSDPATTLYDRIVEESKKKDRKNSCGLLKEIHQIELCSRHLMHVTDTAEFPLPKDKDAYAQEAAQELVQVCQSLKDGLDPLERQVREMFHLIVRTRTEILDCLSRPHGAE

SEQ ID NO: 101139 - protein, 116 aa, Setaria italica
  misc_feature (2)..(2): Xaa can be any naturally occurring amino acid
  misc_feature (18)..(18): Xaa can be any naturally occurring amino acid
  Transcript Sequence Number=SeqID_35165
  Gene Ontology: Mol. function=cysteine-type peptidase activity; Biological process=proteolysis
IXVTAKSVQLILGIPFNXKPGTVKYEMDAQSTALMKQDYYSDGLPARITSIGEQLSEMRKADDRFLRTFLLLAMSCFLCPTTSCRISPRCFPSLVDISSVAQLDWCDFVCLKSNFS

SEQ ID NO: 101140 - protein, 44 aa, Setaria italica
  Transcript Sequence Number=SeqID_35166
NAVLIYSTKVIGISCLKSHCGQNFSGIIALKAAVFVMVPKLLDF

SEQ ID NO: 101141 - protein, 97 aa, Setaria italica
  misc_feature (27)..(27): Xaa can be any naturally occurring amino acid
  Transcript Sequence Number=SeqID_35167
MLEELLIFTRGGLILWALSGSGGAAVXGSPIDALIRSCLLEDRSADGTGASQDGKRAFKWAFHNGLGLVFVAVYRRVLRLLYVDDLLAAVRAEVYVL

SEQ ID NO: 101142 - protein, 81 aa, Setaria italica
  Transcript Sequence Number=SeqID_35168
  Gene Ontology: Mol. function=electron carrier activity
  Homolog annotation: Hit_ID=Q94EV6; Match level="QueryCoverage=56%, HitCoverage=8%, E-value=1e-11, Identity=76%"; Hit description =Cytochrome P450
MVQMGDGIGVVAAALAVVLLPWLWAALAHLVWRPYAVARAFARQGVRGRPYRFFVGNTGEVRAMRAATSGLTLDRSSQTSS

SEQ ID NO: 101143 - protein, 76 aa, Setaria italica
  Transcript Sequence Number=SeqID_35169
  Gene Ontology: Mol. function=catalytic activity; Cellular component =chloroplast; Biological process=cellular metabolic process
  Homolog annotation: Hit_ID=B6SU61; Match level="QueryCoverage=100%, HitCoverage=24%, E-value=2e-31, Identity=84%"; Hit description=Tic62 protein
IIRPGGMERPTDTFKETHNLVVAMEDTYVGGLVSNLQVAELIGCMANNRRAAYCKVVEVIAETTAPLLPMEQLLAA

SEQ ID NO: 101144 - protein, 377 aa, Setaria italica
  Transcript Sequence Number=SeqID_35170
  Gene Ontology: Mol. function=catalytic activity; Cellular component =chloroplast; Biological process=cellular metabolic process
  Homolog annotation: Hit_ID=B6SU61; Match level="QueryCoverage=69%, HitCoverage=79%, E-value=1e-112, Identity=77%"; Hit description =Tic62 protein
  Pfam annotation: Domain name=Epimerase; Domain location=81-310; Score= -49.4; E_value=0.0019; Accession=PF01370.13; Description=NAD dependent epimerasedehydratase family
  Pfam annotation: Domain name=NAD_binding_4; Domain location=83-326; Score=-97.6; E_value=0.013; Accession=PF07993.4; Description=Male sterility protein
  Pfam annotation: Domain name=NmrA; Domain location=81-338; Score= -38.9; E_value=4.2e-06; Accession=PF05368.5; Description=NmrA-like family
  Pfam module annotation: Pfam domain module=Epimerase::NAD_binding _4::NmrA; Domain location=81-310::83-326::81-338
  Subcellular localization annotation: CTP_CleavageSite=57; ConfidenceScore=5.83e-01
MDTVASLSPLRHGHPSSSSPASCNTSRPSPWLLKLKQRSLISSSNSLPARPRAWPPRASASASSAATPPPPQQQQKEKDLVFVAGATGRVGSRAVRELIKLGFRVRAAVRNAERASSLVQSVQQLKLDGNAAAAISPSEKLEIVECDLEKQPQDGIVEAIGNASLVVCSIGASEKEILDVTGPYRIDYMATTKLVQAATAAQVEHFVLVTSLGTNRIGFPAFLLNLFWGVLLWKRRAEEALIASGIPYTIIRPGGMERPTDTFKETHNLVVAMEDTYVGGLVSNLQVAELIGCMANNRRAAYCKVVEVIAETTAPLLPMEQLLAAIPSKREPPAEDETEKVKPSSREPAKAERPLSPYTSYKDLKAPSSSTLSAPKI

SEQ ID NO: 101145 - protein, 82 aa, Setaria italica
  Transcript Sequence Number=SeqID_35171
  Homolog annotation: Hit_ID=Q9FXS6; Match level="QueryCoverage=63%, HitCoverage=29%, E-value=6e-11, Identity=61%"; Hit description=NtEIG- E80 protein
  Pfam annotation: Domain name=PAR1; Domain location=2-79; Score=-53.5; E_value=3.4e-06; Accession=PF06521.3; Description=PAR1 protein
PRVAGAVCSPACLQGCPNIVNLYANLAAGEGVAFSELCEVHRANPRRAMAQLQSSGKAHGASTTVRLDAAAPSPAPAPSESA

SEQ ID NO: 101146 - protein, 114 aa, Setaria italica
  misc_feature (62)..(62): Xaa can be any naturally occurring amino acid
  Transcript Sequence Number=SeqID_35172
  Gene Ontology: Mol. function=transferase activity, transferring glycosyl groups; Biological process=metabolic process
  Homolog annotation: Hit_ID=B9S398; Match level="QueryCoverage=96%, HitCoverage=23%, E-value=1e-19, Identity=47%"; Hit description=UDP -glucuronosyltransferase, putative
PRSGAFLTHCGWNSTLESILGGVPMICRPLGGDQLCNARYVCQVWKVGVRLVEVENQLTRGXLQLAVERLMGREEGDRIRERIRDLRDAAVKCTSKGGSTDASLQRLVDFIVSP

SEQ ID NO: 101147 - protein, 42 aa, Setaria italica
  Transcript Sequence Number=SeqID_35173
HFCEMHCHFLYCLPFVLTWSWQFTKRWNISVLNFQFIMDIYF

SEQ ID NO: 101148 - protein, 34 aa, Setaria italica
  Transcript Sequence Number=SeqID_35174
AKAKEMQEQRESAWRQLEAVVAAKAAGDDMVLVN

SEQ ID NO: 101149 - protein, 372 aa, Setaria italica
  Transcript Sequence Number=SeqID_35175
  Gene Ontology: Mol. function=ribose phosphate diphosphokinase activity; Cellular component=chloroplast; Biological process =ribonucleoside monophosphate biosynthetic process
  Homolog annotation: Hit_ID=Q9XG98; Match level="QueryCoverage=83%, HitCoverage=92%, E-value=1e-156, Identity=85%"; Hit description =Ribose-phosphate pyrophosphokinase 1
  Pfam annotation: Domain name=Pribosyltran; Domain location=201-309; Score=95.2; E_value=2.2e-25; Accession=PF00156.19; Description =Phosphoribosyl transferase domain
  Subcellular localization annotation: CTP_CleavageSite=25; ConfidenceScore=5.74e-01
MAMAAGAACCACPSPSTSLSHRPMRRRMVVACSSSMFYDSSLLSPLPQFAAAVPSRGGGGRLRIFSGSANPVLAQEIACYLGMELGRVKIKRFADGEIYVQLQESVRGCDVFLVQPTCPPANENLMELLIMIDACRRASAKTITAVIPYFGYARADRKMQGRESIAAKLVANLITEAGAHRVLACDLHSGQSIGYFDIPVDHVHGQPVILDYLASKTIRPSDVVVVSPDVGGVARARAFAKKLSDAPLAIVDKRRQGHNQAEVVNLIGDVRGKVAIMVDDMIDTAGTITKGAQLLHDEGARAVYACSTHAVLSPPALERLSGGLFQEVIITNTVPVVQHQSFPQLTVLSVANLLGETIWRVHDDCSVSSIFQ

SEQ ID NO: 101150 - protein, 60 aa, Setaria italica
  Transcript Sequence Number=SeqID_35176
LRRLRALARESDKNRLVMATRETRAALVEVAFGSGSGASEELEAEAMAVLALVGLGEAEA

SEQ ID NO: 101151 - protein, 573 aa, Setaria italica
  Transcript Sequence Number=SeqID_35177
  Gene Ontology: Mol. function=aminoacyl-tRNA ligase activity
  Homolog annotation: Hit_ID=Q84T06; Match level="QueryCoverage=97%, HitCoverage=75%, E-value=1e-132, Identity=50%"; Hit description =Unknow protein
TAMAMGRGTWVTVLCRKLKDWWHWVAEGDLPIVASHGTEIETYKTLEPATRLVILKAICDIRVEQDDIRNFIDSSLKQGHDLSTFRKERIGGDSLGISYWYEDDEILGHRLYREIRRVEQVKKEPGKRSRGKGGSSAISVVSYQWETVASNFDEFDDVAEKLFSSRNRTEVSLGKKLKIEYLPEIEKIHKKKERLLKKQQREALLLDSYLTSDGLTTGRSLRDRKPVTYTFDDFDRSINEAIKITKKREENSAEPVTTTTTTNRRVLPLRSEAPSNGKLNGPSPTANDSFDGNSSKSDDYRDSDGEQENEALDRSNRRRKRSQRYTQDFVEAVSDIDPNFDSDDDIMGEAVYDEEYLRSRKQQKASSASEEDEEFRLEEDAEDDDEEEEEYSLSTSEDIEPQQHKKLETRGRRGSKLRSVDEIQSGLRRSKRSSRPRINYRQYDFSDSDTEPGKARKSDASDPDAGSDAENDMELSTSSQEQEEEEEDDSPDEQNGNNVNDKMEEDHAVAENKVEPDEQQEQQQQQPVEKMDHAPSRESESVGRTFLDLNQLAPGGGFDDGPSLTVKDDMDNS

SEQ ID NO: 101152 - protein, 81 aa, Setaria italica
  Transcript Sequence Number=SeqID_35178
SSGVPSPSGLSMDDDVHAKTRSCAGGETSAAAASRIIAQWAARRRQACEQMVLTTLDLDRRDRESELLALARLHAVSMLDA

SEQ ID NO: 101153 - protein, 129 aa, Setaria italica
  Transcript Sequence Number=SeqID_35179
  Subcellular localization annotation: CTP_CleavageSite=47; ConfidenceScore=5.71e-01
HKHHWRQSSAAAAPDLPLADATALPPRRRRSRSCRPQPTPFGASSLSSGARGGIPATRDLTLEAGHRPPRMPSSLEGGQAQEQENKITMGTYSEGDIAGGCRGSGTDRICGLPDNLLHSIVLRLPGTAD

SEQ ID NO: 101154 - protein, 81 aa, Setaria italica
  misc_feature (1)..(5): Xaa can be any naturally occurring amino acid
  misc_feature (11)..(11): Xaa can be any naturally occurring amino acid
  Transcript Sequence Number=SeqID_35180
  Subcellular localization annotation: CTP_CleavageSite=34; ConfidenceScore=5.22e-01
XXXXXLFFFFXFFFFFFKPKDFFFFFPSSIRYLQEAYVQDYSTVTLLMIPQISPLSPPARAARPDRTRRPSTFLFLFSFLP

SEQ ID NO: 101155 - protein, 97 aa, Setaria italica
  Transcript Sequence Number=SeqID_35181
  Subcellular localization annotation: CTP_CleavageSite=85; ConfidenceScore=5.42e-01
FHSISTGSICTRLQYSNPFDDPTNFPDVNPKSPNPSTHLAIASSSKAPAGPVRPLSIRKGRGPYTDRLSHPSAAPSHSQNGLILSAGAPAAEVHGLA

SEQ ID NO: 101156 - protein, 190 aa, Setaria italica
  misc_feature (171)..(171): Xaa can be any naturally occurring amino acid
  Transcript Sequence Number=SeqID_35182
  Gene Ontology: Mol. function=hydrolase activity
  Homolog annotation: Hit_ID=B6UDV1; Match level="QueryCoverage=88%, HitCoverage=51%, E-value=4e-32, Identity=47%"; Hit description =Catalytic/ hydrolase
MGFSILPLMEFIARRAFLGAGLQPHTAALPSDDGSDGGQPRTVIHYWAPPGEPRLPPLLLIHGFGPMATWQWRRQVGPLSRHFHVIVPDLLGFGASSRGSPAAPSELAQAAALAALLDALPGLTADARVAAIGTSYGGFVAYALARAAGPGRVGPVVMSNSDLLKTAEDDXGALLERAGGGRRAHGRPRS

SEQ ID NO: 101157 - protein, 195 aa, Setaria italica
  Transcript Sequence Number=SeqID_35183
  Gene Ontology: Mol. function=protein binding; Cellular component =nucleus
  Pfam annotation: Domain name=DUF538; Domain location=41-157; Score =173.0; E_value=8.4e-49; Accession=PF04398.4; Description=Protein of unknown function, DUF538
MASSLTVSTTTATGAAAGTAAANKQREGAEVITGAEACFAHSKEMLKALGFPGGVMPLRGLEECGWVKETGFVWMRQKAPYEHYFRGTGTRVRYDAEVTAYVEEGRMKRMTGVRSKQVLLWVPIVEMSLDGEKRDKIYFKSNVGIGRSFPASAFADEEEKEEKKEEGGDKPAGADEEKKGEVGGDKPADADAATK

SEQ ID NO: 101158 - protein, 82 aa, Setaria italica
  Transcript Sequence Number=SeqID_35184
  Gene Ontology: Mol. function=sequence-specific DNA binding; Cellular component=cytoplasm; Biological process=regulation of transcription, DNA-dependent
  Homolog annotation: Hit_ID=B4FZ71; Match level="QueryCoverage=78%, HitCoverage=14%, E-value=5e-13, Identity=62%"; Hit description=Heat shock transcription factor like protein
PKNKASGDSATAADTTVTPHGDSQAPSEEPAAPPVVANDKFWEQFLTERPGCSEAEEASSTLRRDPYEDTRSDRRDMGQLKL

SEQ ID NO: 101159 - protein, 115 aa, Setaria italica
  misc_feature (18)..(18): Xaa can be any naturally occurring amino acid
  Transcript Sequence Number=SeqID_35185
  Gene Ontology: Mol. function=racemase and epimerase activity, acting on carbohydrates and derivatives; Biological process=carbohydrate metabolic process
  Homolog annotation: Hit_ID=Q1XG32; Match level="QueryCoverage=94%, HitCoverage=22%, E-value=6e-33, Identity=64%"; Hit description=UDP -galactose epimerase
PCPTRYDAVIHFAGLKAXGESVAHPDMYYDNNLVGTINLYKTMKKHGCMKVSTCCMIDPPLSCTISDDPARTAHVQMVFSSSATVYGWPEVIPCVEDANLQAANPYGRTKVKLRP

SEQ ID NO: 101160 - protein, 89 aa, Setaria italica
  Transcript Sequence Number=SeqID_35186
  Gene Ontology: Mol. function=racemase and epimerase activity, acting on carbohydrates and derivatives; Biological process=carbohydrate metabolic process
  Homolog annotation: Hit_ID=Q1XG32; Match level="QueryCoverage=100%, HitCoverage=24%, E-value=4e-41, Identity=86%"; Hit description=UDP -galactose epimerase
GESVAHPDMYYDNNLVGTINLYKTMKKHGCMKMVFSSSATVYGWPEVIPCVEDANLQAANPYGRTKLILEDMARDYHRADPGWSIVLLR

SEQ ID NO: 101161 - protein, 153 aa, Setaria italica
  Transcript Sequence Number=SeqID_35187
MKASASAAVAEENNFCRFDSLTMEVDNVCHPIQRVDGFLVCPCCNAKAPSEIIMRSHLTGKKHKHKMRLAVRNNKKDASVLSTGGDEVLGKSSKSMEANVEAESAPPIVTQAKNAAAMAPMGVDSPAEVKGIEPAEDGEITRGAKATAQFSES

SEQ ID NO: 101162 - protein, 233 aa, Setaria italica
  Transcript Sequence Number=SeqID_35188
  Gene Ontology: Mol. function=DNA binding; Cellular component=nucleus; Biological process=regulation of transcription, DNA-dependent
  Homolog annotation: Hit_ID=B6SSJ3; Match level="QueryCoverage=93%, HitCoverage=48%, E-value=5e-73, Identity=69%"; Hit description =Mutant cincinnata
  Pfam annotation: Domain name=TCP; Domain location=19-221; Score =157.6; E_value=3.7e-44; Accession=PF03634.5; Description=TCP family transcription factor
VVFVGRLSRVGSTICSVRSTGRKDRHSKVCTARGPRDRRVRLSAHTAIQFYDVQDRLGYDRPSKAVDWLIKNAKDAIDKLEVLPAWQPTATVANAAAPPSSSTHPDSAENSDDQAQAITVAHTSFDFPGAGGASGGAGGTGFLPASLDSDSIADTIKSFFPMAGTAGGEASSSTAAAQSSAMGFQSYTPDLLSRTGSHSQELRLSLQSHPDPMFQQQQDRSHGHGGNGSAQQA

SEQ ID NO: 101163 - protein, 155 aa, Setaria italica
  Transcript Sequence Number=SeqID_35189
  Gene Ontology: Cellular component=cytoplasm; Biological process =response to stress
  Homolog annotation: Hit_ID=B6U6V5; Match level="QueryCoverage=88%, HitCoverage=83%, E-value=7e-55, Identity=79%"; Hit description=16.9 kDa class I heat shock protein 2
  Pfam annotation: Domain name=HSP20; Domain location=45-154; Score =71.2; E_value=3.9e-18; Accession=PF00011.13; Description=Hsp20alpha crystallin family
MSLVRLLDTLALDSWRNPFSIFGTAVAADAWQASDTSAFANTYIESRDTAGAYVFSAALPPGVKKEEVRVEVDEGNVLVITGERSLRREERTDGWHHIERSSATFLGRFHLPGDAAVDGVRAAMDAGVLTVTVPKVGAIAAAADADAEKAAEAPA

SEQ ID NO: 101164 - protein, 52 aa, Setaria italica
  Transcript Sequence Number=SeqID_35190
SIIQRLFVKMCFCACVVMNCFYFYHTLISVHRLITPCSCCWCSELRLENKTH

SEQ ID NO: 101165 - protein, 59 aa, Setaria italica
  Transcript Sequence Number=SeqID_35191
  Gene Ontology: Mol. function=endonuclease activity
  Homolog annotation: Hit_ID=Q9FF11; Match level="QueryCoverage=86%, HitCoverage=4%, E-value=8e-09, Identity=56%"; Hit description =Similarity to HepA-related protein Harp
MIFLIFSGECKVENMRTLCVACHYEVTRAQHKELKEIRKKAKEHLKNALNQQKDKASEA

SEQ ID NO: 101166 - protein, 89 aa, Setaria italica
  Transcript Sequence Number=SeqID_35192
PSKRWGFIPRVLFVRSREPEPELIYLARDGSISLDSHLANHPAQRGSERPVAELVEFELDFGFDLRLLRCGVGILAASPVRRGEGGGAA

SEQ ID NO: 101167 - protein, 246 aa, Setaria italica
  Transcript Sequence Number=SeqID_35193
  Gene Ontology: Cellular component=plasma membrane
  Homolog annotation: Hit_ID=B6T1M4; Match level="QueryCoverage=87%, HitCoverage=88%, E-value=1e-107, Identity=86%"; Hit description =Expp1 protein
MAAASASAPSSSRALLALTLSIACLAQLAAGDTNGVYEPCSDAWIQRGDGFSFGVVFAGYNAFFSGNTQLSPCDRRLNLASSAQLAVFRPKVDEISLLTINTTTGFNPASAGGFMVAFAGRKYAARSAPIFVSNTSFTVSSFTLVLEFKKGRLQNLHWKKDGCGACTGKSNFVCLGKQTCAIRTQSCKTQGPVDCSIGIQLAFSGTDRHESVLNSWYEVSNLRQYSLYGLYSNLKDTLSGQFNKFF

SEQ ID NO: 101168 - protein, 79 aa, Setaria italica
  Transcript Sequence Number=SeqID_35194
MADGDDKMALSLLLRIAALCLSVAAAVVMGTASDQVVIVDGDRRSSSYAVSYSQYNALKCFVAAAAISAACSAAALYLC

SEQ ID NO: 101169 - protein, 73 aa, Setaria italica
  Transcript Sequence Number=SeqID_35195
YETGIMIHVKLDELYYVQNIIPYRSFHDDFSFLIIKKRPDHHLQAMVMKIMICICCHTWCCSNVALGNIKLQR

SEQ ID NO: 101170 - protein, 68 aa, Setaria italica
  Transcript Sequence Number=SeqID_35196
FFLLHNTCHHTVYLLLNSHAHILLTLFIYKPIEKGRSISRRTHHCSKVTTKHLKRRGNHTSKAISLTH

SEQ ID NO: 101171 - protein, 61 aa, Setaria italica
  Transcript Sequence Number=SeqID_35197
MAEQPAPSTAAAPAAAEQTEAERLDALDRMLTRLALADDARLAPVLARVLPYAITSLASPA

SEQ ID NO: 101172 - protein, 51 aa, Setaria italica
  Transcript Sequence Number=SeqID_35198
KQPRAPACDVEALRRCLEENKGDRVKCQAHIDAFRSSCSPGPNTTSKTQSS

SEQ ID NO: 101173 - protein, 63 aa, Setaria italica
  misc_feature (30)..(30): Xaa can be any naturally occurring amino acid
  Transcript Sequence Number=SeqID_35199
GAFGDRMSGSYGALPLHQDHQESALPPPAXGAATGIAGSGYFDLLNMGDIYGGFSSTNDDLLF

SEQ ID NO: 101174 - protein, 58 aa, Setaria italica
  Transcript Sequence Number=SeqID_35200
RLEHWHCMYYSLKVQTAVIHSLDFFYKNKLETRHLFYVVHTISLNNIYDTITNLPRHF

SEQ ID NO: 101175 - protein, 56 aa, Setaria italica
  Transcript Sequence Number=SeqID_35201
  Gene Ontology: Mol. function=iron-sulfur cluster binding; Cellular component=integral to membrane; Biological process=iron-sulfur cluster assembly
  Homolog annotation: Hit_ID=Q53ML8; Match level="QueryCoverage=100%, HitCoverage=5%, E-value=3e-23, Identity=98%"; Hit description =Similar to seven transmembrane protein Mlo4
  Pfam annotation: Domain name=NifU; Domain location=2-55; Score=-13.1; E_value=0.016; Accession=PF01106.9; Description=NifU-like domain
YLAGTGGGELEFVAIEEPIVKVRLTGPAAGVMTVRVALTQKLREKIPKIAAVQLLS

SEQ ID NO: 101176 - protein, 227 aa, Setaria italica
  Transcript Sequence Number=SeqID_35202
  Gene Ontology: Mol. function=iron-sulfur cluster binding; Cellular component=integral to membrane; Biological process=iron-sulfur cluster assembly
  Homolog annotation: Hit_ID=Q53ML8; Match level="QueryCoverage=70%, HitCoverage=16%, E-value=5e-86, Identity=96%"; Hit description =Similar to seven transmembrane protein Mlo4
  Pfam annotation: Domain name=NifU; Domain location=162-226; Score =25.5; E_value=6e-07; Accession=PF01106.9; Description=NifU-like domain
  Pfam annotation: Domain name=NifU; Domain location=81-148; Score =121.1; E_value=3.6e-33; Accession=PF01106.9; Description=NifU-like domain
  Pfam module annotation: Pfam domain module=NifU::NifU; Domain location=162-226::81-148
  Subcellular localization annotation: CTP_CleavageSite=49; ConfidenceScore=6.03e-01
MQTAAAAVAWAPGPSPSTSTSSSSPSPFRVGFASTAVPASSAPRLVAASASLARRRRRRQVVQAIANPDPAIELSLTAENVEMVLDEVRPYLMADGGNVALHEIDGNVVRLKLQGACGSCPASVTTMKMGIERRLMEKIPEIVAVEPIADEETGLELNQENIEKVLEEIRPYLAGTGGGELEFVAIEEPIVKVRLTGPAAGVMTVRVALTQKLREKIPKIAAVQLLS

SEQ ID NO: 101177 - protein, 102 aa, Setaria italica
  Transcript Sequence Number=SeqID_35203
  Gene Ontology: Mol. function=hydrolase activity, acting on ester bonds; Biological process=lipid metabolic process
  Homolog annotation: Hit_ID=Q8LSS1; Match level="QueryCoverage=83%, HitCoverage=23%, E-value=8e-15, Identity=44%"; Hit description =Putative lipase
ARAVVATGMPPLGCAPYQLALFPGAPGDYDRVTGCNTRLNGIAELHNRELRRTLDEIRRAHPGRSFLYGDIYSPIVSAVTSPARYGLSDAPLAACWRGAAAG

SEQ ID NO: 101178 - protein, 81 aa, Setaria italica
  Transcript Sequence Number=SeqID_35204
  Gene Ontology: Cellular component=vacuole; Biological process =response to stress
  Homolog annotation: Hit_ID=B6TLW3; Match level="QueryCoverage=100%, HitCoverage=46%, E-value=2e-30, Identity=82%"; Hit description=Fiber protein Fb19
  Pfam annotation: Domain name=Usp; Domain location=1-75; Score=21.3; E_ value=0.004; Accession=PF00582.18; Description=Universal stress protein family
LDKAKELCAQVQVADVEFEALEGDARNVLCDAAERHHAEMLVVGSHGYGAIKRAVLGSVSDYCAHHAHCTVMIVKKPKHKH

SEQ ID NO: 101179 - protein, 81 aa, Setaria italica
  Transcript Sequence Number=SeqID_35205
  Gene Ontology: Cellular component=vacuole; Biological process =response to stress
  Homolog annotation: Hit_ID=B6TLW3; Match level="QueryCoverage=96%, HitCoverage=45%, E-value=3e-33, Identity=87%"; Hit description=Fiber protein Fb19
  Pfam annotation: Domain name=Usp; Domain location=1-75; Score=17.9; E_ value=0.036; Accession=PF00582.18; Description=Universal stress protein family
RVIEKAKELCAQVADAEYEAMEGDARNVLCDAVERHHAEMLVVGSHGYGAIKRAVLGSVSDYCAHHAHCTVMIVKKPKPKH

SEQ ID NO: 101180 - protein, 134 aa, Setaria italica
  Transcript Sequence Number=SeqID_35206
  Gene Ontology: Cellular component=vacuole; Biological process =response to stress
  Homolog annotation: Hit_ID=B6TLW3; Match level="QueryCoverage=86%, HitCoverage=67%, E-value=9e-43, Identity=77%"; Hit description=Fiber protein Fb19
MAEEAPALAAAAGTKMTMVAGVDESEHSFYALQWALQHFFPPGQPQQYRLAVVTAMPSAAVGLAGTGALMDVRSFVEADLKRAARRVLDKAKELCAQVQVADVEFEALEGDARNVLCDAAERHHAEMLVVVRSV

SEQ ID NO: 101181 - protein, 169 aa, Setaria italica
  Transcript Sequence Number=SeqID_35207
  Gene Ontology: Cellular component=vacuole; Biological process =response to stress
  Homolog annotation: Hit_ID=B6TLW3; Match level="QueryCoverage=89%, HitCoverage=88%, E-value=5e-75, Identity=89%"; Hit description=Fiber protein Fb19
  Pfam annotation: Domain name=Usp; Domain location=18-163; Score=87.2; E_value=5.9e-23; Accession=PF00582.18; Description=Universal stress protein family
MAEEASSAPAAAAAAGKMTMVAGVDESDHSFYALQWALQHFFPAGQPQQYRLVVVTAKPSAASAVGLAGPGAADVLPFVEADLKRTALRVIEKAKELCAQVADAEYEAMEGDARNVLCDAVERHHAEMLVVGSHGYGAIKRAVLGSVSDYCAHHAHCTVMIVKKPKPKH

SEQ ID NO: 101182 - protein, 228 aa, Setaria italica
  Transcript Sequence Number=SeqID_35208
  Gene Ontology: Mol. function=protein serine/threonine kinase activity; Biological process=protein amino acid phosphorylation
  Homolog annotation: Hit_ID=B6T841; Match level="QueryCoverage=96%, HitCoverage=54%, E-value=1e-124, Identity=96%"; Hit description =Glycogen synthase kinase-3 MsK-3
  Pfam annotation: Domain name=Pkinase; Domain location=72-226; Score =18.4; E_value=1.4e-09; Accession=PF00069.17; Description=Protein kinase domain
  Pfam annotation: Domain name=Pkinase_Tyr; Domain location=72-226; Score=-106.6; E_value=1.2e-06; Accession=PF07714.9; Description =Protein tyrosine kinase
  Pfam module annotation: Pfam domain module=Pkinase::Pkinase_Tyr; Domain location=72-226::72-226
MASAGVAPSGYKHSSSTNVGADKLQDHMNELKIRDDKEVEATIINGKGTETGHIIVTTTGGKNGQPKQTVSYMAERIVGQGSFGIVFQAKCLETGETVAIKKVLQDKRYKNRELQTMRLLDHPNVVALKHCFFSTTEKDELYLNLVLEYVPETVHRVVKHHNKMNQRMPLIYVKLYMYQICRALAYIHGSIGVCHRDIKPQNLLVNPHTHQLKLCDFGTCKSFLVLRG

SEQ ID NO: 101183 - protein, 298 aa, Setaria italica
  Transcript Sequence Number=SeqID_35209
  Gene Ontology: Mol. function=protein serine/threonine kinase activity; Biological process=protein amino acid phosphorylation
  Homolog annotation: Hit_ID=B6T841; Match level="QueryCoverage=100%, HitCoverage=73%, E-value=1e-172, Identity=96%"; Hit description =Glycogen synthase kinase-3 MsK-3
  Pfam annotation: Domain name=Pkinase; Domain location=1-246; Score =195.9; E_value=1.1e-55; Accession=PF00069.17; Description=Protein kinase domain
  Pfam annotation: Domain name=Pkinase_Tyr; Domain location=1-226; Score=-121.3; E_value=1.2e-05; Accession=PF07714.9; Description =Protein tyrosine kinase
  Pfam module annotation: Pfam domain module=Pkinase::Pkinase_Tyr; Domain location=1-246::1-226
NRELQTMRLLAHIVVALLKHCFFSTTEKDELYLNLVLEYVPETVHRVVKHHNKMNQRMPLIYVKLYMYQICRALAYIHGSIGVCHRDIKPQNLLVNPHTHQLKLCDFGSAKVLVKGEPNISYICSRYYRAPELIFGATEYTTAIDIWSAGCVLAELMLGQPLFPGESGVDQLVEIIKVLGTPTREEIKCMNPNYTEFKFPQIKAHPWHKVFHKRMPPEAVDLVSRLLQYSPNLRCTAVEALVHPFFDELRDPNTRLPNGRFLPPLFNFKPHELKGVPADIVAKLIPEHAKKQCPYVGL

SEQ ID NO: 101184 - protein, 49 aa, Setaria italica
  Transcript Sequence Number=SeqID_35210
  Gene Ontology: Mol. function=oxidoreductase activity, acting on the CH-OH group of donors, NAD or NADP as acceptor; Biological process =metabolic process
GSNSHGAVTRVLFCGPYWPASTNYTREYLQNYPYIQMQIFESSAVLEVL

SEQ ID NO: 101185 - protein, 174 aa, Setaria italica
  Transcript Sequence Number=SeqID_35211
  Gene Ontology: Mol. function=oxidoreductase activity, acting on the CH-OH group of donors, NAD or NADP as acceptor; Biological process =metabolic process
  Homolog annotation: Hit_ID=Q8H423; Match level="QueryCoverage=79%, HitCoverage=43%, E-value=4e-63, Identity=84%"; Hit description =Putative phosphoglycerate dehydrogenase
  Pfam annotation: Domain name=2-Hacid_dh; Domain location=13-137; Score=24.7; E_value=4.9e-05; Accession=PF00389.22; Description=D -isomer specific 2-hydroxyacid dehydr
SCGSNSHGAVTRVLFCGPYWPASTNYTREYLQNYPYIQVDEVGLEQVLDVIQNYHICVVKNKRIDSDIIAKATQMKIIMQYGVGLEGVDVNAATEHKIKVARIPGSTTGNAVSCAEMAIYLTLGVLRKQKEMDTAVNRKDLGVPVGDTLFGKTVLILGFGAIGIEVAKRLKPFG

SEQ ID NO: 101186 - protein, 129 aa, Setaria italica
  Transcript Sequence Number=SeqID_35212
CLDLTQNAVVRSMNCNPNTQYFQISAENLRSLYSVFFGGVVGDFSGPLLLIVIAIVYRKTQSVLPFRWYPLFLTSVSDFLCAKLRKTNTTKLLPFFPFPLTNILHLFIVNITLWLLLCASTYTLPDVPR

SEQ ID NO: 101187 - protein, 90 aa, Setaria italica
  misc_feature (74)..(74): Xaa can be any naturally occurring amino acid
  Transcript Sequence Number=SeqID_35213
  Gene Ontology: Mol. function=nucleotide binding; Biological process =defense response
  Homolog annotation: Hit_ID=Q2R1D4; Match level="QueryCoverage=100%, HitCoverage=8%, E-value=6e-30, Identity=72%"; Hit description=NB-ARC domain containing protein
VRGQCRPSTQRTGRHLVIQSCWDRDRIVFDSIDFSRLRSLTVFGKWESFFVSQSMKVLRVLDLEDASNVTDKAXEIVKQLPRLKFLSLRG

SEQ ID NO: 101188 - protein, 89 aa, Setaria italica
  misc_feature (74)..(74): Xaa can be any naturally occurring amino acid
  Transcript Sequence Number=SeqID_35214
TQLRSAPRAPVPERSHHGRHTHEHGHEQHLTPTDESAWMSLMPRRALRREEAFDWLMLYRKLRGATAGAPRPGXAAGAFLSEGPPCTTC

SEQ ID NO: 101189 - protein, 68 aa, Setaria italica
  Transcript Sequence Number=SeqID_35215
ARFPGEQVHARAVALGLGAHPSVLPRLASFYIALGDLPAARAAVERAAWKARAFPWNLLIWGYADRGM

SEQ ID NO: 101190 - protein, 313 aa, Setaria italica
  misc_feature (34)..(34): Xaa can be any naturally occurring amino acid
  Transcript Sequence Number=SeqID_35216
  Gene Ontology: Mol. function=carboxypeptidase activity; Cellular component=integral to membrane; Biological process=proteolysis
  Homolog annotation: Hit_ID=B6SWE3; Match level="QueryCoverage=100%, HitCoverage=40%, E-value=1e-130, Identity=74%"; Hit description =Glutamate carboxypeptidase 2
  Pfam annotation: Domain name=Peptidase_M20; Domain location=22-195; Score=-29.4; E_value=0.058; Accession=PF01546.20; Description =Peptidase family M20M25M40
  Pfam annotation: Domain name=Peptidase_M28; Domain location=19-204; Score=40.9; E_value=4e-10; Accession=PF04389.9; Description =Peptidase family M28
  Pfam module annotation: Pfam domain module=Peptidase_M20::Peptidase _M28; Domain location=22-195::19-204
MATIQNVISVIEGKEEPERYVILGNHRDAWTFGXVDPNSGTAALLELAQRLSELQKKGWRPRRTIILCNWDAEEYALIGSTEWVEENRAMLTSRTVAYLNVDSAVFGRGFYASATPQLDELLKEASKQVQNPDNRTESLYDLWMASNTSPLIGRLGGGGSDHSAFVQHIGIPSVDMSIGSDYPVYHSLYDDFIWMEKFGDPLFQRHVAAASMWGLVALRLSDEEILPFNYSYYATELENGVMGINERVLGMPVSLSPLHKSIKEFRRAVLKVDSELKALRTWKIWAQWRSCPLKVRDINDRLMMTERAFTERE

SEQ ID NO: 101191 - protein, 184 aa, Setaria italica
  Transcript Sequence Number=SeqID_35217
  Gene Ontology: Mol. function=carboxypeptidase activity; Cellular component=integral to membrane; Biological process=proteolysis
  Homolog annotation: Hit_ID=B6SWE3; Match level="QueryCoverage=90%, HitCoverage=23%, E-value=4e-78, Identity=82%"; Hit description =Glutamate carboxypeptidase 2
  Pfam annotation: Domain name=TFR_dimer; Domain location=38-182; Score= 68.2; E_value=3e-17; Accession=PF04253.7; Description=Transferrin receptor-like dimerisation domain
TKYGLKSIVGGLCLSSCRRLSDEEILPFNYSYYATELENGVMGINERVLGMPVSLSPLHKSIKEFRRAVLKVDSELKALRTWKIWAQWRSCPLKVRDINDRLMMTERAFTEREGLSGRPWYKHLIYGPSLHNDYGAEIYPGIDDAIQTAKRTSTLESWQAVQNEIHRVARVINQAALVLTGGLT

SEQ ID NO: 101192 - protein, 349 aa, Setaria italica
  Transcript Sequence Number=SeqID_35218
  Gene Ontology: Mol. function=DNA binding; Cellular component=nucleus; Biological process=regulation of transcription
  Homolog annotation: Hit_ID=B6SUI0; Match level="QueryCoverage=100%, HitCoverage=100%, E-value=1e-154, Identity=80%"; Hit description =GRAB2 protein
  Pfam annotation: Domain name=NAM; Domain location=20-147; Score =295.4; E_value=1.3e-85; Accession=PF02365.7; Description=No apical meristem (NAM) protein
MSEVSVINQAEVEDAGQLDLPPGFRFHPTDEEIITHYLTHKALDHRFVSGVIGEVDLNKCEPWDLPGRAKMGEKEWFFFCHKDRKYPTGTRTNRATETGYWKATGKDKEIFRGRGILVGMKKTLVFYRGRAPRGEKTGWVMHEFRLEGKLPHALPRSAKDEWAVCKVFNKELAARTEPAMAAAGAELERIGSLGFISELLDSAELPPLMDPSFGGEVDEVIDFKGVASTSGHAAAAPGTSYLPVKMEEHAPLQYQQQPPMFYSGQYFSLPAVNSGDLTPAIRRYCKAEQVASGQTTSVLSPSRETGLSTDRNAGGGCAEISSAVTPSASHQFLHDLDDPLLYVADFWKH

SEQ ID NO: 101193 - protein, 96 aa, Setaria italica
  Transcript Sequence Number=SeqID_35219
  Gene Ontology: Mol. function=ligase activity; Cellular component =chloroplast; Biological process=response to auxin stimulus
  Homolog annotation: Hit_ID=A1BNG5; Match level="QueryCoverage=100%, HitCoverage=15%, E-value=6e-25, Identity=56%"; Hit description =Jasmonic acid-amino acid-conjugating enzyme
FWELNDGEVSDDGKLLLQSCCDELDRGFVDAGYLGSRITRAIGPLELRVLRRGTFEEVLRHYLSLGAPVNQFKLPRCVPRSNSAVLQILSSNTLKA

SEQ ID NO: 101194 - protein, 105 aa, Setaria italica
  Transcript Sequence Number=SeqID_35220
  Gene Ontology: Mol. function=N-acetyltransferase activity; Cellular component=chloroplast; Biological process=metabolic process
  Homolog annotation: Hit_ID=B9RLC7; Match level="QueryCoverage=85%, HitCoverage=47%, E-value=9e-29, Identity=63%"; Hit description=N -acetyltransferase, putative
  Pfam annotation: Domain name=Acetyltransf_1; Domain location=8-82; Score=45.1; E_value=2.7e-10; Accession=PF00583.16; Description =Acetyltransferase (GNAT) family
VWLSAAVGEEAGRPVAFARAAGDGVFNAVVWDVVVEPSCQGLGLGRAVMERLVQDLRSDGVGNIVLYAEARVVGFYRLLDFAMDPDGIRGMAYYRSKQPTATSSQ

SEQ ID NO: 101195 - protein, 75 aa, Setaria italica
  Transcript Sequence Number=SeqID_35221
  Gene Ontology: Mol. function=transferase activity, transferring phosphorus-containing groups; Cellular component=membrane; Biological process=two-component signal transduction system (phosphorelay)
  Homolog annotation: Hit_ID=Q5SML4; Match level="QueryCoverage=100%, HitCoverage=7%, E-value=1e-30, Identity=70%"; Hit description =Histidine kinase
DVLENTINMINIVGISKGLEVVWDPCDFSILKCGDVIGDCRRLKQILDNVLGNSVKFTQEGHIILRAWANRPITR

SEQ ID NO: 101196 - protein, 207 aa, Setaria italica
  misc_feature (38)..(38): Xaa can be any naturally occurring amino acid
  Transcript Sequence Number=SeqID_35222
  Gene Ontology: Mol. function=nucleic acid binding; Cellular component= nuclear speck; Biological process=negative regulation of nuclear mRNA splicing, via spliceosome
  Homolog annotation: Hit_ID=B6THS7; Match level="QueryCoverage=73%, HitCoverage=73%, E-value=9e-49, Identity=67%"; Hit description =Splicing factor, arginine/serine-rich 4
  Pfam annotation: Domain name=RRM_1; Domain location=39-109; Score =83.9; E_value=5.6e-22; Accession=PF00076.14; Description=RNA recognition motif. (a.k.a. RRM, RBD, o
MRRGYSYSPSPPRGYRRRARSPTPRDYNGDRGRDLPTXLLVRNLRRDCRPEDLRRPFAQFGRVKDIYLPRDYYTGEPRGFGFVQFYDPEDAADAKYYMDGQIVLGRQITVVFAEDNRKKPQEMRARDRVRGRSYDRRYSRSRSPPYSRGRSPSRSYSRSPSPPNPKHRLRERSYSRSPVDSRSRSGSPYEERYRRSSPRERSLPVSG

SEQ ID NO: 101197 - protein, 96 aa, Setaria italica
  misc_feature (14)..(14): Xaa can be any naturally occurring amino acid
  Transcript Sequence Number=SeqID_35223
  Gene Ontology: Mol. function=glutamate-ammonia ligase activity; Cellular component=cytoplasm; Biological process=nitrogen compound metabolic process
  Homolog annotation: Hit_ID=A9PEW3; Match level="QueryCoverage=100%, HitCoverage=26%, E-value=4e-44, Identity=87%"; Hit description =Glutamine synthetase
  Pfam annotation: Domain name=Gln-synt_C; Domain location=1-96; Score=- 124.8; E_value=0.0068; Accession=PF00120.16; Description=Glutamine synthetase, catalytic domain
MGPYYCAAGAEQVXGGDIVDAHYKACLYAGIDISGINGEVMPGQWEFQVGPAVGISAGDQIWVARYILERITEIAGVVVSFDPKPIPGDWNGAGAH

SEQ ID NO: 101198 - protein, 136 aa, Setaria italica
  Transcript Sequence Number=SeqID_35224
  Gene Ontology: Mol. function=glutamate-ammonia ligase activity; Cellular component=cytoplasm; Biological process=nitrogen compound metabolic process
  Homolog annotation: Hit_ID=P38560; Match level="QueryCoverage=95%, HitCoverage=35%, E-value=2e-65, Identity=93%"; Hit description =Glutamine synthetase root isozyme 2
  Pfam annotation: Domain name=Gln-synt_C; Domain location=2-136; Score= -12.0; E_value=3.2e-10; Accession=PF00120.16; Description=Glutamine synthetase, catalytic domain
TGEGREDEVEVHYKACLYAGIDISGINGEVMPGQWEFQVGPAVGISAGDQIWVARYILERITEIAGVVVSFDPKPIPGDWNGAGAHTNYSTKSMRSDGGYEVIKKAIQKLGLRHREHIAAYGDGNERRLTGRHETA

SEQ ID NO: 101199 - protein, 394 aa, Setaria italica
  Transcript Sequence Number=SeqID_35225
  Gene Ontology: Mol. function=glutamate-ammonia ligase activity; Cellular component=cytoplasm; Biological process=nitrogen compound metabolic process
  Homolog annotation: Hit_ID=P38560; Match level="QueryCoverage=92%, HitCoverage=99%, E-value=0.0, Identity=87%"; Hit description =Glutamine synthetase root isozyme 2
  Pfam annotation: Domain name=Gln-synt_C; Domain location=130-382; Score=303.5; E_value=4.3e-88; Accession=PF00120.16; Description =Glutamine synthetase, catalytic domain
  Pfam annotation: Domain name=Gln-synt_N; Domain location=44-124; Score=147.5; E_value=4.2e-41; Accession=PF03951.11; Description =Glutamine synthetase, beta-Grasp domain
  Pfam module annotation: Pfam domain module=Gln-synt_C::Gln-synt_N; Domain location=130-382::44-124
SHCSCSALAPLPRRRRGDHQEGIPVVAMALLTDLVNLDLSDCTEKIIAEYIWVGGSGMDVRSKARTLSGPVDDPSKLPKWNFDGSSTGQATGDDSEVILRPQAIFRDPFRKGKNILVMCDCYAPNGEPIPTNKRHGAAKIFSHPDVKAEEPWFGIEQEYTLLQKDTNWPLGWPLGGYPGPQGPYYCAAGADKSYGRDIVDAHYKACLYAGIDISGINGEVMPGQWEFQVGPAVGISAGDQIWVARYILERITEIAGVVVSFDPKPIPGDWNGAGAHTNYSTKSMRSDGGYEVIKKAIQKLGLRHREHIAAYGDGNERRLTGRHETADINTFIWGVANRGASVRVGRDTEKEGKGYFEDRRPASNMDPYVVTSLIAETTLLWNPSHSNGNGVAAP

SEQ ID NO: 101200 - protein, 71 aa, Setaria italica
  Transcript Sequence Number=SeqID_35226
  Gene Ontology: Mol. function=protein serine/threonine kinase activity; Biological process=protein amino acid phosphorylation
  Homolog annotation: Hit_ID=Q6ZEZ5; Match level="QueryCoverage=83%, HitCoverage=10%, E-value=1e-19, Identity=77%"; Hit description =Serine/threonine-protein kinase Nek3
SVVAPLPTMYSGAFRGLVKSMLRKSPDHRPSASELLKHPHLQHYVFKLQLKLTLPHNLFSAKLPTKHNTNK

SEQ ID NO: 101201 - protein, 56 aa, Setaria italica
  Transcript Sequence Number=SeqID_35227
LYFWFQPIRHFCISYPKTKYKESKTNRKLPIRIDRVCRCHDQSYRIFAEVHSCRSL

SEQ ID NO: 101202 - protein, 71 aa, Setaria italica
  Transcript Sequence Number=SeqID_35228
DKKNIKIHQFLLQWCTTEFQNSHKIERTVFNVCNVQDLLGTTDFLIWLKFLQYNVDLIICIKLSFLRFSIF

SEQ ID NO: 101203 - protein, 241 aa, Setaria italica
  Transcript Sequence Number=SeqID_35229
  Gene Ontology: Mol. function=transcription factor activity; Cellular component=nucleus; Biological process=regulation of transcription, DNA-dependent
  Homolog annotation: Hit_ID=B6T615; Match level="QueryCoverage=100%, HitCoverage=100%, E-value=2e-47, Identity=50%"; Hit description =Ethylene-responsive transcription factor 4
  Pfam annotation: Domain name=AP2; Domain location=32-83; Score=82.7; E_value=1.3e-21; Accession=PF00847.12; Description=AP2 domain
MAPRAADKSPVPPATGLGLGVGGGVGGVGMGPHFRGVRKRPWGRYAAEIRDPAKKSRVWLGTYDTAEEAARAYDAAAREFRGAKAKTNFPFASQCPVAAGAGSPSSNSTVDSSGGGSACGVQAPMQAMPLPPALDLDLFHRAAAVTAVSSGGMRFPFKGYPVARPTPHPYFFYEQAAAAAAAAAGYRMLKVAPPPVTVAAVAQSDSDSSSVVDHTPSPPPVTTKKEVSFDLDLNWPPPAEN

SEQ ID NO: 101204 - protein, 110 aa, Setaria italica
  Transcript Sequence Number=SeqID_35230
  Gene Ontology: Mol. function=substrate-specific transmembrane transporter activity; Cellular component=integral to membrane; Biological process=transmembrane transport
  Homolog annotation: Hit_ID=Q94AZ2; Match level="QueryCoverage=100%, HitCoverage=21%, E-value=2e-39, Identity=75%"; Hit description=Sugar transport protein 13
PIVIISCIMAATGGLMFGYDVGISGGVTSMDDFLGKFFPAVLRKKHEDKESNYCKYDNQGLQLFTSSLYLAGLTATFFASYTTRRLGRRLTMLIAGVFFIVGVIFNGAAQ

SEQ ID NO: 101205 - protein, 249 aa, Setaria italica
  misc_feature (222)..(222): Xaa can be any naturally occurring amino acid
  Transcript Sequence Number=SeqID_35231
  Gene Ontology: Mol. function=aminoacyl-tRNA ligase activity; Cellular component=cytoplasm; Biological process=tRNA aminoacylation for protein translation
  Homolog annotation: Hit_ID=B6TBG7; Match level="QueryCoverage=100%, HitCoverage=48%, E-value=1e-120, Identity=85%"; Hit description =Seryl-tRNA synthetase
  Pfam annotation: Domain name=tRNA-synt_2b; Domain location=1-151; Score=157.9; E_value=2.9e-44; Accession=PF00587.17; Description=tRNA synthetase class II core domain (G, H, P, S and T)
ITPEIVRSSVVEKCGFQPRAQNTQVYSIENSDQCLIGTAEIPVGGIHMDSILLESALPLKYVAYSHCFRTEAGAAGAATRGLYRVHQFSKVEMFIFCRPEESDKWHEELITIEEDLYASLGLHFKTLDMATGDLGAPAYRKFDIEAWMPGLERYGEISSASNCTDYQSRRLGIRYRPAPTEPPPANAKKVKAAGGPTQFVHTLNATAVAVPRLIVCILENFXQDDGSIVIPEPLRPFMGGLEVLTPKSK

SEQ ID NO: 101206 - protein, 202 aa, Setaria italica
  Transcript Sequence Number=SeqID_35232
  Gene Ontology: Mol. function=aminoacyl-tRNA ligase activity; Cellular component=cytoplasm; Biological process=tRNA aminoacylation for protein translation
  Homolog annotation: Hit_ID=B6TBG7; Match level="QueryCoverage=96%, HitCoverage=37%, E-value=1e-101, Identity=91%"; Hit description =Seryl-tRNA synthetase
  Pfam annotation: Domain name=tRNA-synt_2b; Domain location=89-202; Score=28.5; E_value=6.5e-08; Accession=PF00587.17; Description=tRNA synthetase class II core domain (G, H, P, S and T)
FGLEEDLVELTDKLQLEAQSIPNATHPDVPVGGEESSVVRKEVGSQRSFNFTIKDHLQLGKELDLFDFDAAAEVSGSKFYYLKNEAVLLEMALVNWAISEVAKKGFTPLITPEIVRSSVVEKCGFQPRAQNTQVYSIENSDQCLIGTAEIPVGGIHMDSILLESALPLKYVAYSHCFRTEAGAAGAATRGLYRVHPLKIMTD

SEQ ID NO: 101207 - protein, 176 aa, Setaria italica
  Transcript Sequence Number=SeqID_35233
  Homolog annotation: Hit_ID=A6YRS1; Match level="QueryCoverage=100%, HitCoverage=41%, E-value=1e-52, Identity=60%"; Hit description=R -interacting factor 1
  Pfam annotation: Domain name=ENT; Domain location=1-47; Score=20.4; E_ value=0.00042; Accession=PF03735.6; Description=ENT domain
TWEKEDLITELREELRVSDEAHQQLLNMINNDDLTHSIRERRTTGGIEERLPNNPSHDSVSNHTTSARKRQKTSKSITASLATPTQPSSSTAIKAVSLGTKGKRTKPCQKVSGGSAVKPTSSSEGPSARGPLMNRYFPGGPSAEFSEAQNVNPLIGRKVMNRWPDDNSFYEVVISD

SEQ ID NO: 101208 - protein, 107 aa, Setaria italica
  misc_feature (75)..(75): Xaa can be any naturally occurring amino acid
  Transcript Sequence Number=SeqID_35234
  Subcellular localization annotation: CTP_CleavageSite=38; ConfidenceScore=5.67e-01
ASRNPSKRRRRSPWTRTRNPPATIGSSSTPAPPPTTTTASSRSPPAAAPPPRAPPPTPTPTPTPPTSPTPSSPTXPQSPPPPPPTTPRASTRSRTPRTTTPTPPPSP

SEQ ID NO: 101209 - protein, 105 aa, Setaria italica
  Transcript Sequence Number=SeqID_35235
MAGRKAGNAAALVAVLIVAAMAAEAGAIKLCGVDRTAVDACRSYCAVGSAEASPSKACCDKVRPAQWDCLCKFKGSLPDGIDGARVMDLQYKCKCDYPPATCGAN

SEQ ID NO: 101210 - protein, 75 aa, Setaria italica
  misc_feature (56)..(56): Xaa can be any naturally occurring amino acid
  Transcript Sequence Number=SeqID_35236
AVQQHKDGGQWLRSAELLLLINDQFVFVHTSHGLLPWLPVPDGLVRLGQKPAVRIXNGELLTRDALNLRFLNVFP

SEQ ID NO: 101211 - protein, 36 aa, Setaria italica
  misc_feature (9)..(9): Xaa can be any naturally occurring amino acid
  Transcript Sequence Number=SeqID_35237
  Homolog annotation: Hit_ID=B6SWV9; Match level="QueryCoverage=100%, HitCoverage=9%, E-value=4e-10, Identity=91%"; Hit description=DHHC zinc finger domain containing protein
QNIVRFFGXCPYLISRVFLRYSNAGKLQDNSGSKLL

SEQ ID NO: 101212 - protein, 147 aa, Setaria italica
  Transcript Sequence Number=SeqID_35238
  Gene Ontology: Mol. function=metal ion binding
  Homolog annotation: Hit_ID=B6SWV9; Match level="QueryCoverage=100%, HitCoverage=41%, E-value=5e-72, Identity=91%"; Hit description=DHHC zinc finger domain containing protein
LISVVISCAYAAGMTIYASYQMWPSVDFPNLASSHQSMSYMKILLEIITTVAGSAFFLSARGLVLVYLAFASLSVNAGISVLLCQQLSYIYEGNTYLNHLSSPNAMHGERGLQNIVRFFGCPYLISRVFLRYSNAGKLQDNSGSKLL

SEQ ID NO: 101213 - protein, 287 aa, Setaria italica
  misc_feature (201)..(201): Xaa can be any naturally occurring amino acid
  Transcript Sequence Number=SeqID_35239
  Gene Ontology: Mol. function=metal ion binding; Cellular component =integral to membrane; Biological process=regulation of protein metabolic process
  Homolog annotation: Hit_ID=B6SWV9; Match level="QueryCoverage=100%, HitCoverage=81%, E-value=1e-145, Identity=86%"; Hit description=DHHC zinc finger domain containing protein
  Pfam annotation: Domain name=zf-DHHC; Domain location=149-212; Score =96.8; E_value=7.3e-26; Accession=PF01529.12; Description=DHHC zinc finger domain
MVEPEQRPLLEVEQCVTSIPEDHEATCWGCGLRLVFASYSPVYKCGWCGAITQSNQTARKPDSICFSHWRRLRDRFFVTVLVFFMLFVICGGVWAVYPIVFSISKFCGILHCMVTAMLAVFTISSYCLASFKSAGAPTNIRWGSYPMVGKNDLENYTFCTYCNKPKPPRAHHCRSCKMCVVDMDHHCPFIGNCVGASNHQXFVIFLISVVISCAYAAGMTIYASYQMWPSVDFPNLASSHQSMSYMKILLEIITTVAGSAFFLSARGLVLVYLAFASLSVNAGISVL

SEQ ID NO: 101214 - protein, 147 aa, Setaria italica
  misc_feature (109)..(109): Xaa can be any naturally occurring amino acid
  Transcript Sequence Number=SeqID_35240
  Homolog annotation: Hit_ID=Q339Q6; Match level="QueryCoverage=45%, HitCoverage=23%, E-value=3e-09, Identity=38%"; Hit description =Retrotransposon protein, putative, Ty3-gypsy subclass, expressed
  Pfam annotation: Domain name=FAR1; Domain location=33-107; Score =25.5; E_value=8.7e-08; Accession=PF03101.7; Description=FAR1 family
MRVVMIQVLAMLWKIVPSFQGAKKVTREDGKKGQYLFQGAKKGSWVLNNEGYQTMREVVCQRQGFDKRTKSKTKGCHCKAMIRLHRTEDDGWFISTYVKEHNHEFSETXAEKREWNSHKKIEQTTRDMVKYLQSAMFGLGQLFNLLP

SEQ ID NO: 101215 - protein, 214 aa, Setaria italica
  misc_feature (27)..(27): Xaa can be any naturally occurring amino acid
  misc_feature (76)..(76): Xaa can be any naturally occurring amino acid
  misc_feature (132)..(132): Xaa can be any naturally occurring amino acid
  Transcript Sequence Number=SeqID_35241
  Gene Ontology: Mol. function=nucleoside-triphosphatase activity; Cellular component=intracellular; Biological process=regulation of transcription, DNA-dependent
  Homolog annotation: Hit_ID=Q9FNQ1; Match level="QueryCoverage=100%, HitCoverage=48%, E-value=3e-92, Identity=54%"; Hit description=RNA helicase
  Pfam annotation: Domain name=Helicase_C; Domain location=129-213; Score=29.7; E_value=1.2e-05; Accession=PF00271.23; Description =Helicase conserved C-terminal domain
IVGLSATLPTYLEVAQFLRVNPETGLXIDSSYRPVPLAQQYIGISERDYTKKSELFNTLCYEKVVESIKQGHQALXFVHTRKDTGKTARTLIDLAAKAGELELFSSADHPQFPLIKKDVGKAKSREVVEFLXSGFGIHNAGMIRSDRNLMERLFGDGLLKVLVCTATLAWGVNLPAHTVVIKGTQLYDPKAGGWRDLGMLDVMQIFGRAGRPQF

SEQ ID NO: 101216 - protein, 64 aa, Setaria italica
  Transcript Sequence Number=SeqID_35242
PPCSFQRKSFFYSHPTRRSMIITPRLYLSASLEIINLLPLLLAPNLHTSGATYPKVPTKFTVEA

SEQ ID NO: 101217 - protein, 532 aa, Setaria italica
  Transcript Sequence Number=SeqID_35243
  Homolog annotation: Hit_ID=B6SW94; Match level="QueryCoverage=100%, HitCoverage=100%, E-value=0.0, Identity=83%"; Hit description=SLT1 protein
MGESLLTALSMDTATAHHPHQGPNTILSMDTASHEDFDLYLQPQGPFRRCLHAAAVVPPDINLPLAADPSPPPPALQDCNVDMLDVGLGGPQQYDSDSPAAAVPVSAPPAATTATVAVAHTKGSGSSAARKCVKRNDSIWGAWFFFTHYFKPVMSADKGGKAKSATAGGNGNSATLDAFLVQHDMENMYMWVFKERPENALGKMQLRSFMNGHSRLGEPQFPFSADKGFVRSHRMQRKHYRGLSNPQCLHGIEIVRAPNMTGVPEAHMKRWMELTGRDANFSIPTEASDFESWRNLPTTDFELERAASTAPAKSSSHGHHKKLLNGSGLNLSTQPSNHSSGDGMEITATCNKRRKDSSPVAMEEDCSNSNSDKAHDMDVSHTFEPSWINDFTGVMRHASGPVTAAKTIYEDSKGYLIIISLPFSDFQKVKVSWKNTLTNGIVKVSCTSVGRMPFLKRHDRTFKLADPSPEHCPPGEFVREIPLPTRIPEDATLEAYRDETGTGLEIIVPKFRVGPEEHEVHVSMRPPSSWCQ

SEQ ID NO: 101218 - protein, 130 aa, Setaria italica
  Transcript Sequence Number=SeqID_35244
  Gene Ontology: Mol. function=microtubule motor activity; Cellular component=microtubule associated complex; Biological process =microtubule-based movement
  Homolog annotation: Hit_ID=Q75LL2; Match level="QueryCoverage=97%, HitCoverage=9%, E-value=3e-38, Identity=62%"; Hit description =Kinesin-like protein
CLSLLEADIEKFIRDNTLAEVWEGEVKNMEALLIDYQDCVFHVNLKEEEIKVCEESLQHQARGLDELHLKLNQAMRELAELLHDRRSLTSCSLDQSMPPVGEKVATDLEAVRIHVAEAKQLLLLDSQANL

SEQ ID NO: 101219 - protein, 304 aa, Setaria italica
  Transcript Sequence Number=SeqID_35245
  Gene Ontology: Mol. function=nucleotide binding; Cellular component =cellular_component; Biological process=biological_process
  Homolog annotation: Hit_ID=B9R6Z6; Match level="QueryCoverage=92%, HitCoverage=95%, E-value=1e-132, Identity=78%"; Hit description=XPA -binding protein, putative
  Pfam annotation: Domain name=ATP_bind_1; Domain location=7-256; Score= 355.9; E_value=7.6e-104; Accession=PF03029.9; Description=Conserved hypothetical ATP binding protein
  Pfam annotation: Domain name=CbiA; Domain location=6-212; Score= -32.7; E_value=0.033; Accession=PF01656.15; Description=Cobyrinic acid a,c-diamide synthase
  Pfam module annotation: Pfam domain module=ATP_bind_1::CbiA; Domain location=7-256::6-212
MVFGQVVIGPPGSGKTTYCNGMSQFLSLLGRKVAVVNLDPANDALPYECAVNIEDLIKLSDVMAEHSLGPNGGLVYCMDYLEKNIDWLEQKLQPLIEDHYLLFDFPGQVELFFLHSNARSVINKLIKKLNLRLTAVHLIDAHLCCDPGKYVSALLLSLSTMLHLELPHINVLSKIDLIENYGNLAFNLDFYTDVQDLSYLQHHLEQDPRSAKYRKLTKELCDVIDDFGLVNFSTLDIQDKESVGNLVKLIDKSNGYIFSSIDSSAVEFSKIAAAPLDWDYYRTAEVQEKYMKDDEFVQQTSRMQ

SEQ ID NO: 101220 - protein, 193 aa, Setaria italica
  misc_feature (7)..(7): Xaa can be any naturally occurring amino acid
  Transcript Sequence Number=SeqID_35246
FAYGRNXQLLNSYMAQIIQQEQEEHVGSSSELLKKCEYTVMGEDNLERTAGRHGYQVELNKAAVVTVGDIWTQAAAEPDSLLRREHLRRLCLSFALYKLLRRRFEDIPTTREETRNCRNLIFKGMLKEEAEKGAEVALFQVFNDETQFVCEYYHSVLPVVLSNPFFFLANYILFPIVVCAFCLLTFIICGNGS

SEQ ID NO: 101221 - protein, 115 aa, Setaria italica
  misc_feature (74)..(74): Xaa can be any naturally occurring amino acid
  Transcript Sequence Number=SeqID_35247
PDSLLRREKLRRLCLSFALYKLLRRRFEDIPTTREETRNCRNLIFKGLLKEQEGAEVALFQVFNDETQFVCDFXFCLLTLIICGNGSVRYAYRSITSDNYIIYTGATTLTRCLLR

SEQ ID NO: 101222 - protein, 276 aa, Setaria italica
  misc_feature (41)..(41): Xaa can be any naturally occurring amino acid
  misc_feature (261)..(261): Xaa can be any naturally occurring amino acid
  Transcript Sequence Number=SeqID_35248
  Subcellular localization annotation: CTP_CleavageSite=40; ConfidenceScore=5.35e-01
LNPSVRLFLSTSLSLFLPVMSYLFSEAKNQGATTMAATTSXSSYGELGDELSLRARTILMWMLLVELLRKKVEAVLVNVGMQWYSGAIDRFARIVWLGYLVFYNVKSPGKKAIYGTLWVLTAAKFLQRVVVKMVLERSFAYGRNTQLLNSYMAQIIQQEQEEHVGSSSELLKKCEYTVMGEDNLERTAGRHGYQVELNKAAVVTVGDIWTQAAAEPDSLLRREHLRRLCLSFALYKLLRRRFEDIPTTREETRNCRNLIFXGMLKDEAEKGAEVAL

SEQ ID NO: 101223 - protein, 484 aa, Setaria italica
  Transcript Sequence Number=SeqID_35249
  Gene Ontology: Mol. function=nutrient reservoir activity; Cellular component=vacuole
  Homolog annotation: Hit_ID=B6SK46; Match level="QueryCoverage=88%, HitCoverage=84%, E-value=0.0, Identity=76%"; Hit description=Cupin family protein
  Pfam annotation: Domain name=Cupin_1; Domain location=21-157; Score =45.1; E_value=2.7e-10; Accession=PF00190.14; Description=Cupin
  Pfam annotation: Domain name=Cupin_1; Domain location=280-429; Score =133.5; E_value=6.7e-37; Accession=PF00190.14; Description=Cupin
  Pfam annotation: Domain name=Cupin_2; Domain location=315-391; Score =3.1; E_value=0.15; Accession=PF07883.3; Description=Cupin domain
  Pfam annotation: Domain name=Cupin_2; Domain location=60-134; Score =11.1; E_value=0.025; Accession=PF07883.3; Description=Cupin domain
  Pfam module annotation: Pfam domain module=Cupin_1::Cupin_1::Cupin _2::Cupin_2; Domain location=21-157::280-429::315-391::60-134
RPEKEKEQEEGEGKGKGRGLFVLDRLEKVVESEGGQVRVVRGQPWPPASFACREGLMHLGFITMEPRTLFVPQYLGSNVILFVRRGEVKVGYIYKDELVERKLKMGDVLHIDAGSTFYMVNTGKGQRLQIICSIDASDSLGFGPPYLSFFLGGAGHQASVLAGFEPKTLAMAFNATYDELARVILAQTRGPIVYYTAEEPESGGKEERVQGNGLDKGSRRREAGAWRPGGRGEEDDEAGEDALPTWSWRKLVNRFIGGAGGVTAEANKKDKKKGSAPKPYNLYDSEPGFRNTYGWTIAVDKHDYEPLKHSDIGVYLVNLTAGSMLAPHVNPRATEYGVVLGGEGKIQVVFPNGSLAMSAVVRAGDVFWIPRFFAFCQVAARGGPFEFFGFTTSARRNRPQFLVGATSVLRAMLGPEVAAGFGAREKEFRELVLAQEEALILPSFPDTGKREKEKHGRKGKEEEEHGKGKGRREAPLVIEQVAKE

SEQ ID NO: 101224 - protein, 43 aa, Setaria italica
  Transcript Sequence Number=SeqID_35250
MPPNAQDTHGTTGVAMTPAPAATAAATKMDCFLTTACTPLNLQ

SEQ ID NO: 101225 - protein, 342 aa, Setaria italica
  Transcript Sequence Number=SeqID_35251
  Gene Ontology: Mol. function=protein kinase activity; Cellular component=plasma membrane; Biological process=protein amino acid phosphorylation
  Homolog annotation: Hit_ID=B6SRI6; Match level="QueryCoverage=100%, HitCoverage=79%, E-value=0.0, Identity=95%"; Hit description=Protein kinase APK1A
  Pfam annotation: Domain name=Pkinase; Domain location=84-328; Score =116.4; E_value=9.2e-32; Accession=PF00069.17; Description=Protein kinase domain
  Pfam annotation: Domain name=Pkinase_Tyr; Domain location=84-338; Score=81.7; E_value=2.7e-21; Accession=PF07714.9; Description =Protein tyrosine kinase
  Pfam module annotation: Pfam domain module=Pkinase::Pkinase_Tyr; Domain location=84-328::84-338
MRCLPFWHGEVKEEDPVTMSASVRSISTTSTERDVRSGSDFTSLNVSDMSAESIRRTQYPSFTDRPSNLRVFSFAELKSATRNFSRSLMVGEGGFGCVYRGIIKTSDEPNERIEIAVKQLNRKGLQGQKEWLTEMNVLGIVDHPNLVKLIGYCAEDDERGVQRLLVYEYMLNGSVDDHLSSRSTSTLSWPMRLKVALDSARGLKYLHEEMEFQVIFRDLKTSNILLDENWNAKLSDFGLARHGPTEGLTHVSTAVVGTLGYAAPEYMQTGRLTAKSDIWSYGVLLYELITGRRPIDRNRPKSEQKLLEWVKPYVGDKKRFPIIIDPRLEGHYNLKSMLKLSS

SEQ ID NO: 101226 - protein, 102 aa, Setaria italica
  misc_feature (61)..(61): Xaa can be any naturally occurring amino acid
  Transcript Sequence Number=SeqID_35252
WPLKGLFEKDLHHLVHLLISEKKWIEETTSRIFPFRLTLPHRRTCVPSNSSKSAALSSIFXSRGRPQKGKYVDDNSKKSKPLTREEILSDCHKVLKELVSQH

SEQ ID NO: 101227 - protein, 60 aa, Setaria italica
  Transcript Sequence Number=SeqID_35253
MPPVNLNTTNCTDRQREFATIHIGSYAIAYSDTSYIRLTLLHKEIEWIRILGKQKKQFEG

SEQ ID NO: 101228 - protein, 84 aa, Setaria italica
  Transcript Sequence Number=SeqID_35254
  Gene Ontology: Mol. function=protein serine/threonine kinase activity; Biological process=protein amino acid phosphorylation
  Homolog annotation: Hit_ID=B6T7G8; Match level="QueryCoverage=92%, HitCoverage=23%, E-value=7e-34, Identity=87%"; Hit description =Serine/threonine-protein kinase 16
MADIILTLFRFNVSPFEYALGESGGSLQLAIVNGQLKWPAGPNPPYPDELRQFVIWMLQPQAAMRPHIGDVVLHVDKLITKYLS

SEQ ID NO: 101229 - protein, 338 aa, Setaria italica
  misc_feature (116)..(116): Xaa can be any naturally occurring amino acid
  Transcript Sequence Number=SeqID_35255
  Gene Ontology: Mol. function=protein serine/threonine kinase activity; Cellular component=membrane; Biological process=protein amino acid phosphorylation
  Homolog annotation: Hit_ID=B6T7G8; Match level="QueryCoverage=99%, HitCoverage=99%, E-value=0.0, Identity=93%"; Hit description =Serine/threonine-protein kinase 16
  Pfam annotation: Domain name=Pkinase; Domain location=28-329; Score =81.3; E_value=3.4e-21; Accession=PF00069.17; Description=Protein kinase domain
  Pfam annotation: Domain name=Pkinase_Tyr; Domain location=28-329; Score=-118.1; E_value=7.1e-06; Accession=PF07714.9; Description =Protein tyrosine kinase
  Pfam module annotation: Pfam domain module=Pkinase::Pkinase_Tyr; Domain location=28-329::28-329
MGCSISGLNALYDAATGGGDVWINERRFRVLRQIGEGGFAFVYLVREQQPASNAAPARRHDAHVSEDGTYAMKKVLIQSKEQLDLVREEIRVSSLFSHPNLLPLLDHAIIAVKSPXGDWSHEAYLLFPVHLDGTLFDNSNIMLSRKEYYSTADVLQIFRQMCEGLKHMHSFDPPYAHNDVKPGNVLITRRKGQAPVATLMDFGSARPARKQIRSRSEALQLQEWAAEHCSAPYRAPELWDCPSHADIDERTDIWSLGCTLYAIMFNVSPFEYALGESGGSLQLAIVNGQLKWPAGPNPPYPDELRQFVIWMLQPQAAMRPHIGDVVLHVDKLITKYLS

SEQ ID NO: 101230 - protein, 241 aa, Setaria italica
  misc_feature (128)..(128): Xaa can be any naturally occurring amino acid
  Transcript Sequence Number=SeqID_35256
  Gene Ontology: Mol. function=oxidoreductase activity; Biological process=oxidation reduction
  Homolog annotation: Hit_ID=B6UFQ5; Match level="QueryCoverage=82%, HitCoverage=58%, E-value=4e-43, Identity=50%"; Hit description =Oxidoreductase
  Pfam annotation: Domain name=2OG-FeII_Oxy; Domain location=48-159; Score=63.0; E_value=1.1e-15; Accession=PF03171.12; Description=2OG -Fe(II) oxygenase superfamily
NVHLTSCCSDTIVSFAKNVLDLEQTVERMVLEGLGARGESIASQLGSQSHAVRATLYGAPPPPGEEAAAGGVSLSLHAHRDEHMTTVIAQHEVGGLEVQDAGDDGRWLAVPPEPGTLVFMAGDQFTVXLDDRVCSCVHRVRAPAGSGRGRFSVLLARRRKDDGDPVLRAMDELVDEDHPLMYKPCNHEEYRAFRYSDEGRRLRESHPLKAFCGVEKLGVGSMEGPLSNRHQLSGRLDPEQS

SEQ ID NO: 101231 - protein, 62 aa, Setaria italica
  Transcript Sequence Number=SeqID_35257
RVKFTLVGLAGSLILCILLYVNTENPKEPYENTGGGAIPGVYSDAAARSFEPDAFCGEPDLS

SEQ ID NO: 101232 - protein, 51 aa, Setaria italica
  Transcript Sequence Number=SeqID_35258
GRPNCRTLAPICTSCCNFISFFLLTLFFFVLLCFWFVYQRCIGFDHMLSPT

SEQ ID NO: 101233 - protein, 63 aa, Setaria italica
  misc_feature (62)..(62): Xaa can be any naturally occurring amino acid
  Transcript Sequence Number=SeqID_35259
  Gene Ontology: Cellular component=retromer complex; Biological process=vacuolar transport
  Homolog annotation: Hit_ID=B6UEZ8; Match level="QueryCoverage=100%, HitCoverage=20%, E-value=6e-25, Identity=84%"; Hit description =Vacuolar protein sorting 26
MNYIIGAFKPPCDISITFSDGRTRKQVSIKKDNGKTAMVPVFQSLETISGEVSIAPVPGKRXE

SEQ ID NO: 101234 - protein, 304 aa, Setaria italica
  Transcript Sequence Number=SeqID_35260
  Gene Ontology: Mol. function=protein binding; Cellular component =retromer complex; Biological process=vacuolar transport
  Homolog annotation: Hit_ID=B6UEZ8; Match level="QueryCoverage=100%, HitCoverage=100%, E-value=1e-161, Identity=91%"; Hit description =Vacuolar protein sorting 26
  Pfam annotation: Domain name=Vps26; Domain location=8-283; Score =613.2; E_value=2.7e-181; Accession=PF03643.7; Description=Vacuolar protein sorting-associated protein 26
MNYIIGATKPPCDISITFSDGRTRKQVSIKKDNGKTAMVPVFQSLETISGEVSIAPVPGKRIEHMGVKIELLGQIELYFDRGNFYDFTSLVRELDVPGEIYERKTYPFEFSTVEMPYESYNGTNVRLRYILKVTIGRNYVGNIVEYRDFCVRNYSPVPTINNSIKMEVGIEDCLHIEFEYSKSKYHLNDVIIGKIYFLLVRIKIKNMELEIRRRESTGSGSNTYVETETLAKFELMDGAPVRGESIPVRLFLTPYELTPTYRNINNKFSVKYYLNLVLVDEEDRRYFKQQEITMYRLLESAPSS

SEQ ID NO: 101235 - protein, 67 aa, Setaria italica
  Transcript Sequence Number=SeqID_35261
RLDRCSHLNSLEHRCSLATHTALKQNFDLPCNFEAISIGRQKTDDAGTIDSDGSLNCCRTSQKERLQ

SEQ ID NO: 101236 - protein, 80 aa, Setaria italica
  Transcript Sequence Number=SeqID_35262
  Subcellular localization annotation: CTP_CleavageSite=31; ConfidenceScore=5.01e-01
YECVPSTRHQPSHLSNFLSCGDMNSGKAFGAASHQSSINRFDSIVYALTPLVLSFMLFIVKLSWDVGFDQEKTSLLQFIA

SEQ ID NO: 101237 - protein, 77 aa, Setaria italica
  Transcript Sequence Number=SeqID_35263
STILYLIFFCLYARRKRTKHPLLIIEGIIIHHMYIHCARLFSITSSSELAKSCLNASCLCHKANQSCDQCLFGGHIT

SEQ ID NO: 101238 - protein, 87 aa, Setaria italica
  Transcript Sequence Number=SeqID_35264
  Homolog annotation: Hit_ID=Q1SN29; Match level="QueryCoverage=73%, HitCoverage=8%, E-value=8e-11, Identity=53%"; Hit description =Protein kinase
LTCRSPAAQHPHPLPDADAQRREKKSNAAVAASLPEWVRSVVREEWTAEVFDVELLRYRDIEEDRDVSVTSPSIGVTTDDGGGRLSY

SEQ ID NO: 101239 - protein, 89 aa, Setaria italica
  misc_feature (52)..(52): Xaa can be any naturally occurring amino acid
  Transcript Sequence Number=SeqID_35265
  Gene Ontology: Mol. function=hydrolase activity, hydrolyzing O -glycosyl compounds; Cellular component=extracellular region; Biological process=carbohydrate metabolic process
  Homolog annotation: Hit_ID=B6SYY0; Match level="QueryCoverage=95%, HitCoverage=20%, E-value=1e-22, Identity=55%"; Hit description=Beta -fructofuranosidase, insoluble isoenzyme 7
LLREWHKPSYNPVIPQPGDVMGNNFHDPSTAWLGDVGLVERNATPLHASPDXECVDFFPVAERGAEGLDTSAANGPGVRHVLSICGIFS

SEQ ID NO: 101240 - protein, 58 aa, Setaria italica
  Transcript Sequence Number=SeqID_35266
YAKGHTVPFKGDLFPQLLCCPCSVKRMGAVSIVNGNAWGRFRGCWHERFRWLCLLQVQ

SEQ ID NO: 101241 - protein, 85 aa, Setaria italica
  Transcript Sequence Number=SeqID_35267
MTRNHTSKSLAVLLRARMHPDALPSPPPQLSPPPPPTDPDPAAPPAASVLHWLHAAASAASPPPATLDNFSDGYRSLDRVGRREV

SEQ ID NO: 101242 - protein, 422 aa, Setaria italica
  Transcript Sequence Number=SeqID_35268
  Gene Ontology: Mol. function=nucleoside-triphosphatase activity; Cellular component=intrinsic to membrane; Biological process=innate immune response
  Homolog annotation: Hit_ID=B9RCE1; Match level="QueryCoverage=98%, HitCoverage=41%, E-value=1e-109, Identity=49%"; Hit description =Nucleoside-triphosphatase, putative
FGEPVPFFTPRSLSARAPEHAGPENKCSANGIALKISDILSGDSFVQPEQPPSANVGVLPSDVSPPISLCTSSNFGTPAIVYNNPSFVSTFNGPCQGSSSATSNGGRSARKEKQKRLGGMYRKSSSSQPTTSAASVSRLRSYDVYIGFHGRKASLLRFTNWLRAELEIHGISCFVSDRSRCRNSHSHDAVERIMNASTYGVVVLTKKSFGNPYTIEELRNFFGKKNLIPIFFDLDAADCLARDIIEKRGELWEKHGGKLWMLYGGIEHEWMESVDALSRVVDVQLEVNDGNWRDCILQAVILLATKLGRRSVVDRVNRWKGRMEKEEFPIPRNDDFVGRKKELSELELILFGDVTGDGEREYFELKTKQRRKGLAVRRSANNHEQVNTDDSKGKEPVLWKETEKDIEMQRLDSPLRHGRPLR

SEQ ID NO: 101243 - protein, 99 aa, Setaria italica
  Transcript Sequence Number=SeqID_35269
GYWYSRLFILHSDWQLGHQTIILQSQLMQVYHRFKHTGQPNPGRTNQLQLEEVKGHPVYAPHAVSLRLRSAIKWLSSYIMAYLQVPSLGSKRTASSAEY

SEQ ID NO: 101244 - protein, 257 aa, Setaria italica
  Transcript Sequence Number=SeqID_35270
  Homolog annotation: Hit_ID=Q5JMX2; Match level="QueryCoverage=100%, HitCoverage=43%, E-value=1e-98, Identity=68%"; Hit description =Putative vascular plant one zinc finger protein
FDLKDGPLFAALIAKVQGKNVGIPVCGGAATSKSPWNAPELFDLSLLEGESLREWLFFDTPRRAFESGNRKQRSLPDYSGRGWHESRKQLMKDFAGLKRSYYMDPQPSSSHEWHLFEYEINSSDALALYRLEYKSCDSKKSAKSKLASSSLNEIQQQMVRLTADSPVENKRTARSKPKANHKNTNANVFAHVNTPSQVDAPNAYQAAPQVNQMTFLNENVVYGPHLPHSENVVYGPHLPHGYSAEGSSFFWNPRDGT

SEQ ID NO: 101245 - protein, 72 aa, Setaria italica
  Transcript Sequence Number=SeqID_35271
LLVDVCHYHGNNDFQRPSSPSLLLSPLYESSHFMSMLSQALYKRRVGLFSGSLTYWVKVFHDPSRKFVPGVL

SEQ ID NO: 101246 - protein, 89 aa, Setaria italica
  Transcript Sequence Number=SeqID_35272
LVVRRTNKPEGIITKETAATTEPRPQPVSMNDSYVNDTVDSDSSMDDDDDEDDFDDDDEGNVGGGNSKMQYEIQFQRQQQSQSSVVRPN

SEQ ID NO: 101247 - protein, 71 aa, Setaria italica
  Transcript Sequence Number=SeqID_35273
  Subcellular localization annotation: CTP_CleavageSite=32; ConfidenceScore=5.67e-01
AGAHARARPTTSLNRTYMLFKPKPASIAISVTSSSTSPPSTISPSTNYTTVLVHASCNSPVPFHYLLICFG

SEQ ID NO: 101248 - protein, 177 aa, Setaria italica
  misc_feature (51)..(51): Xaa can be any naturally occurring amino acid
  misc_feature (93)..(93): Xaa can be any naturally occurring amino acid
  Transcript Sequence Number=SeqID_35274
  Homolog annotation: Hit_ID=Q7XR86; Match level="QueryCoverage=83%, HitCoverage=19%, E-value=1e-27, Identity=53%"; Hit description =OSJNBa0011L07.15 protein
TQYFHQLEAIYNRKHLRSIGAASASSVAIAGAPPALPAEQANPTRQELEGXKNINDDKRNNGGSGAGAQEPNSNGEKAPAPPAAFDADSGMKXEDIVRELNEQPPREFTTDETDSDEMGDEYTDGEEGEDDGKMQYRIQFQRPNSGGTNSAPPAPAPTTAAAPATSAPTSTFLAVVR

SEQ ID NO: 101249 - protein, 150 aa, Setaria italica
  Transcript Sequence Number=SeqID_35275
  Subcellular localization annotation: CTP_CleavageSite=27; ConfidenceScore=5.27e-01
SGNGNGCAAGRGGSDNNGGSSGGMQTQASNGGVAARFSVEGAGGNGVATNKPEGIITKETAATTEPRPQPVSMNDSYVNDTVDSDSSMDDDDDEDDFDDDDEGNVGGGNSKMQYEIQFQRQQQSQSSVVRPNASGGAGSGPGGPGPAATA

SEQ ID NO: 101250 - protein, 284 aa, Setaria italica
  Transcript Sequence Number=SeqID_35276
  Gene Ontology: Mol. function=DNA binding
  Homolog annotation: Hit_ID=Q6H6S9; Match level="QueryCoverage=88%, HitCoverage=80%, E-value=9e-57, Identity=52%"; Hit description =Putative DNA-binding protein Gt-2
  Pfam annotation: Domain name=MADF_DNA_bdg; Domain location=34-116; Score=7.0; E_value=0.042; Accession=PF10545.1; Description=Alcohol dehydrogenase transcription f
SLQPVPAPPKPEEARAWAGGEGSGSSLPSRWPKEEVQALIQLRTEKDEQYHDVVAKGPLWEDIAAGMRRIGYHRSAKRCKEKWENINKYYKKVKESNKRRPEDSKTCPYFHQLDAMYRKKRFAGRGISTAPGAYTAAVAVTVLENPNLNPRELEGKSSHDAGKSKNDGQGNVQGPPGNNGETAPATTVPDDGDKNKDSELTMKETDVQLLQQQFGADETESDDNDMGGDYTEEGGNDEDKTKYKTSFQKPNVIGSSGDATAPPATAAATANSAGPTSSTFLAVQ

SEQ ID NO: 101251 - protein, 186 aa, Setaria italica
  misc_feature (93)..(93): Xaa can be any naturally occurring amino acid
  Transcript Sequence Number=SeqID_35277
  Gene Ontology: Mol. function=DNA binding
  Homolog annotation: Hit_ID=Q6H6S9; Match level="QueryCoverage=81%, HitCoverage=20%, E-value=4e-14, Identity=41%"; Hit description =Putative DNA-binding protein Gt-2
WRPEDSKTCPYFHQLDAMYRKKRFAGRGISTAPGAYTAAVAVTVLENPNLNPRELEGKSSHDAGKSKNDGQGNVQGPPGNNGETAPATTVPDXATKNKRAEDSMKETDVQLLQQQFGADETESDDNDMGGDYTEEGGNDEDKTKYKTSFQKPNVIGSSGDATAPPATAAATANSAGPTSSTFLAVQ

SEQ ID NO: 101252 - protein, 484 aa, Setaria italica
  misc_feature (19)..(19): Xaa can be any naturally occurring amino acid
  Transcript Sequence Number=SeqID_35278
  Gene Ontology: Mol. function=DNA binding
  Homolog annotation: Hit_ID=B9RYZ9; Match level="QueryCoverage=55%, HitCoverage=64%, E-value=3e-68, Identity=50%"; Hit description =Transcription factor, putative
GGDVGGGGSGSGKMMRFFXGLMRQVMERQEEMQQRFIEAIERREQDRMIREEAWRRQEVARLAREQDALAQERAMAASRDAAVVSFIQRVTGQTIPMPSVAPPVFISALTPPPLQPTPVASAAPAAAPAQHQQPPSIHLSPKPGKPHPQPHQTQPPLAQLQMSSKEMIVRAPPAESQETPGSGGGAPSPSRWPKAEVHALIQLRTELEARYQDSGPKGPLWEDISAGMRRLGYNRSAKRCKEKWENINKYFKKVKESNKKRPEDSKTCPYYHQLEALYRSKALASSAAPPPPADQQAAGVTVLAAVPLSQTPPHAEHGGKDCSNGNGNGCAAGRGGSDNNGGSSGGMQTQASNGGVAARFSVEGAGGNGVATNKQPEGIITKETAATTEPRPQPVSMNDSYVNDTVDSDSSMDDDDDEDDFDDDDEGNVGGGNSKMQYEIQFQRQQQSQSSVVRPNASGGAGSGPGGPGPAATASGSFLTMVHH

SEQ ID NO: 101253 - protein, 439 aa, Setaria italica
  Transcript Sequence Number=SeqID_35279
  Gene Ontology: Mol. function=DNA binding
  Homolog annotation: Hit_ID=Q7XR86; Match level="QueryCoverage=83%, HitCoverage=83%, E-value=2e-84, Identity=49%"; Hit description =OSJNBa0011L07.15 protein
EDDVLLQGLMQQVVQRQEEMQHRFLETMEKREAERTAREEAWRRQEVARLNREQEQLAQERAAAASRDAAIINFLQRIGGQSVQPPAAVAIPMPVQTPPPPKQPPRQPQHPPPPSPQATTPQSKPISAAPLQQQPQETAAHRDAGTPRSAPPTSGASLELAPPVTTEQHVDSGLGGGDGGAASSSRWPKTEVHALIQLRMDLDMRYQETGPKGPLWEEISSGMRRLGYNRSSKRCKEKWENINKYYKKVKESNKKRPEDSKTCPYFHQLEAIYNRKHLRSIGAASASSVAIAGAPPALPAEQANPTRQELEGKNINDDKRNNGGSGAGAQEPNSNGEKAPAPPAAFDADSGMKKPEDIVRELNEQPPREFTTDETDSDEMGDEYTDGEEGEDDGKMQYRIQFQRPNSGGTNSAPPAPAPTTAAAPATSAPTSTFLAVVR

SEQ ID NO: 101254 - protein, 484 aa, Setaria italica
  Transcript Sequence Number=SeqID_35280
  Gene Ontology: Mol. function=DNA binding
  Homolog annotation: Hit_ID=Q9C6K3; Match level="QueryCoverage=21%, HitCoverage=73%, E-value=3e-46, Identity=63%"; Hit description=GT -like trihelix DNA-binding protein, putative
  Pfam annotation: Domain name=DUF2076; Domain location=215-416; Score=- 115.8; E_value=0.067; Accession=PF09849.1; Description=Uncharacterized protein conserved in
MIREEAWRRQEMTRLAREQEILAQERAMAASRDAAVLSFIQKITGQTIPMPSIAAPTINAMPPPSHPRPPPPQPHPTPIASASPAATPAWAQPPASQPPPAQQPQPSLPPQRSPMPATPQTPAPPQQQSTDIVMTPAETAAHADTPGYDGSGGGATSSRWPKAEVHALIQLRSNLDTRYQEAGPKGPLWEEISAGMRRLGYNRNAKRCKEKWENINKYFKKVKESNKKRPEDSKTCPYFHQLDALYRNKAALSSSGAGAGPAAVHASSAPSTQAPETVKVTAAAPISQTPPPPTLPSQSSQHAAKNGGGSNAAAGSGNGNGGGASEHGTSGGGSGGMQAQASNGSVAASRFFGDGGGGGSASAAKKPEDIMKEMMEQRPQPQAVVSGYNRIDGADSDNIDEDEDDYDDDDDDEDDVDGNKMQYEIQFQQRQHHHHHHQQPQQQHQNVVRPNAGGGGAGNPPGTTAPSTAAAATTTAGSFLGMVQ

SEQ ID NO: 101255 - protein, 133 aa, Setaria italica
  Transcript Sequence Number=SeqID_35281
YCFQERHNIKDAVDTSHFQTPPASHSWRAKPLLYHRHGGFKSPGANLVRKKRPGATSHATMPPLAHLAWPPPATPPWHHKRATELTAAGHTTTAQTLAPMTADASDGCHCRPGKCLDDASRRGMALEGVTIVV

SEQ ID NO: 101256 - protein, 73 aa, Setaria italica
  Transcript Sequence Number=SeqID_35282
MAGKSHTHKAFLLCNYVLLGAASSCIFLTLSLRLLPSPCGLLLLFLHALTAVFSAAGCSGSFTAPATPAQWHN

SEQ ID NO: 101257 - protein, 53 aa, Setaria italica
  Transcript Sequence Number=SeqID_35283
  Gene Ontology: Mol. function=transferase activity, transferring phosphorus-containing groups
  Homolog annotation: Hit_ID=Q5EFI5; Match level="QueryCoverage=100%, HitCoverage=2%, E-value=4e-23, Identity=98%"; Hit description=Target of rapamycin
MKPSPHFPEIGKKPKDLIAKDHAFNIAAYISSGADVIAAALRKHVEEEARDLS

SEQ ID NO: 101258 - protein, 194 aa, Setaria italica
  misc_feature (13)..(13): Xaa can be any naturally occurring amino acid
  Transcript Sequence Number=SeqID_35284
NSGGKPMNEGSEXDYTKTLQKDKVESTQDSRPKEVSETVPVQNQAAAQKLLQKMSQAVPEGRHGRGHRFKGKGKEEDAQVFTLDEWEKRKAIGSKSTSESYMQDTSRDEELARQLQEQLDLEDMHGGADVFHGRPESSDAERLRMSMFSFSGPDEAGGGRREFGGWGRGRGRGRGRGRGRGERFLSTVNGIVGL

SEQ ID NO: 101259 - protein, 59 aa, Setaria italica
  Transcript Sequence Number=SeqID_35285
PLRVARKKKMRSSSLVQALFMGSSSRLQLDGELHPFACLLKIFYPDWLRRLTLETSLLV

SEQ ID NO: 101260 - protein, 823 aa, Setaria italica
  Transcript Sequence Number=SeqID_35286
  Gene Ontology: Mol. function=protein kinase activity; Cellular component=plasma membrane; Biological process=protein amino acid phosphorylation
  Homolog annotation: Hit_ID=Q9LNK3; Match level="QueryCoverage=99%, HitCoverage=88%, E-value=0.0, Identity=41%"; Hit description=Leucine- rich repeat receptor-like protein kinase
  Pfam annotation: Domain name=LRR_1; Domain location=117-139; Score =13.0; E_value=0.98; Accession=PF00560.25; Description=Leucine Rich Repeat
  Pfam annotation: Domain name=LRR_1; Domain location=163-186; Score =13.5; E_value=0.78; Accession=PF00560.25; Description=Leucine Rich Repeat
  Pfam annotation: Domain name=LRR_1; Domain location=187-206; Score =8.3; E_value=7.7; Accession=PF00560.25; Description=Leucine Rich Repeat
  Pfam annotation: Domain name=LRR_1; Domain location=209-232; Score =11.9; E_value=1.6; Accession=PF00560.25; Description=Leucine Rich Repeat
  Pfam annotation: Domain name=LRR_1; Domain location=22-45; Score =10.4; E_value=3.1; Accession=PF00560.25; Description=Leucine Rich Repeat
  Pfam annotation: Domain name=LRR_1; Domain location=233-255; Score =18.1; E_value=0.038; Accession=PF00560.25; Description=Leucine Rich Repeat
  Pfam annotation: Domain name=LRR_1; Domain location=257-279; Score =11.9; E_value=1.6; Accession=PF00560.25; Description=Leucine Rich Repeat
  Pfam annotation: Domain name=LRR_1; Domain location=281-303; Score =13.3; E_value=0.87; Accession=PF00560.25; Description=Leucine Rich Repeat
  Pfam annotation: Domain name=LRR_1; Domain location=305-327; Score =15.1; E_value=0.3; Accession=PF00560.25; Description=Leucine Rich Repeat
  Pfam annotation: Domain name=LRR_1; Domain location=329-351; Score =11.2; E_value=2.2; Accession=PF00560.25; Description=Leucine Rich Repeat
  Pfam annotation: Domain name=LRR_1; Domain location=353-374; Score =4.4; E_value=43; Accession=PF00560.25; Description=Leucine Rich Repeat
  Pfam annotation: Domain name=LRR_1; Domain location=375-397; Score =13.3; E_value=0.84; Accession=PF00560.25; Description=Leucine Rich Repeat
  Pfam annotation: Domain name=LRR_1; Domain location=399-421; Score =19.2; E_value=0.018; Accession=PF00560.25; Description=Leucine Rich Repeat
  Pfam annotation: Domain name=LRR_1; Domain location=423-444; Score =11.5; E_value=1.9; Accession=PF00560.25; Description=Leucine Rich Repeat
  Pfam annotation: Domain name=LRR_1; Domain location=47-66; Score=7.4; E_value=12; Accession=PF00560.25; Description=Leucine Rich Repeat
  Pfam annotation: Domain name=LRR_1; Domain location=69-91; Score =15.2; E_value=0.28; Accession=PF00560.25; Description=Leucine Rich Repeat
  Pfam annotation: Domain name=LRR_1; Domain location=93-115; Score =15.7; E_value=0.19; Accession=PF00560.25; Description=Leucine Rich Repeat
  Pfam annotation: Domain name=Pkinase; Domain location=563-819; Score=- 30.6; E_value=1.1e-06; Accession=PF00069.17; Description=Protein kinase domain
  Pfam annotation: Domain name=Pkinase_Tyr; Domain location=533-819; Score=-98.4; E_value=3.5e-07; Accession=PF07714.9; Description =Protein tyrosine kinase
  Pfam module annotation: Pfam domain module=LRR_1::LRR_1::LRR_1::LRR _1::LRR_1::LRR_1::LRR_1::LRR_1::LRR_1::LRR_1::LRR_1::LRR_1::LRR _1::LRR_1::LRR_1::LRR_1::LRR_1::Pkinase::Pkinase_Tyr; Domain location= 117-139::163-186::...
  Pfam module annotation: Domain location=187-206::209-232::22-45::233 -255::257-279::281-303::305-327::329-351::353-374::375-397::399 -421::423-444::47-66::69-91::93-115::563-819::533-819
  Subcellular localization annotation: CTP_CleavageSite=49; ConfidenceScore=5.48e-01
SSFNLSSNMLSDPLSNFSAFPQLEVLDLSVNSFTSENLSADLGSFLKLRSLNVSANKLNGEVPTSMVGSLLELVLSGNRLSGSIPPDLFKYENLTLLDLSQNVLTGVVPDKFMNLSKFETLLLSGNKLIGEIPPSLSNVRTLSRFAANQNNFNGSVPSNITKHVRMLDLSYNNLNGMIPLDFLSHPGLQSVDLTTNMLEGSIPRNFSPSLYRLRLGGNRLSGNISDSICDGMGLTYLELDNNQLTGNIPSELGNCKNLSLLSLASNKLQGQVPPAISSLDKLVVLKLQNNSLNGPIPYAFSDLKSLSILNLSQNLLTGDIPSGIFELQKLSILDLHDNSISGAIPISVSLSKLLIELNLGNNALAGTIPTMPTTLTTSLNLSHNNLSGSIPSDIGYLSELEILDLSYNSLSGEVPSSLGNLQSLTQLVLSYNDLSGSVPIFRQNVSIHIEGNPDVVNGTGDKNGIHTTSTRKRHTIVIIIFTIAGALVGLCLLAAIVMMSLSKRIYRVEDEGLPAGESVPQITNGCLITMNSIHTSAIEFTKAMEAVCNHQNIFLKTRFCTYYKVVMPNGSTYSVKKLNSSDKIFQIGNQEKFAREIEVLGKLTNSNVMVPLAYILTADSAYLLYEHGYKGTVSDLLHGEKSDNIDWPSRYSIALGVAQGLTFLHGCTQPVLLLDLSTRTIHLKSSIEPQIGDIELYKIIDPSRSTGSFSTIAGTVGYIPPEYAYTMRLTMAGNVYSFGVILLELLTGKPSVSDGIELAKWALSLSGRPEQREQILDTRVSGTSIAVHSQMLSVLNIALSCVAFSPDARPKMRNVLRMLFNAK

SEQ ID NO: 101261 - protein, 73 aa, Setaria italica
  Transcript Sequence Number=SeqID_35287
  Homolog annotation: Hit_ID=B6UFN8; Match level="QueryCoverage=100%, HitCoverage=8%, E-value=1e-14, Identity=60%"; Hit description=ALG2 -interacting protein X
MASAAGSSNVMLAIHEKKTTPTDLYRPLRLYIASAYSEREAAAADDDLSAVRDLRAEVEQPSLPDPSSLEQRR

SEQ ID NO: 101262 - protein, 92 aa, Setaria italica
  misc_feature (69)..(69): Xaa can be any naturally occurring amino acid
  misc_feature (87)..(87): Xaa can be any naturally occurring amino acid
  Transcript Sequence Number=SeqID_35288
  Gene Ontology: Mol. function=heat shock protein binding; Cellular component=integral to membrane; Biological process=protein folding
  Homolog annotation: Hit_ID=Q10MW6; Match level="QueryCoverage=100%, HitCoverage=13%, E-value=1e-29, Identity=69%"; Hit description=DnaJ domain containing protein, expressed
  Pfam annotation: Domain name=DnaJ; Domain location=29-90; Score =126.1; E_value=1.1e-34; Accession=PF00226.23; Description=DnaJ domain
MGIPLRSLLVVSLLLSSVALHVAAAKTIDPYKVLGVDKKASQRDIQKAFHKLSLKYHPDKNKGKGAQEXFEEINNAYEILSDEEKRXNYDLY

SEQ ID NO: 101263 - protein, 41 aa, Setaria italica
  misc_feature (21)..(21): Xaa can be any naturally occurring amino acid
  Transcript Sequence Number=SeqID_35289
  Homolog annotation: Hit_ID=C0L2V3; Match level="QueryCoverage=92%, HitCoverage=17%, E-value=4e-11, Identity=84%"; Hit description =Putative phosphoglycerate dehydrogenase (Fragment)
KGLIEPISSVFVNLVNADFTXKQRGVRITEERILLDSTLAI

SEQ ID NO: 101264 - protein, 560 aa, Setaria italica
  Transcript Sequence Number=SeqID_35290
  Gene Ontology: Mol. function=oxidoreductase activity, acting on the CH-OH group of donors, NAD or NADP as acceptor; Cellular component =chloroplast; Biological process=amino acid biosynthetic process
  Homolog annotation: Hit_ID=O49485; Match level="QueryCoverage=93%, HitCoverage=86%, E-value=0.0, Identity=74%"; Hit description =Phosphoglycerate dehydrogenase-like protein
  Pfam annotation: Domain name=2-Hacid_dh; Domain location=21-330; Score=126.6; E_value=8.1e-35; Accession=PF00389.22; Description=D -isomer specific 2-hydroxyacid dehydr
  Pfam annotation: Domain name=2-Hacid_dh_C; Domain location=123-298; Score=308.6; E_value=1.3e-89; Accession=PF02826.11; Description=D -isomer specific 2-hydroxyacid dehydr
  Pfam annotation: Domain name=ACT; Domain location=487-551; Score =30.9; E_value=5.2e-06; Accession=PF01842.17; Description=ACT domain
  Pfam annotation: Domain name=ADH_zinc_N; Domain location=156-314; Score=-22.8; E_value=0.061; Accession=PF00107.18; Description=Zinc -binding dehydrogenase
  Pfam annotation: Domain name=AdoHcyase_NAD; Domain location=132-302; Score=-21.5; E_value=0.0045; Accession=PF00670.13; Description=S -adenosyl-L-homocysteine hydrolase, NAD binding domain
  Pfam annotation: Domain name=F420_oxidored; Domain location=159-398; Score=-54.3; E_value=0.037; Accession=PF03807.9; Description=NADP oxidoreductase coenzyme F420-dependent
  Pfam annotation: Domain name=IlvN; Domain location=154-323; Score= -72.6; E_value=0.0037; Accession=PF07991.4; Description=Acetohydroxy acid isomeroreductase, cata
  Pfam module annotation: Pfam domain module=2-Hacid_dh::2-Hacid_dh _C::ACT::ADH_zinc_N::AdoHcyase_NAD::F420_oxidored::IlvN; Domain location=21-330::123-298::487-551::156-314::132-302::159-398::154-323
AASTASPDAPSSGAVPGKPTVLVAEKLGAAGLALLREFANVDCSYGLSPEELRAKISLCDALIVRSGTKVGRDVFEASGGRLRVVGRAGVGIDNVDLAAATEHGCLVVNAPTANTVAAAEHGIALLTAMARNIAQADASLKAGTWQRNKYVGVSLVGKTLAILGFGKVGSEVARRAKGLGMHVIAHDPYASADRARAIGVELVSMEEAMTTADFISLHMPLTPATNKMLNDEAFAKMKKGVRIINVARGGVIDEEALVRALDSGVVAQAALDVFTKEPPAPDNKLVLHENVTVTPHLGASTVEAQEGVAIEIAEAVIGALKGELAASAVNAPMVPAEVLSELAPFVVLAEKLGRLAVQLVAGGGGIKSVKVTYASARAPDDLDTRLLRAMITKGLIEPISSVFVNLVNADFTAKQRGVRITEERILLDGSPETPIDYIQVQIANVESKFPSAISETGEITVEGRVKDGVPHLTKVGAFQVDVSLEGSLILCRQVDQPGMIGSVGSVLGEENVNVSFMSVGRLAPRKHAVMAIGVDEEPSKGTLTRIGEIPAIEEFVFLKL

SEQ ID NO: 101265 - protein, 212 aa, Setaria italica
  Transcript Sequence Number=SeqID_35291
  Gene Ontology: Mol. function=nucleotide binding; Biological process =defense response
  Homolog annotation: Hit_ID=Q01JX4; Match level="QueryCoverage=65%, HitCoverage=10%, E-value=2e-34, Identity=56%"; Hit description =B0809H07.6 protein
LEKLILSWKDTNDDISISEAEEGSSPTDDSDSSYTNDDISISEAEKGSSPMDDSDEEGRSPMDDSDPNYGPLINTETERERSQMDGSNNSPRSGPFIDMAHDVLEGLEPHQNLKHLQISGYSGSTSPAWLATSVTFLQALHLDDCGEWKILPSLESLKFLTKLKLSNMQKVKKVSIAPLEELVLINMPKLECCSCNSVMDLNSSLRVLKFEQ

SEQ ID NO: 101266 - protein, 88 aa, Setaria italica
  Transcript Sequence Number=SeqID_35292
RLEDVQMGCGRDDKLVKSCARGDKNNRATDYGQKSVFLRPFPPFPHVIHSHKNKNLSTTAAKTLQAAVEIRFLLHEEESVPRRLNWIH

SEQ ID NO: 101267 - protein, 105 aa, Setaria italica
  misc_feature (85)..(85): Xaa can be any naturally occurring amino acid
  Transcript Sequence Number=SeqID_35293
  Gene Ontology: Mol. function=aspartic-type endopeptidase activity; Biological process=DNA integration
  Homolog annotation: Hit_ID=Q84T51; Match level="QueryCoverage=60%, HitCoverage=3%, E-value=1e-11, Identity=43%"; Hit description =Putative copia-type pol polyprotein
VSLQYGDAYAAEADSNDDEEEEGIEDEEENLDEDVRAPAGVIMTKAHVVTIAQYIDWNTLEEYNDPILNEIVSMCKQRKIYDLMXYKHDWNTEIIAQFFATLYFW

SEQ ID NO: 101268 - protein, 383 aa, Setaria italica
  Transcript Sequence Number=SeqID_35294
  Gene Ontology: Mol. function=electron carrier activity; Cellular component=extracellular region; Biological process=response to oxidative stress
  Homolog annotation: Hit_ID=B6T6D4; Match level="QueryCoverage=84%, HitCoverage=92%, E-value=1e-151, Identity=80%"; Hit description =Peroxidase 27
  Pfam annotation: Domain name=peroxidase; Domain location=89-346; Score=386.6; E_value=4.3e-113; Accession=PF00141.15; Description =Peroxidase
AYVRSARLESAKAKQPIAYCFFFSPSVGDRLHFCYCTTMAVRVLPLPPVLVLPLLLALVASVHGYGGYGDGKLRVGFYKDSCPDAEAIVREIVAKAVHKDPTANAPLLRLHFHDCFVRGCEGSVLINSTKGNTAEKDAKPNHTLDAFDVIDDIKEALEKRCPGTVSCADILAIAARDAVSLATKVVAKGEWSKDGNLYEVETGRRDGSVSSAKEAVKNLPDSFDGIRKLIKRFASKNLSLKDLTVLSGAHAIGKSHCPSIAKRLRNFTENRDSDPTLDRAYADRLRRRCWRPKDKTTELEMVPGSSETFDTAYYGLVTKRRGLFHSDEALLRNDVTKGLVYRYRDSPETTFLRDFGVSMVNMGRVGVLTGSQGEIRKKCAFVN

SEQ ID NO: 101269 - protein, 119 aa, Setaria italica
  Transcript Sequence Number=SeqID_35295
  Gene Ontology: Mol. function=nucleotide binding; Biological process =defense response
  Homolog annotation: Hit_ID=Q9XEQ9; Match level="QueryCoverage=85%, HitCoverage=7%, E-value=6e-36, Identity=70%"; Hit description =Disease resistance protein RPM1 homolog
SPTQSSDSDSMSLFYKRIFGSEDSCPINLKDVATDIIKRCGGLPLAIITMASLLATKSGRREEWLDVCSSIGLGLQNYKVEEMERILSLSYNDLPYHLKTCLLYLSMYPEDYKVDIVSV

SEQ ID NO: 101270 - protein, 118 aa, Setaria italica
  Transcript Sequence Number=SeqID_35296
  Homolog annotation: Hit_ID=Q9LPK9; Match level="QueryCoverage=98%, HitCoverage=90%, E-value=2e-10, Identity=37%"; Hit description =F24J8.11 protein
  Subcellular localization annotation: CTP_CleavageSite=64; ConfidenceScore=5.34e-01
MAHTMTPLSTAQNTTSILKIAPKSPTLKNSSDLSLGAKCDTRRALVCGLIAAGAGAMLGPDIASAASKRRPPPPSPTEEKKDPNVSGVQAKVLASKRRKEAMKEAVAKLREKGKPVDK

SEQ ID NO: 101271 - protein, 374 aa, Setaria italica
  Transcript Sequence Number=SeqID_35297
  Gene Ontology: Mol. function=sugar:hydrogen symporter activity; Cellular component=integral to membrane; Biological process =carbohydrate transport
  Homolog annotation: Hit_ID=B6UBN6; Match level="QueryCoverage=100%, HitCoverage=93%, E-value=0.0, Identity=90%"; Hit description =Nucleotide-sugar transporter/ sugar porter
  Pfam annotation: Domain name=Nuc_sug_transp; Domain location=75-311; Score=36.8; E_value=1.2e-15; Accession=PF04142.7; Description =Nucleotide-sugar transporter
  Pfam annotation: Domain name=TPT; Domain location=180-320; Score= -36.8; E_value=0.092; Accession=PF03151.8; Description=Triose -phosphate Transporter family
  Pfam annotation: Domain name=UAA; Domain location=10-326; Score= -153.3; E_value=0.011; Accession=PF08449.3; Description=UAA transporter family
  Pfam module annotation: Pfam domain module=Nuc_sug_transp::TPT::UAA; Domain location=75-311::180-320::10-326
HRSTVSSRQRALNVLLVSGDCVLAGLQPILVYMSKVDGKFKFSPISVNFLTEITKIIFAIIMLFIQARRLKMGDKPLLTVSTFMQAARNNVLLAVPAFLYAINNYLKFIMQLYFNPASVKMLSNLKVLVIAVLLKIIMKRRFSTIQWEALALLLIGISVNQLKSLPEGSSALGLPVAAGAYLYTFFFVTVPALASVYNEKALKSQFDTSIYLQNLFLYGYGAIFNFLGLVITAIIQGPSSFNILEGHSKATMFLICNNAAQGILSSFFFKYADTILKKYSSTIATIFTGVASAVLFGHTLTINFVLGISIVIISMHQYLSNQIKDEVPSSKIEMAEAHDHSRVKESVYVNVTDSVASEAKHRHGSDERQPLLPV

SEQ ID NO: 101272 - protein, 66 aa, Setaria italica
  Transcript Sequence Number=SeqID_35298
MAQEQAETKYMGIEQENESLTSTLPTREGWWEPFFFLQGCWLSTKMTRSVMAMKPQFHPRHDDIIL

SEQ ID NO: 101273 - protein, 100 aa, Setaria italica
  Transcript Sequence Number=SeqID_35299
  Gene Ontology: Cellular component=plasma membrane; Biological process= ubiquitin-dependent protein catabolic process
  Homolog annotation: Hit_ID=Q8H485; Match level="QueryCoverage=99%, HitCoverage=26%, E-value=2e-19, Identity=53%"; Hit description=Tubby- like F-box protein 11
MPFSSMIQEMKGEIGAISRRGLLRSRSQSTGRVQRVEPDEAAMRESSWAQVPPELLRVVLAKVEAGEARWPGRGAVVACAGVCRGWRGTVKEIVPVPEAY

SEQ ID NO: 101274 - protein, 91 aa, Setaria italica
  Transcript Sequence Number=SeqID_35300
NGSREGQYNVKIQLQSEGHVCQLCLPQTQNKKQNELITRKVTYHTRTHRFKFMQTSCQLASTVWSLSEQDMSWLRLSSIVLASFVDTRERI

SEQ ID NO: 101275 - protein, 100 aa, Setaria italica
  Transcript Sequence Number=SeqID_35301
  Gene Ontology: Mol. function=phosphoprotein phosphatase activity; Cellular component=cytoplasm; Biological process=negative regulation of tyrosine phosphorylation of Stat3 protein
  Homolog annotation: Hit_ID=B6TM39; Match level="QueryCoverage=100%, HitCoverage=43%, E-value=8e-53, Identity=98%"; Hit description =Serine/threonine protein phosphatase
MSSPHGGLDDQIERLMQCKPLPEPEVRALCDKAKEILMEESNVQPVKSPVTICGDIHGQFHDLAELFRIGGKCPDTNYLFMGDYVDRGYYSVETVTLLVA

SEQ ID NO: 101276 - protein, 161 aa, Setaria italica
  misc_feature (25)..(25): Xaa can be any naturally occurring amino acid
  misc_feature (66)..(66): Xaa can be any naturally occurring amino acid
  misc_feature (94)..(94): Xaa can be any naturally occurring amino acid
  misc_feature (115)..(115): Xaa can be any naturally occurring amino acid
  Transcript Sequence Number=SeqID_35302
  Gene Ontology: Mol. function=phosphoprotein phosphatase activity; Cellular component=cytoplasm; Biological process=negative regulation of mitotic cell cycle
  Homolog annotation: Hit_ID=Q10BT5; Match level="QueryCoverage=84%, HitCoverage=41%, E-value=2e-60, Identity=86%"; Hit description =Serine/threonine-protein phosphatase PP2A-2 catalytic subunit
RYPQRITILRGNHESRQLIYFLICXITQVYGFYDECLRKYGNANVWKTFTDLFDYFPLTALVESEXFCLHGGLSPSIETLDNIRNFDRVQEVPXHEGPMCDLLWSDPDDRCGWGXISPRGAGYTFGQVHKLFGITNCSGAYHISLCIDTAIFCVVPGYIGA

SEQ ID NO: 101277 - protein, 59 aa, Setaria italica
  misc_feature (12)..(12): Xaa can be any naturally occurring amino acid
  misc_feature (15)..(15): Xaa can be any naturally occurring amino acid
  Transcript Sequence Number=SeqID_35303
  Gene Ontology: Mol. function=phosphoprotein phosphatase activity; Cellular component=cytoplasm; Biological process=negative regulation of tyrosine phosphorylation of Stat3 protein
  Homolog annotation: Hit_ID=Q10BT5; Match level="QueryCoverage=96%, HitCoverage=18%, E-value=4e-24, Identity=94%"; Hit description =Serine/threonine-protein phosphatase PP2A-2 catalytic subunit
MSKKVVTIFSAXPNXCYRCGNMASILEVDDCREHTFIQFEPAPRRGEPDVTRRTPDYFL

SEQ ID NO: 101278 - protein, 90 aa, Setaria italica
  Transcript Sequence Number=SeqID_35304
  Gene Ontology: Mol. function=phosphoprotein phosphatase activity; Cellular component=cytoplasm; Biological process=negative regulation of mitotic cell cycle
  Homolog annotation: Hit_ID=B6TM39; Match level="QueryCoverage=100%, HitCoverage=38%, E-value=8e-48, Identity=100%"; Hit description =Serine/threonine protein phosphatase
  Pfam annotation: Domain name=Metallophos; Domain location=4-89; Score= 41.7; E_value=2.8e-09; Accession=PF00149.20; Description=Calcineurin -like phosphoesterase
PVKSPVTICGDIHGQFHDLAELFRIGGKCPDTNYLFMGDYVDRGYYSVETVTLLVALKVRYPQRITILRGNHESRQITQVYGFYDECLRK

SEQ ID NO: 101279 - protein, 95 aa, Setaria italica
  Transcript Sequence Number=SeqID_35305
  Gene Ontology: Mol. function=phosphoprotein phosphatase activity; Cellular component=cytoplasm; Biological process=negative regulation of tyrosine phosphorylation of Stat3 protein
  Homolog annotation: Hit_ID=Q10BT5; Match level="QueryCoverage=100%, HitCoverage=30%, E-value=5e-51, Identity=98%"; Hit description =Serine/threonine-protein phosphatase PP2A-2 catalytic subunit
SAGYTFGQDISEQFNHTNNLRLIARAHQLVMEGFNWAHEQKVVTIFSAPNYCYRCGNMASILEVDDCREHTFIQFEPAPRRGEPDVTRRTPDYFL

SEQ ID NO: 101280 - protein, 263 aa, Setaria italica
  Transcript Sequence Number=SeqID_35306
  Gene Ontology: Mol. function=phosphoprotein phosphatase activity; Cellular component=cytoplasm; Biological process=negative regulation of tyrosine phosphorylation of Stat3 protein
  Homolog annotation: Hit_ID=Q10BT5; Match level="QueryCoverage=100%, HitCoverage=85%, E-value=1e-156, Identity=100%"; Hit description =Serine/threonine-protein phosphatase PP2A-2 catalytic subunit
  Pfam annotation: Domain name=Metallophos; Domain location=4-199; Score=142.2; E_value=1.6e-39; Accession=PF00149.20; Description =Calcineurin-like phosphoesterase
PVKSPVTICGDIHGQFHDLAELFRIGGKCPDTNYLFMGDYVDRGYYSVETVTLLVALKVRYPQRITILRGNHESRQITQVYGFYDECLRKYGNANVWKTFTDLFDYFPLTALVESEIFCLHGGLSPSIETLDNIRNFDRVQEVPHEGPMCDLLWSDPDDRCGWGISPRGAGYTFGQDISEQFNHTNNLRLIARAHQLVMEGFNWAHEQKVVTIFSAPNYCYRCGNMASILEVDDCREHTFIQFEPAPRRGEPDVTRRTPDYFL

SEQ ID NO: 101281 - protein, 82 aa, Setaria italica
  Transcript Sequence Number=SeqID_35307
  Subcellular localization annotation: CTP_CleavageSite=13; ConfidenceScore=5.66e-01
RARGGTAPARRTTCAAGSAPAPPPPAPSRPPRRGGSSARGAGPGRWTPPPPPTASTAPSPPPGPLPPRPPWPPPPPRNPNPR

SEQ ID NO: 101282 - protein, 48 aa, Setaria italica
  Transcript Sequence Number=SeqID_35308
NTRNYLFYCYKRCAVKKIGQLMRRSYCSVDDFILGSTCSLVLSFGSFR

SEQ ID NO: 101283 - protein, 79 aa, Setaria italica
  Transcript Sequence Number=SeqID_35309
MELPHIFSCLLFAGTRVFSSIEGATTSDSTHFNKFLEADVSSEYSDTASSITVATAEIPRSESSSSCHMDYRQEVEFIK

SEQ ID NO: 101284 - protein, 397 aa, Setaria italica
  misc_feature (386)..(386): Xaa can be any naturally occurring amino acid
  Transcript Sequence Number=SeqID_35310
STEIVSFTFTSPVDKSLHSVHSPNHSVEKQFIENLNAVSTSSNTSNTKLDVIDGDYLGLLLEQKLRELTSGVRSPYFNPAKGVKVHGTSTALEDTASACETSSIASTDYDRESMQSFNDGKATLPQTDLATKSGQSFQPAKYDRDVTDRAELEHLRQSPHSTWEASISMETCSSSESLRSANGTRVFSSIEGATTSDSTHFNKFLEADVSSEYSDTASSITVATAEIPRSESSSSCHMDYRQEVEFIREILNASSSCLERFGDSDILDPHLLEELNGNTRFLAGEDGKGYRLRRRLLFDCVSELLTVKCAYYFNAGYGSWFMGMAILQSLSAEEIHREMTSLKVAEEWMVDELVYREMSSPLGSWVDFKMDSYQAGGDIAAELLGXLIDEVVVDLLT

SEQ ID NO: 101285 - protein, 220 aa, Setaria italica
  Transcript Sequence Number=SeqID_35311
IPADNTKNIDRNSTHSSNQFNVNNDLQSNSSEENCSKKTVHSTEMSRKVDQKDDGHIPDPQHTISESFAEEKLRKRESNLGPEDKSASRNNQILGYSRRCSSKSVSPEANLRSVHQTTSSQCFEGNTSRTEFNVTPRKNNQDFSWHADTQGLQENEVIKHVVNRSGGGHAQRRKSILASFSSKAPNEAPDSETGISSSPLSSKESASEAAVSNLGRSPAE

SEQ ID NO: 101286 - protein, 72 aa, Setaria italica
  Transcript Sequence Number=SeqID_35312
  Subcellular localization annotation: CTP_CleavageSite=32; ConfidenceScore=5.37e-01
HQATKIVTQLHVFTSTKAFRARFRGRDRALPTATRKPRLIFLASPQVLDQLINVLLLPRRVPKNFPQLPGIA

SEQ ID NO: 101287 - protein, 120 aa, Setaria italica
  misc_feature (30)..(30): Xaa can be any naturally occurring amino acid
  Transcript Sequence Number=SeqID_35313
  Gene Ontology: Mol. function=oxidoreductase activity, acting on single donors with incorporation of molecular oxygen, incorporation of two atoms of oxygen; Cellular component=plasma membrane; Biological process=...
  Gene Ontology: Biological process=methionine biosynthetic process
  Homolog annotation: Hit_ID=B6U3W8; Match level="QueryCoverage=83%, HitCoverage=53%, E-value=4e-38, Identity=80%"; Hit description=1,2 -dihydroxy-3-keto-5-methylthiopentene dioxygenase 4
  Pfam annotation: Domain name=ARD; Domain location=1-79; Score=1.7; E _value=1.6e-05; Accession=PF03079.6; Description=ARDARD' family
ELKEREQRHARCEEIRYCLRAAGNFRIVRXDKDDKWIRIWIKEGDMIILPAGIYHRFTLDSANYVKLMRLFIGEPVWTALNRPQEGHPARQEYVKNVMANTGFALDKTTTRNTRPLTNRN

SEQ ID NO: 101288 - protein, 182 aa, Setaria italica
  Transcript Sequence Number=SeqID_35314
  Gene Ontology: Mol. function=oxidoreductase activity, acting on single donors with incorporation of molecular oxygen, incorporation of two atoms of oxygen; Cellular component=plasma membrane; Biological process=...
  Gene Ontology: Biological process=methionine biosynthetic process
  Homolog annotation: Hit_ID=B6U3W8; Match level="QueryCoverage=100%, HitCoverage=100%, E-value=4e-94, Identity=90%"; Hit description=1,2 -dihydroxy-3-keto-5-methylthiopentene dioxygenase 4
  Pfam annotation: Domain name=ARD; Domain location=4-153; Score=244.3; E_value=3e-70; Accession=PF03079.6; Description=ARDARD' family
  Pfam annotation: Domain name=Cupin_2; Domain location=73-147; Score =29.2; E_value=1.7e-05; Accession=PF07883.3; Description=Cupin domain
  Pfam module annotation: Pfam domain module=ARD::Cupin_2; Domain location=4-153::73-147
MAPRAWIVGEKGEDLQGPKEFLPLSKLEDVGVLYWQLDPKKSESEEELAKIRKERGYSYMDLIEICPDKLENYEEKVKNFFTEHMHADEEIRYCLEGSGYFDVRDKDDKWIRIWIKEGDMIILPAGIYHRFTLDSANYVKLMRLFIGEPVWTALNRPQEGHPARQEYVKNVMANTGFALAAH

SEQ ID NO: 101289 - protein, 86 aa, Setaria italica
  Transcript Sequence Number=SeqID_35315
CHCSLCCCCFSYNFFFNVETRKALACSRRNFQLQISGWAREEHEHRRRRAPPPPRGRAGMTPPSEPRRRRGHHAQAAAVAEAPEVS

SEQ ID NO: 101290 - protein, 138 aa, Setaria italica
  Transcript Sequence Number=SeqID_35316
  Homolog annotation: Hit_ID=B9SRZ4; Match level="QueryCoverage=93%, HitCoverage=93%, E-value=5e-47, Identity=71%"; Hit description =Transporter, putative
  Pfam annotation: Domain name=Vps55; Domain location=16-133; Score =187.9; E_value=2.9e-53; Accession=PF04133.6; Description=Vacuolar protein sorting 55
MALSRSMRTCLHSGRLALLAILVSGGIVLQILACALYNNWWPMLTVLMYLILPMPLIFFLGSDTSSIMSNGGDGWVNFTKFLTGASIVGSIAIPSILKHAGVIGWGALTMELSSFVVFGVAILWFIQMSSEDEYSSVF

SEQ ID NO: 101291 - protein, 76 aa, Setaria italica
  Transcript Sequence Number=SeqID_35317
  Gene Ontology: Mol. function=nucleoside-triphosphatase activity; Biological process=protein transport
  Homolog annotation: Hit_ID=Q6Z7F0; Match level="QueryCoverage=81%, HitCoverage=9%, E-value=1e-29, Identity=100%"; Hit description =Putative ATP-dependent Clp protease ATP-binding subunit ClpX1 (CLPX)
LSALEVFQCAPFFQVESGDLIAYGLIPEFIGRFPILVSLAALNEDQLVQVLMEPKNALGKQFKKLFSMNNVKLHFT

SEQ ID NO: 101292 - protein, 545 aa, Setaria italica
  Transcript Sequence Number=SeqID_35318
  Gene Ontology: Mol. function=nucleoside-triphosphatase activity; Biological process=protein transport
  Homolog annotation: Hit_ID=Q6Z7F0; Match level="QueryCoverage=98%, HitCoverage=84%, E-value=0.0, Identity=81%"; Hit description =Putative ATP-dependent Clp protease ATP-binding subunit ClpX1 (CLPX)
  Pfam annotation: Domain name=AAA; Domain location=196-408; Score =13.3; E_value=1.6e-06; Accession=PF00004.21; Description=ATPase family associated with various cellular activities (AAA)
  Pfam annotation: Domain name=AAA_2; Domain location=192-398; Score =230.8; E_value=3.4e-66; Accession=PF07724.6; Description=ATPase family associated with various
  Pfam annotation: Domain name=ClpB_D2-small; Domain location=404-497; Score=50.7; E_value=5.6e-12; Accession=PF10431.1; Description=C -terminal, D2-small domain, of ClpB pr
  Pfam module annotation: Pfam domain module=AAA::AAA_2::ClpB_D2-small; Domain location=196-408::192-398::404-497
PPAAPGGYQALNLCPNCRSAYFFRPHDLAPLQGTFVEIGRVRADLLDHPAARARDSSFWEAIRTSSSSRDDGDGGGVAVHVPPGPPFHPNLNVVRVAGGGGGGGGGGGAGGEEGAGNEGWGGSSLGKDLPTPKEICKGLDKYVIGQDRAKKVLSVAVYNHYKRIYHQSLQKGSGADSGGFDGEADDDDNVELEKSNVLLMGPTGSGKTLLAKTLARFVNVPFVIADATTLTQAGYVGEDVESILYKLLTVADFNVQAAQQGMVYIDEVDKITKKAESLNISRDVSGEGVQQALLKMLEGTIVNVPEKGARKHPRGDNIQIDTKDILFICGGAFVDLEKTISERRQDSSIGFGAPVRANMRGSGISSAQVTSSLLESVESGDLIAYGLIPEFIGRFPILVSLAALNEDQLVQVLMEPKNALGKQFKKLFSMNNVKLHFTDGALRIIAKKAMSKNTGARGLRTILENILMDSMYEIPDAKSGEKRIDAVVVDEDAVGSVDQPGCGAKILYGDGALDQYLSKIKASGDGAGSEVDGEAELSPSRAIGM

SEQ ID NO: 101293 - protein, 72 aa, Setaria italica
  Transcript Sequence Number=SeqID_35319
QFINHLVNQLAAHRFLKISCQLEKRAKISSAYSLLKAIELELQSYLSAVDVRLDKYHSINQAASEMFEEGSV

SEQ ID NO: 101294 - protein, 133 aa, Setaria italica
  Transcript Sequence Number=SeqID_35320
  Gene Ontology: Mol. function=zinc ion binding
  Homolog annotation: Hit_ID=Q5JMV5; Match level="QueryCoverage=90%, HitCoverage=10%, E-value=4e-10, Identity=31%"; Hit description=Far -red impaired response-like
LLQSSRSNGLQKDAIENFFCQYDIFQKNVISPEDGYGLESTQKRQCTAQGSQVERHAAEVYTMGMFLKFQKELLDASAFNVFEIESGRVYAVKKTLDYEEAEFPGDSFSVEVDLGNNMFNCICSKFERDGMLC

SEQ ID NO: 101295 - protein, 100 aa, Setaria italica
  Transcript Sequence Number=SeqID_35321
LARSRQRYRGRDRRKRMEERCAKSSPLLPAQTMTERNLKYYQEMSGTNGESGMHQGNESANRESYSLVVSARNKVREPRKEAEKESEMAMVETEVKGMGL

SEQ ID NO: 101296 - protein, 76 aa, Setaria italica
  Transcript Sequence Number=SeqID_35322
  Gene Ontology: Mol. function=zinc ion binding
PEHYIKQRWTKKFREQELQKLCTEKTGSTASQNARYAVLMNRTAEIGATVSKDPKQSQVFLEELERIQQKLSSGAS

SEQ ID NO: 101297 - protein, 673 aa, Setaria italica
  misc_feature (575)..(575): Xaa can be any naturally occurring amino acid
  misc_feature (606)..(606): Xaa can be any naturally occurring amino acid
  misc_feature (648)..(648): Xaa can be any naturally occurring amino acid
  Transcript Sequence Number=SeqID_35323
  Gene Ontology: Mol. function=zinc ion binding
  Homolog annotation: Hit_ID=Q8H3L3; Match level="QueryCoverage=85%, HitCoverage=51%, E-value=3e-98, Identity=34%"; Hit description =Putative far-red impaired response protein
  Pfam annotation: Domain name=FAR1; Domain location=113-195; Score =57.7; E_value=4.3e-14; Accession=PF03101.7; Description=FAR1 family
  Pfam annotation: Domain name=MULE; Domain location=317-413; Score =116.7; E_value=7.8e-32; Accession=PF10551.1; Description=MULE transposase domain
  Pfam annotation: Domain name=SWIM; Domain location=597-633; Score =23.1; E_value=0.0011; Accession=PF04434.9; Description=SWIM zinc finger
  Pfam module annotation: Pfam domain module=FAR1::MULE::SWIM; Domain location=113-195::317-413::597-633
MLAPEHEAGEHVNLTTEDSLQQSPIFLWNDTETNRRSEIQALETGDTFVQELDQENGNAILNGDEDLNECQKDQAEAEADGDEDYMFPSPEEMEKARPPEVGMVFPTLQDAHRFISVYGQVTGFAVIKGTNYKHKKITFVCNKSRKAKETDTRQRKRRRDAVEHTQCRMKMTVKLVADRWEVTAAMNEHNHPLWCSPLLTRFFMSHKDMSEEERHFSRILQESRIKPTKIMEIFRKLQGRLKNIPARKVDSNNLKQSDRLMKTRNTDIGSTLEHVRRLQKEQPGFYYAMKTDEDSTIRSIFWTDARARLDYALYGDFIHFNTTCRTNAYHMPFASLIGINGHGKPTVFGWALLENDEAETFSWLFRTFLDVMDGKKPSIIMTHQDSAIQKSIAEVFPTVFHRFSMWHVMREAAAEFGGFMVNRPGMEADLTRLVTNSLTTEEFENDWKTMLEKYAAELNAHLKHMYWTRSMWVPVYFKHVFCPFIRSSGSCENTNSIFKDYVLQEDTIETFIRQYNIFQESVSTDRFESTRQKPKYCTRQPIERHAAEIYTMGLFLKFQKELLDASAFNVFKKEXDRIYMVKRMLDYEDSEFLHYTFSVEVDMKNXTFNCICLKFERDGILCCHVLRLFTQFGINEIPEHYIKQRWTXKFREQELQKLHGTEKTRSTVSQNAL

SEQ ID NO: 101298 - protein, 54 aa, Setaria italica
  Transcript Sequence Number=SeqID_35324
DCCFRLGFSCAQELSSKSCKLIWMLQSQCTQYLLEKTKWTIQFGNVSVILIEFL

SEQ ID NO: 101299 - protein, 104 aa, Setaria italica
  Transcript Sequence Number=SeqID_35325
MEGATGVGASECERKPLSEVVGDCVQRWFQDAFKEARKGDVANQVLVAQMFFSGYGVPKNEYKGRQWMDRASKYRSSALKVGMKRPGYNASDSDSDEANDDANQ

SEQ ID NO: 101300 - protein, 104 aa, Setaria italica
  Transcript Sequence Number=SeqID_35326
  Subcellular localization annotation: CTP_CleavageSite=38; ConfidenceScore=5.01e-01
YSFSPASLREQSNRSTAHHLSWITRTATDVGCTTLVCSVMEARSIGLSVSALGHGGRRRLDVGNDMAAERVLLAVSVAVGVGAEVRGSSVTTPAPGLPSPRWSL

SEQ ID NO: 101301 - protein, 79 aa, Setaria italica
  misc_feature (64)..(64): Xaa can be any naturally occurring amino acid
  Transcript Sequence Number=SeqID_35327
  Subcellular localization annotation: CTP_CleavageSite=39; ConfidenceScore=5.67e-01
MATAAAAATAASTSLRPPSASQRRLASVPRRWCWGIPVRSAGGSAFHAERRRRSTLLCAADKAXEESLKKTIEVDRLID

SEQ ID NO: 101302 - protein, 142 aa, Setaria italica
  misc_feature (57)..(57): Xaa can be any naturally occurring amino acid
  Transcript Sequence Number=SeqID_35328
FPISPPPARLASPSPLAQRPCRIVSPLVLGGCVGAEGEVNLEAAAAVAAERDETVAXAPARELVVGYALSSKKPKSFLQPKLRGLARYCGLRCAPPTITASLSRRVRVLSFQNPVVPWSPCRTGSWISELRLQASTQIWIDL

SEQ ID NO: 101303 - protein, 97 aa, Setaria italica
  Transcript Sequence Number=SeqID_35329
  Gene Ontology: Mol. function=metal ion binding
  Homolog annotation: Hit_ID=Q54EK0; Match level="QueryCoverage=90%, HitCoverage=5%, E-value=2e-19, Identity=52%"; Hit description=RING Zn finger-containing protein
RLQPLLHEHIGRDDILFDTVFSKFVAAQSGGMFLEVLEPYILKDMLGSLPPEIMQALVEHYSGKGWLQRVEQCILHMDISSLDFNQVVRLCREHGLY

SEQ ID NO: 101304 - protein, 63 aa, Setaria italica
  Transcript Sequence Number=SeqID_35330
WEKTTSLMLMKKMVRMMSKSKEFSQTLVTILETSILMWKLLQLCSRLRSKIYLLDDMNCYCNC

SEQ ID NO: 101305 - protein, 95 aa, Setaria italica
  Transcript Sequence Number=SeqID_35331
MTGEVAVSSSSGSESKSGSDDEDTERERELERVLADEPFGELQRAGADGSLALQTASAAKAAADKKARRKEGSRCPAAGDGDKQRKIDGLNRKTY

SEQ ID NO: 101306 - protein, 86 aa, Setaria italica
  Transcript Sequence Number=SeqID_35332
PVAKSLFKYGITQASCFLTPTTLRTHPEADGEREIGFGCDPCPCSCCPFRNTADIKFLFLHCIPGCPLNFSNSAAAAPPFASLGGV

SEQ ID NO: 101307 - protein, 89 aa, Setaria italica
  Transcript Sequence Number=SeqID_35333
DARARRTESPATLPPAEAPSKGKNKHKRRRKQHGKKEAPAEAPQPLSPPAPAAPSPADLEDVSGPAPSAFDVNASSRQHQHWGSPSCRP

SEQ ID NO: 101308 - protein, 132 aa, Setaria italica
  Transcript Sequence Number=SeqID_35334
  Gene Ontology: Mol. function=protein dimerization activity; Cellular component=nucleus; Biological process=regulation of transcription, DNA-dependent
  Homolog annotation: Hit_ID=B9T1D2; Match level="QueryCoverage=91%, HitCoverage=33%, E-value=3e-16, Identity=42%"; Hit description =Transcription factor TGA1, putative
  Pfam annotation: Domain name=bZIP_1; Domain location=73-132; Score =24.8; E_value=0.00034; Accession=PF00170.13; Description=bZIP transcription factor
  Pfam annotation: Domain name=bZIP_2; Domain location=73-123; Score =20.2; E_value=0.0039; Accession=PF07716.7; Description=Basic region leucine zipper
  Pfam module annotation: Pfam domain module=bZIP_1::bZIP_2; Domain location=73-132::73-123
RHMVAAGLWGEPFRPDGDAFVAPLAAAAPVTGVAVDVVVETEAKFALQAQDEAVPPVEEVAPSSDSFGHDDARPRDKTQRRLAQNREAARKSRLRKKAYIQNLETSRLKLAQLEQELTMARRQQVQLRIIQE

SEQ ID NO: 101309 - protein, 46 aa, Setaria italica
  Transcript Sequence Number=SeqID_35335
PFSIVPCAVKVVRCAIIVAAIVYPARFFSYSRLVEVELVLIALHCR

SEQ ID NO: 101310 - protein, 124 aa, Setaria italica
  Transcript Sequence Number=SeqID_35336
  Gene Ontology: Mol. function=protein domain specific binding; Cellular component=cytoplasm; Biological process=response to stress
  Homolog annotation: Hit_ID=Q6ZKC0; Match level="QueryCoverage=74%, HitCoverage=35%, E-value=4e-45, Identity=94%"; Hit description=14-3 -3-like protein GF14-C
  Pfam annotation: Domain name=14-3-3; Domain location=1-124; Score= -4.3; E_value=0.0047; Accession=PF00244.12; Description=14-3-3 protein
TLIKEYRGKIEAELSNICDGILKLLDSHLVPSSTAAESKVFYLKMKGDYHRYLAEFKTGTERKESAESTMVAYKAAQDIALAEMAPTHPIRLTCSSFLRDSSFCSMEETMRHEARRAPITFLYA

SEQ ID NO: 101311 - protein, 255 aa, Setaria italica
  Transcript Sequence Number=SeqID_35337
  Gene Ontology: Mol. function=protein domain specific binding; Cellular component=cytoplasm; Biological process=response to stress
  Homolog annotation: Hit_ID=Q6ZKC0; Match level="QueryCoverage=100%, HitCoverage=99%, E-value=1e-136, Identity=94%"; Hit description=14-3- 3-like protein GF14-C
  Pfam annotation: Domain name=14-3-3; Domain location=3-240; Score =502.5; E_value=5.6e-148; Accession=PF00244.12; Description=14-3-3 protein
MSREENVYMAKLAEQAERYEEMVEYMEKVAKTVDVEELTVEERNLLSVAYKNVIGARRASWRIVSSIEQKEESRKNEEHVAQIKEYRGKIEAELSNICDGILKLLDSHLVPSSTAAESKVFYLKMKGDYHRYLAEFKTGTERKESAESTMVAYKAAQDIALAELAPTHPIRLGLALNFSVFYYEILSSPDKACNLAKQAFDEAISELDTLGEESYKDSTLIMQLLRDNLTLWTSDLTEDGAEEGKEAPKGDAGEA

SEQ ID NO: 101312 - protein, 256 aa, Setaria italica
  Transcript Sequence Number=SeqID_35338
  Gene Ontology: Mol. function=protein domain specific binding; Cellular component=cytoplasm; Biological process=response to stress
  Homolog annotation: Hit_ID=Q6ZKC0; Match level="QueryCoverage=100%, HitCoverage=100%, E-value=1e-139, Identity=95%"; Hit description=14 -3-3-like protein GF14-C
  Pfam annotation: Domain name=14-3-3; Domain location=3-240; Score =507.8; E_value=1.5e-149; Accession=PF00244.12; Description=14-3-3 protein
MSREENVYMAKLAEQAERYEEMVEYMEKVAKTVDVEELTVEERNLLSVAYKNVIGARRASWRIVSSIEQKEESRKNEEHVNLIKEYRGKIEAELSNICDGILKLLDSHLVPSSTAAESKVFYLKMKGDYHRYLAEFKTGTERKESAESTMVAYKAAQDIALAEMAPTHPIRLGLALNFSVFYYEILNSPDKACNLAKQAFDEAISELDTLGEESYKDSTLIMQLLRDNLTLWTSDLTEDGADEGKEASKGDAGEGQ

SEQ ID NO: 101313 - protein, 258 aa, Setaria italica
  misc_feature (176)..(176): Xaa can be any naturally occurring amino acid
  misc_feature (211)..(211): Xaa can be any naturally occurring amino acid
  Transcript Sequence Number=SeqID_35339
  Gene Ontology: Mol. function=protein domain specific binding; Cellular component=cytoplasm; Biological process=response to stress
  Homolog annotation: Hit_ID=Q6ZKC0; Match level="QueryCoverage=100%, HitCoverage=100%, E-value=1e-136, Identity=94%"; Hit description=14 -3-3-like protein GF14-C
  Pfam annotation: Domain name=14-3-3; Domain location=3-242; Score =491.8; E_value=9.1e-145; Accession=PF00244.12; Description=14-3-3 protein
MSREENVYMAKLAEQAERYEEMVEYMEKVAKTVDVEELTVEERNLLSVAYKNVIGARRASWRIVSSIEQKEESRKNEEHVSLIKEYRGKIEAELSNICDGILKLLDSHLVPSSSAAESKVFYLKMKGDYHRYLAEFKTGAERKESAESTMVAYKAAQDIALAELAPTHPIRLGLAXLNFSVFYYEILNSPDKACNLAKQAFDEAISELDTXLGEESYKDSTLIMQLLRDNLTLWTSDLTEDGAEEGKEAPKGDAGEGQ

SEQ ID NO: 101314 - protein, 415 aa, Setaria italica
  Transcript Sequence Number=SeqID_35340
  Gene Ontology: Mol. function=nucleic acid binding
  Homolog annotation: Hit_ID=B6UA93; Match level="QueryCoverage=100%, HitCoverage=100%, E-value=0.0, Identity=85%"; Hit description=RNA -binding post-transcriptional regulator csx1
  Pfam annotation: Domain name=RRM_1; Domain location=110-181; Score =69.5; E_value=1.2e-17; Accession=PF00076.14; Description=RNA recognition motif. (a.k.a. RRM, RBD, o
  Pfam annotation: Domain name=RRM_1; Domain location=17-87; Score =52.8; E_value=1.3e-12; Accession=PF00076.14; Description=RNA recognition motif. (a.k.a. RRM, RBD, o
  Pfam annotation: Domain name=RRM_1; Domain location=228-292; Score =76.0; E_value=1.4e-19; Accession=PF00076.14; Description=RNA recognition motif. (a.k.a. RRM, RBD, o
  Pfam module annotation: Pfam domain module=RRM_1::RRM_1::RRM_1; Domain location=110-181::17-87::228-292
MAAPYHQPTSLEEVRTLWIGDLQYWTDENYLYGCFAHTGEVQSVKIIRNKVTSLPEGYGFIEFISHEAAEKVLQTYNGTQMPGTEHTFRLNWASFSSGERRPDAGPDHSIFVGDLAPDVTDYLLQETFRVNYPSVRGAKVVTDPNTGRSKGYGFVKFADENEKNRAMTEMNGVYCSTRPMRISAAIPKKSAGSQLQYSAAKAIYPATAYAVPQLQTVLPDSDPTNTTIFIGNLDPNVTEDELRQICVQFGELIYVKIPVGKGCGFVQYAARASAEEAVQRLHGTMIGQQAVRLSWGRSPASKQDPSAVWSQQADPNQWASTYYGYGYDTYGYAQDPSYAYGAYAGYSQYPQQVDGTGDATCVAGSHPGMEQKEEPYDPMNIPDVDKLNASYMAVHGRAMLGRSLWLKTNPLPQPT

SEQ ID NO: 101315 - protein, 195 aa, Setaria italica
  misc_feature (9)..(9): Xaa can be any naturally occurring amino acid
  Transcript Sequence Number=SeqID_35341
  Homolog annotation: Hit_ID=B9R6T0; Match level="QueryCoverage=98%, HitCoverage=53%, E-value=5e-56, Identity=56%"; Hit description =Catalytic, putative
  Pfam annotation: Domain name=DUF676; Domain location=1-183; Score =139.2; E_value=1.3e-38; Accession=PF05057.6; Description=Protein of unknown function (DUF676)
TFDGVDVMXRLAEEVTSVVENRPELRKISFVAHSLGGLIARYAIALLYERDTQKDSHEECDKNAVGNPSNQHSSGGKIAGLEPINFITFATPHLGTRSHKQIPLLRGSNKLEKMAYSLSWIAGKSGKHLFLKDIEDEKPPLLLQMVTDYGGLHFMSALRSFKRRVVYSNVCSDFYVGWRTSSIRRQHELPERQSF

SEQ ID NO: 101316 - protein, 66 aa, Setaria italica
  Transcript Sequence Number=SeqID_35342
VEELTSQFARCQQLLNSISGTISSKSTTVEGQRQSLDETRQLLDQRKELITKYRSSVEDLLKGDTR

SEQ ID NO: 101317 - protein, 161 aa, Setaria italica
  Transcript Sequence Number=SeqID_35343
VVSESVFVWCLPNLSMWPWFLTPCHMWPWLTGAKVSPAPCHKRGRAREGETTEKRGVGRILGTSRQRLSLCLPHLLQRQHRSGFHKTGEARKLERAAAVLHLWMLRGGGFDDLRPTEVLVMAVLVAAPCLTVNHGSIYRELSGGVQLRGFCGARVSEGSGG

SEQ ID NO: 101318 - protein, 159 aa, Setaria italica
  Transcript Sequence Number=SeqID_35344
MDHHHPQQYGDPYRGLVPSPQPDHHLHALQYHHQQQQPAMMSPPQAQPGLMSPPQPQQHHHASLASHFHLLHLVTRLSDAIGSGTRDQNFDALVEELTSQFARCQQLLNSISGTISSKSTTVEGQRQSLDETRQLLDQRKELITKYRSSVEDLLKGDTR

SEQ ID NO: 101319 - protein, 79 aa, Setaria italica
  Transcript Sequence Number=SeqID_35345
  Gene Ontology: Mol. function=hydrolase activity; Biological process =metabolic process
  Homolog annotation: Hit_ID=B6TNR9; Match level="QueryCoverage=100%, HitCoverage=32%, E-value=2e-35, Identity=87%"; Hit description =Isochorismatase hydrolase
IKTILVLGICTDICVLDFASSALAARNIGRVPPLQDVVVYSEGCATYNLPVEVAMDVKGAVAHPQDLMHHIGLYMAKGR

SEQ ID NO: 101320 - protein, 139 aa, Setaria italica
  Transcript Sequence Number=SeqID_35346
  Gene Ontology: Mol. function=catalytic activity; Biological process =metabolic process
  Homolog annotation: Hit_ID=Q8GXD0; Match level="QueryCoverage=100%, HitCoverage=18%, E-value=2e-22, Identity=45%"; Hit description =Putative acetyl-CoA synthetase
SASNVVMLSGFSIPKLVLQIVTIETVLRIDKPSNELAVLKDIAFTVYNKARRIPRAVSTNDMFQSPTYLGRSQSTMMHVTSPAPTLWKECLVPRMSGPTLSRETDFDAPMRSATWDNSWQPARAGLLDPSKIPDLCAQD

SEQ ID NO: 101321 - protein, 203 aa, Setaria italica
  Transcript Sequence Number=SeqID_35347
  Gene Ontology: Mol. function=catalytic activity; Biological process =metabolic process
  Homolog annotation: Hit_ID=Q8GXD0; Match level="QueryCoverage=80%, HitCoverage=21%, E-value=6e-45, Identity=54%"; Hit description =Putative acetyl-CoA synthetase
  Subcellular localization annotation: CTP_CleavageSite=46; ConfidenceScore=5.46e-01
VGSSHLSPISSISDYLQAFSKHWSVKSFLTSVSRILRDIKLTSSISTNQKESSSGPCTVIYVVCPFPDPGAILQTLVECSVSLGYVISSPERERKSLYFQVAKAQNSSACADEASASNVVMLSGFSIPKLVLQIVTIETVLRIDKPSNELAVLKDIAFTVYNKARRIPRAVSTNDMFQSPTYLGRSQSTMMHVTSPAPTLWVE

SEQ ID NO: 101322 - protein, 145 aa, Setaria italica
  misc_feature (133)..(145): Xaa can be any naturally occurring amino acid
  Transcript Sequence Number=SeqID_35348
  Subcellular localization annotation: CTP_CleavageSite=48; ConfidenceScore=5.23e-01
QKCYLSQGLHLQASFANGRLSAKCCDMPVPLFSLLITCRSSGWRGSCRLCHRSCLGALPSSLAECTVVFMLLFIVHGRCFPKWMIGRPSGDLEYLTIDCLICLYSVLHWIGVVSMKKAGKCHLVIMCFLLLPXXXXXXXXXXXXX

SEQ ID NO: 101323 - protein, 159 aa, Setaria italica
  Transcript Sequence Number=SeqID_35349
  Gene Ontology: Mol. function=ubiquitin-protein ligase activity
  Homolog annotation: Hit_ID=B9T256; Match level="QueryCoverage=92%, HitCoverage=7%, E-value=1e-27, Identity=42%"; Hit description =Ubiquitin ligase E3 alpha, putative
TILLRRQFTEAREYFVSKYIDPYCHPKDMVRRLTYPYLRRCALLWELLRSSATSPLYDNSNIWEGSHLYLSNSTQDGSSSLAMELNGISELERLFQVQSLDLILRDESVHVLALKWSQHFCEDYSSRKYRGSLFSTPAVPFRLMQLPPVYQVLLERLLF

SEQ ID NO: 101324 - protein, 280 aa, Setaria italica
  Transcript Sequence Number=SeqID_35350
  Gene Ontology: Mol. function=ubiquitin-protein ligase activity
  Homolog annotation: Hit_ID=B9T256; Match level="QueryCoverage=96%, HitCoverage=12%, E-value=3e-62, Identity=48%"; Hit description =Ubiquitin ligase E3 alpha, putative
ELIYKLAIGDATHSQIVKSLPRDLSSSDQLQNVLDSLAVYSNPCGMKQGKYVLRKSCWNELDLYHPRWNSRELQIAEERYYRFCKTSALNAQLPRWTHVFSPLRSISNVATSKAVLQIVRAVLFYAVYSEASSASRAPDNVLVTGLHLLWLALDICESERQVHADQYGMDVVQHDDESWVVLSSYTEEAFPILTYSTEVVSPESDNVKKESMLTLLVLLMHKYKEENDATFSGSKYCNIPSLIESLLKKFAKLSKKCMFTLRQMAPHVVPSTPDSSSTKE

SEQ ID NO: 101325 - protein, 99 aa, Setaria italica
  misc_feature (22)..(22): Xaa can be any naturally occurring amino acid
  Transcript Sequence Number=SeqID_35351
  Gene Ontology: Mol. function=ubiquitin-protein ligase activity; Cellular component=integral to membrane
  Homolog annotation: Hit_ID=Q9LZ94; Match level="QueryCoverage=84%, HitCoverage=10%, E-value=6e-27, Identity=70%"; Hit description =Eceriferum3 (CER3)
FRHLPVLNHASQCGAGVGIFFXSEETTILLQRSARLAFWPSPYLDTFGEEDHEMQRGKPLYLSQERYTALTYLVASHSLDRTSEVLRQTTISFYGSGSD

SEQ ID NO: 101326 - protein, 194 aa, Setaria italica
  misc_feature (58)..(58): Xaa can be any naturally occurring amino acid
  Transcript Sequence Number=SeqID_35352
  Gene Ontology: Mol. function=nucleotide binding; Biological process =defense response
  Homolog annotation: Hit_ID=A2ZP99; Match level="QueryCoverage=63%, HitCoverage=13%, E-value=3e-28, Identity=52%"; Hit description=NBS -LRR disease resistance protein
AECNVHKIVEAWSLSTVGMCNQNTIGDSPHQVILMPLLKRLSLLHCPKLRALPQDLHXSLHEIVDLPAVVWLKVKHNRSLTRIANLSKLEDLFVQDCPALDQAENLGKLKRLEMVGCAKAEQFRRCLLEEEPSNMVHRRMFSLYLQAERSWLMSTPADDFCIHLVQPLCFQGLKPWTRRVFFNYRYTFLCDMRT

SEQ ID NO: 101327 - protein, 49 aa, Setaria italica
  Transcript Sequence Number=SeqID_35353
MGKLCCSQEDDEPAFNLLGLLVTIVLALLLLMMCTPPRRRRCIAVYPCC

SEQ ID NO: 101328 - protein, 1018 aa, Setaria italica
  Transcript Sequence Number=SeqID_35354
  Gene Ontology: Mol. function=ubiquitin-protein ligase activity; Cellular component=integral to membrane
  Homolog annotation: Hit_ID=B9T256; Match level="QueryCoverage=94%, HitCoverage=46%, E-value=0.0, Identity=42%"; Hit description =Ubiquitin ligase E3 alpha, putative
MLHQSSYTDPILTYSTEVVSPESDNVKKESMLTLLVLLMHKYKEENDATFSGSKYCNIPSLIESLLKKFAKLSKKCMFTLRQMAPHVVPSTPDSSSIKESLGTSSDPMEKKAKARQHQAAIMAKMRAEQSKFAASMKSSENEGHDVPMLETDVSSSTGAVSEESLPVCSLCRDSDSKSPLCYLILLQKSRLATFVEMGHPSWDNPTQANKTSGSVKKEDSTDSLVSGSSTSEELVDDTTVEPSFDLDSMEVDAFLDFSNEQHPLIRYISSFPSGHCNGNADDTVSLEAIEADIYNSILNDVFGSSNAHIQNAEQTSPSSASSITVDSKKTRSPKRSVLGTYVSCLSAKHRHSSLYDVASKSSASVSTRNKFGPLHCDGIHISSCGHAVHQECHDRYLFSLKQRYVRRLGFEGGHIVDPDLGELLCPVCRRFANSILPASTDFSSKTLKGKPFVETLTREVVITTTSHLNTSHLQFPRALSLLESAGKTVGQSKFLKALSGKLNDTTESALEPSLRRLAMLYYHRGPSGFSASERKRLNPSLFLWDTLRYSVVSTEIASRGRMLNQSAESKSCLESLRGELNSSSGFILSLLFRVAHSARNLNRLEVLLRFEGIQLLAGSICSCISGYKDVLNATKRKGSLPPMVDPGEEGPLFPDVQFWKQCADPVLAQDPFSSLMSTLFCLPVQFVSSAEFFIPFVHLFYVVCAIQALITCYGSETFDRSSFSDCLLNDVCKTMSGYDIAREYFVSKYIDPYCHPKDMVRRLTYPYLRRCALLWELLRSSATSPLYDNSNIWEGSHLYLSNSTQDGSSSLAMELNGISELEKLFQIQSLDLILRDESVHVLALKWSQHFCEDYSSRKYRGSLFSTPAVPFRLMQLPPVYQVLLERYIKMQCPDCGSVPDEPALCLLCGKLCSPSWKPCCRTGKCLNHASQCGAGVGIFLLVRKTTILLQRSARLAFWPSPYLDTFGEEDHEMQRGKPLYLSQERYTALTYLVASHSLDRTSEVLRQTTISFYGSGSD

SEQ ID NO: 101329 - protein, 317 aa, Setaria italica
  Transcript Sequence Number=SeqID_35355
  Gene Ontology: Mol. function=nucleic acid binding; Cellular component= transcription elongation factor complex; Biological process=DNA damage response, signal transduction resulting in induction of apoptosis
  Homolog annotation: Hit_ID=Q655K6; Match level="QueryCoverage=100%, HitCoverage=40%, E-value=1e-130, Identity=76%"; Hit description =Putative RAD26
FKARDMKDLFTLQDDEGNGSTETSNIFSQLSEDVNIGVPSEGQQDQVHIASTMPSTSEAEPPSGVKGKVDENSDQADEESNILKCLFDAQGIHSAINHDAIMNANDDQKVRLEAEASQVAQRAAEALRQSRMLRSRDSFAVPTWTGRSGAAGAPSSVRRKFGSTVNSQLISSSQPPETSSSRSQSLPVGALNGKAMSSAELLAKIRGTREGAASDALEHQLNGGSGSNHVLGPSGNSGRSSNSSNPSMIVQPEVLIRQLCTFIQQNGGSASSTSITEHFKSRIQSKDMLLFKNLLKEIATLQRGANGAMWVLKPDYE

SEQ ID NO: 101330 - protein, 186 aa, Setaria italica
  Transcript Sequence Number=SeqID_35356
  Gene Ontology: Mol. function=nucleoside-triphosphatase activity; Cellular component=nucleus; Biological process=regulation of transcription from RNA polymerase II promoter
  Homolog annotation: Hit_ID=Q6ZLD7; Match level="QueryCoverage=100%, HitCoverage=42%, E-value=8e-76, Identity=73%"; Hit description =Putative RuvB-like protein 1,49-kDa TATA box-binding protein -interacting protein
MRIEEVQSTSKKQRIAIHTHIKGLGLDANGAALPLGSGFVGQAGAREGSGLIVDMIRQKRMAGRAVLFAGPPATGKTALALGISQELGSKVPFCPMVGSEVYSSEVKKTEVLMEHFRRAIGLRIKENKEVYEGEVTELSPEESESTTGGYAIVISHVIIGLKTVKGTKQLKLDPSIYDALIKEKVA

SEQ ID NO: 101331 - protein, 142 aa, Setaria italica
  Transcript Sequence Number=SeqID_35357
RTRPCATIRAPPPAAELIDETANNLLARRRGDLERGGAAAVANVIKTYIADIATNGVYGTPRPHPLSLAFFSGGATRCRGVTRWAVRELQSSAVAAAPSSCPSTTMPSSSGAAPSARLAPRPRCRRLGSTPRNPRSRDNMKL

SEQ ID NO: 101332 - protein, 391 aa, Setaria italica
  Transcript Sequence Number=SeqID_35358
  Gene Ontology: Mol. function=structural molecule activity; Cellular component=viral capsid; Biological process=oxidation reduction
  Homolog annotation: Hit_ID=B9SYK0; Match level="QueryCoverage=97%, HitCoverage=64%, E-value=1e-114, Identity=53%"; Hit description =Spore coat protein, putative
  Pfam annotation: Domain name=Cu-oxidase; Domain location=58-189; Score=-31.0; E_value=0.1; Accession=PF00394.14; Description =Multicopper oxidase
  Pfam annotation: Domain name=Cu-oxidase_2; Domain location=228-390; Score=32.2; E_value=7.5e-07; Accession=PF07731.6; Description =Multicopper oxidase
  Pfam module annotation: Pfam domain module=Cu-oxidase::Cu-oxidase_2; Domain location=58-189::228-390
VVVLTIPSLGGLMGAYRVVSPGEEAPLNLPSGEAFDRNLVLFDRDFRADGALFMNRTGNNPDVHPQWQPEYFGSVVVVNGKAWPYLRVRRRRYRFRILNASNARFFRLSLSGGLRFVHVGSDSVYLARPVATEKFLVAPSEIADVVVDFAESSAGAAVLSNDAPAPYPGDPGDKAEPVAVMKFLIEDAATEPDTSAVPASLMPHYPRPDAREAAATRRITMYEYTKNGTDEPTHLYLNARSYMEPVTETPREGTSEVWEVINLTDDNHPLHVHLALFAVLEQRSLRRVDEFRDCMVRRNDAGACGMGRHLAGGRRHVVPPQERGWKNVFKVRPSAVTRILVRFKPLASDDASPEEDSRFPFDVTTGPGYVYHCHILDHEDNEMMRPMKIVR

SEQ ID NO: 101333 - protein, 86 aa, Setaria italica
  Transcript Sequence Number=SeqID_35359
SFSRSASSSARSAARLFAGYGSPDDVDLQRDEARARSPSVDVIRRYLSKISSRLRRVASTTAAADLRLQKSRSASAAQVSAAAQSP

SEQ ID NO: 101334 - protein, 134 aa, Setaria italica
  Transcript Sequence Number=SeqID_35360
  Gene Ontology: Cellular component=intracellular
DGAAASRKAGVRAWAGSEMKPAKDYYVDAKGDHDNLAFGSLYRMDVARYRSQSMLEARGLNRSMFFNRRFGSSHIDLDSDLDGLDNKVRAGGRYYSAKNAVFERNKGFKHLKVMKGDISAMLAEDFVPFDAQSV

SEQ ID NO: 101335 - protein, 112 aa, Setaria italica
  Transcript Sequence Number=SeqID_35361
GGMSGDNKPQAWRRGRQGGRPRRASGRTAVTAEYWQRHVTPSGRGEGVLNGEENRADLDKRIDEEIARKCNVRRGKEGTLGQIEKKPNPSLALYHVRNSTYIHNRSTRPKYI

SEQ ID NO: 101336 - protein, 111 aa, Setaria italica
  Transcript Sequence Number=SeqID_35362
SIIEALYCTTMVAIQTIGNKNKRKKSLLQNQSAFTPRLTFNYTDFSYKLLLASKHHTYMLYCRCPYYCISKRLFTVAFMLFVLIKSYNEKHQCMKIHKNNNWQSFGGTRHI

SEQ ID NO: 101337 - protein, 60 aa, Setaria italica
  Transcript Sequence Number=SeqID_35363
  Gene Ontology: Mol. function=metal ion binding
  Homolog annotation: Hit_ID=B6TXY1; Match level="QueryCoverage=95%, HitCoverage=10%, E-value=4e-11, Identity=57%"; Hit description =Protein binding protein
ARERLEQLNASPSATPSKYFRVYSALLLVLSADLLWMKFCVGFTGAAEPNLFWLLFFRAT

SEQ ID NO: 101338 - protein, 153 aa, Setaria italica
  misc_feature (19)..(19): Xaa can be any naturally occurring amino acid
  Transcript Sequence Number=SeqID_35364
  Gene Ontology: Mol. function=nucleotide binding; Biological process =defense response
  Homolog annotation: Hit_ID=Q2R1D0; Match level="QueryCoverage=54%, HitCoverage=18%, E-value=1e-14, Identity=54%"; Hit description=NB -ARC domain containing protein
MLRIRDPIQVCRQLLKSMXCLIVIDGLQSTEEWDSIKAALGFEPDQTRSLIIVIANEESVATYCSENWWSVEGLEIDDALELFKRTIKGLDSRFWPADPSPADIESAKSVLSKCGGLPKVIIAVAHPIANGWRPKEDYFIQVLENHPAFGRSL

SEQ ID NO: 101339 - protein, 86 aa, Setaria italica
  Transcript Sequence Number=SeqID_35365
  Gene Ontology: Mol. function=racemase and epimerase activity, acting on carbohydrates and derivatives; Biological process=carbohydrate metabolic process
  Homolog annotation: Hit_ID=B6SPN6; Match level="QueryCoverage=87%, HitCoverage=15%, E-value=2e-19, Identity=70%"; Hit description =Protein capI
  Subcellular localization annotation: CTP_CleavageSite=34; ConfidenceScore=5.25e-01
MPSSGITAVDAAAKGMKLERYASGGALMLRRATSAKIVSASSHLLFRATVLATLALVFLFTLHYPSLLFRSFHLSAGGGGPGGAHS

SEQ ID NO: 101340 - protein, 84 aa, Setaria italica
  Transcript Sequence Number=SeqID_35366
THGNHSIIPRANLIQRTKASRSHTHSIVHFDVLTMRAQIARHLADWPRSLYLLTASPPSVHSNDDTPCNASRKLYCQVSQPSKL

SEQ ID NO: 101341 - protein, 55 aa, Setaria italica
  Transcript Sequence Number=SeqID_35367
  Homolog annotation: Hit_ID=B6TCL9; Match level="QueryCoverage=98%, HitCoverage=30%, E-value=5e-21, Identity=87%"; Hit description =Vacuolar protein sorting protein 25
  Pfam annotation: Domain name=ESCRT-II; Domain location=1-54; Score= -55.8; E_value=0.0013; Accession=PF05871.4; Description=ESCRT-II complex subunit
SETREKQVQLWKDLILDYCRSQKIHTISLEEDFPLFSNPKIERSLSHEAKEHFLC

SEQ ID NO: 101342 - protein, 57 aa, Setaria italica
  Transcript Sequence Number=SeqID_35368
HYDRFPQVQFHEYRFQSVLFSCGLCGLCSNCRRARMRTLRSIPSSAFEDSCFAFLFL

SEQ ID NO: 101343 - protein, 305 aa, Setaria italica
  Transcript Sequence Number=SeqID_35369
  Gene Ontology: Cellular component=integral to membrane; Biological process=protein transport
  Homolog annotation: Hit_ID=Q8H5X5; Match level="QueryCoverage=100%, HitCoverage=100%, E-value=1e-141, Identity=82%"; Hit description =Secretory carrier-associated membrane protein 1
  Pfam annotation: Domain name=SCAMP; Domain location=113-287; Score =372.2; E_value=9.4e-109; Accession=PF04144.5; Description=SCAMP family
MAGRYDSNPFEEEDVNPFSEQARGKAGGQSNFGGGAFYMPNPRNVPPASNSRLSPLPPEPADFSATVDIPLDSSKDLKRREKELQAREAELNKREKELKRREEAAARAGIVIEEKNWPPFLPLIHHDITNEIPSHLQRMQYVAFASFLGLVCCLFWNVIAVTTAWIKGEGVKIWLLAVIYFISGVPGAYVLWYRPLYNAMRTDSALKFGLFFLLYLFHILFCVFSAVAPPVVFEGKSLAGILPAIDLISVNALVGIFYFVGFGLFCLESLLSIWVIQQVYMYFRGSGKAAEMKRDATRGAMRAAF

SEQ ID NO: 101344 - protein, 177 aa, Setaria italica
  Transcript Sequence Number=SeqID_35370
  Gene Ontology: Cellular component=cytoplasm; Biological process =protein transport
  Homolog annotation: Hit_ID=B6TCL9; Match level="QueryCoverage=100%, HitCoverage=100%, E-value=1e-95, Identity=93%"; Hit description =Vacuolar protein sorting protein 25
  Pfam annotation: Domain name=ESCRT-II; Domain location=11-145; Score =207.8; E_value=2.8e-59; Accession=PF05871.4; Description=ESCRT-II complex subunit
MQRLGDFRLPPFFNYPPYFTLQPVRETREKQVQLWKDLILDYCRSQKIHTISLEEDFPLFSNPKIERSLSHEAKEVFLAALVSEGRAEWMDKGHKKCLVLWLRIQDWANFLINFVKDNGLEVMTIEEIRSGTDTRGTELEGIDRGVLMRALRQLEQKGKAAIFKGTSADDEGVKFSV

SEQ ID NO: 101345 - protein, 66 aa, Setaria italica
  Transcript Sequence Number=SeqID_35371
IIPVLVRSRIPGALAFYNKQLCEGISLLNSNPQGSYYGCVHTNKIMDACEVEDQITIKFSYDDAIS

SEQ ID NO: 101346 - protein, 60 aa, Setaria italica
  Transcript Sequence Number=SeqID_35372
KETECFNDTPLVEKINYEVSFLCTTPYNFTLICRLHRMMTLPHRYGGQLMDATGTPLLEP

SEQ ID NO: 101347 - protein, 43 aa, Setaria italica
  Transcript Sequence Number=SeqID_35373
MLTTILRLFPRTKCRCAIHGTDPKTGDEQTGSCPNLKASFVVG

SEQ ID NO: 101348 - protein, 192 aa, Setaria italica
  Transcript Sequence Number=SeqID_35374
  Homolog annotation: Hit_ID=Q5VPU9; Match level="QueryCoverage=99%, HitCoverage=46%, E-value=9e-61, Identity=61%"; Hit description =Carboxyl-terminal peptidase-like
  Pfam annotation: Domain name=DUF239; Domain location=109-192; Score= -43.8; E_value=2.6e-05; Accession=PF03080.7; Description=Arabidopsis proteins of unknown function
CVPISKQPAFDHPLLKNHTIQMQPSYHPRGQHGDSNIAPRPITQTWHQNGKCPENTVPIRRTKEEDVLRASSVNLYGKKRPDSIPNIHPEASVTSGHEYAVVSSADGQYYGTQININLWKPMTETAQDFSLTQLWTVAGSYANMDLNTIEAGWQVYQDFYGDNNPRLFIYWTRNAYNGTGCFISNIDLSFFY

SEQ ID NO: 101349 - protein, 200 aa, Setaria italica
  misc_feature (142)..(142): Xaa can be any naturally occurring amino acid
  misc_feature (163)..(163): Xaa can be any naturally occurring amino acid
  Transcript Sequence Number=SeqID_35375
  Gene Ontology: Mol. function=protein binding; Biological process=RNA metabolic process
  Homolog annotation: Hit_ID=Q2HSQ9; Match level="QueryCoverage=100%, HitCoverage=17%, E-value=3e-33, Identity=44%"; Hit description =Initiation factor eIF-4 gamma, middle; Up-frameshift suppressor 2
  Pfam annotation: Domain name=Upf2; Domain location=1-137; Score=73.2; E_value=9.2e-19; Accession=PF04050.6; Description=Up-frameshift suppressor 2
DEEGTVEVRRKVVQVDAKEQEDFDRELKAILQESLESRKLELARPTVNMTIPMNAFEGSKDLMAIEAADKENVCGDGEIGKPGDLGDVRVKVLVKRGHKQQTKQMLIPGDCPLVQSTKQQSAAELEEMQNIKRKILEYNERXEELDAGSLQGGDWDQGGSGNXASCWMAGRVSWVGPNRVGGVRRHYWVAGGFYRGYGRR

SEQ ID NO: 101350 - protein, 168 aa, Setaria italica
  Transcript Sequence Number=SeqID_35376
  Gene Ontology: Mol. function=oxidoreductase activity; Cellular component=cytoplasm; Biological process=oxidation reduction
  Homolog annotation: Hit_ID=A1ZED9; Match level="QueryCoverage=69%, HitCoverage=54%, E-value=2e-17, Identity=44%"; Hit description =Alkylated DNA repair protein
  Pfam annotation: Domain name=2OG-FeII_Oxy; Domain location=48-164; Score=15.2; E_value=0.0055; Accession=PF03171.12; Description=2OG -Fe(II) oxygenase superfamily
PSWAVELSTLIREAICVGDVNVGVSAEMANEDEDACPLPSDLLWREPFFDQMIGNRYNPGEGICAHVDLMRFDDGIAIVSLESACVMHFSQAEPTGTALDTLRQGDGEPRKFPVYLNPGSLVVMSGDARYLWKHEINRKPGAQLWDGRELEQHRRTSVTLRKLLASPS

SEQ ID NO: 101351 - protein, 68 aa, Setaria italica
  misc_feature (25)..(25): Xaa can be any naturally occurring amino acid
  Transcript Sequence Number=SeqID_35377
  Gene Ontology: Mol. function=nucleotide binding; Cellular component =Golgi apparatus; Biological process=small GTPase mediated signal transduction
  Homolog annotation: Hit_ID=B6UIH4; Match level="QueryCoverage=55%, HitCoverage=25%, E-value=3e-13, Identity=86%"; Hit description=ADP -ribosylation factor 3
YVCIFRPYWRCYFPNTQAIIYVVEXSETDMYVTAKEEFHAILEVMLAEDLSFAPSSLRCFSWPHLIEI

SEQ ID NO: 101352 - protein, 91 aa, Setaria italica
  Transcript Sequence Number=SeqID_35378
  Gene Ontology: Mol. function=nucleotide binding; Cellular component =Golgi apparatus; Biological process=small GTPase mediated signal transduction
  Homolog annotation: Hit_ID=B6UIH4; Match level="QueryCoverage=93%, HitCoverage=56%, E-value=1e-33, Identity=87%"; Hit description=ADP -ribosylation factor 3
  Pfam annotation: Domain name=Arf; Domain location=2-86; Score=3.8; E _value=1e-09; Accession=PF00025.13; Description=ADP-ribosylation factor family
YAQFALQFVTLTDSINAFIWQEDELKGAVVLVYANKQDLPGALDDAAITESLELHKIKSRQWAIFKTSAIKGEGLFEGLDWLSNTLKSGSS

SEQ ID NO: 101353 - protein, 182 aa, Setaria italica
  Transcript Sequence Number=SeqID_35379
  Gene Ontology: Mol. function=nucleotide binding; Cellular component =Golgi apparatus; Biological process=small GTPase mediated signal transduction
  Homolog annotation: Hit_ID=P40940; Match level="QueryCoverage=99%, HitCoverage=99%, E-value=4e-97, Identity=92%"; Hit description=ADP -ribosylation factor 3
  Pfam annotation: Domain name=Arf; Domain location=5-177; Score=415.1; E_value=1.1e-121; Accession=PF00025.13; Description=ADP-ribosylation factor family
  Pfam annotation: Domain name=MMR_HSR1; Domain location=18-129; Score =10.0; E_value=0.00012; Accession=PF01926.15; Description=GTPase of unknown function
  Pfam annotation: Domain name=Miro; Domain location=19-129; Score =26.9; E_value=3.3e-05; Accession=PF08477.5; Description=Miro-like protein
  Pfam annotation: Domain name=Ras; Domain location=19-179; Score= -56.8; E_value=4.9e-05; Accession=PF00071.14; Description=Ras family
  Pfam annotation: Domain name=SRPRB; Domain location=15-177; Score= -25.6; E_value=1.1e-05; Accession=PF09439.2; Description=Signal recognition particle receptor beta su
  Pfam module annotation: Pfam domain module=Arf::MMR_HSR1::Miro::Ras::S RPRB; Domain location=5-177::18-129::19-129::19-179::15-177
MGIVFTRLFSSLFGNREARILVLGLDNAGKTTILYRLQMGEVVSTIPTIGFNVETVQYNNIKFQVWDLGGQTSIRPYWRCYFPNTQAIIYVVDSSDTDRLVTAKEEFHAILEEDELKGAVVLVYANKQDLPGALDDAAITESLELHKIKSRQWAIFKTSAIKGEGLFEGLDWLSNTLKSGSS

SEQ ID NO: 101354 - protein, 124 aa, Setaria italica
  Transcript Sequence Number=SeqID_35380
  Gene Ontology: Mol. function=metal ion transmembrane transporter activity; Cellular component=integral to membrane; Biological process=metal ion transport
  Homolog annotation: Hit_ID=B6SZI8; Match level="QueryCoverage=82%, HitCoverage=25%, E-value=2e-46, Identity=91%"; Hit description=ZIP zinc/iron transport family protein
  Pfam annotation: Domain name=Zip; Domain location=3-121; Score=-87.9; E_value=0.024; Accession=PF02535.14; Description=ZIP Zinc transporter
  Subcellular localization annotation: CTP_CleavageSite=53; ConfidenceScore=5.41e-01
GDPCPPLFKCFSSSVPNLLFSTQAKFKLRSIVTMILFFCLTTPVGILIGLGISSVYNEDSPTALIVEGILNSVAAGILVYMALVDLLAEDFMNPKVQSRGKLQLGINVSMLVGAGLMSMLAKWA

SEQ ID NO: 101355 - protein, 417 aa, Setaria italica
  Transcript Sequence Number=SeqID_35381
  Homolog annotation: Hit_ID=Q9LI74; Match level="QueryCoverage=78%, HitCoverage=36%, E-value=7e-89, Identity=49%"; Hit description =Protein CHUP1, chloroplastic
QKKKAEVQRKLKKLKELEVEVIELRRKNKELLYEKRDLIVKLDAAEGKIVESNVVPNAREEINKLRHTNEDLTKQVEGLQMNRFSEVEELVYLRWVNACLRFELRNYQMPSGKVSARDLNKTLSPKSQERAKQLMLEYAGSERGQGDTDLESVSSMPSSPGSEDFDNVSIDSSSSRYSFLSKRPNLMQKLKRWGRSKDDSSSLASSISGSPRRKPRGPLEALMLKNAGDGTAITTFGQRDPNDILDEENVASSFQLMSKTVEGFADEKYPAYKDRHKLATERENAIKEKAGQVRAQRFGGGHSSALISSPKGALPPKLAQIKERAPAANAASSEQSSDNQNNILVVSQLKLANIEKRATRVPRPPPPRSTTASGATNTASGVQTPRPPGAPPPPPPPPGKTGGPPPPPPPPGCFLPR

SEQ ID NO: 101356 - protein, 48 aa, Setaria italica
  Transcript Sequence Number=SeqID_35382
NMNSFSSPNICRKPKLNPSTTRRYAIGMKQKQEIYEDNAQDSDAAHSV

SEQ ID NO: 101357 - protein, 90 aa, Setaria italica
  Transcript Sequence Number=SeqID_35383
  Gene Ontology: Mol. function=double-stranded RNA binding; Cellular component=intracellular
  Homolog annotation: Hit_ID=Q5N8Z0; Match level="QueryCoverage=97%, HitCoverage=18%, E-value=5e-11, Identity=46%"; Hit description =Putative dsRNA-binding protein ODB1
GRRSAKEAYNLAAMAAFEHLTALPAEAPVPVPAAPAPPQPETQIPYKSRLQIYAQKRGKQLPSYRTIYGGSLHAALFKSEVTIDGQTLRA

SEQ ID NO: 101358 - protein, 76 aa, Setaria italica
  Transcript Sequence Number=SeqID_35384
  Gene Ontology: Mol. function=nucleotide binding; Biological process =defense response
  Homolog annotation: Hit_ID=Q9SWT8; Match level="QueryCoverage=100%, HitCoverage=8%, E-value=1e-13, Identity=52%"; Hit description=HV1LRR1
MPQILSSWSHLHNLTRLSLISSELDEDSFSCFAVLRNLCFLDLSKAYDGKKLNFCALSFPRLRQLRVCDAPQLNQV

SEQ ID NO: 101359 - protein, 65 aa, Setaria italica
  Transcript Sequence Number=SeqID_35385
LIFVNNEGKKSRSRRILQVRDCKQFEVSVNSKGSSQLEFWCELKVNNEPNTMLLFKNWPASSPGR

SEQ ID NO: 101360 - protein, 75 aa, Setaria italica
  Transcript Sequence Number=SeqID_35386
  Gene Ontology: Cellular component=plasma membrane
  Subcellular localization annotation: CTP_CleavageSite=69; ConfidenceScore=5.04e-01
MAAAAVACRRALLLHGQHQWPQRWAGAAVPTSAARSISQLVKTNGRRAFLVDTLALVRKLESQGVPTKQAEAITS

SEQ ID NO: 101361 - protein, 206 aa, Setaria italica
  misc_feature (204)..(204): Xaa can be any naturally occurring amino acid
  Transcript Sequence Number=SeqID_35387
GSSSTTDVDVKVNLDSDPYPGISYIYTSFDLYSQLYDYTSWSRQGLDLTTDSDRNTTGSQVKSSVRSKRKTIIEKSHVSADKINNAKSSSGDKAEQKRATKHGVIQEASPNLHVVVEAENDSKNFSTSNGGNTADTPERSSSSLREPEDSDLADEAWNEEDDSDFSSSNNSSYVSDMLDDASRNKGKGYLILVHLLRIACASKXSL

SEQ ID NO: 101362 - protein, 35 aa, Setaria italica
  Transcript Sequence Number=SeqID_35388
QNLQHMDDAAICRRQIIGNLRPSNCISSSSGYTGG

SEQ ID NO: 101363 - protein, 393 aa, Setaria italica
  misc_feature (10)..(10): Xaa can be any naturally occurring amino acid
  Transcript Sequence Number=SeqID_35389
  Homolog annotation: Hit_ID=Q7FB19; Match level="QueryCoverage=90%, HitCoverage=69%, E-value=1e-26, Identity=28%"; Hit description =OSJNBa0018M05.22 protein
  Pfam annotation: Domain name=FBD; Domain location=298-348; Score=9.9; E_value=0.01; Accession=PF08387.2; Description=FBD
IQQHSGIGLXKFSIRCSLQNNSSDHLDRWICFASAAKAKIIDLNLQPKRNDACRTENVYHFPLEALSAQGFPFIQSLFLTNVSIEALSDICSFTKLRRLHLHHVQIIGDLPGLLLNCSILEDLELIACSGVADLNITHQLAKLRHLLISNMCVHKVDFHVAGLTHFGYKGDVIPIVLHGCTKLEKVTLTFQMPLHEQVSNKGLGHAITGIPSISAVKELNIRAYMQEDQPIWSSQVPRMTRPTFMFVNLRHLTCEITIFTNSPNTHTGILQLAHCLDCAPQLETLKLHMQYHVMGSRCWPGEGILPMRRLDHLKTVYMSGFRCYRPQVELLHGILENGAALEHVTIEPTVTLYVDSIANIGVPEDKICEWAHRASERFGKAITVVKAHRRRWS

SEQ ID NO: 101364 - protein, 111 aa, Setaria italica
  Transcript Sequence Number=SeqID_35390
  Gene Ontology: Mol. function=substrate-specific transmembrane transporter activity; Cellular component=integral to membrane; Biological process=transmembrane transport
  Homolog annotation: Hit_ID=B6U4Q3; Match level="QueryCoverage=98%, HitCoverage=21%, E-value=3e-40, Identity=71%"; Hit description =Membrane transporter D1
MVQVPGTWRWMLGVAAVPAIVQFVLMLFLPESPRWLYWKDKKAQAIAVLEKIYDSDRLEEELELLASSSMHEFQSDNTASYLDVFKSKELRLAFFAGAGFQAFQQFTGINT

SEQ ID NO: 101365 - protein, 505 aa, Setaria italica
  Transcript Sequence Number=SeqID_35391
  Gene Ontology: Mol. function=substrate-specific transmembrane transporter activity; Cellular component=integral to membrane; Biological process=transmembrane transport
  Homolog annotation: Hit_ID=B6U4Q3; Match level="QueryCoverage=99%, HitCoverage=98%, E-value=0.0, Identity=83%"; Hit description =Membrane transporter D1
  Pfam annotation: Domain name=MFS_1; Domain location=37-437; Score =113.9; E_value=5.3e-31; Accession=PF07690.8; Description=Major Facilitator Superfamily
  Pfam annotation: Domain name=Sugar_tr; Domain location=33-486; Score =450.8; E_value=2e-132; Accession=PF00083.16; Description=Sugar (and other) transporter
  Pfam module annotation: Pfam domain module=MFS_1::Sugar_tr; Domain location=37-437::33-486
  Subcellular localization annotation: CTP_CleavageSite=31; ConfidenceScore=5.01e-01
MTIDMSMPGSSGLLNAAGKRNMKFFSNSYVLALTGAAGIGGFLFGYDTGVISGALLYIRDEFPAVRDNYFLQETIVSLALVGAMLGAAGGGWINDAYGRKKSTLLADLMFALGSIVMCAAPGPYVLILGRLFVGLGVGIASVTAPVYIAEAAPSEIRGGLVSTNVLMITGGQFFSYLINLGFTEVPGTWRWMLGVAAVPAIVQFVLMLFLPESPRWLYWKDKKAQAIAVLEKIYDSDRLEEELELLASSSMHEFQSDNTASYLDVFKSKELRLAFFAGAGFQAFQQFTGINTVMYYSPTIVQMAGFTSNKLALLLSLIVAAMNAAGTIVGIYLIDRCGRRRLALTSLSGVVISLVILAMAFILQSSSSLCMAAANGTCQGILGWFAVAGLALYIAAFSPGMGPVPWAVNSEIYPEAYRGMCGGMSATVNWISNLIVAQTFLSIVGLVGTGVTFLIIAGIGVLAFIFVALYVPETKGLSFEQVEQLWKERAWGSHGDCQSLLGAAP

SEQ ID NO: 101366 - protein, 107 aa, Setaria italica
  Transcript Sequence Number=SeqID_35392
  Homolog annotation: Hit_ID=B6UFG7; Match level="QueryCoverage=97%, HitCoverage=21%, E-value=2e-20, Identity=66%"; Hit description=ATP binding protein
GNVVDGSKKEATKMREWWKEEFFEEMSKKGPSFDKRRGGGKPWLRSISMNTGHGHGNGDSNVEPSALDLSFRRGRKRSRRRGRSVGSDIHSGCGGDFLSRELSSTTS

SEQ ID NO: 101367 - protein, 134 aa, Setaria italica
  misc_feature (27)..(27): Xaa can be any naturally occurring amino acid
  misc_feature (81)..(81): Xaa can be any naturally occurring amino acid
  misc_feature (94)..(94): Xaa can be any naturally occurring amino acid
  Transcript Sequence Number=SeqID_35393
  Gene Ontology: Mol. function=nucleic acid binding
  Homolog annotation: Hit_ID=Q10I16; Match level="QueryCoverage=61%, HitCoverage=21%, E-value=2e-11, Identity=42%"; Hit description =Transposon protein, putative, Mutator sub-class
YPYYSVERFRAAYENLIPTLTGKSEWXKSNHGFFMYPPLLKAVAGRRKNEMFKGAAESNGNTTRRKGHHRYDICGGFGHHXHTCKNGYPTDIAXAAMLDETERGPPKKKKKKSSEPAQESIENSIVAVSSTSGP

SEQ ID NO: 101368 - protein, 159 aa, Setaria italica
  Transcript Sequence Number=SeqID_35394
VETESIIASSCLILAAACSMRPLSMIPGIGKISENGLMLQAAARIKQLEAMIDSVSTHLERLQESQRSNGTVGDELESSLKDQNVPAASVLEPIPFGHQAEDETEKLRSVLPHPSKAKGTRLFRLASLYMTELVEEYDMKCKTVADLLAMVQIHQKTNN

SEQ ID NO: 101369 - protein, 68 aa, Setaria italica
  misc_feature (16)..(16): Xaa can be any naturally occurring amino acid
  Transcript Sequence Number=SeqID_35395
  Gene Ontology: Cellular component=integral to membrane
  Homolog annotation: Hit_ID=UPI00005DC1A3; Match level="QueryCoverage =85%, HitCoverage=9%, E-value=1e-19, Identity=70%"; Hit description =VAD1 (VASCULAR ASSOCIATED DEATH1)
  Pfam annotation: Domain name=GRAM; Domain location=2-51; Score=32.3; E_value=2e-06; Accession=PF02893.12; Description=GRAM domain
QDFNCALQENILLQGXMYLFLHHICFYSNIFGYETKKTIPLQEVTDVRKAKTAAYFSNVPLKLLLVVK

SEQ ID NO: 101370 - protein, 204 aa, Setaria italica
  misc_feature (197)..(197): Xaa can be any naturally occurring amino acid
  Transcript Sequence Number=SeqID_35396
  Gene Ontology: Cellular component=chloroplast
  Homolog annotation: Hit_ID=B9SH09; Match level="QueryCoverage=96%, HitCoverage=19%, E-value=9e-60, Identity=55%"; Hit description=GTP binding protein, putative
QKRPGTGWDADPGDEEMRIQLLVSRLNEDSLSSRDWRLTRMMKKADLMYNEDNLLRILDGLEARGNWKQALAVTEWVYNENSYRHRKSRFVYTKLLSILGKSLRATEALRVFNIMRGDAQIYPDMPAYHSIAVTLGRAGLLKELIKIIEYMRQKPSKRVMKMRRKDWDPSLEPDVLVYNSVLNACVLSQQWKGVFWXVFQQMRI

SEQ ID NO: 101371 - protein, 89 aa, Setaria italica
  Transcript Sequence Number=SeqID_35397
ILSFQHPCTTHTKRVLLQQCSFKSELVLIIAPLFSLKRNDSFILVKLILVCTWQSLFCCTLFLLLLYVSLLWLSFDQISALHVYQIVRV

SEQ ID NO: 101372 - protein, 82 aa, Setaria italica
  Transcript Sequence Number=SeqID_35398
MASPAAAPAAEFTQMEAARQSLIAISQSVPEIGAPVVRSPNGGMEHGHDDRAEQRYRAKLISISNQSPDARPAPCLPKNAAA

SEQ ID NO: 101373 - protein, 97 aa, Setaria italica
  Transcript Sequence Number=SeqID_35399
  Subcellular localization annotation: CTP_CleavageSite=26; ConfidenceScore=5.53e-01
ILDASEEVQAAAKFRPKQRAKPRKTVLSSRSAASNPTVENGNGKLGVSNQVSSSKELTSQERASLTCPGSETIDDVAGSQVILETSSDDVLTVPLGP

SEQ ID NO: 101374 - protein, 181 aa, Setaria italica
  Transcript Sequence Number=SeqID_35400
  Gene Ontology: Mol. function=protein kinase activity; Biological process=protein amino acid phosphorylation
  Homolog annotation: Hit_ID=Q9LRT1; Match level="QueryCoverage=100%, HitCoverage=51%, E-value=3e-46, Identity=38%"; Hit description =Leucine-rich repeat receptor-like protein kinase
  Pfam annotation: Domain name=LRR_1; Domain location=109-131; Score =10.3; E_value=3.3; Accession=PF00560.25; Description=Leucine Rich Repeat
  Pfam annotation: Domain name=LRR_1; Domain location=134-157; Score =17.7; E_value=0.047; Accession=PF00560.25; Description=Leucine Rich Repeat
  Pfam annotation: Domain name=LRR_1; Domain location=14-36; Score =15.7; E_value=0.19; Accession=PF00560.25; Description=Leucine Rich Repeat
  Pfam annotation: Domain name=LRR_1; Domain location=158-180; Score =14.9; E_value=0.34; Accession=PF00560.25; Description=Leucine Rich Repeat
  Pfam annotation: Domain name=LRR_1; Domain location=38-60; Score =17.0; E_value=0.079; Accession=PF00560.25; Description=Leucine Rich Repeat
  Pfam annotation: Domain name=LRR_1; Domain location=62-84; Score =16.1; E_value=0.14; Accession=PF00560.25; Description=Leucine Rich Repeat
  Pfam annotation: Domain name=LRR_1; Domain location=86-108; Score =12.3; E_value=1.3; Accession=PF00560.25; Description=Leucine Rich Repeat
  Pfam module annotation: Pfam domain module=LRR_1::LRR_1::LRR_1::LRR _1::LRR_1::LRR_1::LRR_1; Domain location=109-131::134-157::14-36::158- 180::38-60::62-84::86-108
FDGHLPGSIAQLSSLVYLSASGNRLSGDVPAWLGKLAAVQHLDLSDNALTGSLPDSLGDLKALKYLSLSRNQLSGSVPASLSGCAKLAELRLRGNSLSGGIPDALFDVGLETLDMSSNALTGVLPSGSTRMAETLQWLDLSGNQLTGGIPTEMLLFFKLRYLNLSSNDLRTQLPPELGLLR

SEQ ID NO: 101375 - protein, 82 aa, Setaria italica
  Transcript Sequence Number=SeqID_35401
  Gene Ontology: Mol. function=nucleoside-triphosphatase activity
  Homolog annotation: Hit_ID=Q10NN1; Match level="QueryCoverage=87%, HitCoverage=7%, E-value=1e-23, Identity=76%"; Hit description=ATPase, AAA family protein, expressed
EGKQYLSPLSLRPVALNLLSQREKDELVQLVDTMVSYSVTYRNTKFAPQERANISVVPHDVPSLSFHPPFSDIINFKGYQSE

SEQ ID NO: 101376 - protein, 292 aa, Setaria italica
  Transcript Sequence Number=SeqID_35402
  Gene Ontology: Mol. function=protein serine/threonine kinase activity; Biological process=protein amino acid phosphorylation
  Homolog annotation: Hit_ID=Q7XHV3; Match level="QueryCoverage=100%, HitCoverage=34%, E-value=1e-142, Identity=85%"; Hit description =Putative receptor protein kinase
  Pfam annotation: Domain name=Pkinase; Domain location=38-291; Score =152.9; E_value=9.9e-43; Accession=PF00069.17; Description=Protein kinase domain
  Pfam annotation: Domain name=Pkinase_Tyr; Domain location=38-286; Score=88.8; E_value=2e-23; Accession=PF07714.9; Description=Protein tyrosine kinase
  Pfam module annotation: Pfam domain module=Pkinase::Pkinase_Tyr; Domain location=38-291::38-286
IPLTPVQDRKLEDESGQNKDLNVTLFDMATIAFSTDNFATWTKLGEGGFGAVYKGELEGGQTVAVKRLSKFSTQGLGEFKNEVMLIAKLQHVNLVRLLGCCIHGEERILVYEYMENRSLDNFIFDKGRSAQLDWSKRFDIILGIARGLLYLHQDSRYKVIHRDLKAGNILLDRDMNPKISDFGVARIFGDDTDSHTRKVVGTYGYMSPEYAMDGVFSVKSDVFSFGVLVLEIVSGRKNRGIYSSGEQTSLLSHAWKLWREGNAVALLDETVAGAGEHRVSEVRRCVQSRLVV

SEQ ID NO: 101377 - protein, 167 aa, Setaria italica
  Transcript Sequence Number=SeqID_35403
  Gene Ontology: Mol. function=peptidyl-prolyl cis-trans isomerase activity; Cellular component=chloroplast; Biological process=protein folding
  Homolog annotation: Hit_ID=Q6Z4E9; Match level="QueryCoverage=78%, HitCoverage=67%, E-value=2e-61, Identity=76%"; Hit description =Immunophilin / FKBP-type peptidyl-prolyl cis-trans isomerase-like
  Pfam annotation: Domain name=FKBP_C; Domain location=52-151; Score =127.3; E_value=4.9e-35; Accession=PF00254.20; Description=FKBP-type peptidyl-prolyl cis-trans isomer
LLTAAAAVGVGVAGGEAGAVSTSRRALRASKIPESEFTSLPNGLKYYDIKVGSGAKAVKGSRVAVHYVAKWKGITFMTSRQGLGVGGGTPYGFDVGNSERGNVLKGLDLGVEGMKVGGQRLIIVPPELAYGKKGVQEIPPNATIELDVELLSIKQSPFGTPVKIVEG

SEQ ID NO: 101378 - protein, 45 aa, Setaria italica
  Transcript Sequence Number=SeqID_35404
  Gene Ontology: Mol. function=peptidyl-prolyl cis-trans isomerase activity; Biological process=protein folding
  Homolog annotation: Hit_ID=Q6Z4E9; Match level="QueryCoverage=66%, HitCoverage=12%, E-value=2e-09, Identity=96%"; Hit description =Immunophilin / FKBP-type peptidyl-prolyl cis-trans isomerase-like
YVLPFTSLKSYVQPYGFDVGNSERGNVLKGLDLGVEGMKVGGQVC

SEQ ID NO: 101379 - protein, 218 aa, Setaria italica
  Transcript Sequence Number=SeqID_35405
  Gene Ontology: Mol. function=phosphopantetheine binding
  Homolog annotation: Hit_ID=Q6ZI81; Match level="QueryCoverage=96%, HitCoverage=27%, E-value=4e-71, Identity=64%"; Hit description =Putative T-complex protein 11
RFTMGELKALKAEVSRARIQLLEPIIKGSGGVEYLQKSFADRYGSPSDALASLPSTACWISSVKDIVEEQWNEHVSSLSILPAANHVQPLVATLRTGLAVPGHLQSAISAAGSTELPECTGEGLGRLIRIGLLQLISSTEGLQSQTVPETFMLNWMRLRSVQSKFQQVIVIATSMLVMHQVLVNENPNISPPELENVTLELFNMLTSLLEQTLVRIVR

SEQ ID NO: 101380 - protein, 85 aa, Setaria italica
  Transcript Sequence Number=SeqID_35406
KSFASHRCDNKTHQKHPKFMQTVRILIVLDPDVNSKNMELHIMLGCLGVIKFPNDLLFGGTLYLQSTIRKQILYKINKLWFFSNL

SEQ ID NO: 101381 - protein, 1024 aa, Setaria italica
  Transcript Sequence Number=SeqID_35407
  Gene Ontology: Mol. function=nucleotide binding; Cellular component =nucleus; Biological process=metabolic process
  Homolog annotation: Hit_ID=Q0IJ07; Match level="QueryCoverage=96%, HitCoverage=97%, E-value=0.0, Identity=48%"; Hit description=Nat10 protein (Fragment)
  Pfam annotation: Domain name=DUF1726; Domain location=106-200; Score =191.3; E_value=2.7e-54; Accession=PF08351.3; Description=Domain of unknown function (DUF1726)
  Pfam annotation: Domain name=DUF699; Domain location=280-477; Score =351.9; E_value=1.2e-102; Accession=PF05127.6; Description=Putative ATPase (DUF699)
  Pfam module annotation: Pfam domain module=DUF1726::DUF699; Domain location=106-200::280-477
MRKKVDERIRTLIENGVRQRQRSMFVIVGDKSRDQIVNLNYMLSKSRVKSRPSVLWCYRDKLEISSHKKKRAKQIKKLMQRGLMDPEKADPFSLFLETSDITYCLYRDSERVLGNTFGMCILQDFEALTPNLLARTIETVEGGGLIILLLRSLSSLTSLYTMVMDVHERFRTESHTQPAARFNERFLLSIASCKACVVMDDELNILPISSHMKFIQPVTNNEDSEGLSKRERQLKDLKDQLREDFPVGPLIGKCCTLDQGNAVINFLDSVLDKNLRNTVALLAARGRGKSAALGLAIAGAIAAGYSNIFVTAPSPENLKTLFDFVCKGINALEYKEHLHYDVVKSADPELKKATIQINVYKQHRQTIQYLKPHDHGKLSQVELLVIDEAAAIPLPIVKSMLGPYLVFLSSTVNGYEGTGRSLSLKLLQQLESQSQPSAQSNGSNSSRVFKKIELNESIRYASGDPIETWLNDLLCLDLANSIPNISRLPHPKECDLYYVNRDTLFSYHKESEIFLQRMMALYVASHYKNSPNDLQLMADAPAHHLFVLLGPVDESKNQLPDILCVIQVCLEGQISRKSAMKSLSEGRAPSGDQIPWKFCEQFQDNVFPSLSGARIVRIAVHPSALRLGYGSAAVDLLTRYYEGQMTLFADDEETEEPEVKITEAAEKASLLEENIKPRANLPPLLVHLRERRPEKLHYLGVSFGLTQELFRFWRKHNFYPFYVGQIQSAVTGEHTCMVLRPLNSDDIEVSESNKCGFLDPFYQDFRQRFRRLLGTSFRHLNFKLAMSVLASKIDYSNHEPSEYGNNSASKLLGDTLSPHDMKRLEAYSNNLVDYHLILDLVPILAHQYFSEKLPVSLHGAQAAVLFCMGLQDKDVGTVKEELGIEREQVLSNFIKTMKKLYGYLHKIAGKEIEATLPRLKEIEMPPLSKSMDEDLAEAAKEVEEKRRAANEAPVDPKILQKYAIDNNDNEMEEALKSAKVSASGIISVKSNKTKADKKEKHKEMGKSKRKGTDGGRSESKKKRS

SEQ ID NO: 101382 - protein, 110 aa, Setaria italica
  misc_feature (77)..(77): Xaa can be any naturally occurring amino acid
  Transcript Sequence Number=SeqID_35408
  Subcellular localization annotation: CTP_CleavageSite=50; ConfidenceScore=5.72e-01
NMVKTLSRMRRDDSPPPQSRKPVRRRTALRTRRRSRPLSVLPAPSSTELCAAARRATISCGGTMASPTSSQPPAPAXAHLPLREGSDGIRTGADLAIPDAASAAVSGTGR

SEQ ID NO: 101383 - protein, 69 aa, Setaria italica
  Transcript Sequence Number=SeqID_35409
  Subcellular localization annotation: CTP_CleavageSite=4; ConfidenceScore=5.22e-01
TIPRSRHRRRRSASATPATPEVEPTTTAPVSQEQTRPVVLPSSGRRASVDAPATTAAFVLLLAVGAALV

SEQ ID NO: 101384 - protein, 88 aa, Setaria italica
  Transcript Sequence Number=SeqID_35410
LAYVKLPYMHVSQLACSINLTKKHEREYVQITSNVSASSNRFHSPRLLLVSFSINDGQCPHEYPKSSISMSIRVTTQPRKTAHAHSTH

SEQ ID NO: 101385 - protein, 60 aa, Setaria italica
  Transcript Sequence Number=SeqID_35411
LCYKYCNFQLPQRSKLTVHVIYAGNAWGFTASRLLYRNFKIYELALGMSHGADVRLKLEY

SEQ ID NO: 101386 - protein, 251 aa, Setaria italica
  misc_feature (172)..(172): Xaa can be any naturally occurring amino acid
  misc_feature (251)..(251): Xaa can be any naturally occurring amino acid
  Transcript Sequence Number=SeqID_35412
ISEKLNSHLVLFSSVQKEVAAVKQVLGDVHFLVGEKENVVADLKDKVQMISVLEKDVVDKLNFLESKISAYQLELRSRARIIYELKDRLEAEKLNNSFQPQLEELKKALLVKDDIIERLTSEKQAMRVELHNMEIALQRFQDLFSSIGHGRMKNFLAISGSQDVNNGQPERXGLANEHNSVTAIDEAATTQNVDHQLEISPGSMQVQSPTCLKFGALSSLEPVAAHTEKADCLPELKEDIVMGDLSPTHPX

SEQ ID NO: 101387 - protein, 108 aa, Setaria italica
  Transcript Sequence Number=SeqID_35413
MLLGEIISIPGTQGGLANEHNSVTAIDEAATTQNVDHQLEISPGSMQVQSPTCLKFGALSSLEPVAAHTEKADCLPELKEDIVMGDLSPTHPTDSVNPEPDSENQQLL

SEQ ID NO: 101388 - protein, 82 aa, Setaria italica
  Transcript Sequence Number=SeqID_35414
KLNFLESKISAYRFELRNMARIIYELKDCLEAEKRNNSFIPQLDEISKALLLKGEIIERLTSEKQCMGLHSIEVALQKFQDL

SEQ ID NO: 101389 - protein, 79 aa, Setaria italica
  Transcript Sequence Number=SeqID_35415
VSRFIYAEKLNFLESKISAYRFELRNMARIIYELKDCLEVEKRNNWFIPQLDEISILTSEKQCMGLHSIEVALQKFQDL

SEQ ID NO: 101390 - protein, 111 aa, Setaria italica
  misc_feature (30)..(30): Xaa can be any naturally occurring amino acid
  Transcript Sequence Number=SeqID_35416
MAGLNFSFQTWKQTDICPTYHVHRQDSTCXMQWTIQMKDKQIAIISEKLSSHLVLFSSVEKEVPAVKQVLGDVHCLVGEKENVVADLKDKVQMDYGHTWHLHSPIIWQLHF

SEQ ID NO: 101391 - protein, 142 aa, Setaria italica
  misc_feature (101)..(101): Xaa can be any naturally occurring amino acid
  misc_feature (114)..(114): Xaa can be any naturally occurring amino acid
  Transcript Sequence Number=SeqID_35417
QPNQELLFKFVTWKDKVQRVTVIQKDFVEKLNFLESKISAYRFELRNMARIIYELKDCLEVEKRNNSFIPQLDEISILTSEKQCMGLHSIEVALQKFQDLXSSIGHEIALKGSXVHSVNNEQPESIPGTQSGLANRFCESGS

SEQ ID NO: 101392 - protein, 112 aa, Setaria italica
  misc_feature (2)..(2): Xaa can be any naturally occurring amino acid
  misc_feature (6)..(6): Xaa can be any naturally occurring amino acid
  misc_feature (18)..(18): Xaa can be any naturally occurring amino acid
  Transcript Sequence Number=SeqID_35418
PXEQTXSVLRSLSSPFSXESNRRTGHQPVSALGIGLGWWRSTGGRAAAKICSENDGCDATPLPPLALSGFSAYYCSPRFPEAAPRCNTAAWPEREGVEVCLWARERGCRQKA

SEQ ID NO: 101393 - protein, 133 aa, Setaria italica
  Transcript Sequence Number=SeqID_35419
RSRLAEEAPTRLARGGRKRERTEKAACFPCFLQLNAEVIASPGTSPTTELQALALGADAEQQPAVASGVEHEKGGGQPRLDKTRQDNYLLPPSTLPPPNKRRCSGLAAAVPALVVCSILLPLVFLLGLPPPRS

SEQ ID NO: 101394 - protein, 121 aa, Setaria italica
  misc_feature (4)..(4): Xaa can be any naturally occurring amino acid
  Transcript Sequence Number=SeqID_35420
  Subcellular localization annotation: CTP_CleavageSite=60; ConfidenceScore=5.79e-01
TPQXPPPPSMVSVDSPRMNASGKIVFQGLERSSSSPAGSVHSSMRSRSRVMDRSYSAGVRATPVVLNVPVCSRPVFGFFKDKKDATAKDAASSRPRSALGRRTAATPAPGGANCRDLGNGN

SEQ ID NO: 101395 - protein, 69 aa, Setaria italica
  Transcript Sequence Number=SeqID_35421
NLHNLGFLPQNLHHETLASPGSGGPGGPRVGASPGGDPGPSIHAGGMDDYAAPAPNQHGGRHITRAQQY

SEQ ID NO: 101396 - protein, 43 aa, Setaria italica
  Transcript Sequence Number=SeqID_35422
YCEYSQHPKDPLRIYAMSVYHCKYNISIFNSFKHLHTKCFSRK

SEQ ID NO: 101397 - protein, 119 aa, Setaria italica
  Transcript Sequence Number=SeqID_35423
  Gene Ontology: Mol. function=secondary active sulfate transmembrane transporter activity; Cellular component=integral to membrane; Biological process=sulfate transport
  Homolog annotation: Hit_ID=A7YF68; Match level="QueryCoverage=98%, HitCoverage=17%, E-value=9e-50, Identity=76%"; Hit description =Sulfate transporter
  Pfam annotation: Domain name=Sulfate_transp; Domain location=1-119; Score=-133.8; E_value=0.0014; Accession=PF00916.12; Description =Sulfate transporter family
KQWNWQTILIAASFLGFLMVTKYIGKKKKKLFWMSATAPLISVIVSTFFVYITRADKHGVAVVKNIEKGINPPSASLIYFSGPFMLKGFKIGVVVGLIALTEAIAVGRTFAGMKDYKLD

SEQ ID NO: 101398 - protein, 93 aa, Setaria italica
  misc_feature (47)..(47): Xaa can be any naturally occurring amino acid
  misc_feature (87)..(87): Xaa can be any naturally occurring amino acid
  Transcript Sequence Number=SeqID_35424
  Gene Ontology: Mol. function=double-stranded RNA binding; Cellular component=intracellular
  Homolog annotation: Hit_ID=Q7XUL7; Match level="QueryCoverage=90%, HitCoverage=9%, E-value=2e-34, Identity=81%"; Hit description =OSJNBa0074L08.12 protein
AENIYSVSDLVPLNAYCLQTAVFPLGAEEIHLVAMTSKRNLPNHACXWGYKVPLGLYNSCLTMLNLRCLGIVFDLDETLVVANTSRXFEDKID

SEQ ID NO: 101399 - protein, 80 aa, Setaria italica
  Transcript Sequence Number=SeqID_35425
PAVRIHTLQAQPPKVRLPGHARRHGHRPAAHQRLLIDYIDDPPHVWVWVCVCIWKYGMGYGNTTVILYVYVYREWGNETN

SEQ ID NO: 101400 - protein, 341 aa, Setaria italica
  misc_feature (32)..(32): Xaa can be any naturally occurring amino acid
  Transcript Sequence Number=SeqID_35426
  Gene Ontology: Mol. function=unfolded protein binding; Cellular component=plasma membrane; Biological process=response to stress
  Homolog annotation: Hit_ID=O49045; Match level="QueryCoverage=99%, HitCoverage=50%, E-value=1e-178, Identity=89%"; Hit description=Heat shock 70 protein
  Pfam annotation: Domain name=FtsA; Domain location=87-270; Score= -40.9; E_value=0.085; Accession=PF02491.12; Description=Cell division protein FtsA
  Pfam annotation: Domain name=HSP70; Domain location=1-341; Score =469.7; E_value=4e-138; Accession=PF00012.12; Description=Hsp70 protein
  Pfam annotation: Domain name=MreB_Mbl; Domain location=2-284; Score= -270.3; E_value=0.019; Accession=PF06723.5; Description=MreBMbl protein
  Pfam module annotation: Pfam domain module=FtsA::HSP70::MreB_Mbl; Domain location=87-270::1-341::2-284
EKETDGKQYSPSQVGAFVLTLSRTSAEAYLGXSVSKAVITVPAYFNDAQRQATKDAGRIAGLDVERIINEPTAAALSYGMNNKEGLIAVFDLGGGTFDISILEISNGVFEVKATNGDTFLGGEDFDNTLLEFLVSDFKKTEGIDLSKDRLALQRLREAAEKAKVELSSTSQTEINLPFITADSSGAKHLNITLTRSKFESLVHQLIERTRDPCKNCLKDAGISTKDVDEVLLVGGMTRVPKVQEVVSEIFGKSPSKGVNPDEAVAMGAAIQGGILRGDVKELLLLDVTPLSLGLETLGGIFTRLINRNTTIPTKKSQVFSTAADNQTQVGIRVLQGEREMA

SEQ ID NO: 101401 - protein, 212 aa, Setaria italica
  Transcript Sequence Number=SeqID_35427
  Homolog annotation: Hit_ID=Q9LR58; Match level="QueryCoverage=95%, HitCoverage=49%, E-value=9e-62, Identity=58%"; Hit description =F21B7.29
  Pfam annotation: Domain name=DTW; Domain location=1-199; Score=41.1; E_value=4.4e-09; Accession=PF03942.7; Description=DTW domain
ASLFLQDFLRQNNTGKLLWQGFGIQAAQLCLFGIQEHEDIMWDAFQRSGKGKISFLYPNKSTIPKSVKDLKFDGLSLSSDLHDMSSQDEPFNFILLDGTWSNSAALYRRLKERWTAIWGDEDIPCISLSTLSASVMHKLRPQPAWDRTCTAAAAAGLLWELNLRPELSTLEFEKQAEAVECSLDILLDALTTRRVRLGRSITRKQRHNRNCI

SEQ ID NO: 101402 - protein, 70 aa, Setaria italica
  Transcript Sequence Number=SeqID_35428
  Gene Ontology: Cellular component=intracellular
NRKPGSVPSINSSGRPSTQEEIDEVHQERQQFVEVAKKEVRDRRARRMQVKVVLGSCRFCWHACGPNIYQ

SEQ ID NO: 101403 - protein, 366 aa, Setaria italica
  misc_feature (94)..(94): Xaa can be any naturally occurring amino acid
  misc_feature (235)..(235): Xaa can be any naturally occurring amino acid
  Transcript Sequence Number=SeqID_35429
  Gene Ontology: Cellular component=intracellular
  Homolog annotation: Hit_ID=B9RQZ2; Match level="QueryCoverage=93%, HitCoverage=60%, E-value=1e-117, Identity=58%"; Hit description =Topbp1, putative
TRKHPPQTPMKESGNDELVFMNDTIYIDPGISGEMKKKISDAATREGAKLLEHWFIGCPATYVVCEDASINRYAGHSDNIVTPLWILKTVKEKXLQRLVHFSSDLARRVAMVLQNAQTSDKNRKPGSVPSINSSGRPSTQEEIDEVHQERQQFVEVAKKEVRDRRARRMQSCEVPIHPITPATLLDSICWTISEPTSSASIYTDSSWSDDTNEQQGTTYFDANGDARDPDQPTDXFSRPLKESERSELIFKNHFLTILFPIDRFGELGPSSKTFYNHGGFTRIQVLDHIYNFYQENMSMDEIDMALHTDSRHADRLRSLYSSAESAEKGLVTFKRIEFLGSRRSFEALKRLNRENNSNVYELVIRA

SEQ ID NO: 101404 - protein, 235 aa, Setaria italica
  Transcript Sequence Number=SeqID_35430
  Gene Ontology: Mol. function=nucleic acid binding; Cellular component= chloroplast; Biological process=cell redox homeostasis
  Homolog annotation: Hit_ID=Q8S7U8; Match level="QueryCoverage=98%, HitCoverage=97%, E-value=3e-72, Identity=61%"; Hit description =Putative thioredoxin
  Pfam annotation: Domain name=Thioredoxin; Domain location=82-186; Score=-21.1; E_value=0.011; Accession=PF00085.12; Description =Thioredoxin
MASALMNHWVVGRSPHRGYKSNRSDGCFKILNWNYHGIKGKQFLSREKVDSTGCQITRAVPKDPKKGNHTKWWEKDMKGNMKSIKSQDDFDEQLLMAGDKFTVVHFFSPSCRALSKLHSKVHQFARMHPGLQFLMVNYNEQTEICRRLNVYVLPLFRFYRGAEGRICSFSCTISTIHKFKDALKRHGVQTESLATEKGLEESEPKSFAPPTDIPNASDPSPNMDVDDGPVEPGYD

SEQ ID NO: 101405 - protein, 40 aa, Setaria italica
  Transcript Sequence Number=SeqID_35431
  Gene Ontology: Mol. function=triacylglycerol lipase activity; Biological process=lipid metabolic process
  Homolog annotation: Hit_ID=B6TYC3; Match level="QueryCoverage=100%, HitCoverage=9%, E-value=1e-11, Identity=85%"; Hit description =Triacylglycerol lipase
VALANKEEGALKDQYPVPADWWVAKNKFMVKGADGHWALQ

SEQ ID NO: 101406 - protein, 54 aa, Setaria italica
  Transcript Sequence Number=SeqID_35432
WKILIDGLLQKGNTADCSSLLSFMEEQNYRPNAAIYARLKGEITVASEVQEIAT

SEQ ID NO: 101407 - protein, 95 aa, Setaria italica
  misc_feature (33)..(33): Xaa can be any naturally occurring amino acid
  misc_feature (73)..(73): Xaa can be any naturally occurring amino acid
  Transcript Sequence Number=SeqID_35433
  Homolog annotation: Hit_ID=B9R7B1; Match level="QueryCoverage=96%, HitCoverage=15%, E-value=7e-14, Identity=44%"; Hit description=DNA binding protein, putative
MEGEEAKMTAWENMQKANAEAAIQKLEIKLEKXRPYSLERIFNTLRSGPRKTQVVRSTSAANSRSAFSRSIKXAPHLSKNGQMSLLGGCITCCAF

SEQ ID NO: 101408 - protein, 419 aa, Setaria italica
  misc_feature (207)..(207): Xaa can be any naturally occurring amino acid
  misc_feature (304)..(304): Xaa can be any naturally occurring amino acid
  misc_feature (396)..(396): Xaa can be any naturally occurring amino acid
  Transcript Sequence Number=SeqID_35434
  Homolog annotation: Hit_ID=B9R7B1; Match level="QueryCoverage=97%, HitCoverage=64%, E-value=2e-65, Identity=38%"; Hit description=DNA binding protein, putative
  Pfam annotation: Domain name=Remorin_C; Domain location=301-412; Score=25.9; E_value=2.2e-05; Accession=PF03763.5; Description =Remorin, C-terminal region
MLMDAFLVCPGTPSYHRRGTTIVGYQQGPNSERVIPPSARHRRHPGSSMVLPYSSGRTLPSKWEDAERWIFSPNPSNALGRSVPQLWRPKSKSGPLGPTGRFGGPYSSSSSSALFLESGRVGNLTVNSPYLAGVLLPEHVCAGVMDSGRDLSGASGEDSSNGRGGRSGQTNGRYPAMQSTRASQQFGSATESYQSLPTSHESIHDGXIESIEDSGTSSAPVIVRKDVATQTSPDISRSSSSNMRSSFSRSLSAQQVKELESCFSKLEIRDVQVDDRVTLTRWSKKHVTRGFDKNATNIIEWKKXTLESKSSAWEVKETAKCISKMEGEEAKMTAWENMQKANAEAAIQKLVIKLEKKRPYSLERIFSTLRSGPRKMQVLRSTSTANHDQHISRTIXTAPRLSKNGQMSSLSGCFTCHAF

SEQ ID NO: 101409 - protein, 386 aa, Setaria italica
  misc_feature (302)..(302): Xaa can be any naturally occurring amino acid
  Transcript Sequence Number=SeqID_35435
  Gene Ontology: Mol. function=zinc ion binding; Cellular component =nucleus
  Homolog annotation: Hit_ID=Q10NX9; Match level="QueryCoverage=73%, HitCoverage=27%, E-value=3e-54, Identity=39%"; Hit description =Transposon protein, putative, unclassified, expressed
  Pfam annotation: Domain name=SWIM; Domain location=118-154; Score =34.0; E_value=5.9e-07; Accession=PF04434.9; Description=SWIM zinc finger
AGMSVTDRSDSVTDYFDGWLTSGTSLKMFVEQYEGAVKDKLEKESYEDLRSSQMRPPMMTGLPVEDQAAKVYTAEIFQKFLNEIGHSFHCNYSILDRNDSVVTYVVSEHINQATKVDYKVVYDNVEDDIWCLCRLFQSKGILCRHALTVLRQELVLMIPPKYIIHRWCKDCKQTCASISQPVSAGNQELGSYDDLYKLGHQYFAEVVEFGSMNSESKEYALSIMREIRDKVISYEKSLRDQRVDSHVSTANFAYNPVNEDFTDDALPISLSTKGWDLTQGQSKRSRKKKLATPTVLDTLKKXTKRAYNKRRNATANTINTAVTATDSVTDATNVQANPVNEGWPLTSTGAPETFPYGVETISFDLSQYNNAPSFHWPESSSRSQLQ

SEQ ID NO: 101410 - protein, 219 aa, Setaria italica
  misc_feature (172)..(172): Xaa can be any naturally occurring amino acid
  misc_feature (193)..(193): Xaa can be any naturally occurring amino acid
  Transcript Sequence Number=SeqID_35436
  Gene Ontology: Mol. function=RNA binding; Cellular component =ribonucleoprotein complex; Biological process=mRNA processing
  Homolog annotation: Hit_ID=Q84N49; Match level="QueryCoverage=97%, HitCoverage=32%, E-value=6e-55, Identity=55%"; Hit description=CRS2 -associated factor 1, chloroplastic
MKLNHGTDMVLSSAVEVPGLFHSTGISGTEPSADTNRGLVEKSLDHSARSEHCPDDLEPHPGVTSIGDDLETKRKGNEGIEGTDVLNSSSEVRPSYMVGVLCLLEQAIDSGRALVLSENEFVDSDLVYQKCVAFTKSIPRELVFKRTQTKTSARRNGLDKQVKIKKHLVENXLSSSHIEKKDNANGCLAMRTXGRAQEFLSDVVPQGTLRVDELAKLLA

SEQ ID NO: 101411 - protein, 126 aa, Setaria italica
  misc_feature (42)..(42): Xaa can be any naturally occurring amino acid
  Transcript Sequence Number=SeqID_35437
  Gene Ontology: Mol. function=N-acetyltransferase activity; Cellular component=nucleus; Biological process=metabolic process
  Homolog annotation: Hit_ID=Q6ZA58; Match level="QueryCoverage=94%, HitCoverage=8%, E-value=1e-45, Identity=69%"; Hit description=PHD finger transcription factor-like
WGKIKHRRCGLLVRGGTHNMEDNMDGYIPYEWKRTVYSWMIXDLGVISEDTEVKYMNNKRTRAMLQGKITRKGIFCGCCSKILTAMKFELHAGSKEKQPYANIFVEGGRVSLLQCLHDAWEKHTRY

SEQ ID NO: 101412 - protein, 81 aa, Setaria italica
  Transcript Sequence Number=SeqID_35438
SWLSLTYPKYLESTVQSCKLASHVHGVLPLNLCRLLQWGARWLVRGSPLQLATNHAGLVGVGSERTGACVLDRQHGEPVPG

SEQ ID NO: 101413 - protein, 366 aa, Setaria italica
  misc_feature (217)..(217): Xaa can be any naturally occurring amino acid
  Transcript Sequence Number=SeqID_35439
  Gene Ontology: Mol. function=deoxyribodipyrimidine photo-lyase activity; Biological process=DNA repair
  Homolog annotation: Hit_ID=Q6F6A2; Match level="QueryCoverage=97%, HitCoverage=70%, E-value=0.0, Identity=86%"; Hit description=CPD photolyase
  Pfam annotation: Domain name=FAD_binding_7; Domain location=105-340; Score=302.8; E_value=7.1e-88; Accession=PF03441.6; Description=FAD binding domain of DNA photolyase
LRQVREALDAVASELQRDAADMAVHQVDAHNVVPVWAASGKLEYSAKTFRGKVSKVMDEYLVEYPELPALMPWDGEQSEDIYWDALIDRVCSEAENVPEIDWCEPGEAAALEVLLGSKDGFLTKRIKNYDMGRNDPTKPHALSCLSPYLHFGHISAQRCALEARKRRQLSPKSVDAFLEELIIRRELADNFCYYQPHYDSLAGAWEWARKTLMDHAXNKREHIYTREQLENAKTSDPLWNASQLEMVHHGKMHGFMRMYWAKKILEWTSGPEEALSVAIYLNDKYHIDGRDPNGYVGCMWSICGLHDQGWKERPVFGKIRYMNYAGCKRKFNVDAYISYVKRLVAQAKKRKAEESPDTGKVKASRV

SEQ ID NO: 101414 - protein, 51 aa, Setaria italica
  Transcript Sequence Number=SeqID_35440
  Gene Ontology: Mol. function=protein serine/threonine kinase activity; Cellular component=cytoplasm; Biological process=protein amino acid phosphorylation
  Homolog annotation: Hit_ID=Q53N72; Match level="QueryCoverage=90%, HitCoverage=9%, E-value=5e-20, Identity=97%"; Hit description =Mitogen-activated protein kinase 15
AAPSEMDFFTEYGEGSRYKIEEVIGKGSYGVVCSALDTHTGEKVAIKKIND

SEQ ID NO: 101415 - protein, 72 aa, Setaria italica
  misc_feature (45)..(45): Xaa can be any naturally occurring amino acid
  misc_feature (56)..(57): Xaa can be any naturally occurring amino acid
  Transcript Sequence Number=SeqID_35441
  Gene Ontology: Mol. function=protein serine/threonine kinase activity; Cellular component=cytoplasm; Biological process=protein amino acid phosphorylation
  Homolog annotation: Hit_ID=Q75KK8; Match level="QueryCoverage=66%, HitCoverage=8%, E-value=3e-17, Identity=87%"; Hit description =Mitogen-activated protein kinase 14
FSFYTCLCAVDYLEHSNIICFELLQYTPAIDIWSIGCIFAELLNXEKPLFPGKNVXXQLDIITDLLGTPSPE

SEQ ID NO: 101416 - protein, 137 aa, Setaria italica
  misc_feature (62)..(62): Xaa can be any naturally occurring amino acid
  Transcript Sequence Number=SeqID_35442
  Gene Ontology: Mol. function=protein serine/threonine kinase activity; Cellular component=cytoplasm; Biological process=protein amino acid phosphorylation
  Homolog annotation: Hit_ID=Q75KK8; Match level="QueryCoverage=97%, HitCoverage=24%, E-value=1e-56, Identity=79%"; Hit description =Mitogen-activated protein kinase 14
VSKAEPVMKLEFEFERRRITKEDIRELIYREILEYHPNMLREFLEGTESTGFMIHGTWVHLXKQFAYLEEHYAKGSTAAPPERQHNSLPRPSVLYSDNRTQSTTNVTEDLSKCVIRDDARRAQLDSSSVGANRVPQG

SEQ ID NO: 101417 - protein, 45 aa, Setaria italica
  Transcript Sequence Number=SeqID_35443
SYLVEEQVHEQLQSRTLQTGPMLPLTSEFPLYIRLTNLHQILVIE

SEQ ID NO: 101418 - protein, 76 aa, Setaria italica
  Transcript Sequence Number=SeqID_35444
SWWLQTLNYAHGLIVVKCNMEFEFEQSNFPVAFCSNVIIFIFERNEDADLCNKSVALFITKKKKTKKRTRPRTHRE

SEQ ID NO: 101419 - protein, 374 aa, Setaria italica
  Transcript Sequence Number=SeqID_35445
  Gene Ontology: Mol. function=protein serine/threonine kinase activity; Cellular component=cytoplasm; Biological process=protein amino acid phosphorylation
  Homolog annotation: Hit_ID=Q75KK8; Match level="QueryCoverage=98%, HitCoverage=69%, E-value=1e-178, Identity=81%"; Hit description =Mitogen-activated protein kinase 14
  Pfam annotation: Domain name=Pkinase; Domain location=1-143; Score= -86.8; E_value=0.0025; Accession=PF00069.17; Description=Protein kinase domain
DFTSRITPTAIFWTYYVATRWYRAPELCGSFFSKYTPAIDIWSIGCIFAELLTGKPLFPGKNVVHQLDIITDLLGTPSPEAISRIRNEKAKRYLSSMRRKKPIPFTHKFPNADPLALRLLERMLAFDPKDRPSAEEALADPYFKNIANVDREPAAQPVMKLEFEFERRRITKEDIRELIYREILEYHPNMLREFLEGTESTGFMYPSAVDHFKKQFAYLEEHYAKGSTAAPPERQHNSLPRPSVLYSDNRTQSTTNVTEDLSKCVIRDDARRAQLDSSSVGANRVPQAGGATRPARGVGSAERYGNYASPAADQYEQRRIANGVSPRSSYPKRIPTCKGETSEADRIDVRQTGQPKPYIPNKLPTTVDGRNGHW

SEQ ID NO: 101420 - protein, 545 aa, Setaria italica
  Transcript Sequence Number=SeqID_35446
  Gene Ontology: Mol. function=protein serine/threonine kinase activity; Cellular component=cytoplasm; Biological process=protein amino acid phosphorylation
  Homolog annotation: Hit_ID=Q75KK8; Match level="QueryCoverage=100%, HitCoverage=100%, E-value=0.0, Identity=86%"; Hit description =Mitogen-activated protein kinase 14
  Pfam annotation: Domain name=Pkinase; Domain location=13-304; Score =297.2; E_value=3.5e-86; Accession=PF00069.17; Description=Protein kinase domain
  Pfam annotation: Domain name=Pkinase_Tyr; Domain location=13-302; Score=14.5; E_value=1.1e-14; Accession=PF07714.9; Description =Protein tyrosine kinase
  Pfam module annotation: Pfam domain module=Pkinase::Pkinase_Tyr; Domain location=13-304::13-302
MDFFTEYGEGNRYKIEEVIGKGSYGVVCSALDTHTGEKVAIKKINDIFEHVSDATRILREIKLLRLLRHPDIVEIKHILLPPSRREFRDIYVVFELMESDLHQVIKANDDLTPEHYQFFLYQLLRGLKYIHTANVFHRDLKPKNILANADCKLKICDFGLARVAFNDTPTAIFWTDYVATRWYRAPELCGSFFSKYTPAIDIWSIGCIFAELLTGKPLFPGKNVVHQLDIITDLLGTPSPEAISRIRNEKARRYLSTMRRKKAIPFTQKFPNADPLALSLLERMLAFEPKDRPSAEEALADPYFKNIANVDREPSAQAVTKLEFEFERRRVTKDDIRELIYREILEYHPKMLREFLEGTESSGFMYPSAVDHFKKQFAYLEEHYCKGSTGTPPERQHNSLPRPSVVYSDNRQQSTANITEDLSKCLIRENTQKTQQHSASVAANKFPLHVPHGAAARPGKAVGSVLQYNPGPASAAEQYEQRRIARHPAIAPNNIPSGSSYPRRNQTCKSETGDAERMDVNQAGQPKPYAANKLPATVDGRGGHW

SEQ ID NO: 101421 - protein, 126 aa, Setaria italica
  Transcript Sequence Number=SeqID_35447
  Subcellular localization annotation: CTP_CleavageSite=76; ConfidenceScore=5.39e-01
ASEHSLQSRRGRRAGEGSSRDGRSAPLCQPSRWQSILARTFSGKLSFFSFSASRMTFSSDRGEVSSSSFTRLREKRVAAVDAADVPTKGSVLLDCIGGSASCAKAGAASREVAVDEEKAVTQRLPT

SEQ ID NO: 101422 - protein, 248 aa, Setaria italica
  misc_feature (212)..(212): Xaa can be any naturally occurring amino acid
  Transcript Sequence Number=SeqID_35448
  Homolog annotation: Hit_ID=Q49L63; Match level="QueryCoverage=92%, HitCoverage=37%, E-value=1e-46, Identity=44%"; Hit description=GEX1 (Fragment)
LDRQSRTMEGLNNLHSFQAKALEESRETVQKLAQFGQRQQEELLARQEQIRQAHDHLIQNSHSILEAQEEFRAKQANIFAALDKLHILHNAILAESRFIKAFFFYCCIVFLIYMLTSAKQTFSIRGQLYFGLCITLVLEIGLIKIGADDFDKQFWIMSKVFLVRMLFLGVATVQILHSIFTYRDYEALNHRLLQTLVEKVRALEKNAGGRRXPYDTEESEGSLMDYSWVFDELADEVDSKVDPSYVLP

SEQ ID NO: 101423 - protein, 96 aa, Setaria italica
  Transcript Sequence Number=SeqID_35449
  Gene Ontology: Mol. function=binding
  Homolog annotation: Hit_ID=Q6H6D6; Match level="QueryCoverage=100%, HitCoverage=9%, E-value=5e-40, Identity=80%"; Hit description =Transducin-like
DSLIGGFDVDRNIENAKQMIALGGLDLLISRLEAGDARESRHCIALLTTCIQADGSCRHYLADNLKKEPIVQLLVGNQKKASAAALNFISELVCLN

SEQ ID NO: 101424 - protein, 82 aa, Setaria italica
  Transcript Sequence Number=SeqID_35450
  Homolog annotation: Hit_ID=B9RK77; Match level="QueryCoverage=85%, HitCoverage=22%, E-value=2e-18, Identity=57%"; Hit description =Valacyclovir hydrolase, putative
MAEPVSSSQDASNPPAPEQRVLVTNKHGENLVGLLHHTGSNKVVVLCHGFTASKDDGIIVDLAAAITKQGISVFRFDFSGNG

SEQ ID NO: 101425 - protein, 177 aa, Setaria italica
  misc_feature (9)..(9): Xaa can be any naturally occurring amino acid
  Transcript Sequence Number=SeqID_35451
  Homolog annotation: Hit_ID=B9RK77; Match level="QueryCoverage=94%, HitCoverage=53%, E-value=7e-55, Identity=59%"; Hit description =Valacyclovir hydrolase, putative
ADDLHSVVXYLFQENFDVAAIVGLSKGGDVVVLYASIYNDVPMVVNLSGRFNLEKGVEERLGKEFMDRINKEGYIDVTNKSGKFLYRVTKESLMERLNTDMHAASLSISKECRFFTIHGSADEIIPVEDAYEFAKLIPNHKLRVIEGANHCYTAHRKELSDAIVECITSNEAGDIPR

SEQ ID NO: 101426 - protein, 301 aa, Setaria italica
  misc_feature (232)..(232): Xaa can be any naturally occurring amino acid
  Transcript Sequence Number=SeqID_35452
  Gene Ontology: Mol. function=hydrolase activity
  Homolog annotation: Hit_ID=B9RK77; Match level="QueryCoverage=82%, HitCoverage=75%, E-value=2e-78, Identity=56%"; Hit description =Valacyclovir hydrolase, putative
  Pfam annotation: Domain name=DUF1749; Domain location=1-260; Score= -194.4; E_value=0.052; Accession=PF08538.2; Description=Protein of unknown function (DUF1749)
  Pfam annotation: Domain name=Peptidase_S9; Domain location=45-272; Score=-74.7; E_value=0.043; Accession=PF00326.13; Description=Prolyl oligopeptidase family
  Pfam module annotation: Pfam domain module=DUF1749::Peptidase_S9; Domain location=1-260::45-272
TAAPEQRVLVTNKHGENLVGLLHHTGSNKVVVLCHGFTASKDDGIIVDLAAAITKQGISVFRFDFSGNGESEGEFQYGNYRKEADDLHSVVSYLFQENFDVAAIVGHSKGGDVVVLYASIYNDVPMVVNLSGRFNLEKGVEERLGKEFMDRINKEGYIDVTNKSGKFLYRVTKESLMERLNTDMHAASLSISKECRFFTIHGSADEIIPVEDAYEFAKKIKINQKPKNKKAXPNHKLRVIEGANHCYTAHRIIIVVWFIIIMQFIVCVIMLFIEFVSLASQVLTDAIVECITSNEAGDIPR

SEQ ID NO: 101427 - protein, 45 aa, Setaria italica
  Transcript Sequence Number=SeqID_35453
ARNILFCVLLYMKNSGRIAISAASKAIGWRVQDSDLMATSSKHHY

SEQ ID NO: 101428 - protein, 96 aa, Setaria italica
  Transcript Sequence Number=SeqID_35454
  Subcellular localization annotation: CTP_CleavageSite=86; ConfidenceScore=5.10e-01
PSLDNNSQWNLVGCFGCGFTLGCGLAWGFGGGFLGVISESVSSLFLRWFGFSTQMAFLGALGGVSMKTPSLTHSDTFCSLAGLGCSLFYVGDSRGV

SEQ ID NO: 101429 - protein, 286 aa, Setaria italica
  Transcript Sequence Number=SeqID_35455
  Subcellular localization annotation: CTP_CleavageSite=27; ConfidenceScore=5.74e-01
MMPSGPPNPMGPGQPVGGTAASLLRTSSSLLSGGGGGQPGMGGGGGGMLSAQSPFSSLVSPRTQFGGNGLLGGASSVSSLLNRQSFGNGGHMQGPGSMQGGGMQMGTLQQRGGMDGGGDFIGAGGSDPLSFPSSSQVNLGNQMGSDNMQATSQQQQQQMDVVQDMQQQQQQLPMSYNQQPQHSQQLQQPQATVKLENGGSMVGIKSEQQMGQSDQNGPAQMMRSASGVKLEPQQLQAQMMRSLSSVKMEQQSSDSSAFLQQQQQQQQQQQQQQHQQLLRQQSLKLL

SEQ ID NO: 101430 - protein, 152 aa, Setaria italica
  misc_feature (19)..(19): Xaa can be any naturally occurring amino acid
  Transcript Sequence Number=SeqID_35456
  Gene Ontology: Mol. function=nucleic acid binding; Biological process= DNA integration
  Homolog annotation: Hit_ID=Q7XN66; Match level="QueryCoverage=100%, HitCoverage=12%, E-value=4e-37, Identity=49%"; Hit description =OSJNBa0089N06.16 protein
MSFISSIEPLTGGNYGSWXEKVEIALALSDIDLALTAPCPIELGDPVRVENESKDFDKRVRDHAPIRMQYDLDRAKWDSSNRKYLMVIKSSITEAIRGAIPECKTATKYLTKVESQFTGSSKVYASTLIRKLVTAKYTGGGVREHILRMSNM

SEQ ID NO: 101431 - protein, 270 aa, Setaria italica
  Transcript Sequence Number=SeqID_35457
  Gene Ontology: Cellular component=integral to membrane; Biological process=protein transport
  Homolog annotation: Hit_ID=Q0JAI9; Match level="QueryCoverage=100%, HitCoverage=100%, E-value=1e-134, Identity=85%"; Hit description =Secretory carrier-associated membrane protein 6
  Pfam annotation: Domain name=SCAMP; Domain location=96-270; Score =345.2; E_value=1.2e-100; Accession=PF04144.5; Description=SCAMP family
MHHDPNPFDEGAADDNPYSNGGGGGGKQQYGFRPTEPIGFGGAGRGDAVVDVPLDTMGDSKGKARELSSWESDLKRREADIKRREESLKNAGVPMEEKNWPPFFPLIHHDIANEIPANVQRLQYLAFASWLGIVLCLSWNFIAVIVCWIKEGDSKLFFLATIYALLGIPLSYLIWYRPLYRAMRTNSAFSFGWFFLCYLIHIGFCIIAAIAPPIVFHGKSLTGILAAIDTFSEHIVIGIFYFVGFGLFCLETLLSIAVLQRVYMYFRGNK

SEQ ID NO: 101432 - protein, 499 aa, Setaria italica
  Transcript Sequence Number=SeqID_35458
  Gene Ontology: Mol. function=aspartic-type endopeptidase activity; Cellular component=apoplast; Biological process=proteolysis
  Homolog annotation: Hit_ID=C0JAF8; Match level="QueryCoverage=90%, HitCoverage=86%, E-value=1e-159, Identity=64%"; Hit description =Aspartic proteinase nepenthesin-1
  Pfam annotation: Domain name=Asp; Domain location=160-497; Score= -40.9; E_value=3.9e-11; Accession=PF00026.15; Description=Eukaryotic aspartyl protease
MAASCRPSHGSFCLVLLLLAAAAVLGAAGSSSHVQLSAESLLLAADSSSCPTPQGQQHGGASTGTRMPIVHQHGPCSPLADKRGKAPSHSEILAADQRRVEYIHRRVSETTGGARPKRGAAPVQLRPGAPSATTSASSASSYATSANLPASSGQALGAGNYVVTIGLGTPSERFTVVFDTGSDTTWVQCRPCVAYCYRQQEPLFSPAKSSSYANISCSSSYCDDLDASGCDGGHCLYGVQYGDGSYTIGFFAQDTLTLAHDVVKEFRFGCGEKNRGLFGRSAGLMGLGRGKTSLTVQAYGKYGGVFAYCLPATPSGTTGFLDFGPGAPAANARLTPMLTGSVPTFYYVGMTGIKVGGHLLPIPGSVFSAGGALVDSGTVITRLPPSAYEPMRSAFAKGMDALGYKKAPAFSILDTCYDLTGYKGSIPLPAVSLVFKGGACLDVDASGILYDVDVSQACLAFAANDDDTDVAIIGNTQQKTYSVLYDLGKKVVGFAPGAC

SEQ ID NO: 101433 - protein, 145 aa, Setaria italica
  Transcript Sequence Number=SeqID_35459
  Gene Ontology: Mol. function=binding; Cellular component=spindle microtubule; Biological process=anaphase-promoting complex-dependent proteasomal ubiquitin-dependent protein catabolic process
  Homolog annotation: Hit_ID=Q10PF0; Match level="QueryCoverage=97%, HitCoverage=19%, E-value=2e-58, Identity=85%"; Hit description=TPR Domain containing protein, expressed
  Pfam annotation: Domain name=TPR_1; Domain location=36-69; Score =17.7; E_value=0.044; Accession=PF00515.20; Description =Tetratricopeptide repeat
  Pfam annotation: Domain name=TPR_2; Domain location=36-69; Score =24.7; E_value=0.00038; Accession=PF07719.9; Description =Tetratricopeptide repeat
  Pfam module annotation: Pfam domain module=TPR_1::TPR_2; Domain location=36-69::36-69
CLGCKIDEHGKVLDQDDDSDIYFDKDAEDHEINIKSAICFLRGKAYEALDNRDLARQWYKAAIKADPLCYEALECLVDNYMLTCEEESELLASLQFRKEDGWLSAFYSCLIRKHEKEYVVEAKFKELERESCSISSSSSGETLKN

SEQ ID NO: 101434 - protein, 87 aa, Setaria italica
  Transcript Sequence Number=SeqID_35460
  Gene Ontology: Mol. function=transferase activity, transferring glycosyl groups
  Homolog annotation: Hit_ID=B6SV44; Match level="QueryCoverage=97%, HitCoverage=15%, E-value=3e-26, Identity=75%"; Hit description =Transferase, transferring glycosyl groups
LAVEAGASLCPSATGCLDWRAGLGRWLYGGGGGGGDAMEEFMKEWRRSHREATLLDPVVVEAAPDSLDALMAEMGAMLASYDARLDM

SEQ ID NO: 101435 - protein, 59 aa, Setaria italica
  Transcript Sequence Number=SeqID_35461
SEQRQATASAWRLPPVCWSRADLSFPSICARSTGPCQKSQSPRHKGEVHEQCREWLMQF

SEQ ID NO: 101436 - protein, 40 aa, Setaria italica
  Transcript Sequence Number=SeqID_35462
KFTPKHNGSVSFSLQCRSISGQTPLPDHMHTCTLRTRIII

SEQ ID NO: 101437 - protein, 148 aa, Setaria italica
  Transcript Sequence Number=SeqID_35463
  Gene Ontology: Mol. function=protein serine/threonine kinase activity; Cellular component=plasma membrane; Biological process =protein amino acid phosphorylation
  Homolog annotation: Hit_ID=Q00RM8; Match level="QueryCoverage=98%, HitCoverage=14%, E-value=1e-79, Identity=95%"; Hit description =H0814G11.12 protein
  Pfam annotation: Domain name=Pkinase; Domain location=1-145; Score= -42.4; E_value=5.7e-06; Accession=PF00069.17; Description=Protein kinase domain
  Pfam annotation: Domain name=Pkinase_Tyr; Domain location=2-145; Score=-46.8; E_value=1.3e-10; Accession=PF07714.9; Description =Protein tyrosine kinase
  Pfam module annotation: Pfam domain module=Pkinase::Pkinase_Tyr; Domain location=1-145::2-145
LVNGSVAAVKRMDKVSRQAEEEFCREMELLARLHHRHLVTLKGFCIEKKERFLVYEYMANGSLKDHLHSSGRKPLSWQTRLQIAMDVANALEYLHFFCNPPLCHRDIKSSNILLDEHFVAKLADFGLAHASRTGAISFEAVNTDIRGT

SEQ ID NO: 101438 - protein, 101 aa, Setaria italica
  misc_feature (38)..(38): Xaa can be any naturally occurring amino acid
  misc_feature (50)..(50): Xaa can be any naturally occurring amino acid
  Transcript Sequence Number=SeqID_35464
  Gene Ontology: Mol. function=aspartic-type endopeptidase activity; Cellular component=chromatin; Biological process=RNA-dependent DNA replication
  Homolog annotation: Hit_ID=Q8SA91; Match level="QueryCoverage=83%, HitCoverage=3%, E-value=5e-11, Identity=45%"; Hit description =Putative gag-pol polyprotein
KALVPATGGPDAAIPKDSSQTQMDKFASLRAYRRARGXCDKCAEKWHHGXKCSPTVQLNSVQELFDLFSKDESSPAVDTPSYLGSEYPGQLFLALSQDALV

SEQ ID NO: 101439 - protein, 81 aa, Setaria italica
  Transcript Sequence Number=SeqID_35465
  Gene Ontology: Mol. function=transcription regulator activity; Cellular component=nucleus; Biological process=regulation of transcription
  Homolog annotation: Hit_ID=A3FM28; Match level="QueryCoverage=82%, HitCoverage=16%, E-value=4e-28, Identity=86%"; Hit description=Basic helix-loop-helix protein
  Pfam annotation: Domain name=HLH; Domain location=1-47; Score=24.0; E_ value=0.00048; Accession=PF00010.18; Description=Helix-loop-helix DNA- binding domain
HSLAERVRRERISERMKMLQSLVPGCNKITGKALMLDEIINYVQSLQRQVEFLSMKLSTMNPELDLDARYQTAVLAPPHHH

SEQ ID NO: 101440 - protein, 227 aa, Setaria italica
  misc_feature (20)..(20): Xaa can be any naturally occurring amino acid
  misc_feature (145)..(145): Xaa can be any naturally occurring amino acid
  misc_feature (159)..(159): Xaa can be any naturally occurring amino acid
  Transcript Sequence Number=SeqID_35466
  Gene Ontology: Mol. function=lipid binding
  Homolog annotation: Hit_ID=B6UI71; Match level="QueryCoverage=100%, HitCoverage=100%, E-value=1e-108, Identity=82%"; Hit description =Lipid binding protein
  Pfam annotation: Domain name=F-box; Domain location=7-54; Score=24.6; E_value=0.0004; Accession=PF00646.25; Description=F-box domain
MTDRSDGPIGRLPEHLIVEXFIRLPVSEWVQIACVNKQWANIFEGDCLWQTAIARNWPSAGLQKRWPGPIPRGSPRRRFQALYVSENLVPSGGEIDELVGHTYLYLKEQLERPAMPPSSILHGTIIDQFIACGKTGEKAHDLSSXIWLAVIDGLEETRXTFLLLKHLAREGEFFLPFPYSRSYKVLWRVYDKLFTDFRDCFSGADYHDALSTAKSRFQPVPSTWLGH

SEQ ID NO: 101441 - protein, 106 aa, Setaria italica
  Transcript Sequence Number=SeqID_35467
  Homolog annotation: Hit_ID=B6UI71; Match level="QueryCoverage=54%, HitCoverage=25%, E-value=2e-21, Identity=84%"; Hit description=Lipid binding protein
TSNENSFLGHFRRFQALYVSENLVPSGGEIDELVGHTYLYLKEQLERPAMPPSSILHGTIIGEVFCSTSPRMKLLLTNFRQSDMLQWIMLTSGIFFIEFVWRRKKS

SEQ ID NO: 101442 - protein, 84 aa, Setaria italica
  Transcript Sequence Number=SeqID_35468
RKARSRRGGKDKQGKRDGRERDAHKPAPLPRCSQCGKEFKPQELHAHMQSCRGFKERMRSSTSSRPSVDRRRNSTAGGHRGKPD

SEQ ID NO: 101443 - protein, 202 aa, Setaria italica
  Transcript Sequence Number=SeqID_35469
  Gene Ontology: Mol. function=protein binding; Biological process =ubiquitin-dependent protein catabolic process
  Homolog annotation: Hit_ID=Q7XSP3; Match level="QueryCoverage=95%, HitCoverage=53%, E-value=1e-53, Identity=57%"; Hit description =OSJNBa0070M12.10 protein
  Pfam annotation: Domain name=Kelch_2; Domain location=136-187; Score =28.2; E_value=3.2e-05; Accession=PF07646.7; Description=Kelch motif
  Subcellular localization annotation: CTP_CleavageSite=43; ConfidenceScore=5.49e-01
SASSSSTAAAHPPKSLAVCNPFAGTYRLLPPLGSAWARHGTVLAGPGGTVLVLTELAALSYTPSGSGKWMKHPLSLPSKPRSPILASAAAAVFALCDVGTPWRSQWKLFSCPLATLTGGWAPVERAAWGDVFEILKRPRLLAGAGGRRVLMIGGLRSSFAMDAPCSTVLILRLDLATMVWDEAGRMPPNMYRCFTGLCEAAS

SEQ ID NO: 101444 - protein, 45 aa, Setaria italica
  Transcript Sequence Number=SeqID_35470
KQLANMICLSSINVEFKQLKSAMLKIKQTLTKIHNYIILCKLPKY

SEQ ID NO: 101445 - protein, 177 aa, Setaria italica
  misc_feature (10)..(10): Xaa can be any naturally occurring amino acid
  misc_feature (78)..(78): Xaa can be any naturally occurring amino acid
  misc_feature (168)..(168): Xaa can be any naturally occurring amino acid
  Transcript Sequence Number=SeqID_35471
  Gene Ontology: Mol. function=nucleotide-sugar transmembrane transporter activity; Cellular component=integral to membrane; Biological process=nucleotide-sugar transport
  Homolog annotation: Hit_ID=B9T341; Match level="QueryCoverage=100%, HitCoverage=52%, E-value=4e-72, Identity=75%"; Hit description=Cmp -sialic acid transporter, putative
  Pfam annotation: Domain name=Nuc_sug_transp; Domain location=1-174; Score=-33.4; E_value=4.4e-11; Accession=PF04142.7; Description =Nucleotide-sugar transporter
  Pfam annotation: Domain name=TPT; Domain location=39-177; Score= -30.8; E_value=0.04; Accession=PF03151.8; Description=Triose -phosphate Transporter family
  Pfam module annotation: Pfam domain module=Nuc_sug_transp::TPT; Domain location=1-174::39-177
KLSNLQWMAXLLAVGATTSQVVVIVDAPCDSLFSAPLQGYMLGILSACLSALAGVYTEYLMKKNSDSLYWQNVQLYTXRFGVIFNMGWLIYGDFKAGFELGPWWQRLFNGYSITTWMVVFNLGSTGLLVSWLMKYSDNIVKVYSTSMAMLLTMVLSIYLFSVKATIQXFLGIMVCII

SEQ ID NO: 101446 - protein, 200 aa, Setaria italica
  Transcript Sequence Number=SeqID_35472
  Gene Ontology: Mol. function=nucleotide-sugar transmembrane transporter activity; Cellular component=integral to membrane; Biological process=nucleotide-sugar transport
  Homolog annotation: Hit_ID=B9T341; Match level="QueryCoverage=100%, HitCoverage=59%, E-value=6e-96, Identity=83%"; Hit description=Cmp -sialic acid transporter, putative
  Pfam annotation: Domain name=DUF6; Domain location=15-144; Score=2.4; E_value=0.055; Accession=PF00892.12; Description=Integral membrane protein DUF6
  Pfam annotation: Domain name=Nuc_sug_transp; Domain location=67-200; Score=-79.3; E_value=4.2e-08; Accession=PF04142.7; Description =Nucleotide-sugar transporter
  Pfam module annotation: Pfam domain module=DUF6::Nuc_sug_transp; Domain location=15-144::67-200
MQWYLVAALLTILTSSQGILTTLSQSNGKYKYDYATIPFLAELFKLSVSSFFLWKECQSSSPPRMTKEWRSVRLYLVPSVIYLIHNNVQFATLTYVDPSTYQIMGNLKIVTTGILFRLVLKRKLSNLQWMAIVLLAVGTTTSQVKGCGDAPCDSLFSAPLQGYMLGILSACLSALAGVYTEYLMKKNSDSLYWQNVQLYT

SEQ ID NO: 101447 - protein, 333 aa, Setaria italica
  Transcript Sequence Number=SeqID_35473
  Gene Ontology: Mol. function=tumor necrosis factor receptor binding; Cellular component=nuclear ubiquitin ligase complex
  Homolog annotation: Hit_ID=B4FTI4; Match level="QueryCoverage=100%, HitCoverage=84%, E-value=1e-168, Identity=85%"; Hit description =Protein BRE
  Pfam annotation: Domain name=BRE; Domain location=1-280; Score=-72.7; E_value=0.00023; Accession=PF06113.4; Description=Brain and reproductive organ-expressed protein (BRE)
PFCLDYVHWDVVYNALSPKVAPDVVFGPDDEGFHPLVDYAEAGNGDKSCLACWDCRDPKGLLALVQELRELYVEYHKKQVAKVDDARVTFELSTVLSKEGIEVCMVPSADRPDEVKFAVPLLDADFDFTKLVQGCPWRVPQKIHLQVIFPISRSSSYSSVPSAPRLKLISTPDLKSLFSVEDVKLPPWSNGMCLAEYLPALEESLNLLVVEASASIGARRRFIEALAPTFGRPIEADPIFCKRATVLSISGIFTFLVHFAIPLQFPKQQPVLTLQSSQHCNADGTPITSPPINDYPWSPRWDQAEMVERIYDFLTDECQNFKKFCSDAITQQK

SEQ ID NO: 101448 - protein, 187 aa, Setaria italica
  misc_feature (166)..(166): Xaa can be any naturally occurring amino acid
  Transcript Sequence Number=SeqID_35474
  Homolog annotation: Hit_ID=B6STI1; Match level="QueryCoverage=100%, HitCoverage=69%, E-value=7e-95, Identity=92%"; Hit description =Protein YIF1A
  Pfam annotation: Domain name=YIF1; Domain location=34-187; Score =120.8; E_value=4.4e-33; Accession=PF03878.7; Description=YIF1
  Subcellular localization annotation: CTP_CleavageSite=36; ConfidenceScore=5.30e-01
MYNNYGNPPGMQMPQQNSQPGQFNNPLYGASSGLIRSGLGVYGEKFLGSSSEFMQSNINRYFSNPQYYFHVNDQYVRNKLKVILFPFFHRGHWTRISEPVGGRLSYKPPIYDINAPDLYIPFMAFGSFIILAGFTLGFMGKFTPEAINLQFTRALIGWAFQLVILXKGLLYSNGRGEVPLLDLVAYG

SEQ ID NO: 101449 - protein, 132 aa, Setaria italica
  misc_feature (22)..(22): Xaa can be any naturally occurring amino acid
  Transcript Sequence Number=SeqID_35475
KKEKYVILPSISDVVVEQGYLXSFFGIYSIRIENVGVRKPASDDVKITGVSHPHDFRKAVLVHLLNTRNLNFSRKAPSDGQQSTSLNPIASAWEPPLGDLILEKLDEVEISVKKMQAMVQGIETSKTKTRSS

SEQ ID NO: 101450 - protein, 321 aa, Setaria italica
  Transcript Sequence Number=SeqID_35476
  Gene Ontology: Mol. function=3'-phosphoadenosine 5'-phosphosulfate transmembrane transporter activity; Cellular component=integral to membrane; Biological process=transport
  Homolog annotation: Hit_ID=B6TDX5; Match level="QueryCoverage=95%, HitCoverage=86%, E-value=1e-171, Identity=95%"; Hit description =Adenosine 3-phospho 5-phosphosulfate transporter 1
  Pfam annotation: Domain name=DUF6; Domain location=165-296; Score =3.0; E_value=0.052; Accession=PF00892.12; Description=Integral membrane protein DUF6
  Pfam annotation: Domain name=TPT; Domain location=156-294; Score= -7.8; E_value=0.0018; Accession=PF03151.8; Description=Triose -phosphate Transporter family
  Pfam annotation: Domain name=UAA; Domain location=1-302; Score=365.1; E_value=1.3e-106; Accession=PF08449.3; Description=UAA transporter family
  Pfam module annotation: Pfam domain module=DUF6::TPT::UAA; Domain location=165-296::156-294::1-302
LGIMSTLLVYGVLQEKIMRIPYGVEKEFFRYSLFLVFCNRITTSMVSAMVLLASKKSLDPVAPLHKYGVVSISNILTTTCQYEALKYVSFPVQTLAKCAKMIPVMIWGTIIMRKKYGGKDYFFAVIVTLGCSLFILYPASMDVSPFNKGRESTIWGVSLMLGYLGFDGFTSTFQDKLFKGYDMEIHNQIFYTTMCSCVLSLSGLILQNHLIPAVDFMFRHPDCFSDVVILSSVATASQFFISYTIRTFGALTFATIMTTRQLVSILLSCVWFVHPLSWMQWVGAAIVFGALYTRSFFRSKPQKPAVASPPRGSSPNPPNNS

SEQ ID NO: 101451 - protein, 154 aa, Setaria italica
  Transcript Sequence Number=SeqID_35477
  Homolog annotation: Hit_ID=B4FGS2; Match level="QueryCoverage=97%, HitCoverage=54%, E-value=6e-65, Identity=80%"; Hit description =Spindle and kinetochore-associated protein 1 homolog
  Pfam annotation: Domain name=DUF1395; Domain location=1-146; Score =144.7; E_value=2.9e-40; Accession=PF07160.4; Description=Protein of unknown function (DUF1395)
TRLQSVSQYNECELKIKEEPVAAPKKGRAPAPRWYISTEELASLSSYMRGRLTLEKVNIAINEVASYADANAHLVTCPKKKLSEDMWDKALELRDIAATEAVKGKPFFLEVDIKGPGLKLDNTGKAILTVLRHLGRIHETRIGHHRVFILSKQA

SEQ ID NO: 101452 - protein, 81 aa, Setaria italica
  Transcript Sequence Number=SeqID_35478
  Gene Ontology: Mol. function=fumarylacetoacetase activity; Biological process=aromatic amino acid family metabolic process
  Homolog annotation: Hit_ID=B6T3P4; Match level="QueryCoverage=100%, HitCoverage=19%, E-value=1e-23, Identity=73%"; Hit description =Fumarylacetoacetase
  Pfam annotation: Domain name=DUF1969; Domain location=22-81; Score =43.5; E_value=8.6e-10; Accession=PF09298.3; Description=Domain of unknown function (DUF1969)
MAEARQLRSFVEVPAGSHFPIQNLPFGVFRRRQAQEPPRPAVAIGDFALDLAAVSDAGLFDGPALAGSPCFHQETLNMFLG

SEQ ID NO: 101453 - protein, 209 aa, Setaria italica
  Transcript Sequence Number=SeqID_35479
  Gene Ontology: Mol. function=protein serine/threonine kinase activity; Biological process=protein amino acid phosphorylation
  Homolog annotation: Hit_ID=C4P7U5; Match level="QueryCoverage=93%, HitCoverage=38%, E-value=1e-111, Identity=97%"; Hit description=CBL -interacting protein kinase 13
  Pfam annotation: Domain name=Pkinase; Domain location=1-169; Score =107.2; E_value=5.4e-29; Accession=PF00069.17; Description=Protein kinase domain
  Pfam annotation: Domain name=Pkinase_Tyr; Domain location=1-167; Score=-130.9; E_value=5.1e-05; Accession=PF07714.9; Description =Protein tyrosine kinase
  Pfam module annotation: Pfam domain module=Pkinase::Pkinase_Tyr; Domain location=1-169::1-167
FARVAKGRLKEDIARRYFQQLISAVGFCHARGVFHRDLKPENLLVDERGDLKVSDFGLSAVADQFHPDGLLHTFCGTPSYVAPEVLARRGYDGAKADIWSCGVILFVLMAGYLPFHDQNLMAMYRKIYRGEFRCPRWFSKDLTSLLNRLLDTNPETRITVAQIMESRWFQKGFRPVRFYVEDDQVHSLADDENEVPELGPSQPPPPPPP

SEQ ID NO: 101454 - protein, 124 aa, Setaria italica
  misc_feature (9)..(9): Xaa can be any naturally occurring amino acid
  misc_feature (46)..(46): Xaa can be any naturally occurring amino acid
  Transcript Sequence Number=SeqID_35480
  Gene Ontology: Mol. function=oxidoreductase activity; Cellular component=chloroplast; Biological process=lipid metabolic process
  Homolog annotation: Hit_ID=Q2HWS9; Match level="QueryCoverage=76%, HitCoverage=20%, E-value=1e-43, Identity=88%"; Hit description =Plastid omega-3 fatty acid desaturase
FPLYLFKRXSPGKKGSHFNPSSDLFQPNEKKDIITSTASWLAMVGXLAGLTFVMGPIQMLKLYAVPYLVFVAWLDMVTYLHHHGHEDKIPWYRGKVNVNKASKLLVFQDGCNLQKLGYHPFLVG

SEQ ID NO: 101455 - protein, 89 aa, Setaria italica
  Transcript Sequence Number=SeqID_35481
PGPRAGGAARGRSTRIARAEPLPGGRSGREAARRGGYGVEAAWMEWVAIGYFVVQSTAAAAAGWHGTGSSAFATDGIGFLGSGVRWPTG

SEQ ID NO: 101456 - protein, 398 aa, Setaria italica
  Transcript Sequence Number=SeqID_35482
  Gene Ontology: Mol. function=oxidoreductase activity; Cellular component=chloroplast; Biological process=lipid metabolic process
  Homolog annotation: Hit_ID=B6TE28; Match level="QueryCoverage=97%, HitCoverage=88%, E-value=0.0, Identity=85%"; Hit description=Omega-3 fatty acid desaturase
  Pfam annotation: Domain name=FA_desaturase; Domain location=101-362; Score=144.7; E_value=2.8e-40; Accession=PF00487.16; Description =Fatty acid desaturase
  Pfam annotation: Domain name=FA_hydroxylase; Domain location=204-331; Score=-36.2; E_value=0.063; Accession=PF04116.5; Description=Fatty acid hydroxylase
  Pfam module annotation: Pfam domain module=FA_desaturase::FA _hydroxylase; Domain location=101-362::204-331
AAAARAAAAAIHRDWALRVSAPTRLTSTVEGEDRGSSPLGEEAAGGEFDPGAPPPFGLAEIRAAIPKHCWVKDPWRSMSYVLRDVVIVLGLAAAAARLDSWLVWPLYWAAQGTMFWALFVLGHDCGHGSFSNNPKLNSVVGHILHSSILVPYHGWRISHRTHHQNHGHVEKDESWHPLPESLYKSLDFMTRKLRFTMPFPLLAFPLYLFKRSPGKKGSHFNPSSDLFQPNEKKDIITSTASWLAMVGVLAGLTFVMGPIQMLKLYAVPYLVFVAWLDMVTYLHHHGHEDKIPWYRGKEWSYLRGGLTTLDRDYGLINNIHHDIGTHVIHHLFPQIPHYHLIEATEAAKPVLGKYYKEPKKSGPLPLHLFGVLAESLKQDHYVSDTGDVLYYQTDKKMT

SEQ ID NO: 101457 - protein, 116 aa, Setaria italica
  Transcript Sequence Number=SeqID_35483
  Gene Ontology: Mol. function=intramolecular transferase activity, phosphotransferases; Cellular component=cellular_component; Biological process=carbohydrate metabolic process
  Homolog annotation: Hit_ID=Q6ZDQ1; Match level="QueryCoverage=100%, HitCoverage=20%, E-value=5e-42, Identity=71%"; Hit description =Phosphoacetylglucosamine mutase
LGAALQGINAVVGSHAIDMGILTTPQLHWMVRCKNKGIKASESDYFTQLINSFRRMLELVPKDKGGDELAKKLIVDGANGIGGVKLEQIKAELSGLDIIVRNSGKEGEGILNHMCG

SEQ ID NO: 101458 - protein, 312 aa, Setaria italica
  Transcript Sequence Number=SeqID_35484
  Gene Ontology: Mol. function=intramolecular transferase activity, phosphotransferases; Biological process=embryonic development ending in birth or egg hatching
  Homolog annotation: Hit_ID=Q6ZDQ1; Match level="QueryCoverage=100%, HitCoverage=55%, E-value=1e-135, Identity=73%"; Hit description =Phosphoacetylglucosamine mutase
  Pfam annotation: Domain name=PGM_PMM_IV; Domain location=240-309; Score=3.5; E_value=0.029; Accession=PF00408.12; Description =Phosphoglucomutasephosphomannomutase
SGKEGEGILNHMCGADFVQKERVTPHGFSSEDLGVRCASLDGDADRLVYFRMSSASDNKVDLVDGDKILSLFALFIREQLDIINKNGSQVNKSLPARLGIVQTAYANGASTQFLKNLGLEVVFTPTGVKYLHKKALEYDIGIYFEANGHGTVVFSEDFISQLESLSNELSQAANGSAQYHAAMRLMAASQLINQAVGDALSGLLLVEAILQYKGWSFENWCELYSDLPSRQLKVKVIDRSSIVTTDAETKVSQPSSLQELIDKETANYTHGRCFVRPSGTEDVVRVYAEASTQVEADSLAKSVARHVEHLLG

SEQ ID NO: 101459 - protein, 145 aa, Setaria italica
  Transcript Sequence Number=SeqID_35485
  Homolog annotation: Hit_ID=B6TT53; Match level="QueryCoverage=100%, HitCoverage=100%, E-value=1e-65, Identity=88%"; Hit description =SAUR36-auxin-responsive SAUR family member
  Pfam annotation: Domain name=Auxin_inducible; Domain location=43-104; Score=89.3; E_value=1.3e-23; Accession=PF02519.6; Description=Auxin responsive protein
MISSKKLAQLSKKWQGMGAIGRRRVTTVDKEINPSCSSIVAGKGNCIVYSSDGKRFEIPLTYLRTTVFTELLKLSQEEFGFTSDGRITLPCDTAVMEYVMCLLRREASEDVEKALLSSIVMPCHHQSRMVQPSSGLNQQFAVCSS

SEQ ID NO: 101460 - protein, 78 aa, Setaria italica
  Transcript Sequence Number=SeqID_35486
  Subcellular localization annotation: CTP_CleavageSite=54; ConfidenceScore=5.08e-01
GKKRTKTSKLKHIHEQQHYAKWTTSRSSGGSSRARSPRAHRHGDHHRLMMLGVRSSGAQPLGLVRRRANDSALPLPRH

SEQ ID NO: 101461 - protein, 160 aa, Setaria italica
  Transcript Sequence Number=SeqID_35487
  Gene Ontology: Mol. function=nucleotide binding; Cellular component =intracellular; Biological process=regulation of transcription, DNA -dependent
  Homolog annotation: Hit_ID=B6TGJ7; Match level="QueryCoverage=91%, HitCoverage=68%, E-value=9e-67, Identity=85%"; Hit description=Ras -related protein Rab-18
  Pfam annotation: Domain name=Arf; Domain location=1-126; Score= -100.2; E_value=0.069; Accession=PF00025.13; Description=ADP -ribosylation factor family
  Pfam annotation: Domain name=Ras; Domain location=3-128; Score=141.8; E_value=2.2e-39; Accession=PF00071.14; Description=Ras family
  Pfam module annotation: Pfam domain module=Arf::Ras; Domain location =1-126::3-128
LSILSYSSSLEIFCTIWDTAGQERFRTITSSYYRGAHGIILVYDVTKRESFTNLADVWTKEIEMHSTNKDCVKMLVGNKVDKDEDRVVTREEGLALAQEYGCLFLESSAKTRENVEKCFEELALKILEVPSLLEEGSSVVKRNTLKQKQENANQSGGCCQ

SEQ ID NO: 101462 - protein, 111 aa, Setaria italica
  Transcript Sequence Number=SeqID_35488
GYASEYSHTGPARREANNVVQRTCAAAAENYSRNTPLNSKAYQPDSYSSHVPAREDVKSTHKLDGLSDVPSAPPIHDYDQDHRPVTHNDTRFSGNANSTDGLSAKKEELPK

SEQ ID NO: 101463 - protein, 63 aa, Setaria italica
  Transcript Sequence Number=SeqID_35489
FVLSFACGIALLHLFNCLVAHFNHFTFIVWLCIFMPSVVKLASKVLPPHLNMTIQTMNSSFFN

SEQ ID NO: 101464 - protein, 271 aa, Setaria italica
  misc_feature (254)..(254): Xaa can be any naturally occurring amino acid
  Transcript Sequence Number=SeqID_35490
  Gene Ontology: Mol. function=sodium:dicarboxylate symporter activity; Cellular component=plasma membrane
  Homolog annotation: Hit_ID=UPI0001A7B14A; Match level="QueryCoverage =87%, HitCoverage=28%, E-value=5e-65, Identity=50%"; Hit description =aminopeptidase
MAEEKAGKEKDVVRLERESVIPIMKPKLIIKLAYLIEHQSDREEFLKLCKRVEYTIRAWYHLQFDDMMELFALFDPVHGAKKLQQQNFSSEEIDTLEQNFLSYFFQVMEKSNFNIVNDDEVELAHSGQYLLNLPIKVDESKLDNKLLSKYFKEHHHENLPDFSDKYVIFRRGIGLDRTSNFFFMEKVDMIIARAWRKFLEKTRLQKLFSRKKNGKQKMDSKKNDDLASEVEDKELYVERIRLETMELSLHFAAXKLIGKVAIQEPTFEEVI

SEQ ID NO: 101465 - protein, 50 aa, Setaria italica
  Transcript Sequence Number=SeqID_35491
PLFLLDHGTILRSQLGANRTIYFLPLTQCPACHFVFLLYFISDFRLQKPS

SEQ ID NO: 101466 - protein, 126 aa, Setaria italica
  Transcript Sequence Number=SeqID_35492
  Gene Ontology: Mol. function=UDP-glucose:glycoprotein glucosyltransfer ase activity; Biological process=protein amino acid glycosylation
  Homolog annotation: Hit_ID=Q6ESI8; Match level="QueryCoverage=87%, HitCoverage=6%, E-value=1e-47, Identity=80%"; Hit description =Putative UDP-glucose:glycoprotein glucosyltransferase
LLVGCLASVGAGAEIRRQKNVQVALRAKWAGTPLLLEASELLSKEWKDLFWDFIDHWKELDKGSECLTAKCCVQKIVEDTRTLLNEPLSSVFEFSLTLRSASPRLVLYRQLAEESLSSVSINDSQE

SEQ ID NO: 101467 - protein, 94 aa, Setaria italica
  Transcript Sequence Number=SeqID_35493
  Gene Ontology: Mol. function=protein serine/threonine phosphatase activity; Cellular component=protein serine/threonine phosphatase complex; Biological process=protein amino acid dephosphorylation
MASTRSSSAPSPAGGDGETGLEALALAKVAEAADAIAAAASAGEVVRAIHAVAALLFPIDSAAVAGTVEEPFRTQIIEAVSVSNDERESWRRAF

SEQ ID NO: 101468 - protein, 128 aa, Setaria italica
  Transcript Sequence Number=SeqID_35494
  Gene Ontology: Mol. function=hydrolase activity; Cellular component =nucleus; Biological process=response to DNA damage stimulus
  Homolog annotation: Hit_ID=B9RQZ5; Match level="QueryCoverage=99%, HitCoverage=17%, E-value=8e-53, Identity=74%"; Hit description=DNA cross-link repair protein pso2/snm1, putative
  Pfam annotation: Domain name=DRMBL; Domain location=13-111; Score =146.6; E_value=7.9e-41; Accession=PF07522.6; Description=DNA repair metallo-beta-lactamase
LKHLELPQEIMHWFTANEAESHIHVVPMWTLASFKRMKHLSNQYAGRFDLIVAFCPTGWAFGKGKKRTPGKRWQQGSIIRYEVPYSEHSSFTELQEFVKFISPEHIIPSVNNDGPESADAMLAQLLNE

SEQ ID NO: 101469 - protein, 78 aa, Setaria italica
  Transcript Sequence Number=SeqID_35495
  Subcellular localization annotation: CTP_CleavageSite=47; ConfidenceScore=5.02e-01
HKHSIARSTHVWPKENQPIISSWPIEPNSVTRHRRMQQHTAAKTSMNASRRSRDEVDDDGFGWMLESNKTLPARLPDC

SEQ ID NO: 101470 - protein, 39 aa, Setaria italica
  Transcript Sequence Number=SeqID_35496
  Gene Ontology: Mol. function=hydrolase activity, hydrolyzing O -glycosyl compounds; Biological process=carbohydrate metabolic process
  Homolog annotation: Hit_ID=B6U0V2; Match level="QueryCoverage=100%, HitCoverage=6%, E-value=7e-09, Identity=72%"; Hit description =Hydrolase, hydrolyzing O-glycosyl compounds
  Pfam annotation: Domain name=X8; Domain location=1-35; Score=-20.7; E_ value=0.0028; Accession=PF07983.5; Description=X8 domain
FNSYYQRKGRAAGTCDFSGAGSIVNQAPKFGNCVLPSNG

SEQ ID NO: 101471 - protein, 63 aa, Setaria italica
  Transcript Sequence Number=SeqID_35497
THCLVRIPSLFVVLLRSASSENGCLRCMSMTWSLACQTLKFFVSIISFFSKDAFSYSFHFRVK

SEQ ID NO: 101472 - protein, 82 aa, Setaria italica
  misc_feature (10)..(10): Xaa can be any naturally occurring amino acid
  Transcript Sequence Number=SeqID_35498
  Gene Ontology: Mol. function=nucleic acid binding
IYCQTCIVKXLKSSSSRCPICRRSLSKEDLFLAPEVKHSDEDGAGKPVSDRPLSSKVQALLKLLKTSQNEDPSSKSVVFLSS

SEQ ID NO: 101473 - protein, 155 aa, Setaria italica
  Transcript Sequence Number=SeqID_35499
  Gene Ontology: Mol. function=ubiquitin-protein ligase activity; Cellular component=ubiquitin ligase complex; Biological process =ubiquitin-dependent protein catabolic process
  Homolog annotation: Hit_ID=B9SG36; Match level="QueryCoverage=94%, HitCoverage=18%, E-value=2e-27, Identity=47%"; Hit description =Ubiquitin-protein ligase, putative
  Pfam annotation: Domain name=Arm; Domain location=114-154; Score =42.9; E_value=1.2e-09; Accession=PF00514.15; Description =Armadillobeta-catenin-like repeat
  Subcellular localization annotation: CTP_CleavageSite=39; ConfidenceScore=5.12e-01
KVTFSRSSNHLEAVAKHKEEQVSSNSSASETARNDQMVTSSMVEPNRLPRFGGIRSRSQLVWRQLSDKAVPADSRSDSPGVDVQVRRLIEDLKNESTELQRSAIGELLILSRHSMENRIAIANHGAIPFLVSLLYSADPSTQESAVTVLLNLSIN

SEQ ID NO: 101474 - protein, 346 aa, Setaria italica
  Transcript Sequence Number=SeqID_35500
  Gene Ontology: Mol. function=ubiquitin-protein ligase activity; Cellular component=ubiquitin ligase complex; Biological process =ubiquitin-dependent protein catabolic process
  Homolog annotation: Hit_ID=B9SG36; Match level="QueryCoverage=92%, HitCoverage=40%, E-value=1e-112, Identity=64%"; Hit description =Ubiquitin-protein ligase, putative
  Pfam annotation: Domain name=Arm; Domain location=132-172; Score =25.3; E_value=0.00026; Accession=PF00514.15; Description =Armadillobeta-catenin-like repeat
  Pfam annotation: Domain name=Arm; Domain location=173-213; Score =42.1; E_value=2.2e-09; Accession=PF00514.15; Description =Armadillobeta-catenin-like repeat
  Pfam annotation: Domain name=Arm; Domain location=214-253; Score =23.1; E_value=0.0011; Accession=PF00514.15; Description =Armadillobeta-catenin-like repeat
  Pfam annotation: Domain name=Arm; Domain location=254-294; Score =22.1; E_value=0.0023; Accession=PF00514.15; Description =Armadillobeta-catenin-like repeat
  Pfam annotation: Domain name=Arm; Domain location=296-333; Score=4.5; E_value=3.3; Accession=PF00514.15; Description=Armadillobeta-catenin -like repeat
  Pfam annotation: Domain name=Arm; Domain location=91-131; Score=42.9; E_value=1.2e-09; Accession=PF00514.15; Description=Armadillobeta -catenin-like repeat
  Pfam module annotation: Pfam domain module=Arm::Arm::Arm::Arm::Arm::Ar m; Domain location=132-172::173-213::214-253::254-294::296-333::91-131
VNSDASETARNDQMVTSSMVEPNRLPRFGGIRSRSQLVWRQLSDKAVPADSRSDSPGVDVQVRRLIEDLKNESTELQRSAIGELLILSRHSMENRIAIANHGAIPFLVSLLYSADPSTQESAVTVLLNLSINDNNKIAIACANAIEPLIHVLETGNPEAKANSAATLFSLSVNEENKAKIGRSGAIKPLVDLLEDGNAQGKKDAATALFNLSIFHENKARIIEAGAVKPLVELMDPAAGMVDKAVSVLSILATVQEGRDGIAQAGGIPVLVEVVELGSARAKENAAAALLQLCTNNSKFCSLVLQEGAMPPLVALSQSGTARAREKAQVLLSFFRNQRQVGKVIRR

SEQ ID NO: 101475 - protein, 186 aa, Setaria italica
  Transcript Sequence Number=SeqID_35501
PSGGNLHDGPSSPVSVYCAPSSEKERKISPGLVVKVPEFPDDDDDDDKVEEEKEAEVGDHDDFNAQYDDTLSKSIGDNTKSKKPVSINGALASALEALLTSTKGTSSSTPVVCTASDLSAENTNDSVSCSLSPEKMDEMSAKDRSADQYLGTSGNANLVGTFRSSQEINVTPHTSLSKECWMARFR

SEQ ID NO: 101476 - protein, 54 aa, Setaria italica
  Transcript Sequence Number=SeqID_35502
MAQAMAAASELISTTLKRPFGSDGPLGDDNGGGALAHADEKPKARRREADPAAA

SEQ ID NO: 101477 - protein, 70 aa, Setaria italica
  Transcript Sequence Number=SeqID_35503
HLLQNIKMCSSHLPDSTTHRSNSTIKTARMFVDGHPESCLQILLVPPLNLFLWRKRSLQHYFKVSNIHSA

SEQ ID NO: 101478 - protein, 61 aa, Setaria italica
  Transcript Sequence Number=SeqID_35504
LLDLLLFRFRSCSVASSLTRRARGNQRERDRERAAARKPNAKGSQGTGLQPRKTRRPTKER

SEQ ID NO: 101479 - protein, 174 aa, Setaria italica
  Transcript Sequence Number=SeqID_35505
CIRVTASLQTTNEFMTQQTSHLRGCEGTQANGIDNRTELRRGRPVRPLLLAAALVLVVRGGPGAAARRLLRLLGRLLLQRLLVPLAALLRGEPVLGPLGVGLPRRRALTVAFPLVAASHLAASALLALALSAGQNSATTRRICPLFLSLLRARRWPMGGNLRWGLMRRSRCWVV

SEQ ID NO: 101480 - protein, 93 aa, Setaria italica
  misc_feature (1)..(34): Xaa can be any naturally occurring amino acid
  Transcript Sequence Number=SeqID_35506
  Subcellular localization annotation: CTP_CleavageSite=67; ConfidenceScore=5.20e-01
XXXXXXXXXXXXXXXXXXXXXXXXXXXXXXXXXXFFFFFLFTCRFTGSSLYLTVGSSIQISGFMYISGATSVKSSYSLFLLSLYFLPGLLTKL

SEQ ID NO: 101481 - protein, 86 aa, Setaria italica
  Transcript Sequence Number=SeqID_35507
SSTHVFSLMKPYCIHEITEGLHAMLLAVYHVTPDRKKEQSESVIRKILILTSESSYGGKVVIHTVAEVMERVTGEVADAFPINENL

SEQ ID NO: 101482 - protein, 314 aa, Setaria italica
  misc_feature (42)..(42): Xaa can be any naturally occurring amino acid
  Transcript Sequence Number=SeqID_35508
  Gene Ontology: Cellular component=plasma membrane
  Homolog annotation: Hit_ID=Q5K2M9; Match level="QueryCoverage=89%, HitCoverage=38%, E-value=1e-131, Identity=85%"; Hit description =START domain-containing protein
  Pfam annotation: Domain name=DUF1336; Domain location=66-271; Score =391.2; E_value=1.8e-114; Accession=PF07059.4; Description=Protein of unknown function (DUF1336)
NRSMGMIDEESDEDDEYQVPEADLEEDPNKSDSDAKRTDDPXEKIDLSCFSGILHRDADEKSRNCWTVPDSKIFKVRSKNFPQDKSKIPAASYLMELAAIDWFKDTKRMDNVARQKGCVAQVAAEKGMHTFVVNIQIPGSTQYSLVMYFVASSLKKGSLLQRFFDGDDEFRNSRLKLIPSVPKGSWIVRQSVGSTPCLLGKAVDCSYVRGPGYLEVVDVDIGSSAVANGVLGLVFGVVTTLVVDMAFLIQANTYEELPEQVIGAARLAHVEPATAVVPDLAIWKLEHLVTDSFHCQFHVIFLSHNYHPTSTYPS

SEQ ID NO: 101483 - protein, 66 aa, Setaria italica
  Transcript Sequence Number=SeqID_35509
  Homolog annotation: Hit_ID=Q01JI5; Match level="QueryCoverage=87%, HitCoverage=24%, E-value=3e-10, Identity=63%"; Hit description =H0818E04.21 protein
RAACYAVGSISCYAEVMERVTGEVADAFPINENLKEAAKASKIKAVTDVMEEDAEKAKALIQKLPV

SEQ ID NO: 101484 - protein, 78 aa, Setaria italica
  Transcript Sequence Number=SeqID_35510
DIMTQNRFYNTQMKIEDYKRWDQLSLSYLSRALGLASLTLSYQYRKYSFLWFSHRLGAHKILNITSTRTNVYHPICQG

SEQ ID NO: 101485 - protein, 68 aa, Setaria italica
  Transcript Sequence Number=SeqID_35511
  Homolog annotation: Hit_ID=Q8LKQ0; Match level="QueryCoverage=69%, HitCoverage=26%, E-value=2e-09, Identity=68%"; Hit description =Putative cell cycle regulatory protein kinase Wee1 (Fragment)
MTQVANEFDDDKVLRENIVLILHICFENEQLCIQMELCDCCLSVNLNQPLKHWEALELLYQVGDRLVL

SEQ ID NO: 101486 - protein, 71 aa, Setaria italica
  Transcript Sequence Number=SeqID_35512
  Homolog annotation: Hit_ID=Q01JI5; Match level="QueryCoverage=80%, HitCoverage=23%, E-value=6e-12, Identity=70%"; Hit description =H0818E04.21 protein
IGSIIFRTHLEIVVIHTVAEVMERVTGEVADAFPINENLKEAAKASKIKAVTDVMEEDAEKAKALIQKLPV

SEQ ID NO: 101487 - protein, 191 aa, Setaria italica
  misc_feature (7)..(7): Xaa can be any naturally occurring amino acid
  misc_feature (69)..(69): Xaa can be any naturally occurring amino acid
  misc_feature (145)..(145): Xaa can be any naturally occurring amino acid
  Transcript Sequence Number=SeqID_35513
  Homolog annotation: Hit_ID=Q01JT0; Match level="QueryCoverage=93%, HitCoverage=40%, E-value=6e-54, Identity=58%"; Hit description =OSIGBa0152L12.4 protein
KQNYPGXYVSDDTSGNGQSCEHVVYHWHQCPPDTRALTILDEFLKCYKWSPGHEEECQKIFNRKAVRQXVNLFCHERQRIRQVLAAKKDKKSSPAPRARGEMELEEDDVREDSDKEQRDESMVVLEHEDPLKWKPFVPLWINQNXWEMLCDHWAKDEVMQSYQQRKNAAGSQKITLHEQVMGRTKNANPAC

SEQ ID NO: 101488 - protein, 63 aa, Setaria italica
  Transcript Sequence Number=SeqID_35514
  Gene Ontology: Mol. function=protein disulfide oxidoreductase activity; Cellular component=chloroplast; Biological process =glycerol ether metabolic process
  Homolog annotation: Hit_ID=Q5JMR9; Match level="QueryCoverage=100%, HitCoverage=51%, E-value=1e-25, Identity=87%"; Hit description =Thioredoxin M-like
  Pfam annotation: Domain name=Thioredoxin; Domain location=1-57; Score= -19.0; E_value=0.0074; Accession=PF00085.12; Description=Thioredoxin
LSDKIQVVKIDTEKYTSIANRYRIEALPTFIIFKNGKPCHRFEGALPANQLIEQIENVLAVTE

SEQ ID NO: 101489 - protein, 136 aa, Setaria italica
  Transcript Sequence Number=SeqID_35515
  Gene Ontology: Mol. function=protein disulfide oxidoreductase activity; Cellular component=chloroplast; Biological process =glycerol ether metabolic process
  Homolog annotation: Hit_ID=Q5JMR9; Match level="QueryCoverage=83%, HitCoverage=92%, E-value=6e-56, Identity=90%"; Hit description =Thioredoxin M-like
  Pfam annotation: Domain name=Thioredoxin; Domain location=28-130; Score=116.4; E_value=9.4e-32; Accession=PF00085.12; Description =Thioredoxin
LRCSPPTLGLRRGTTGPSRRGSAALRVEAKKQTFSSFDELLEKSEKPLLVDFYATWCGPCQYMVPILQEVSEKLSDKIQVVKIDTEKYTSIANRYRIEALPTFIIFKNGKPCHRFEGALPANQLIEQIENVLAVTE

SEQ ID NO: 101490 - protein, 89 aa, Setaria italica
  Transcript Sequence Number=SeqID_35516
  Subcellular localization annotation: CTP_CleavageSite=66; ConfidenceScore=5.20e-01
NTVNNQPIIIRAFLSMGKWPLVLVLPFFSFIFPMLAGTFTSLLPHCLANKKDAGRDRPARPGRNCGGAAARGGSSGGFWEGGRKEEPAV

SEQ ID NO: 101491 - protein, 101 aa, Setaria italica
  Transcript Sequence Number=SeqID_35517
  Gene Ontology: Mol. function=anthranilate synthase activity; Biological process=folic acid and derivative biosynthetic process
  Homolog annotation: Hit_ID=Q5Z856; Match level="QueryCoverage=84%, HitCoverage=9%, E-value=6e-29, Identity=70%"; Hit description =Putative aminodeoxychorismate synthase/glutamin amidotransferase
VLEGELSNISNDNASESDGSRVIMAIRHSSRPHYGVQFHPESVATHYGRQIFQNFKKMTRDFGLHSSWLQETKVHSIGKLEKSQVLSVVKLFDTNPLYASF

SEQ ID NO: 101492 - protein, 219 aa, Setaria italica
  Transcript Sequence Number=SeqID_35518
  Gene Ontology: Mol. function=anthranilate synthase activity; Biological process=folic acid and derivative biosynthetic process
  Homolog annotation: Hit_ID=Q5Z856; Match level="QueryCoverage=98%, HitCoverage=25%, E-value=2e-75, Identity=63%"; Hit description =Putative aminodeoxychorismate synthase/glutamin amidotransferase
SSTLTFLGSLDNNFMAIPLEHSISCGELSNISNDNASESDGSRVIMAIRHSSRPHYGVQFHPESVATHYGRQIFQNFKKMTRDFGLHSSWLQETKVNSAGQCGSVSHDLLHTERLELQEPNGACMLAQRAIGKKCLRLRWKKIDRFLCSSVGSEDIFTALFGHQSGEDTFWLDSSSVDQNRARFSFMGGKGGSLWKQMTFHLSGQRANCGGTLIIRDAW

SEQ ID NO: 101493 - protein, 431 aa, Setaria italica
  Transcript Sequence Number=SeqID_35519
  Gene Ontology: Mol. function=amino acid binding; Biological process =metabolic process
  Homolog annotation: Hit_ID=B4F9T0; Match level="QueryCoverage=98%, HitCoverage=93%, E-value=0.0, Identity=90%"; Hit description=ACR4
  Pfam annotation: Domain name=ACT; Domain location=111-183; Score =42.2; E_value=2.1e-09; Accession=PF01842.17; Description=ACT domain
  Pfam annotation: Domain name=ACT; Domain location=18-85; Score=9.6; E_ value=0.81; Accession=PF01842.17; Description=ACT domain
  Pfam annotation: Domain name=ACT; Domain location=245-310; Score =17.0; E_value=0.078; Accession=PF01842.17; Description=ACT domain
  Pfam annotation: Domain name=ACT; Domain location=323-389; Score =35.1; E_value=2.9e-07; Accession=PF01842.17; Description=ACT domain
  Pfam module annotation: Pfam domain module=ACT::ACT::ACT::ACT; Domain location=111-183::18-85::245-310::323-389
NFGDCRIVIDNESSAEATIVRVDSANEYGILLEVIQVMIDLNLVIGKAYITSDGGWFMDVFNVTDKEGKKIKDDVTLAQIEDYIRKSLGADSRYIPSRRRSVGVAAAADHNVIELMGTDRPGLLSEVSAVLASLKCNVVSAEIWTHNTRAAAVMRVTDEDTGLAVTDPDRLERIRERLSYLLRGGDLSRGAAMAVSSETATMHTERRLHQMMLDDGDYEQLQRQAPEQSQRPNVTVRNWNDKDYSVVTIRCKDRSKLLFDTVCTLTDLQYVVFHANIDAKDNQAYQEFYVRHVNGSPMNTETERLRVIQCLEAAIERRVSEGVKLELCTNDKVGLLSEVTRIFRENSLTVTRAEVTTRGRMAVNTFYVRGSAGEAVDQKTIDSIRQAIGQNLQVKGQPEPPVAQKKESPTWFLFANLFRPRSLYSFGLFMC

SEQ ID NO: 101494 - protein, 260 aa, Setaria italica
  Transcript Sequence Number=SeqID_35520
  Gene Ontology: Cellular component=mitochondrial matrix
  Homolog annotation: Hit_ID=B6TFV4; Match level="QueryCoverage=73%, HitCoverage=72%, E-value=7e-78, Identity=73%"; Hit description =Mitochondrial glycoprotein
  Pfam annotation: Domain name=MAM33; Domain location=78-258; Score =89.2; E_value=1.4e-23; Accession=PF02330.8; Description =Mitochondrial glycoprotein
  Subcellular localization annotation: CTP_CleavageSite=85; ConfidenceScore=5.73e-01
MSTAFLAARLLRRAATASSPLSTLARRALHLGRAPVPLPRRLPAAASSPAAAARRFLASQSPASSSKADADENLRRVIESEIECVVQSEESLADKCIDLPDDFPFEVIDNPGDQSITLKREFAGETIKSAVYTNFDTEEDLDEDDGSDNDKESFKPAIQMVVTVEKSEGPILEFDCNFNDDELAIENMRVLNRDDLDVEHAYEGPPFSDLDESLQKALHRYLETRGIKHSLHDWLYEYMMKKDEKEYVVWLKNMKEFIGN

SEQ ID NO: 101495 - protein, 256 aa, Setaria italica
  misc_feature (144)..(144): Xaa can be any naturally occurring amino acid
  Transcript Sequence Number=SeqID_35521
  Gene Ontology: Mol. function=ion channel activity; Cellular component= voltage-gated potassium channel complex; Biological process=potassium ion transport
  Homolog annotation: Hit_ID=B9SZD2; Match level="QueryCoverage=98%, HitCoverage=47%, E-value=5e-67, Identity=49%"; Hit description =Protein binding protein, putative
EFTHLATFECPHRENCILVVDPVTLKPMQEIGRQSGSAAKSSTPCRVVHLPAPGLVFASFVSSGAFGYSGYMRLWDIRSGNVVWETSEPGGAGRSSRFGDPFADADVDVKQQAIYKVCSKSGDVAVADLRSLGNDPWAYMSSGXIRSGGGYGSVLHCHQSQVFVSRKDGLEVWSRLGEQLHDTGDFAEQSGTKEGPRSEGIDESFYRSCYVDTEEDAKRGMIQMMAGGGDRLFLTRENMQGVEVWETSHLAGAVSL

SEQ ID NO: 101496 - protein, 84 aa, Setaria italica
  Transcript Sequence Number=SeqID_35522
  Homolog annotation: Hit_ID=B6U6R2; Match level="QueryCoverage=76%, HitCoverage=11%, E-value=4e-22, Identity=83%"; Hit description =Calmodulin binding protein
AQDAQTGTEIVQLDPYRFRFSLTSPAEIMPLQDINNEENALVNDTEQRSKEEPLSTESLKGSKRRSSFSTKPEYPENGSKNSPA

SEQ ID NO: 101497 - protein, 56 aa, Setaria italica
  Transcript Sequence Number=SeqID_35523
  Homolog annotation: Hit_ID=B6U6R2; Match level="QueryCoverage=100%, HitCoverage=9%, E-value=2e-15, Identity=75%"; Hit description =Calmodulin binding protein
  Subcellular localization annotation: CTP_CleavageSite=43; ConfidenceScore=5.07e-01
TRRHSLPSSTNGKMVSHSPRTQRPTNAGGKDGAKGDKAMLSSRDASERPLKAEWRR

SEQ ID NO: 101498 - protein, 574 aa, Setaria italica
  Transcript Sequence Number=SeqID_35524
  Gene Ontology: Cellular component=plasma membrane
  Homolog annotation: Hit_ID=B6U6R2; Match level="QueryCoverage=100%, HitCoverage=100%, E-value=0.0, Identity=80%"; Hit description =Calmodulin binding protein
  Pfam annotation: Domain name=IQ; Domain location=111-131; Score=29.8; E_value=1.1e-05; Accession=PF00612.19; Description=IQ calmodulin -binding motif
  Pfam annotation: Domain name=IQ; Domain location=133-153; Score=21.5; E_value=0.0034; Accession=PF00612.19; Description=IQ calmodulin -binding motif
  Pfam annotation: Domain name=IQ; Domain location=159-179; Score=4.4; E_value=11; Accession=PF00612.19; Description=IQ calmodulin-binding motif
  Pfam module annotation: Pfam domain module=IQ::IQ::IQ; Domain location=111-131::133-153::159-179
  Subcellular localization annotation: CTP_CleavageSite=60; ConfidenceScore=5.51e-01
MGKSPAKWIKSVLFGKKSSSRSGSTKAKDLSKGASNKGYAGKEPAFSESSPVISEPVLVSAHNNEAVREVPKGENSSVQGEVAVPDVNQDLEKHDTVGSDASNDAERLREEQAAVKAQAAFRGYLARRAFRALKGIIRLQALIRGHLVRRQAVSTLRATWLIVNFQALIRGRNVRLSQAAIHASRKLTQQNFGGAKPDLWKEKLSSNAFARKLLSSPIVVEALHFQYDEMDPNSAFNWLERWTISHVWKPISQPKRVGTDAKPHARKASYAMETESAKLKRNARKSSATPFEPSQTNTTTEIEKTKRIPRKMSSAPADSVPDGQLTELEKVKRSLRKVTNSMAETSKVSNPAPEIPDDQEVRCDRPLRSAKQVPVHPESQEPQNVNLLDNAKMAILVPDLQPDEEIASDPVINEEKVDELSVVTPPAEIMPLQDINNEENALVNDTEQRSKEEPLSTESLKGSKRRSSFSTKPEYPENGSKNSPALPSYMAATQSAKAKLRGQNSPRLSSDSAEKNGFTRRHSLPSSTNGKMVSHSPRTQRPTNAGGKDGAKGDKAMLSSRDASERPLKAEWRR

SEQ ID NO: 101499 - protein, 96 aa, Setaria italica
  Transcript Sequence Number=SeqID_35525
  Gene Ontology: Mol. function=serine-type carboxypeptidase activity; Biological process=proteolysis
  Subcellular localization annotation: CTP_CleavageSite=32; ConfidenceScore=5.60e-01
PSRVATAALLLVLVLTVTTSTSPAAAQRFPARARPTKSGYLNVTSTNSLYFAFYEATDPVTAPPTAAPLLVWLQGGPGCSSLIGNFAELGPTSSST

SEQ ID NO: 101500 - protein, 194 aa, Setaria italica
  Transcript Sequence Number=SeqID_35526
  Gene Ontology: Cellular component=nucleus; Biological process =regulation of transcription, DNA-dependent
  Homolog annotation: Hit_ID=A7YJG7; Match level="QueryCoverage=24%, HitCoverage=6%, E-value=8e-16, Identity=84%"; Hit description=ELF3 protein
  Subcellular localization annotation: CTP_CleavageSite=63; ConfidenceScore=5.78e-01
VVVSPSSVSLSSASFPLPIPTPPRPSAAAAARYFSTSPPNSLRAGPRFQSPHLLSRPPLPGTPASRRGDRILPASLADFCLDRDWWWILSPARGARARGGSSAPSNPPSSSSLSSKPGHGRARCRAAAAWLLLLRGHRRSHEAGAGKDEAPDKVMGPLFPRLHVNDTVKGGPRAPPRNKMALYEQFSVPSHRFS

SEQ ID NO: 101501 - protein, 94 aa, Setaria italica
  Transcript Sequence Number=SeqID_35527
MDAGAEAASSSPSKLGHRLRTTVCCCFGGGSGAGPERVRWRRRGAAAGEFRYDALSYALNFDEGGGDDDEACAADPAAAFRYRNFNARLPPSPA

SEQ ID NO: 101502 - protein, 217 aa, Setaria italica
  Transcript Sequence Number=SeqID_35528
  Gene Ontology: Mol. function=actin binding; Cellular component =integral to membrane; Biological process=actin cytoskeleton organization and biogenesis
  Homolog annotation: Hit_ID=Q6H7U3; Match level="QueryCoverage=100%, HitCoverage=24%, E-value=5e-95, Identity=81%"; Hit description =Formin-like protein 10
  Pfam annotation: Domain name=FH2; Domain location=1-217; Score=-67.2; E_value=1.6e-06; Accession=PF02181.15; Description=Formin Homology 2 Domain
LQEDASSLGDSFLQLEAACGELKHRLFLKLLEAVLKTGNRLNDGTFRGGANAFKLDTLLKLSDVKGADGKTTLLHFVVQEIIRSEGVREARSAMESGRSPSSTSDDNSNGSLEVEEDGDYYSHRGLKIVSGLSTEMDNVKRVAALDAEALSASVVNLRHELLKSKEFLSEIATIEEKSGFRRSLECFVEYADNETKQKMKEEKRLRSLVKKTIRYFH

SEQ ID NO: 101503 - protein, 114 aa, Setaria italica
  Transcript Sequence Number=SeqID_35529
  Gene Ontology: Cellular component=chloroplast envelope
  Homolog annotation: Hit_ID=Q8YRQ3; Match level="QueryCoverage=83%, HitCoverage=57%, E-value=3e-12, Identity=40%"; Hit description =All3391 protein
SGGYSETVAVEAVTAYLLYLSWTPDTLRAMFASKYWLPELPSIVRMFASEMTVASAWIHLLAVDLFAARQVYHDGLKNNIETRHSVSLCLLFCPVGILVHVATKVLAGAVGRSH

SEQ ID NO: 101504 - protein, 81 aa, Setaria italica
  Transcript Sequence Number=SeqID_35530
  Subcellular localization annotation: CTP_CleavageSite=42; ConfidenceScore=5.22e-01
PNTLMADQLLHTHPSNDIKLRAQQHPPTKALLRILRIRRLFRAFVSKNVGRVAVALGGATAMVLGLLSKKAGAVELRRNKI

SEQ ID NO: 101505 - protein, 109 aa, Setaria italica
  Transcript Sequence Number=SeqID_35531
NHAENCRYASDRTETSPEQKKYPIYHNQERTIMPTLGQVKYKIICYCDSKSIKFVVTVAGTVELGKDVVVAATQVDLITFGLSSRSLRKRKSKRLDSGEHHSNPWKYLV

SEQ ID NO: 101506 - protein, 63 aa, Setaria italica
  Transcript Sequence Number=SeqID_35532
RSMWLGTVAIAYLQFECIGRCASPILASSNHQSCQVHEQRYAIRYGLSYRPCTSHMGCACWTI

SEQ ID NO: 101507 - protein, 129 aa, Setaria italica
  misc_feature (122)..(122): Xaa can be any naturally occurring amino acid
  Transcript Sequence Number=SeqID_35533
  Gene Ontology: Mol. function=protein kinase activity; Cellular component=plasma membrane; Biological process=protein amino acid phosphorylation
  Homolog annotation: Hit_ID=B9RWV4; Match level="QueryCoverage=85%, HitCoverage=11%, E-value=2e-20, Identity=46%"; Hit description =Receptor protein kinase, putative
  Pfam annotation: Domain name=LRR_1; Domain location=16-35; Score=0.9; E_value=2.1e+02; Accession=PF00560.25; Description=Leucine Rich Repeat
  Pfam annotation: Domain name=LRR_1; Domain location=38-60; Score =11.2; E_value=2.2; Accession=PF00560.25; Description=Leucine Rich Repeat
  Pfam annotation: Domain name=LRR_1; Domain location=62-86; Score=4.8; E_value=38; Accession=PF00560.25; Description=Leucine Rich Repeat
  Pfam annotation: Domain name=LRR_1; Domain location=88-113; Score =14.0; E_value=0.63; Accession=PF00560.25; Description=Leucine Rich Repeat
  Pfam module annotation: Pfam domain module=LRR_1::LRR_1::LRR_1::LRR _1; Domain location=16-35::38-60::62-86::88-113
  Subcellular localization annotation: CTP_CleavageSite=45; ConfidenceScore=5.57e-01
FFCFFSFFRFLSSSFPSVYLDLTGNAFSGPLPPAFPPTIRFLMLSCNQFSGPIPEGLSKSPLLLHLNVSGNQLSGSPDFAGALWPLERLRTLDLSRNQFSGPVTDGIARLHNLKTVSLAGNXFFGAVPQ

SEQ ID NO: 101508 - protein, 104 aa, Setaria italica
  misc_feature (6)..(6): Xaa can be any naturally occurring amino acid
  Transcript Sequence Number=SeqID_35534
  Gene Ontology: Mol. function=electron carrier activity; Biological process=oxidation reduction
  Homolog annotation: Hit_ID=B6SY44; Match level="QueryCoverage=100%, HitCoverage=17%, E-value=4e-26, Identity=67%"; Hit description =Cytochrome P450 CYP78A53
RAIGFXPHGTYWRALRRVASTHLFSPWQVAASGAQRAVIARQMVGAIKGLSDAGRGGDVEVRRVLRRGSLHNVMWSVFGQRYDLELDPAKESPETRELRALVDE

SEQ ID NO: 101509 - protein, 83 aa, Setaria italica
  Transcript Sequence Number=SeqID_35535
  Subcellular localization annotation: CTP_CleavageSite=56; ConfidenceScore=5.20e-01
WSCVSSGGRTTSLRRGGGTGGRTGGLGWATASAFLGGMVPDLLLCASIPRVTVETCQSSRPAVSNRDSGLSLSLSVLPSALVG

SEQ ID NO: 101510 - protein, 108 aa, Setaria italica
  Transcript Sequence Number=SeqID_35536
  Gene Ontology: Cellular component=chloroplast envelope
  Homolog annotation: Hit_ID=Q7F2H9; Match level="QueryCoverage=93%, HitCoverage=26%, E-value=5e-36, Identity=74%"; Hit description =P0432B10.9 protein
TYRNVLRLNAATWGLHMGGSSNLRYQTLNGIEYVLGKVAPAPVFKASVVALRCINNVLGGMSFVLLARLTGAQKSDKPATVAEEKETLIAVGNAAADAISEAKEGEGK

SEQ ID NO: 101511 - protein, 249 aa, Setaria italica
  Transcript Sequence Number=SeqID_35537
  Gene Ontology: Cellular component=chloroplast envelope
  Homolog annotation: Hit_ID=Q7F2H9; Match level="QueryCoverage=100%, HitCoverage=64%, E-value=1e-105, Identity=75%"; Hit description =P0432B10.9 protein
LGVFLAGWAARVAADPQFPFKVLMEEVVGVTACVLGDMASRPNFGLNELDLVFSTIVVGSIVNFVIMYLLAPTAAASSVASALPNYMFEPGAYTLGSRVATLLSKGATFTMVGFAAGLAGTALSNGLIAMRKRMDPAFETPNKAPPTLLNAATWALHMGVSSNLRYQTLNGIEYLLGKVAPGPVFKVSVLALRCMNNVLGGMSFVLLARLTGAQRSDKPTTVAEEKETLIAVSNAAADAISEAKEGEGK

SEQ ID NO: 101512 - protein, 90 aa, Setaria italica
  misc_feature (38)..(38): Xaa can be any naturally occurring amino acid
  Transcript Sequence Number=SeqID_35538
QSAPSFDHTKFFHGLVAQVNEKIRGFQARVSELWYVEXYDVLALALNGKMKVRRLHLDCNRRAMKIHKEVMRMGKELGYALCKAVVKQKF

SEQ ID NO: 101513 - protein, 258 aa, Setaria italica
  Transcript Sequence Number=SeqID_35539
ELYAKMARDLDERGAAFLRGGETSQSLTLTDLFDTADDGAVVPRLKAADPPVRANVLYLDPEFAAVISKAVKEVFLPYFDQVIWFQNTSMYHFSLFHASHHLEPIVATDDEIEAEVEAVKKVTKTICPLKIVLDRVVLTSTGVLLGLWQVESGTDPAEIRSRLREALLRAPQKQLYDSVLLHTSFARILGHPKLPQEQSAPSFDHTKFFHGLVAQVNEKIRGFQARVSELWYVEEYDVLALALNGKMKVRRLHLDCNR

SEQ ID NO: 101514 - protein, 64 aa, Setaria italica
  Transcript Sequence Number=SeqID_35540
  Gene Ontology: Mol. function=protein serine/threonine phosphatase activity; Cellular component=protein serine/threonine phosphatase complex; Biological process=protein amino acid dephosphorylation
  Homolog annotation: Hit_ID=Q94H98; Match level="QueryCoverage=93%, HitCoverage=15%, E-value=8e-25, Identity=86%"; Hit description =Probable protein phosphatase 2C 34
WLYCQVSRSIGDFYLKKPEYSLDPLFRQVGPPVALKRPALSAEPSIQVRKLKPNDLFLIFASDG

SEQ ID NO: 101515 - protein, 83 aa, Setaria italica
  Transcript Sequence Number=SeqID_35541
  Gene Ontology: Mol. function=protein serine/threonine phosphatase activity; Cellular component=protein serine/threonine phosphatase complex; Biological process=protein amino acid dephosphorylation
  Homolog annotation: Hit_ID=Q94H98-3; Match level="QueryCoverage=97%, HitCoverage=31%, E-value=4e-36, Identity=91%"; Hit description =Isoform 3 of Probable protein phosphatase 2C 34
RPHAAGEFSMAAAQANVAMEDQAQVLASPSATLVGVYDGHGGVDASRFLRSRLFPHVQRFATEQGGMSTEVIRRAFGAADHLR

SEQ ID NO: 101516 - protein, 114 aa, Setaria italica
  Transcript Sequence Number=SeqID_35542
  Gene Ontology: Mol. function=magnesium ion binding; Cellular component=chloroplast; Biological process=photosynthesis, light harvesting
  Homolog annotation: Hit_ID=Q10HD0; Match level="QueryCoverage=100%, HitCoverage=44%, E-value=8e-54, Identity=89%"; Hit description =Chlorophyll a-b binding protein, chloroplastic
  Pfam annotation: Domain name=Chloroa_b-bind; Domain location=60-114; Score=5.7; E_value=9.1e-06; Accession=PF00504.13; Description =Chlorophyll A-B binding protein
  Subcellular localization annotation: CTP_CleavageSite=22; ConfidenceScore=5.11e-01
MAASALHQTTSFLGQALVSRPAAAADAGGRITMRRTVKSAPQSIWYGPDRPKYLGPFSEQTPSYLTGEFPGDYGWDTAGLSADPETFARNRELEVIHSRWAMLGALGCVFPEIL

SEQ ID NO: 101517 - protein, 76 aa, Setaria italica
  misc_feature (55)..(55): Xaa can be any naturally occurring amino acid
  Transcript Sequence Number=SeqID_35543
  Gene Ontology: Mol. function=aspartic-type endopeptidase activity; Cellular component=chromatin; Biological process=chromatin assembly or disassembly
  Homolog annotation: Hit_ID=Q8W1D1; Match level="QueryCoverage=90%, HitCoverage=4%, E-value=2e-25, Identity=78%"; Hit description=Gag-pol
RHECNTHNLRTAQSRQKSYADTRRSELTVEVGDYVYLNVSPIRGLRRFKVKGKLXPHYISPFKVLERRGEVAYQLE

SEQ ID NO: 101518 - protein, 64 aa, Setaria italica
  Transcript Sequence Number=SeqID_35544
  Subcellular localization annotation: CTP_CleavageSite=44; ConfidenceScore=5.34e-01
PPPPPNHVPSTSCHPLSPLVQDFTCWCWKLASRPISAPPLTSSSCVHPGNSCLPSMRLLNSIPE

SEQ ID NO: 101519 - protein, 434 aa, Setaria italica
  misc_feature (377)..(377): Xaa can be any naturally occurring amino acid
  Transcript Sequence Number=SeqID_35545
  Gene Ontology: Mol. function=binding; Cellular component=chloroplast
  Homolog annotation: Hit_ID=B9RTG3; Match level="QueryCoverage=100%, HitCoverage=72%, E-value=1e-132, Identity=35%"; Hit description =Pentatricopeptide repeat-containing protein, putative
  Pfam annotation: Domain name=PPR; Domain location=108-142; Score =31.1; E_value=4.4e-06; Accession=PF01535.12; Description=PPR repeat
  Pfam annotation: Domain name=PPR; Domain location=143-177; Score =32.2; E_value=2.1e-06; Accession=PF01535.12; Description=PPR repeat
  Pfam annotation: Domain name=PPR; Domain location=244-278; Score =26.2; E_value=0.00013; Accession=PF01535.12; Description=PPR repeat
  Pfam annotation: Domain name=PPR; Domain location=279-313; Score =17.5; E_value=0.055; Accession=PF01535.12; Description=PPR repeat
  Pfam annotation: Domain name=PPR; Domain location=314-348; Score =36.5; E_value=1.1e-07; Accession=PF01535.12; Description=PPR repeat
  Pfam annotation: Domain name=PPR; Domain location=349-383; Score =22.4; E_value=0.0019; Accession=PF01535.12; Description=PPR repeat
  Pfam annotation: Domain name=PPR; Domain location=38-72; Score=44.9; E_value=3.1e-10; Accession=PF01535.12; Description=PPR repeat
  Pfam annotation: Domain name=PPR; Domain location=384-418; Score =20.3; E_value=0.008; Accession=PF01535.12; Description=PPR repeat
  Pfam annotation: Domain name=PPR; Domain location=73-107; Score=33.1; E_value=1.1e-06; Accession=PF01535.12; Description=PPR repeat
  Pfam module annotation: Pfam domain module=PPR::PPR::PPR::PPR::PPR::PP R::PPR::PPR::PPR; Domain location=108-142::143-177::244-278::279 -313::314-348::349-383::38-72::384-418::73-107
VLQAHKKAGEYEMAELFFRKWSSDSSRRMEGHPRYSLYTYNTLIDTYGKAGQLEKVSDTFNQMLREGVAPSVVTFNTMIHVWGKHHRMERVASLVKMMEEFQCFPDRRTYNILISLYRECNDIDVAEYYFWKMKAENLVPDVVSCRTLLYGYSIRGMVTKAEALLKEMDERGFLIDEYTQSALTRMYVNAGMLEQAWHWFDRFHHQMNSECFCANIDAFGEKGYIVLAEKAFICCLKKKMLSVSVCNVMIKGYGLVEKLDEACEVADGMESYGILPDYVTYSSLIQLLSTAKLPKKALHYLTKMQAVKLLSDCVPYSMVISSFAKNGDLRMVEYLFREMITSGIRADVFLYSILIDAYAEAGKVQQAAAYFGLIKKXGLCESATIYNSLIKLYTKVGYVAEARETYKLLRSLDTDANPYASNCMIDLYCDHCMV

SEQ ID NO: 101520 - protein, 96 aa, Setaria italica
  Transcript Sequence Number=SeqID_35546
  Gene Ontology: Mol. function=hydrolase activity, hydrolyzing O -glycosyl compounds; Biological process=carbohydrate metabolic process
  Homolog annotation: Hit_ID=B9RL34; Match level="QueryCoverage=100%, HitCoverage=14%, E-value=4e-45, Identity=81%"; Hit description =Periplasmic beta-glucosidase, putative
  Pfam annotation: Domain name=Glyco_hydro_3; Domain location=1-95; Score=-51.6; E_value=6.4e-06; Accession=PF00933.13; Description =Glycosyl hydrolase family 3 N terminal domain
DAVHGNNNVYNATLFPHNVGLGATRDPDLIKRIGEATALEVRATGIQYTFAPCIAVCRDPRWGRCYESYSEDHTVVQQMTDIILGLQGEIPVNHTK

SEQ ID NO: 101521 - protein, 81 aa, Setaria italica
  Transcript Sequence Number=SeqID_35547
LAAKEMYLKGLPAFYPTSTHEVQLQKALRSFCSMVKGPAVRVFSKKLEDECRTIWESGRQQCDAVSLTGRPCKHRRHVDSN

SEQ ID NO: 101522 - protein, 53 aa, Setaria italica
  Transcript Sequence Number=SeqID_35548
MKNFLRKLHIGEGSSDGGSSPPPPPSRKGGSAGGGVHHHQPHHDQRQHARRAV

SEQ ID NO: 101523 - protein, 57 aa, Setaria italica
  Transcript Sequence Number=SeqID_35549
SVAGELIIARAVLIRHLKNRTKMPIRTMITSLQTPWFHHLIGYDCHITFNLFFEVIY

SEQ ID NO: 101524 - protein, 164 aa, Setaria italica
  Transcript Sequence Number=SeqID_35550
  Homolog annotation: Hit_ID=Q2QWP0; Match level="QueryCoverage=28%, HitCoverage=7%, E-value=4e-10, Identity=72%"; Hit description=F13j11 PRLI-interacting factor G, putative, expressed
QDSQNQQQQQQQHQHQHQQQMSMPYNQQHMLPQTQPQQQPAVKMENGGGILGGVKLEQQMGQPDQNGPAQMMRSSSGGVKLEPQLQAMRGLGAVKMEHQSSDPSVFLQQQQQQQHMLQLSKQNPQAAAAQLSLLQQQQQRFLHLQQQQQQQQQQQILKNLPLTE

SEQ ID NO: 101525 - protein, 143 aa, Setaria italica
  Transcript Sequence Number=SeqID_35551
  Gene Ontology: Mol. function=oxidoreductase activity; Biological process=oxidation reduction
  Homolog annotation: Hit_ID=B6U9L0; Match level="QueryCoverage=72%, HitCoverage=29%, E-value=2e-15, Identity=43%"; Hit description =Leucoanthocyanidin dioxygenase
  Pfam annotation: Domain name=2OG-FeII_Oxy; Domain location=1-81; Score=30.4; E_value=7.2e-06; Accession=PF03171.12; Description=2OG -Fe(II) oxygenase superfamily
YRTTTEQTTVVTVLLLDRDVGGLQVLRDGRWVDVPVLRRGELLVVVGEEMEIMSNAVFRAPTHRVVTSERERMTLVLFYQPEPNRDLAPAEELVGEDRPAMYRKLRAKAFADGFWDAFALGERTIDFLKIKVEQEQLELKAAS

SEQ ID NO: 101526 - protein, 175 aa, Setaria italica
  misc_feature (128)..(128): Xaa can be any naturally occurring amino acid
  Transcript Sequence Number=SeqID_35552
  Gene Ontology: Mol. function=protein dimerization activity; Biological process=DNA integration
  Homolog annotation: Hit_ID=Q2R1C3; Match level="QueryCoverage=79%, HitCoverage=20%, E-value=1e-13, Identity=31%"; Hit description=HAT family dimerisation domain containing protein
RWQVGSQSLSAQTGADASNAIDEERRHRTLWRHVRLLQKKKSTSGGSKIRMPFLCNIIPGSYFRVRGHLLKEPNKGTSVCSTATLEMLEERPAILRLIHSFKSKSTKKKRQSGILECFHLELQQMAKXTIARMFYTGGIPFNLARNSNCGASSSFVANHENNVKLQPSRRNHSCF

SEQ ID NO: 101527 - protein, 104 aa, Setaria italica
  Transcript Sequence Number=SeqID_35553
NPNETNPKNKTTTYRTTELDPLLVCLRILIRRCVSENVSKDDIPKLFPDEVPPELQKLLTLLLQKFQPEWQEDASKDRASAQHSCTAEHQLNQNGEHIRAASCS

SEQ ID NO: 101528 - protein, 70 aa, Setaria italica
  misc_feature (52)..(52): Xaa can be any naturally occurring amino acid
  Transcript Sequence Number=SeqID_35554
  Homolog annotation: Hit_ID=Q9LUR0; Match level="QueryCoverage=91%, HitCoverage=9%, E-value=7e-11, Identity=53%"; Hit description =Chromosoma associate protein subunit H2
RSHLNKLLASIAEVEQQSEMDARVSTWKERIELALEEQDKNPPFDISSYGEXQILDTLSSRTDGMGIATF

SEQ ID NO: 101529 - protein, 526 aa, Setaria italica
  Transcript Sequence Number=SeqID_35555
  Gene Ontology: Mol. function=protein binding
  Homolog annotation: Hit_ID=B9S8S6; Match level="QueryCoverage=98%, HitCoverage=97%, E-value=1e-175, Identity=58%"; Hit description =Protein binding protein, putative
  Pfam annotation: Domain name=BTB; Domain location=122-233; Score= -4.7; E_value=0.035; Accession=PF00651.23; Description=BTBPOZ domain
MAELKAATASLDARTTKIRNVPIAVTPEGFWCCPSQAVLQKTAKNQNQQAKTKGGASPPASKASSIQRAPTISSERRTHSTPTRSKINSEEQRCLSGENAATNPPKAVNERPQKQHKISVGFGQHEISDLKVVLYGKDGVAVKMSVHKNILAENSTFFADKLSRQTPVSSLEVTDCEDVEIYVETVGLMYCSDVKQRLIKQTVPRVLRILKVAELLGFQACVVSCLDYLEAVPWVGEEEENVISSVRNLHSENYGVSPVLKRVASDLTTPPNDTFSHIIELVLRSNEDRGRREMKSLVQKLLKENSATCTSGSSDLCAETLYKSSQNCLESLLTLFQQATGSDFAEQSLNIKEPVFRQIALEADNLLWLAEILADRNAADEFAVMWASQRDLAGLHSKLPVKSRHLVSCVTARLYVAIGKGEILPSKDTRRLLLDIWLQPLMDDYNWLQHGCRSFDRKVVEEGIGRTILTLPLEDQQTILLSWLGSFLKVGDSCPNLQKAFEVWWRRTFIRPYAEQQGNRSQSGRS

SEQ ID NO: 101530 - protein, 294 aa, Setaria italica
  Transcript Sequence Number=SeqID_35556
  Homolog annotation: Hit_ID=Q2R127; Match level="QueryCoverage=98%, HitCoverage=94%, E-value=2e-89, Identity=62%"; Hit description=Plant viral-response family protein, expressed
  Pfam annotation: Domain name=DUF716; Domain location=123-259; Score =219.9; E_value=6.6e-63; Accession=PF04819.4; Description=Family of unknown function (DUF716)
  Subcellular localization annotation: CTP_CleavageSite=45; ConfidenceScore=5.35e-01
MGSFKGHVLPGTLFLLVGLWRVWSSVARFAAEPSSFRVRAWNPVSVASPSSPLRLLELYVIAGGALADMCVEVLYSTHLHIFSGGEINPAHLNDLEHGGMLLMFFLFGALALASQLKPRYMPLTDGVLCLLAATAFTAEFVLFYFHSTTHMGLEGYYHYLLVVLVGLCIVATVLGALLPESFPVDLASGILIALQGLWFYQTAFTLYGPMLPKGCARDADGHIECHLHAAQERSEQLANFQLFGLVFLAFLYVLVCYAVAAARYGHPDLTAMHDKHVAAMEGDAGTGAREECAI

SEQ ID NO: 101531 - protein, 69 aa, Setaria italica
  Transcript Sequence Number=SeqID_35557
FTPPHEQITKQIIRFICTYPCGMMYHVLILISNSQPESRANVMFMIHEARTNTILVGVVRNFEMNLEVA

SEQ ID NO: 101532 - protein, 230 aa, Setaria italica
  Transcript Sequence Number=SeqID_35558
  Gene Ontology: Mol. function=protein tyrosine/serine/threonine phosphatase activity; Cellular component=membrane; Biological process=protein amino acid dephosphorylation
  Homolog annotation: Hit_ID=B6TDJ4; Match level="QueryCoverage=100%, HitCoverage=96%, E-value=1e-120, Identity=90%"; Hit description =Membrane-associated phospholipid phosphatase
  Pfam annotation: Domain name=DSPc; Domain location=98-230; Score =15.9; E_value=1.1e-05; Accession=PF00782.12; Description=Dual specificity phosphatase, catalytic domain
MGISKVTGIAATAFLVTSVSLWELGMRIATLPFLFTGIVACIVTFASHDAVNLPWILGKNSVGRFPCWSIILFGPFLMLARTYAMVKRFMRKESVHDKIVEGLYLGGWPFLLKHLPPGNPSVIDCTCELPRSSFVPKDEYLCLATWDTRAPTPSQIELAARWACEKRSKGKPVYVHCAFGHGRSACVVCAILVALGVAETWKDAENIIRERRKIKMNALHRKTLEEWSKH

SEQ ID NO: 101533 - protein, 177 aa, Setaria italica
  Transcript Sequence Number=SeqID_35559
  Homolog annotation: Hit_ID=B4FLE3; Match level="QueryCoverage=72%, HitCoverage=72%, E-value=6e-53, Identity=80%"; Hit description =Prostaglandin E synthase 3
  Pfam annotation: Domain name=CS; Domain location=5-80; Score=67.0; E _value=7.2e-17; Accession=PF04969.8; Description=CS domain
MSRHPITKWAQRSDRVFLTIELPDAKDVKLNLKPEGHFNFSAKGSDDLPYELDLELFDAVNVEESKAAVAPRTICYLIKKAESKWWPRLPKKEGKPPVFLKVDWDKWQDEDDEDVGFNDFGDMDFSKLDMGGADDDDIEDDEDDVVESANNDGGAKAEESKGEGAVPAAATAEEAKP

SEQ ID NO: 101534 - protein, 155 aa, Setaria italica
  Transcript Sequence Number=SeqID_35560
MCISPYRETCLSGGDDDEGEKKDKEKKEKKDKDEEGKKKDKEKKDKKKDKGTKEKINDPVKLKAKLEKVDAKLQDLQAKREDIMRQLKELEEGGKGKTNEEKPAQVQEDKGKIRKRRKTMKIQERWIKIRRVRARRKTRRIKRLKIRKRIGSESK

SEQ ID NO: 101535 - protein, 119 aa, Setaria italica
  misc_feature (25)..(25): Xaa can be any naturally occurring amino acid
  Transcript Sequence Number=SeqID_35561
  Gene Ontology: Mol. function=metal ion transmembrane transporter activity; Cellular component=membrane; Biological process=metal ion transport
  Homolog annotation: Hit_ID=B6UH65; Match level="QueryCoverage=84%, HitCoverage=28%, E-value=4e-41, Identity=79%"; Hit description=Zinc transporter 2
SRYVITSYWVYSSSCLPVLLPNRPXLSCFAYAFAFAISSPIGVAIGIVIDATTQGRVADWIFAISMGLATGIFVYVSINHLLSKGYKPRRPVAVDTPVGRWLAVVLGVAVIAVVMIWDT

SEQ ID NO: 101536 - protein, 92 aa, Setaria italica
  Transcript Sequence Number=SeqID_35562
  Homolog annotation: Hit_ID=B6UH65; Match level="QueryCoverage=66%, HitCoverage=16%, E-value=2e-10, Identity=52%"; Hit description=Zinc transporter 2
EVRRRRRGPREELSFLLNGLPTLETVKPEVGSSGRKSTAPGSSAGGAELEEGKVSTTNGTSSEPQPAEAHGSDHSVASMLHNANTLGDSILL

SEQ ID NO: 101537 - protein, 179 aa, Setaria italica
  Transcript Sequence Number=SeqID_35563
  Gene Ontology: Mol. function=metal ion transmembrane transporter activity; Cellular component=membrane; Biological process=metal ion transport
  Homolog annotation: Hit_ID=B6UH65; Match level="QueryCoverage=100%, HitCoverage=50%, E-value=6e-76, Identity=78%"; Hit description=Zinc transporter 2
  Pfam annotation: Domain name=Zip; Domain location=2-178; Score=-45.7; E_value=0.00028; Accession=PF02535.14; Description=ZIP Zinc transporter
MRWNEAFLALGTQFAGGVFLGTALMHYISDANETFGDLLPGSAYPWAFMLACAGYVVTTLADVVVSHVVSRGRTAPGSSAGGAELEEGKVSTTNGTSSEPQPAEAHGSDHSVASMLHNANTLGDSILLIAALCFHSVFEGIAIGVAETKADAWKALWTISLHKIFAAIAMGIALLRMLP

SEQ ID NO: 101538 - protein, 324 aa, Setaria italica
  misc_feature (91)..(91): Xaa can be any naturally occurring amino acid
  misc_feature (116)..(116): Xaa can be any naturally occurring amino acid
  Transcript Sequence Number=SeqID_35564
  Gene Ontology: Mol. function=metal ion transmembrane transporter activity; Cellular component=membrane; Biological process=metal ion transport
  Homolog annotation: Hit_ID=B6UH65; Match level="QueryCoverage=99%, HitCoverage=87%, E-value=1e-139, Identity=77%"; Hit description=Zinc transporter 2
  Pfam annotation: Domain name=Zip; Domain location=12-320; Score =188.3; E_value=2.1e-53; Accession=PF02535.14; Description=ZIP Zinc transporter
SPKPDLRARGLVAAKLWCLAAVFAGTLLGGVSPYFMRWNEAFLALGTQFAGGVFLGTALMHFLSDANETFGDLLPGSAYPWAFMLACAGYXVTTLADVVVSHVVSRGQERRRFPRXSRGRTAPGSSAGGAELEEGKVSTTNGTSSEPQPAEAHGSDHSVASMLHNANTLGDSILLIAALCFHSVFEGIAIGVAETKADAWKALWTISLHKIFAAIAMGIALLRMLPNRPFLSCFAYAFAFAISSPIGVAIGIVIDATTQGRVADWIFAISMGLATGIFVYVSINHLLSKGYKPRRPVAVDTPVGRWLAVVLGVAVIAVVMIWDT

SEQ ID NO: 101539 - protein, 66 aa, Setaria italica
  Transcript Sequence Number=SeqID_35565
EPTKGILSVRIACNNFQMKLERVCLVLQCIGGGSCGHGRGRNCSLPFGSCIGLNSQKALPTTCRLL

SEQ ID NO: 101540 - protein, 302 aa, Setaria italica
  Transcript Sequence Number=SeqID_35566
  Gene Ontology: Mol. function=protein serine/threonine kinase activity; Cellular component=integral to membrane; Biological process=protein amino acid phosphorylation
  Homolog annotation: Hit_ID=B6U887; Match level="QueryCoverage=98%, HitCoverage=45%, E-value=1e-158, Identity=90%"; Hit description =Protein kinase
  Pfam annotation: Domain name=Pkinase; Domain location=2-252; Score =89.1; E_value=1.6e-23; Accession=PF00069.17; Description=Protein kinase domain
  Pfam annotation: Domain name=Pkinase_Tyr; Domain location=1-252; Score=49.8; E_value=4.9e-17; Accession=PF07714.9; Description =Protein tyrosine kinase
  Pfam module annotation: Pfam domain module=Pkinase::Pkinase_Tyr; Domain location=2-252::1-252
GPLGGADEDFEFLSEIELLSRLNHCHVVPLLGYCSEIQGRQLERLLVFECMSNGNLRDCLDLKQGRKPMDWQTRVSIALGAARGLEYLHEAAAPRILHRDIKSTNILLDDKFRAKITDLGMAKCLMNDGVTSCSSSPARMLGTFGYFAPEYAIVGKASLKSDVFSFGVVILELITGRPPIHKSSSTRADESLVIWATSRLRDSRLVVAELPDPTLESKFPAEEMQIMAHLARECLQWDPEARPTMTEVVQILSTIAPPLHGAKRRNLPIAAAFNLTPSPHVGRCDPEPVDIEAPQECSTASF

SEQ ID NO: 101541 - protein, 151 aa, Setaria italica
  Transcript Sequence Number=SeqID_35567
  Gene Ontology: Mol. function=protein binding
DMSPNTIECENMSQLLKEWGVFSLDSLKKEVVEANEHRDAALQEVSEMKSSLGELTTKLVSLEAYCSELKKALKQATSTKNMQSHSKRSARSVSGSRDNSLPVSHGVMVEGFLQIVSEARLSIKQFCKVLIQQVEDADNGLSDKLNLLLQP

SEQ ID NO: 101542 - protein, 517 aa, Setaria italica
  misc_feature (508)..(508): Xaa can be any naturally occurring amino acid
  Transcript Sequence Number=SeqID_35568
  Gene Ontology: Mol. function=nucleic acid binding; Cellular component= intracellular
  Homolog annotation: Hit_ID=B9SSN0; Match level="QueryCoverage=93%, HitCoverage=31%, E-value=1e-147, Identity=55%"; Hit description=ATP -dependent RNA helicase, putative
  Pfam annotation: Domain name=DEAD; Domain location=286-460; Score =12.9; E_value=5e-06; Accession=PF00270.21; Description=DEADDEAH box helicase
PDLKKGIPNDVVETCTKEIDEEEIELGGMFFEDSSAWDAVAPEILKQQKIEKLSHDGYGNLLGNIDDIWKKGDSGKMPKAVLQKFCQRLGWEAPKYSKISEKNGKFVYAVNVLRGATGRGKSRKAGGLTKIQLPEIDEEYGSVEEAQSRVAAFALYQFFADLPLRHLLTEPYSSLVLRWQEGELLSTSRVLDTEDSRRAGFVDMLLNMDADTSLIEDSSAGGIFVDSRDTEDNKSVHEKREAAMMSCMGLKSPEHAESAILKKQLEDKRKLPNYLKMLEARASLPIAKQKQHFLQLLKENDVIVVSGETGCGKTTQVPQFILDDMIESELGGYCNIICTQPRRIAAISVAERVSDERCESSPGSNDSLVGYQVRLDSARNERTKLLFCTTGILLRKLSGNRDLSDVTHVVVDEVHERTILSDFLLIVLKNLVEKRSYQQGRKLKVILMSATVDSSLFARYFGECPVINVEGRTHPVSTHFLEDVYEKMEYCLALDSPASGAYFAHHGXEKWKHASSS

SEQ ID NO: 101543 - protein, 261 aa, Setaria italica
  Transcript Sequence Number=SeqID_35569
  Gene Ontology: Mol. function=protein binding; Cellular component =nucleus; Biological process=transcription from RNA polymerase I promoter
  Homolog annotation: Hit_ID=B6SZA4; Match level="QueryCoverage=83%, HitCoverage=65%, E-value=7e-97, Identity=80%"; Hit description =SWIB/MDM2 domain containing protein
  Pfam annotation: Domain name=SWIB; Domain location=181-258; Score =131.9; E_value=2e-36; Accession=PF02201.10; Description=SWIBMDM2 domain
  Pfam annotation: Domain name=SWIB; Domain location=65-140; Score =151.4; E_value=2.7e-42; Accession=PF02201.10; Description=SWIBMDM2 domain
  Pfam module annotation: Pfam domain module=SWIB::SWIB; Domain location=181-258::65-140
RLAGGSEWRIRPEPETEEGEGEEEEGEGEEDEDEEEEDEDGDSGGARKKQRSDKGNGGKKRGGGFTKLCSLSPALQEFVGASELARTEVVKKLWAYIREHNLQDQSNKRKILPDERLRKIFNVNSIDMFQMNKALTKHIWPLNSEGPVSPDRSTPKEKPQKRDRNEGKKQKGGSSGAGSGLLVPLQLSNDLVKFIGTGESMLSRSDVVKRMWEYIKENNLQDPSDRRKIICDEKLKDLLQVESFNGFTVSKLLAPHFTKTK

SEQ ID NO: 101544 - protein, 77 aa, Setaria italica
  misc_feature (66)..(66): Xaa can be any naturally occurring amino acid
  Transcript Sequence Number=SeqID_35570
  Subcellular localization annotation: CTP_CleavageSite=55; ConfidenceScore=5.37e-01
MDAKLLLPFPSPPAALHPAAAAVPKSLFLGASLPLHPRAPPPFPLRLRPRPALVVAQAAVKRRKEXPLDNVIQRDKK

SEQ ID NO: 101545 - protein, 58 aa, Setaria italica
  Transcript Sequence Number=SeqID_35571
  Gene Ontology: Mol. function=hydrolase activity
  Homolog annotation: Hit_ID=B9RES9; Match level="QueryCoverage=96%, HitCoverage=26%, E-value=7e-23, Identity=89%"; Hit description =Guanine deaminase, putative
MFIFQACKKLGKIELSDCEIYASCEPCPMCFGAVHLSRIKRLVYGAKAEAAIAIGFDD

SEQ ID NO: 101546 - protein, 74 aa, Setaria italica
  Transcript Sequence Number=SeqID_35572
NAHSEGILQCSNFHCFGILSVQMFYVPRIPQFLVNLQGSSLLPLNVQLMEFSFCPSHGALHTSLAGSEFELELA

SEQ ID NO: 101547 - protein, 51 aa, Setaria italica
  Transcript Sequence Number=SeqID_35573
  Gene Ontology: Mol. function=hydrolase activity
  Homolog annotation: Hit_ID=B9RES9; Match level="QueryCoverage=74%, HitCoverage=18%, E-value=7e-11, Identity=78%"; Hit description =Guanine deaminase, putative
MINHDLNVLSVFFFTLVVQSKDGTISVASAFAGHQQAIQDRDHKFLTKAVE

SEQ ID NO: 101548 - protein, 98 aa, Setaria italica
  Transcript Sequence Number=SeqID_35574
  Gene Ontology: Mol. function=oxidoreductase activity, acting on the CH-OH group of donors, NAD or NADP as acceptor; Cellular component =peroxisome; Biological process=metabolic process
  Homolog annotation: Hit_ID=B9T0F2; Match level="QueryCoverage=84%, HitCoverage=21%, E-value=3e-34, Identity=83%"; Hit description =Hydroxypyruvate reductase, putative
MGSSISMPQCYICTIEQDEPYMKPGLADMKNAVLVPHIASASKWTREGMSTLAALNVLGGIKGYPVWGNPNQVEPFLNEKMTPPPACPSIVNAKQLGW

SEQ ID NO: 101549 - protein, 387 aa, Setaria italica
  Transcript Sequence Number=SeqID_35575
  Gene Ontology: Mol. function=oxidoreductase activity, acting on the CH-OH group of donors, NAD or NADP as acceptor; Cellular component =peroxisome; Biological process=metabolic process
  Homolog annotation: Hit_ID=B9T0F2; Match level="QueryCoverage=99%, HitCoverage=99%, E-value=0.0, Identity=83%"; Hit description =Hydroxypyruvate reductase, putative
  Pfam annotation: Domain name=2-Hacid_dh; Domain location=19-358; Score=55.3; E_value=2.3e-13; Accession=PF00389.22; Description=D -isomer specific 2-hydroxyacid dehydr
  Pfam annotation: Domain name=2-Hacid_dh_C; Domain location=129-323; Score=217.8; E_value=2.9e-62; Accession=PF02826.11; Description=D -isomer specific 2-hydroxyacid dehydr
  Pfam module annotation: Pfam domain module=2-Hacid_dh::2-Hacid_dh_C; Domain location=19-358::129-323
MATKPISIEVWNPSGKYRVVSTKSMPGTRWIRLLTDNDCRLEICTEAKTILSVDDILALIGDRCDGVIGQLTEDWGEVLFSALKRAGGTAFSNMAVGYNNVDVAAANKNGIAVGNTPGVLTETTAELAASLTLAAARRIVEADQFMRAGLYDGWLPHLFVGNLLKGQTVGVIGAGRIGSAYARMMIEGFKMNLIYYDLYQATRLEKFVTAYGQFLKANGEQPVTWKRAATMEDVLREADVISLHPVLDKTTYHLINPERLAIMKKEAILVNASRGPVIDEAALVEHLKANPMFRVGLDVFEDEPYMKPGLADMKNAVLVPHIASASKWTREGMSTLAALNVLGGIKGYPVWGNPNQVEPFLNEKMTPPPACPSIVNAKQLGLPSSKL

SEQ ID NO: 101550 - protein, 76 aa, Setaria italica
  Transcript Sequence Number=SeqID_35576
HICCSAAIAQDQVLFLTATTINMIIINRIYKRLKKIGRWVLADPPFSVLLLQEPLPLWESIAHLEFSTSTQPQLAI

SEQ ID NO: 101551 - protein, 88 aa, Setaria italica
  Transcript Sequence Number=SeqID_35577
  Subcellular localization annotation: CTP_CleavageSite=64; ConfidenceScore=5.60e-01
GAGGASGGGAGGAGGAGGGGAGGVSGGGGAGGAGSTASSAVAPGGTTNRNGGSHVAVSNLGETTSSAGGPTASLTIGFPSALVTWTCI

SEQ ID NO: 101552 - protein, 61 aa, Setaria italica
  Transcript Sequence Number=SeqID_35578
VKRNCVPQMNALEVHITMPVHIHPEFTISVNHHGHPQPLQFRKCGKERKGDALMIRHPMII

SEQ ID NO: 101553 - protein, 144 aa, Setaria italica
  Transcript Sequence Number=SeqID_35579
  Gene Ontology: Mol. function=nucleotide binding; Biological process =defense response
  Homolog annotation: Hit_ID=Q2R1F8; Match level="QueryCoverage=100%, HitCoverage=13%, E-value=4e-52, Identity=70%"; Hit description=NB -ARC domain containing protein, expressed
  Pfam annotation: Domain name=LRR_1; Domain location=109-130; Score =9.5; E_value=4.7; Accession=PF00560.25; Description=Leucine Rich Repeat
  Pfam annotation: Domain name=LRR_1; Domain location=86-107; Score =10.1; E_value=3.6; Accession=PF00560.25; Description=Leucine Rich Repeat
  Pfam module annotation: Pfam domain module=LRR_1::LRR_1; Domain location=109-130::86-107
VVGGHWQTPFPSYKVRRLSVQKSNGKEKEMVERMKLSHVRSLTALGSLRALHSTLHKFQILQMLDLEGCKDLSLNQLQENMTKWHQLKYLSLRRTDVEEIPSKISRLESLEVLDIRETSIIILPESVDKLQRMEHLLAGNKNKR

SEQ ID NO: 101554 - protein, 213 aa, Setaria italica
  Transcript Sequence Number=SeqID_35580
  Gene Ontology: Mol. function=protein serine/threonine kinase activity; Biological process=protein amino acid phosphorylation
  Homolog annotation: Hit_ID=Q5XPL8; Match level="QueryCoverage=89%, HitCoverage=19%, E-value=3e-38, Identity=51%"; Hit description=EDR1
QSDQPSTAGTLLKRKQDLKLLQNSQDKEECKRLFSDLNPLRDIGPGKSSVALKRPDNRNNEFQRRRENVAPVPARSQQPLVIKNWSAFNDISNNKQYNFAEGSVPRRNVINNVASSSQLAWSAAKHYNSNAVERNNRSYVAPVRNYDNGTIGTSATTAASNSGERLDKSNMGVASDYDMIGTSSANTACTYQIGKVAEKGPCDDLEKGSMYSV

SEQ ID NO: 101555 - protein, 146 aa, Setaria italica
  Transcript Sequence Number=SeqID_35581
  Gene Ontology: Mol. function=RNA polymerase II transcription factor activity; Cellular component=nucleus; Biological process =transcription initiation from RNA polymerase II promoter
  Homolog annotation: Hit_ID=Q8LMN8; Match level="QueryCoverage=87%, HitCoverage=24%, E-value=5e-15, Identity=50%"; Hit description =Mutant TFIIF-alpha, putative, expressed
DIEERPDLADPEAAPPEIKQDDNETELGSSSSNLSKSGQELKKLLRQAAGEESDTDDKNTDEDEPASPECAPKQLLEPKSEPVDSNPSKLTPSAQAQNPTPPSKSTQKRRSGGGDANTSNGAASKKIKTEPETRTMSVKDETPSSL

SEQ ID NO: 101556 - protein, 157 aa, Setaria italica
  misc_feature (84)..(84): Xaa can be any naturally occurring amino acid
  Transcript Sequence Number=SeqID_35582
  Gene Ontology: Mol. function=ATP binding
  Homolog annotation: Hit_ID=Q84T10; Match level="QueryCoverage=98%, HitCoverage=5%, E-value=3e-60, Identity=72%"; Hit description=Unknow protein
GNLPGRHENVDVLGNDVAEQHYYLGTVCSREAINCLLRAPMLSDLHIWSHWDLLFAPTLGSFVRWLLTTGPIQELSCIVTTDGXFIRVDPSATVDQFLEAIIQRSPFQVAVKLLSLLYIYDGSTNTPMSLLKCYAERAIKLIVDNNNDLMNTNSETV

SEQ ID NO: 101557 - protein, 70 aa, Setaria italica
  misc_feature (6)..(6): Xaa can be any naturally occurring amino acid
  Transcript Sequence Number=SeqID_35583
KGRETXPKAGCYLYGDTVGIDPGLNPMRGAFLYWQPHNWRTYHHTSGMLTPLVSYLSVFSGIRMHLWSPL

SEQ ID NO: 101558 - protein, 215 aa, Setaria italica
  Transcript Sequence Number=SeqID_35584
  Gene Ontology: Mol. function=nucleic acid binding
  Homolog annotation: Hit_ID=Q7XHQ6; Match level="QueryCoverage=92%, HitCoverage=68%, E-value=6e-48, Identity=52%"; Hit description =Putative RNA and export factor binding protein
  Pfam annotation: Domain name=RRM_1; Domain location=51-120; Score =44.3; E_value=4.7e-10; Accession=PF00076.14; Description=RNA recognition motif. (a.k.a. RRM, RBD, o
VVPYPSGRHQGHRAAAESPYGVYSEHIAAMAAVAPPPPPATARSLETGTKLHISNLDAGVTVEDVQELFSEVGELKRYSMNYDKDGISKGTAEVVFARKVDALDAIKKYNGVLLDGKPMNIDLIGSNAERPSMPPLIQNRPLQNYNDIHSSVPQNQRGGQRKAPQGNGRGGGSIQNSGGRGQGKGRGQDRNRTPLSAADLDAELDNYHASAVKEK

SEQ ID NO: 101559 - protein, 54 aa, Setaria italica
  Transcript Sequence Number=SeqID_35585
QSTLLTTIIFVPPALHYHSFSDEFTCVDKLLLPFFHNKLPYTGAFILFCFCCYR

SEQ ID NO: 101560 - protein, 93 aa, Setaria italica
  Transcript Sequence Number=SeqID_35586
LGYDYIGECFRVVLGFVLYSMQQIGVIMRILDSEYLHAFPPLSLNYGMASRLQLWSFPPAHFFPISNLTGERRGKKFVYHRCLLHEGSSYLLF

SEQ ID NO: 101561 - protein, 187 aa, Setaria italica
  misc_feature (130)..(130): Xaa can be any naturally occurring amino acid
  Transcript Sequence Number=SeqID_35587
LRRRRRGRSLSDGEVLGHERRETSYMRGDLLTKTRKLVKVLAKPAPKWLKAMEEAPPVTFPRVDGKVKKIELPEDVYVKKFFKKHPDSLYHDAIKISGFDPPPARVFAWRVLELKEQGVSEDYVMAVADXYPSAPPNPYPSAIKEIQAEEKKYVMDRFYNPKVIEIANKMKEERDMLLRDRVASGRW

SEQ ID NO: 101562 - protein, 188 aa, Setaria italica
  Transcript Sequence Number=SeqID_35588
MSYMRGDLLTKTRKLVKGLAKPAPKWLKAMEEAPPVTFPRVDGKVKKIELPEDVYVKKFFKKHPDSLYHDAIKISGFDPPPARVFAWRVLELKEQGVSEDYAMAVADFEYRKEKKAKKKAYKELKEIARSEGKEPPPNPYPSAIKEIQAEEKKYVMDRFYNPKVIEIANKMKEEREMFLRDRAASGQW

SEQ ID NO: 101563 - protein, 97 aa, Setaria italica
  Transcript Sequence Number=SeqID_35589
  Gene Ontology: Mol. function=transferase activity; Biological process= metabolic process
  Homolog annotation: Hit_ID=B6SHC0; Match level="QueryCoverage=85%, HitCoverage=27%, E-value=3e-34, Identity=81%"; Hit description =Dehydrodolichyl diphosphate synthase 6
MAGSLISCSPSVDLKVEKPDEMVTTGVLASLQNFLRKCLIAVLSYGPMPKHIAFIMDGNRRYAKFRSIQQGAGHRVGFSALIAKSCLVTFYYPYFSL

SEQ ID NO: 101564 - protein, 99 aa, Setaria italica
  Transcript Sequence Number=SeqID_35590
KKKPKQPEQQQPPLTSKEIVLVDHDRAAAVVELHLTSASTTDGEKSDERDVDTAAEETPELADDRRIEEFIAKQWSKIRHESLQLDRSSGSQSQAITTC

SEQ ID NO: 101565 - protein, 107 aa, Setaria italica
  Transcript Sequence Number=SeqID_35591
  Gene Ontology: Mol. function=DNA binding; Cellular component=nucleus; Biological process=regulation of transcription
  Homolog annotation: Hit_ID=Q8S3Y9; Match level="QueryCoverage=92%, HitCoverage=60%, E-value=9e-53, Identity=100%"; Hit description =Typical P-type R2R3 Myb protein (Fragment)
  Pfam annotation: Domain name=Myb_DNA-binding; Domain location=32-77; Score=51.1; E_value=4.4e-12; Accession=PF00249.23; Description=Myb -like DNA-binding domain
LIFVCSCHAGLKRTGKSCRLRWLNYLRPDLRRGNITPQEQLLILELHSRWGNRWSKIAQHLPGRTDNEIKNYWRTRVQKHAKQLKCDVNSQQFKDVMRYLWMPRLVE

SEQ ID NO: 101566 - protein, 60 aa, Setaria italica
  Transcript Sequence Number=SeqID_35592
QLSPQYHNFLDKLKHRHMRTPLQETVSNIPPKTKYTCYRNKIIEKLSRKALNSKDRKELL

SEQ ID NO: 101567 - protein, 364 aa, Setaria italica
  Transcript Sequence Number=SeqID_35593
  Gene Ontology: Mol. function=transcription factor activity; Cellular component=nucleus; Biological process=regulation of transcription, DNA-dependent
  Homolog annotation: Hit_ID=B6SXJ5; Match level="QueryCoverage=100%, HitCoverage=99%, E-value=1e-161, Identity=80%"; Hit description =Protein BABY BOOM 2
  Pfam annotation: Domain name=AP2; Domain location=178-238; Score =60.1; E_value=8.2e-15; Accession=PF00847.12; Description=AP2 domain
  Pfam annotation: Domain name=AP2; Domain location=280-332; Score =62.7; E_value=1.3e-15; Accession=PF00847.12; Description=AP2 domain
  Pfam module annotation: Pfam domain module=AP2::AP2; Domain location =178-238::280-332
MEESVAGVNLAKQMEKEKAAGEPGDEGAIERSHSINLNTVPPPVAVEARSTQENGETHGAEVSGTKDSRTGKPEQSSGADQKKLPKCEQVDYESETEGCENPAEKAALVTVVGNEGLADFGDEDERAQVLTIVKKDEPADEIGDSINPLAGAGFREEKGVVGASAEISAVRPAGSRSSSFHGVTRHRWSGKYEAHLWDSSCRVEGRRRKGKQVYLGSYDTEEKAARSYDVAALKYWGQNTRLNFPISQYEKELEDIRDLSREECVTYLRRRSSCFSRGASIYRGVTRRQKDGRWQARIGLVAGTRDIYLGTFKTEEEAAEAYDIAAIEIRGKNAVTNFDRSNYVDKGMHCIEGEGLRLLASKPE

SEQ ID NO: 101568 - protein, 119 aa, Setaria italica
  misc_feature (54)..(54): Xaa can be any naturally occurring amino acid
  misc_feature (67)..(67): Xaa can be any naturally occurring amino acid
  misc_feature (85)..(85): Xaa can be any naturally occurring amino acid
  Transcript Sequence Number=SeqID_35594
  Gene Ontology: Mol. function=protein binding
  Homolog annotation: Hit_ID=Q1EPE0; Match level="QueryCoverage=46%, HitCoverage=11%, E-value=4e-14, Identity=70%"; Hit description=WD-40 repeat family protein
MGNHKKLIQFLRPDSAVTAAPKPAPPPPSSDNEDDDYACSTPTTPTTTTTNSSXASPLALSPWTQLXGSLVKADGHVYSMAAAGXFLYTGTDSRNIRVWRDRPELGGFRSSSGLGKAIN

SEQ ID NO: 101569 - protein, 134 aa, Setaria italica
  Transcript Sequence Number=SeqID_35595
  Gene Ontology: Mol. function=oxidoreductase activity; Biological process=oxidation reduction
  Homolog annotation: Hit_ID=Q9M5K1; Match level="QueryCoverage=89%, HitCoverage=37%, E-value=9e-42, Identity=66%"; Hit description =Putative flavonol synthase-like protein
  Pfam annotation: Domain name=2OG-FeII_Oxy; Domain location=46-134; Score=48.5; E_value=2.6e-11; Accession=PF03171.12; Description=2OG -Fe(II) oxygenase superfamily
QSFPLIASSVHDAIFVADLSRKIMRGIALALGGAIDAFEGETAGDPFWVLRLIGYPVEIPEEQRTDTGCGAHTDYGLLTLVNQDDDICALEVQNRSGEWIYATPIPGTFVCNIGDMLKVWSNGIYESTLHRVVN

SEQ ID NO: 101570 - protein, 169 aa, Setaria italica
  misc_feature (12)..(12): Xaa can be any naturally occurring amino acid
  misc_feature (16)..(16): Xaa can be any naturally occurring amino acid
  misc_feature (136)..(136): Xaa can be any naturally occurring amino acid
  Transcript Sequence Number=SeqID_35596
  Gene Ontology: Mol. function=oxidoreductase activity; Biological process=oxidation reduction
  Homolog annotation: Hit_ID=Q9M5K1; Match level="QueryCoverage=85%, HitCoverage=44%, E-value=8e-57, Identity=71%"; Hit description =Putative flavonol synthase-like protein
  Pfam annotation: Domain name=2OG-FeII_Oxy; Domain location=24-127; Score=97.7; E_value=3.9e-26; Accession=PF03171.12; Description=2OG -Fe(II) oxygenase superfamily
MRGIALALGGAXIDAXEGETAGDPFWVLRLIGYPVEIPEEQRTDTGCGAHTDYGLLTLVNQDDDICALEVQNRSGEWIYATPIPGTFVCNIGDMLKVWSNGIYESTLHRVVNNSPRYRISVAFFYESNFDAAIEPXVQFCREKTGGAAKYEKVVYGEHLVKKVLTNFVM

SEQ ID NO: 101571 - protein, 326 aa, Setaria italica
  Transcript Sequence Number=SeqID_35597
  Gene Ontology: Mol. function=oxidoreductase activity; Biological process=oxidation reduction
  Homolog annotation: Hit_ID=B6TK78; Match level="QueryCoverage=99%, HitCoverage=99%, E-value=1e-129, Identity=68%"; Hit description =Flavonol synthase-like protein
  Pfam annotation: Domain name=2OG-FeII_Oxy; Domain location=182-285; Score=97.7; E_value=3.9e-26; Accession=PF03171.12; Description=2OG -Fe(II) oxygenase superfamily
MGSDFKAIPLIDIGPLVEKIDDPRMANDADLLEVVRMLDDACKEAGFFYVKGHGITESLLKEVRDVTRKFFQLPCEEKLKIKMSPQSGYRGYQRIGENITKGKPDMHEAIDCYTPIKPGKYGDLAKPMEGSNLWPENPSNFEALLENYINLCRDLSRKIMRGIALALGGAIDAFEGETAGDPFWVLRLIGYPVEIPEEQRTDTGCGAHTDYGLLTLVNQDDDICALEVQNRSGEWIYATPIPGTFVCNIGDMLKVWSNGIYESTLHRVVNNSPRYRISVAFFYESNFDAAIEPVQFCREKTGGAAKYEKVVYGEHLVKKVLTNFVM

SEQ ID NO: 101572 - protein, 126 aa, Setaria italica
  misc_feature (81)..(81): Xaa can be any naturally occurring amino acid
  Transcript Sequence Number=SeqID_35598
QTNYGRMPLHDREVSVKEASDREAVKKQEDGVIVKVDEATMKARFQDWMEQYGWSYRTEKEKARRHSDDFDWERYIDHINXMAAHGWYIGREEFSVSEAVKQRCKELATNHAEGRSQMDNSKTEKR

SEQ ID NO: 101573 - protein, 55 aa, Setaria italica
  Transcript Sequence Number=SeqID_35599
KIMMKNSQSILLTWDIICPLSPTKFERKLNLHAEKKRKISLGGRLNQLKYFEGVN

SEQ ID NO: 101574 - protein, 53 aa, Setaria italica
  Transcript Sequence Number=SeqID_35600
DLFIVLCMYLELSVNGTYLMFSPFSIWALADGSPHETSPGLPQLCSSDAGSIM

SEQ ID NO: 101575 - protein, 149 aa, Setaria italica
  Transcript Sequence Number=SeqID_35601
  Pfam annotation: Domain name=DUF26; Domain location=55-97; Score =13.5; E_value=0.0045; Accession=PF01657.9; Description=Domain of unknown function DUF26
CGSDGSYTANSTYEANLHHLAAVVPAEAAAAHRFDTYHIFGYWPNRLQADWSCQSSGSDCAACIADAFKQVELECPFHREAFFFGGNCTLRLTEYRILDDDVFAMNPLAMGMIFQAFGLACLFLLFLRAWRHDIKKGTITHHTPLSGDQ

SEQ ID NO: 101576 - protein, 71 aa, Setaria italica
  Transcript Sequence Number=SeqID_35602
KSYCHESRGQSKKHGMWPLAQLLSRFFTKDGTKGSTLWLVLRLLILVVLVVAVCVGYYMQSGTQEIDCINC

SEQ ID NO: 101577 - protein, 439 aa, Setaria italica
  Transcript Sequence Number=SeqID_35603
  Gene Ontology: Mol. function=isomerase activity; Cellular component =intracellular; Biological process=protein folding
  Homolog annotation: Hit_ID=B6U100; Match level="QueryCoverage=100%, HitCoverage=86%, E-value=0.0, Identity=60%"; Hit description =Peptidyl-prolyl isomerase
  Pfam annotation: Domain name=FKBP_C; Domain location=1-73; Score =29.1; E_value=6.5e-06; Accession=PF00254.20; Description=FKBP-type peptidyl-prolyl cis-trans isomer
  Pfam annotation: Domain name=FKBP_C; Domain location=95-193; Score =111.8; E_value=2.3e-30; Accession=PF00254.20; Description=FKBP-type peptidyl-prolyl cis-trans isomer
  Pfam annotation: Domain name=TPR_1; Domain location=214-247; Score =4.3; E_value=1.8; Accession=PF00515.20; Description=Tetratricopeptide repeat
  Pfam annotation: Domain name=TPR_1; Domain location=263-296; Score =15.9; E_value=0.072; Accession=PF00515.20; Description =Tetratricopeptide repeat
  Pfam annotation: Domain name=TPR_1; Domain location=297-330; Score =36.9; E_value=7.9e-08; Accession=PF00515.20; Description =Tetratricopeptide repeat
  Pfam annotation: Domain name=TPR_2; Domain location=214-247; Score =12.0; E_value=1.1; Accession=PF07719.9; Description=Tetratricopeptide repeat
  Pfam annotation: Domain name=TPR_2; Domain location=263-296; Score =16.5; E_value=0.11; Accession=PF07719.9; Description=Tetratricopeptid e repeat
  Pfam annotation: Domain name=TPR_2; Domain location=297-330; Score =27.7; E_value=4.7e-05; Accession=PF07719.9; Description =Tetratricopeptide repeat
  Pfam module annotation: Pfam domain module=FKBP_C::FKBP_C::TPR_1::TPR_ 1::TPR_1::TPR_2::TPR_2::TPR_2; Domain location=1-73::95-193::214 -247::263-296::297-330::214-247::263-296::297-330
GTVVYKSDGVEFTVKDGLFCPAISKAVKTMKKNEKAFLTVKPQYGFGEQGRSASGEEAAVPPDATLHIDLQVVSWKTVTEIGHDKKVLKKILKEGEGYDRPNECAVVRVKLIGKLADGTLFVNKGHDGEEPFEFKTDEDQVIEGLDKAVLSMKKGEVALVTIPPHHAFGANETDQDLATVPPNSSVYYEVELVSFDKEKDSWDLKNNSEKIEAAAKKKDEGNVWFKVGKYARASKRYKKALSFVEYDSSFSEEEKQLSKPLKISCKLNNAACKLKLKDYKEAKELCTEVLELDCTNVKALYRRAQAHTHLVDLDLAEADIKKALEIDPDNRDVKMGYRRLKETVKEYKRRDAKLYGNMISKLSKVEDTEGNDHESRGQSKKHGMWPLAQLLSRFFTKDGTKGSTLWLVLRLLILVVLVVAVCVGYYMQSGTQEIDCINC

SEQ ID NO: 101578 - protein, 117 aa, Setaria italica
  Transcript Sequence Number=SeqID_35604
  Homolog annotation: Hit_ID=B6SH62; Match level="QueryCoverage=100%, HitCoverage=25%, E-value=8e-46, Identity=73%"; Hit description=von Willebrand factor type A domain containing protein
KEFQVLKEEAGGAVHGKGGDDPVLQAVAASSLQRKWEEFKKSDESWKEAPRNFLDLGGVDRDVDSMVGVLKQGSGVGCVYSWLSSSQMQRATAATGLPAAGRFRTPAMAAMVREAHR

SEQ ID NO: 101579 - protein, 54 aa, Setaria italica
  Transcript Sequence Number=SeqID_35605
MWLHAGVVHLVANMLSLLFIGMRLEQQFGYGEPNFTICLSLCLSPTHSFSCKQP

SEQ ID NO: 101580 - protein, 324 aa, Setaria italica
  Transcript Sequence Number=SeqID_35606
  Gene Ontology: Cellular component=integral to membrane
  Homolog annotation: Hit_ID=B4FQY5; Match level="QueryCoverage=100%, HitCoverage=100%, E-value=1e-113, Identity=61%"; Hit description =Membrane protein
  Pfam annotation: Domain name=Rhomboid; Domain location=106-250; Score= 202.5; E_value=1.1e-57; Accession=PF01694.14; Description=Rhomboid family
MATRGDVEKGAVRKEAGKVPSSLYPQHEGEREWVPWIVPVFFVANITVFVVTMYANNCPVHTPAKDGKCIGRFLGRFAFEPLRQNPLLGPSSATLTKLGALVWQKVVHEHQGWRLLSSMWLHAGVVHLVANMLSLLFIGMRLEQQFGYVRIGVVYLLSGLGGSVLSSLFIRNSISVGASGALFGLLGAMLSELLTNWTIYTNKVAAVLTLLFVVAVNLVLGILPHVNNFAHIGGFLTGFLLGFVVLMRPHFAWMERYSMPAGSACTSKKYLLYQWILMAVALVLLVIGFAVGMAMLFRGANANDSCSWCRYLSCVPTSSWKCTN

SEQ ID NO: 101581 - protein, 112 aa, Setaria italica
  Transcript Sequence Number=SeqID_35607
SKERKAFRLSAAAGRQQEGVSGVGGQLSSAGGCNAIMSRGRSWEVCRAEEQAAGANDFWLELRLTGVQELALDVRRLQQLGAVARVMRGRERTGGKRVYLAACCHDALLLSP

SEQ ID NO: 101582 - protein, 125 aa, Setaria italica
  Transcript Sequence Number=SeqID_35608
  Gene Ontology: Mol. function=nucleotide binding; Cellular component =intracellular; Biological process=small GTPase mediated signal transduction
  Homolog annotation: Hit_ID=B9RHQ5; Match level="QueryCoverage=96%, HitCoverage=17%, E-value=2e-60, Identity=93%"; Hit description=GTP -binding protein lepa, putative
  Pfam annotation: Domain name=GTP_EFTU; Domain location=1-125; Score =84.5; E_value=3.7e-22; Accession=PF00009.19; Description=Elongation factor Tu GTP binding domain
  Pfam annotation: Domain name=MMR_HSR1; Domain location=1-92; Score= -17.4; E_value=0.041; Accession=PF01926.15; Description=GTPase of unknown function
  Pfam module annotation: Pfam domain module=GTP_EFTU::MMR_HSR1; Domain location=1-125::1-92
LNMDLERERGITIKLQAARMRYVMNKEPYCLNLIDTPGHVDFSYEVSRSLAACEGALLVVDASQGVEAQTLANVYLALENNLEIIPVLNKIDLPGAEPDRVAQEIEEIIGLDCSDAIRCSAKGRY

SEQ ID NO: 101583 - protein, 163 aa, Setaria italica
  misc_feature (49)..(49): Xaa can be any naturally occurring amino acid
  misc_feature (61)..(61): Xaa can be any naturally occurring amino acid
  misc_feature (72)..(72): Xaa can be any naturally occurring amino acid
  Transcript Sequence Number=SeqID_35609
  Gene Ontology: Mol. function=nucleotide binding; Cellular component =intracellular; Biological process=small GTPase mediated signal transduction
  Homolog annotation: Hit_ID=B9RHQ5; Match level="QueryCoverage=85%, HitCoverage=20%, E-value=2e-57, Identity=76%"; Hit description=GTP -binding protein lepa, putative
TSEYSILAYPLLRDFSWSKKSPTISASIRSVADARVGDTITHYSKKSSXALPGYSEATPMXFCGFFPIDADXQFEELREALEKLQLNDAALKFEPESSSAMGFGFRCGFLGLLHMEIVQERLEREYNLNLIITAPSVVYRVNCADGETVECSNPSLLPEPGKR

SEQ ID NO: 101584 - protein, 174 aa, Setaria italica
  misc_feature (108)..(108): Xaa can be any naturally occurring amino acid
  misc_feature (167)..(167): Xaa can be any naturally occurring amino acid
  Transcript Sequence Number=SeqID_35610
  Gene Ontology: Mol. function=nucleotide binding; Cellular component =intracellular; Biological process=small GTPase mediated signal transduction
  Homolog annotation: Hit_ID=B9RHQ5; Match level="QueryCoverage=100%, HitCoverage=24%, E-value=3e-84, Identity=87%"; Hit description=GTP -binding protein lepa, putative
  Pfam annotation: Domain name=GTP_EFTU; Domain location=1-174; Score =206.5; E_value=7.2e-59; Accession=PF00009.19; Description=Elongation factor Tu GTP binding domain
  Pfam annotation: Domain name=MMR_HSR1; Domain location=1-136; Score= -8.5; E_value=0.0061; Accession=PF01926.15; Description=GTPase of unknown function
  Pfam module annotation: Pfam domain module=GTP_EFTU::MMR_HSR1; Domain location=1-174::1-136
RNFCIIAHIDHGKSTLADKLLELTGTVQKREMKEQFLDNMDLERERGITIKLQAARMRYVMNKEPYCLNLIDTPGHVDFSYEVSRSLAACEGALLVVDASQVQYIFSXGVEAQTLANVYLALENNLEIIPVLNKIDLPGAEPDRVAQEIEEIIGLDCSDAIRCSAKXGIGITEI

SEQ ID NO: 101585 - protein, 212 aa, Setaria italica
  misc_feature (38)..(38): Xaa can be any naturally occurring amino acid
  misc_feature (163)..(163): Xaa can be any naturally occurring amino acid
  Transcript Sequence Number=SeqID_35611
  Gene Ontology: Mol. function=nucleotide binding; Cellular component =intracellular; Biological process=small GTPase mediated signal transduction
  Homolog annotation: Hit_ID=B9RHQ5; Match level="QueryCoverage=99%, HitCoverage=30%, E-value=2e-89, Identity=76%"; Hit description=GTP -binding protein lepa, putative
  Pfam annotation: Domain name=GTP_EFTU_D2; Domain location=61-131; Score=43.8; E_value=6.7e-10; Accession=PF03144.17; Description =Elongation factor Tu domain 2
EIEEIIGLDCSDAIRCSAKEGIGITEILDALVTKIPPXPKDTSKDPLRALIFDSYYDPYRGVIVYFRVTDGSIKKGDKICFMANGKEYVADEIGVLSPNQMQVDELYAGEVGYLSASIRSVADARVGDTITHYSKKAASALPGYSEATPMVFCGLFPIDADQXFEELREALEKLQLNDAALKFEPESSSAMGFGFRCGFLGLLHMEIVQEKA

SEQ ID NO: 101586 - protein, 196 aa, Setaria italica
  Transcript Sequence Number=SeqID_35612
  Gene Ontology: Mol. function=nucleotide binding; Cellular component =intracellular; Biological process=small GTPase mediated signal transduction
  Homolog annotation: Hit_ID=B9RHQ5; Match level="QueryCoverage=98%, HitCoverage=27%, E-value=6e-93, Identity=84%"; Hit description=GTP -binding protein lepa, putative
  Pfam annotation: Domain name=EFG_C; Domain location=1-83; Score=83.2; E_value=9.1e-22; Accession=PF00679.16; Description=Elongation factor G C-terminus
  Pfam annotation: Domain name=LepA_C; Domain location=84-192; Score =273.2; E_value=6e-79; Accession=PF06421.4; Description=GTP-binding protein LepA C-terminus
  Pfam module annotation: Pfam domain module=EFG_C::LepA_C; Domain location=1-83::84-192
KIEMLTPKDYIGPIMELAQDRRGEFKEMNFITESRAKIIYELPLAEMVGDFFDQLKSRSKGYASMEYSLVGYRESQLVKLDIQINGDPVEALSTIVHRDKAYSVGRALTQKLKELIPRQMFRVPIQACIGTKVIASEALSAIRKDVLSKCYGGDITRKKKLLKKQAEGKKRMKAIGRVDVPQEAFMAVLKLEKEVL

SEQ ID NO: 101587 - protein, 323 aa, Setaria italica
  Transcript Sequence Number=SeqID_35613
  Gene Ontology: Mol. function=NAD+ ADP-ribosyltransferase activity; Cellular component=nucleus
  Homolog annotation: Hit_ID=B6TNC0; Match level="QueryCoverage=100%, HitCoverage=100%, E-value=1e-162, Identity=88%"; Hit description =Ankyrin repeat domain-containing protein 2
  Pfam annotation: Domain name=Ank; Domain location=198-230; Score=1.1; E_value=25; Accession=PF00023.22; Description=Ankyrin repeat
  Pfam annotation: Domain name=Ank; Domain location=231-263; Score =30.0; E_value=9.5e-06; Accession=PF00023.22; Description=Ankyrin repeat
  Pfam annotation: Domain name=Ank; Domain location=264-296; Score =40.6; E_value=6.1e-09; Accession=PF00023.22; Description=Ankyrin repeat
  Pfam module annotation: Pfam domain module=Ank::Ank::Ank; Domain location=198-230::231-263::264-296
MASDESKNTKPEKPSAAAGAGLPNPFDFSSMSSLLNDPSIREMAEQIASDPMFNQMAEQLQKSAQGAGEQGIPALDPQQYMETMQQVMQNPQFVSMAERLGNALMQDPAMSSMLENLSSPAHKEQLEERMARIKEDPSLKPILDEIENGGPSAMVKYWNDPEVLQKIGQAMGVNLPGDSSASTVLSGPEETEEEGGYDDESIVHHTASVGDEEGLKKALDGGADKDEEDAEGRRALHFACGYGELKCAEILLEAGAAVDALDKNKNTPLHYAAGYGRKECVDLLLKHGAAVTVQNLDGKTPIEVARLNNQDEVLKLLEKDAFL

SEQ ID NO: 101588 - protein, 121 aa, Setaria italica
  Transcript Sequence Number=SeqID_35614
  Gene Ontology: Mol. function=NAD+ ADP-ribosyltransferase activity; Cellular component=nucleus; Biological process=intracellular protein transmembrane transport
  Homolog annotation: Hit_ID=B6U990; Match level="QueryCoverage=72%, HitCoverage=26%, E-value=4e-44, Identity=95%"; Hit description =Ankyrin repeat domain-containing protein 2
  Pfam annotation: Domain name=Ank; Domain location=29-61; Score=19.6; E_value=0.013; Accession=PF00023.22; Description=Ankyrin repeat
  Pfam annotation: Domain name=Ank; Domain location=62-94; Score=40.6; E_value=6.1e-09; Accession=PF00023.22; Description=Ankyrin repeat
  Pfam module annotation: Pfam domain module=Ank::Ank; Domain location =29-61::62-94
VYLSLTLKTLLFRFFCFFILRSLFFEGTLRTNFLHFACGYGELKCAEILLEAGAAVDALDKNKNTPLHYAAGYGRKECVDLLLKHGAAVTVQNLDGKTPIEVARLNNQDEVLKLLEKDAFL

SEQ ID NO: 101589 - protein, 336 aa, Setaria italica
  Transcript Sequence Number=SeqID_35615
  Gene Ontology: Biological process=response to stress
  Homolog annotation: Hit_ID=Q8LAU8; Match level="QueryCoverage=79%, HitCoverage=84%, E-value=4e-87, Identity=58%"; Hit description =Dessication-related protein, putative
MASYASASFMLLLLLQLWSCSEALPGGHLVDPTCPPEWPSVVAMSSEHGEPSCQPPAPRIPVAVFPYDVDPMQFALNLEFTEVEFFLHGAYGVGLDKIAPKLALGGPPSVGARKANLDEVTWPIIAEFGLQEVGHVRSIQRTVGGIPRPLIDLSAHNFARVMDEAFGYKLDPPFDPYINSLNFLLASYVIPYLGLNGYVGTNPIIDGYETKKLLAGLLGVESGQDAAFRTLLFGRRDEAVPPYNVTVAEFTDRVSALRNRLGRCGVKDEGLTVPRELGAEGAICTNVLSADRDSLSYSRTPAELLRILYLTGDEHVPGGFYPDGANGKIARSFLGK

SEQ ID NO: 101590 - protein, 75 aa, Setaria italica
  Transcript Sequence Number=SeqID_35616
PWAVIAHAERSVAAFCDDKELFCRAAMPTRRWGGFLRVGKGPGPPCHCAAHLHLRRCSAASATALRPARQAPCLS

SEQ ID NO: 101591 - protein, 144 aa, Setaria italica
  misc_feature (118)..(118): Xaa can be any naturally occurring amino acid
  Transcript Sequence Number=SeqID_35617
  Homolog annotation: Hit_ID=B6SH56; Match level="QueryCoverage=100%, HitCoverage=30%, E-value=3e-27, Identity=56%"; Hit description=FK506- binding protein 39 kDa
KKTCKAERRRHLKKKYQVDSTDDNDDGSPVMKPAVKHNAPSIFDSSSDEEDNVPISVALGNKDGAKVAVKRNASSIFDSCSDEDNDVALAKQDSAKVAEETNPQNGQVNDGTKKRVIXDRKRKSSAISEDPASPMDIADANAPS

SEQ ID NO: 101592 - protein, 34 aa, Setaria italica
  Transcript Sequence Number=SeqID_35618
LYTEKSRLLKQKRISDAKRIDKKNIRSGVRSKYD

SEQ ID NO: 101593 - protein, 633 aa, Setaria italica
  Transcript Sequence Number=SeqID_35619
  Gene Ontology: Mol. function=potassium ion transmembrane transporter activity; Cellular component=integral to membrane; Biological process=potassium ion transport
  Homolog annotation: Hit_ID=Q69RI8; Match level="QueryCoverage=100%, HitCoverage=73%, E-value=0.0, Identity=76%"; Hit description =Probable potassium transporter 14
  Pfam annotation: Domain name=K_trans; Domain location=1-633; Score =803.4; E_value=1.5e-238; Accession=PF02705.8; Description=K+ potassium transporter
KIKERLETSSMLKKLLLMLVLFGTSMVIADGVVTPAMSVMSAVNGLKVGISSVNEGEVVMITVAFLIVLFSLQRFGTSKVGLAVGPALFIWFCCLAGIGIYNIRIYGSEVLHAFNPVYIYYYFERNPTQAWMSLGGCLLCATGSEAMFADLCYFSVRSVQLTFVFLVLPCLLLGYLGQAAFLMENLTKSQQVFFLSIPGQAFWPVVFVATLAALIASRAMTTAIFSTIKQATALGCFPRLKIIHTSRKFMGQIYIPVMNWFLLVSCLAFVTVFGSINEIGNAYGMAELGVMMMTTVLVTIIMLLIWQVNIVVVLCFLTLFLGLELFFFSSVLGSAADGSWVLLVFAAVLYLVMYIWNYGTKLKYETEVKQKLSMDLLMQLGCNLGTVRAPGIGLLYNELVRGVPSIFSHFLTTLPAMHSMIIFVCIKWVPVPVVPQNERFLFRRVCPKNYHMFRCIARYGYKDVRKENPQAFEQLLIESLEKFIRREAQERSLESDHNDDTDSEEEIASSSSRVLVGPNGSIYSLGVPLAESAGADNSALGSSASIDYGSLDDAMNGRRSLDNELSFIHKAKESGVVYLLGHGDIRARKESFFLKKLVINYFYAFLRKNCRRGIATLSIPHTRLMQVAMQYMV

SEQ ID NO: 101594 - protein, 105 aa, Setaria italica
  Transcript Sequence Number=SeqID_35620
  Gene Ontology: Mol. function=transporter activity; Cellular component= integral to membrane; Biological process=transport
  Homolog annotation: Hit_ID=B6TU79; Match level="QueryCoverage=97%, HitCoverage=22%, E-value=9e-30, Identity=70%"; Hit description =Sulfate transporter
VFGNSFVTILGQFPIGILGVMLLFSGVELAMASRDMGTKEESFVMLICAGVSLTGSSAALGFISGIVLYLLLRLRDVDYRGLLGRWGAGRRQTGNKAGGDGDEDA

SEQ ID NO: 101595 - protein, 102 aa, Setaria italica
  misc_feature (62)..(62): Xaa can be any naturally occurring amino acid
  Transcript Sequence Number=SeqID_35621
  Gene Ontology: Mol. function=hydroxymethyl-, formyl- and related transferase activity; Biological process=biosynthetic process
  Homolog annotation: Hit_ID=B4FRN6; Match level="QueryCoverage=99%, HitCoverage=28%, E-value=8e-42, Identity=83%"; Hit description =Methionyl-tRNA formyltransferase
  Pfam annotation: Domain name=Formyl_trans_C; Domain location=6-102; Score=40.8; E_value=5.3e-09; Accession=PF02911.10; Description =Formyl transferase, C-terminal domain
MTYVFQLNSEESWLSFDQEAKELHNKVRAFSGWPGTRAKLQLINQNGEPDMLEIKVNSIREXFSCDKVGDENEILFSGSSLLIPCSGSTWLEVLELQLPGKK

SEQ ID NO: 101596 - protein, 65 aa, Setaria italica
  Transcript Sequence Number=SeqID_35622
ITRGDKEQQETVQCQKGEADEIWKSERRREVGEYSNSQDGINGMPLVVGKGEEDHYHPNNGALLG

SEQ ID NO: 101597 - protein, 548 aa, Setaria italica
  Transcript Sequence Number=SeqID_35623
  Gene Ontology: Mol. function=DNA binding; Cellular component=nucleus; Biological process=cell division
  Homolog annotation: Hit_ID=B6TA37; Match level="QueryCoverage=91%, HitCoverage=92%, E-value=0.0, Identity=85%"; Hit description=Protein RCC2
  Pfam annotation: Domain name=AT_hook; Domain location=495-507; Score =2.2; E_value=11; Accession=PF02178.11; Description=AT hook motif
  Pfam annotation: Domain name=AT_hook; Domain location=513-525; Score =14.3; E_value=0.089; Accession=PF02178.11; Description=AT hook motif
  Pfam annotation: Domain name=RCC1; Domain location=140-188; Score =16.3; E_value=0.014; Accession=PF00415.10; Description=Regulator of chromosome condensation (RCC1)
  Pfam annotation: Domain name=RCC1; Domain location=192-256; Score =4.1; E_value=0.29; Accession=PF00415.10; Description=Regulator of chromosome condensation (RCC1)
  Pfam annotation: Domain name=RCC1; Domain location=259-312; Score =15.1; E_value=0.019; Accession=PF00415.10; Description=Regulator of chromosome condensation (RCC1)
  Pfam annotation: Domain name=RCC1; Domain location=88-137; Score =38.8; E_value=2.1e-08; Accession=PF00415.10; Description=Regulator of chromosome condensation (RCC1)
  Pfam module annotation: Pfam domain module=AT_hook::AT_hook::RCC1::RCC 1::RCC1::RCC1; Domain location=495-507::513-525::140-188::192 -256::259-312::88-137
MSASAEPEKDAAAAAAEGDEKAEAKGSGSGWELLYCGGTSFDSMGRKVVGGAQGNLVSPTRLRPLVGVDIRFVGSGCTACHCVALDAEGRCYTWGRNEKGQLGHGDTLLRNLPTVVSQLSKYKIIKASVGRNHTVVVTDDGKSFSFGHNKHGQLGTGSLRNEIESSPVPCIVAEATTAVCGADFTVWLSSVEGSSILTAGLPQYGQLGHGTDNEYNAKDSSVKLTYDPQPRPRAIAALSGKTVVKVACGTNHTVAVDSSGFVYTWGFGGYGRLGHREQKDEWQPRLVEVFQKQNVLPPNAIVSAGSASSACTAGGGQLYMWGKMKNTGDDWMYPKPVMDLSGWNIRCMASGNMHHVVGADDSCISWGVAQNGELGYGPNGQKSSANPKKVDILEGMHVTSVGCGYGLSLIVVDRANIGDRLDKLEIYDGDTSTEVEVEVQAAKKASTSTNSRANKRKKTKDDSESEEDDDEDESEDDENGEIEEAKGKRGRKPSNRGRGRGAKKAAPEPKPSGRGRGRPKKTESPAQKAGSSGGRGGKRGGKRGRPRK

SEQ ID NO: 101598 - protein, 98 aa, Setaria italica
  Transcript Sequence Number=SeqID_35624
  Homolog annotation: Hit_ID=Q9S7R3; Match level="QueryCoverage=93%, HitCoverage=50%, E-value=1e-22, Identity=63%"; Hit description=177 protein
  Pfam annotation: Domain name=DUF640; Domain location=1-66; Score =79.4; E_value=1.3e-20; Accession=PF04852.4; Description=Protein of unknown function (DUF640)
HAAECAYFGQPSPPAPCPCPLRQAWGSLDALIGRLRAAYEESGHPPESNPFAARAVRIYLREVRDAQAKARGIPYEKKNRKRKQPAPTTGPGEASSSS

SEQ ID NO: 101599 - protein, 117 aa, Setaria italica
  misc_feature (25)..(25): Xaa can be any naturally occurring amino acid
  Transcript Sequence Number=SeqID_35625
  Homolog annotation: Hit_ID=B6TE74; Match level="QueryCoverage=86%, HitCoverage=24%, E-value=7e-30, Identity=73%"; Hit description=Water channel
  Pfam annotation: Domain name=DZC; Domain location=99-117; Score=7.7; E_value=0.033; Accession=PF08381.3; Description=Disease resistancezinc fingerchromosome co
  Subcellular localization annotation: CTP_CleavageSite=49; ConfidenceScore=5.46e-01
HGGSGFGGSDAGSASDRFHYAYRRXGSSAASTPRLRAGGAALSSGDATPSMSVRTDFPAGDEEEDDEMASEGGGKEDDAKEWVAQVEPGVLITFVSLAQGGNDLKRIRFSREMFNKW

SEQ ID NO: 101600 - protein, 69 aa, Setaria italica
  Transcript Sequence Number=SeqID_35626
  Subcellular localization annotation: CTP_CleavageSite=49; ConfidenceScore=5.21e-01
LFNPCQHGLKQNLIQPNGRGCKSHPNLRHKKQTMHATSCTGSMFYLLITSSLLSGTIVSAGVYTKQNLR

SEQ ID NO: 101601 - protein, 106 aa, Setaria italica
  misc_feature (12)..(12): Xaa can be any naturally occurring amino acid
  misc_feature (87)..(88): Xaa can be any naturally occurring amino acid
  misc_feature (102)..(102): Xaa can be any naturally occurring amino acid
  Transcript Sequence Number=SeqID_35627
  Gene Ontology: Mol. function=hydrolase activity, hydrolyzing O -glycosyl compounds; Cellular component=chloroplast; Biological process=carbohydrate metabolic process
  Homolog annotation: Hit_ID=Q08047; Match level="QueryCoverage=100%, HitCoverage=15%, E-value=1e-44, Identity=74%"; Hit description=1,4 -alpha-glucan-branching enzyme 2, chloroplastic/amyloplastic
MGLGGEGYLNFXGINLPLGSLCGNNNSYDKCRRRFDLGDADYLRYHGMQEFDRAMQHLEEKYGFMTDDHQYISRKHEEDKVIVFEKXXLVFVFNFHCNNSYXDYRV

SEQ ID NO: 101602 - protein, 74 aa, Setaria italica
  Transcript Sequence Number=SeqID_35628
  Gene Ontology: Mol. function=hydrolase activity, hydrolyzing O -glycosyl compounds; Cellular component=chloroplast; Biological process=carbohydrate metabolic process
  Homolog annotation: Hit_ID=Q24M29; Match level="QueryCoverage=58%, HitCoverage=5%, E-value=6e-16, Identity=86%"; Hit description=Starch branching enzyme IIb
VILGVVIKVGSLVLLVRLDFFGGFGRIHHTAEHFTDGSHDNRPHSFSVYTPSRTCVVYAPADIVPESSEEVISK

SEQ ID NO: 101603 - protein, 220 aa, Setaria italica
  misc_feature (131)..(131): Xaa can be any naturally occurring amino acid
  Transcript Sequence Number=SeqID_35629
  Gene Ontology: Mol. function=hydrolase activity, hydrolyzing O -glycosyl compounds; Cellular component=chloroplast; Biological process=carbohydrate metabolic process
  Homolog annotation: Hit_ID=Q08047; Match level="QueryCoverage=100%, HitCoverage=16%, E-value=7e-38, Identity=85%"; Hit description=1,4 -alpha-glucan-branching enzyme 2, chloroplastic/amyloplastic
  Pfam annotation: Domain name=Alpha-amylase_C; Domain location=152 -217; Score=53.5; E_value=8e-13; Accession=PF02806.10; Description =Alpha amylase, C-terminal all-beta do
FPRGPQRLPSGKFIPGNNNSYDKCRRRFDLGDADYLRYHGMQEFDRAMQHLEEKYGFMTDDHQYISRKHKYQISLFEYNHLVLLVFPRNVLVIISHESIFFLKMLHCPIKLLHTMVPKVVRVTQVPWYARXSASPRSNLEEKYGFMTDDHQYISRKHEEDKVIVFEKGDLVFVFNFHCNNSYFDYRVGCRRSGVYKVVLDSDAGLFGGFGRIHHTAEHFT

SEQ ID NO: 101604 - protein, 347 aa, Setaria italica
  misc_feature (106)..(106): Xaa can be any naturally occurring amino acid
  misc_feature (215)..(215): Xaa can be any naturally occurring amino acid
  misc_feature (238)..(238): Xaa can be any naturally occurring amino acid
  Transcript Sequence Number=SeqID_35630
  Gene Ontology: Mol. function=hydrolase activity, hydrolyzing O -glycosyl compounds; Cellular component=chloroplast; Biological process=carbohydrate metabolic process
  Homolog annotation: Hit_ID=Q08047; Match level="QueryCoverage=91%, HitCoverage=39%, E-value=1e-176, Identity=92%"; Hit description=1,4 -alpha-glucan-branching enzyme 2, chloroplastic/amyloplastic
  Pfam annotation: Domain name=Alpha-amylase_C; Domain location=226 -320; Score=99.2; E_value=1.4e-26; Accession=PF02806.10; Description =Alpha amylase, C-terminal all-beta do
WFYFVLLVNDLIHGLYPEAVTIGEDVSGMPTFALPVHDGGVGFDYRLHMAVADKWIELMKQSDESWKMADIVHTLTNRRWLEKCVTYSESHDQALVGDKTIAFWLXMDKDMYDFMALDRPSTPTIDRGIALHKMIRLITMGLGGEGYLNFMGNEFGHPEWIDFPRGPQRLPSGKFIPGNNNSYDKCRRRFDLGDADYLRYHGMQEFDRAMQHLEXKYGFMTDDHQYISRKHEEDKVIXFEKGDLVFVFNFHCNNSYFDYRVGCRRSGVYKVVLDSDAGLFGGFGRIHHTAEHFTDGSHDNRPHSFSVYTPSRTCVVYAPADTIVPESSEEVISSKHAASTASCMHGL

SEQ ID NO: 101605 - protein, 143 aa, Setaria italica
  misc_feature (18)..(18): Xaa can be any naturally occurring amino acid
  Transcript Sequence Number=SeqID_35631
  Gene Ontology: Mol. function=hydrolase activity, hydrolyzing O -glycosyl compounds; Cellular component=chloroplast; Biological process=carbohydrate metabolic process
  Homolog annotation: Hit_ID=Q08047; Match level="QueryCoverage=90%, HitCoverage=16%, E-value=8e-63, Identity=88%"; Hit description=1,4 -alpha-glucan-branching enzyme 2, chloroplastic/amyloplastic
  Pfam annotation: Domain name=Alpha-amylase_C; Domain location=35-129; Score=102.6; E_value=1.4e-27; Accession=PF02806.10; Description=Alpha amylase, C-terminal all-beta do
GDADYLRYHGMQEFDRAXMQHLEEKYGFMTDDHQYISRKHEEDKVIVFEKGDLVFVFNFHCNNSYFDYRVGCRRSGVYKVVLDSDAGLFGGFGRIHHTAEHFTDGSHDNRPHSFSVYTPSRTCVVYAPADTIVPESSEEVISK

SEQ ID NO: 101606 - protein, 777 aa, Setaria italica
  misc_feature (204)..(204): Xaa can be any naturally occurring amino acid
  misc_feature (312)..(312): Xaa can be any naturally occurring amino acid
  Transcript Sequence Number=SeqID_35632
  Gene Ontology: Mol. function=hydrolase activity, hydrolyzing O -glycosyl compounds; Cellular component=chloroplast; Biological process=carbohydrate metabolic process
  Homolog annotation: Hit_ID=Q08047; Match level="QueryCoverage=96%, HitCoverage=92%, E-value=0.0, Identity=91%"; Hit description=1,4 -alpha-glucan-branching enzyme 2, chloroplastic/amyloplastic
  Pfam annotation: Domain name=Alpha-amylase; Domain location=254-642; Score=-29.5; E_value=8.8e-08; Accession=PF00128.16; Description =Alpha amylase, catalytic domain
  Pfam annotation: Domain name=Alpha-amylase_C; Domain location=669 -763; Score=102.6; E_value=1.4e-27; Accession=PF02806.10; Description= Alpha amylase, C-terminal all-beta do
  Pfam annotation: Domain name=CBM_48; Domain location=130-215; Score =106.8; E_value=7.3e-29; Accession=PF02922.10; Description =Carbohydrate-binding module 48 (Isoam
  Pfam module annotation: Pfam domain module=Alpha-amylase::Alpha -amylase_C::CBM_48; Domain location=254-642::669-763::130-215
MRAAAASGKVVVPEGENDGLTSSADSAQFQSDELEVPDITEDQIESSETMHVAREADAQALNREVLGSAPQVKPRTVPPPGDGQKIFQIDSMLQGYKYHLEYRYSLYRRIRSDIDEHEGGLEAFSRSYEKFGFNRSAEGVTYREWAPGAHSAALVGDFNNWDPNADRMSKNEFGVWEVFLPNNADGSSPIPHGSRVKVRMDTPXSGIKDSIPAWIRYSVQAPGAIPYDGIYYDPPEEVKHVFKHPQPKRPKSLRIYETHVGMSSPEPKINTYANFRDEVLPRIKKLGYNAVQIMAIQEHSYYGSFGYHVTNXFAPSSRFGTPEDLKSLIDKAHELGLLVLMDVVHSHASSNTLDGLNGFDGTDTHYFHSGPRGHHWMWDSRLFNYGNWEVIRFLLSNARWWLEEYKFDGFRFDGVTSMMYTHHGLQVTFTGNFNEYFGFATDVDAVVYLMLVNDLIHGLYPEAVTIGEDVSGMPTFALPVHDGGVGFDYRLHMAVADKWIELMKQSDESWKMADIVHTLTNRRWLEKCVTYSESHDQALVGDKTIAFWLMDKDMYDFMALDRPSTPTIDRGIALHKMIRLITMGLGGEGYLNFMGNEFGHPEWIDFPRGPQRLPSGKFIPGNNNSYDKCRRRFDLGDADYLRYHGMQEFDRAMQHLEEKYGFMTDDHQYISRKHEEDKVIVFEKGDLVFVFNFHCNNSYFDYRVGCRRSGVYKVVLDSDAGLFGGFGRIHHTAEHFTDGSHDNRPHSFSVYTPSRTCVVYAPADTIVPESSEEVISK

SEQ ID NO: 101607 - protein, 154 aa, Setaria italica
  Transcript Sequence Number=SeqID_35633
  Gene Ontology: Mol. function=catalytic activity; Biological process =DNA repair
PSLDNSELSLNNAPGLEDCIGDFPTPEELANLDEGFLAKRCNLGYRAKRIVMLARGVVEGKVCLQKLEEMCRISVPAAEEVSTIESACERLNKELSAISGFGPFTRANVLMCMGFNHTIPADTETIRHLKQVHKRASTISSVHQELDKIYGKYA

SEQ ID NO: 101608 - protein, 147 aa, Setaria italica
  Transcript Sequence Number=SeqID_35634
  Gene Ontology: Mol. function=protein serine/threonine kinase activity; Cellular component=plasma membrane; Biological process =protein amino acid phosphorylation
  Homolog annotation: Hit_ID=Q8VZH5; Match level="QueryCoverage=98%, HitCoverage=22%, E-value=1e-16, Identity=36%"; Hit description =Receptor protein kinase-like protein
QTAQQQMDVIAWSGGIGRTAYTDYVIITPGSGQMDLWVALHPDLSSRPEYYDAILNGLEIFKIQNYGNNSLNGLNRPIPSVEPDGKPGGRNPKVAAPAAIGGAVGGFVVLLIASIGVCIICRRKKKVAKESGKSDDGHWTPLTDYSK

SEQ ID NO: 101609 - protein, 910 aa, Setaria italica
  Transcript Sequence Number=SeqID_35635
  Gene Ontology: Mol. function=protein serine/threonine kinase activity; Biological process=protein amino acid phosphorylation
  Homolog annotation: Hit_ID=Q4PLL4; Match level="QueryCoverage=98%, HitCoverage=87%, E-value=0.0, Identity=84%"; Hit description=SHR5 -receptor-like kinase (Fragment)
  Pfam annotation: Domain name=LRR_1; Domain location=102-124; Score =10.9; E_value=2.4; Accession=PF00560.25; Description=Leucine Rich Repeat
  Pfam annotation: Domain name=LRR_1; Domain location=126-148; Score =16.5; E_value=0.11; Accession=PF00560.25; Description=Leucine Rich Repeat
  Pfam annotation: Domain name=LRR_1; Domain location=174-197; Score =12.5; E_value=1.2; Accession=PF00560.25; Description=Leucine Rich Repeat
  Pfam annotation: Domain name=LRR_1; Domain location=199-221; Score =17.7; E_value=0.05; Accession=PF00560.25; Description=Leucine Rich Repeat
  Pfam annotation: Domain name=LRR_1; Domain location=223-244; Score =6.7; E_value=16; Accession=PF00560.25; Description=Leucine Rich Repeat
  Pfam annotation: Domain name=LRR_1; Domain location=245-268; Score =8.9; E_value=5.9; Accession=PF00560.25; Description=Leucine Rich Repeat
  Pfam annotation: Domain name=LRR_1; Domain location=30-52; Score=8.5; E_value=7.2; Accession=PF00560.25; Description=Leucine Rich Repeat
  Pfam annotation: Domain name=LRR_1; Domain location=54-76; Score =13.0; E_value=0.99; Accession=PF00560.25; Description=Leucine Rich Repeat
  Pfam annotation: Domain name=LRR_1; Domain location=7-29; Score=7.0; E_value=14; Accession=PF00560.25; Description=Leucine Rich Repeat
  Pfam annotation: Domain name=LRR_1; Domain location=78-100; Score =6.8; E_value=15; Accession=PF00560.25; Description=Leucine Rich Repeat
  Pfam annotation: Domain name=Pkinase; Domain location=577-845; Score =141.8; E_value=2.1e-39; Accession=PF00069.17; Description=Protein kinase domain
  Pfam annotation: Domain name=Pkinase_Tyr; Domain location=577-845; Score=77.1; E_value=6.4e-20; Accession=PF07714.9; Description =Protein tyrosine kinase
  Pfam annotation: Domain name=SKG6; Domain location=513-547; Score =12.6; E_value=0.027; Accession=PF08693.2; Description=Transmembrane alpha-helix domain
  Pfam module annotation: Pfam domain module=LRR_1::LRR_1::LRR_1::LRR _1::LRR_1::LRR_1::LRR_1::LRR_1::LRR_1::LRR_1::Pkinase::Pkinase _Tyr::SKG6; Domain location=102-124::126-148::174-197::199-221::223 -244::245-268::30-52::...
  Pfam module annotation: Domain location=54-76::7-29::78-100::577 -845::577-845::513-547
ELQNLTYLSNLNLMQNYLTGPVPSFIGKFPMQYLTLAINPLSGTLPKELGNLTNLISLGISLNNFTGELPSELGNLAKLEQIYFDSSGFSGPFPSTFSKLKNLKILWASDNDFTGKIPDFIGSLTKLEVLRFQGNSFEGPIPESLSNLTKLTNLRIGDIVNGSSSMSFISNLTSLDVLILRNCRISDNLATVNFSNLAGLTLLDLSFNNITGQIPPSILNLAKLGFLFLGNNSLSGSLPDVKSPLLNNLDFSYNQLSGSFPSWATQNNLQLNLVANNFVLGSSNNSILPSGLNCLQQDIPCFRGSPEYSSFAVDCGSSRSMTGSNNTFYEIDPTNTGAASYYVTGQTRWGVSNVGKFNEAPNGSYIIYSPRQFQTAQDSELFQTARMSPSSLRYYGIGLENGNYTVELQFAEFAYPESPTWQSIGRRVFDIYVQGHLKEKNFDIRKTAGGKSYVAVYKKYNATVSKNFLEIHLFWAGKGTCCIPTQGYYGPMISALSVTPNFTPTVRNGVPKKKSKAGAIAGIVIGASVLGLAALLGVFMLVKKRRRVAQQQEELYNMVGRPNIFSNAELKLATDNFSSQNILGEGGYGPVYKGKLPDGRVIAVKQLSQTSHQGKNQFVTEVATISAVQHRNLVKLYGCCIDSNTPLLVYEFHENGSLDRALFGDSGLNLDWPTRFEIILGIARGLTYLHEESSVRIVHRDIKASNVLLDIDLTPKISDFGLAKLFDEKKTHVSTKIAGTFGYLAPEYAMRGHLTEKADVFAFGVVALETIAGRSNTDNSQEEDKIYLFEWAWEMYERDQALGILDPRIEDFDSEEASRVIHVALLCTQGSPHQRPPMSRVVKMLTGDIEVTEVVTKPSYITEWQRRGGNTSYATSNYSGDTTGEFSAQRETIAPLTPSPAMTGVIDEGR

SEQ ID NO: 101610 - protein, 73 aa, Setaria italica
  Transcript Sequence Number=SeqID_35636
  Homolog annotation: Hit_ID=B6TBE4; Match level="QueryCoverage=100%, HitCoverage=17%, E-value=6e-25, Identity=69%"; Hit description=F-box domain containing protein
GHLYMTGDTNDGKLCIVAAIEFTLFIWFLRADADGVDKWMLESMVQLEGEVLQATEGSRDEHEELKVLAILDG

SEQ ID NO: 101611 - protein, 139 aa, Setaria italica
  Transcript Sequence Number=SeqID_35637
  Gene Ontology: Mol. function=mannosyltransferase activity; Cellular component=endoplasmic reticulum membrane; Biological process=GPI anchor biosynthetic process
  Homolog annotation: Hit_ID=O65394; Match level="QueryCoverage=99%, HitCoverage=28%, E-value=1e-37, Identity=58%"; Hit description =F12F1.28 protein
TVAVIMLALSGSARSNGALNAGYFCFQALLQAYDAAVQKKRPMLAVWALVAAALRSIFILLPFFAFQAYGYLNICVHGSSEELRPWCKAKVPLLYGFIQSHYWGVGFLRYFQVKQLPNFLLASPVLSLAVYSIIHYNKN

SEQ ID NO: 101612 - protein, 120 aa, Setaria italica
  Transcript Sequence Number=SeqID_35638
  Gene Ontology: Mol. function=phosphoenolpyruvate carboxykinase (ATP) activity; Cellular component=cytoplasm; Biological process =gluconeogenesis
  Homolog annotation: Hit_ID=Q9SLZ0; Match level="QueryCoverage=100%, HitCoverage=20%, E-value=1e-59, Identity=85%"; Hit description =Phosphoenolpyruvate carboxykinase [ATP]
AAFIMLHPTKYAAMLAEKMQKYGATGWLVNTGWSGGRYGVGKRIRLPYTRKIVDAIHSGELLTEIDGVPSEILDPINTWTDKAAYKETLLRLAGLFKNNFEVFASYKIGDDSSLTDEILA

SEQ ID NO: 101613 - protein, 102 aa, Setaria italica
  Transcript Sequence Number=SeqID_35639
  Gene Ontology: Mol. function=phosphoenolpyruvate carboxykinase (ATP) activity; Cellular component=cytoplasm; Biological process =gluconeogenesis
  Homolog annotation: Hit_ID=B8ZV85; Match level="QueryCoverage=72%, HitCoverage=14%, E-value=2e-25, Identity=72%"; Hit description =Phosphoenolpyruvate carboxykinase (Fragment)
LGTQYAGEMKKGLFGVMHYLMPKRGILSLHSGCNMGKDGDVALFFGLSGKILGVDPNRIVVPSPAQTASDVSLSLSYPIYASDLLLCDVSVTDLYEYRCRIC

SEQ ID NO: 101614 - protein, 75 aa, Setaria italica
  Transcript Sequence Number=SeqID_35640
  Gene Ontology: Mol. function=phosphoenolpyruvate carboxykinase (ATP) activity; Cellular component=cytoplasm; Biological process =gluconeogenesis
  Homolog annotation: Hit_ID=Q10NW9; Match level="QueryCoverage=100%, HitCoverage=11%, E-value=1e-39, Identity=96%"; Hit description =Phosphoenolpyruvate carboxykinase, putative, expressed
KDEAAAQDLWWGKGSPNIEMDEHTFLTNRERAVDYLNSLDKVFVNDQFLNWDPENRIKVRIISARAYHSLFMHNM

SEQ ID NO: 101615 - protein, 660 aa, Setaria italica
  misc_feature (501)..(501): Xaa can be any naturally occurring amino acid
  misc_feature (515)..(515): Xaa can be any naturally occurring amino acid
  Transcript Sequence Number=SeqID_35641
  Gene Ontology: Mol. function=phosphoenolpyruvate carboxykinase (ATP) activity; Cellular component=cytoplasm; Biological process =gluconeogenesis
  Homolog annotation: Hit_ID=Q9SLZ0; Match level="QueryCoverage=100%, HitCoverage=100%, E-value=0.0, Identity=83%"; Hit description =Phosphoenolpyruvate carboxykinase [ATP]
  Pfam annotation: Domain name=PEPCK_ATP; Domain location=135-607; Score=1129.9; E_value=0; Accession=PF01293.12; Description =Phosphoenolpyruvate carboxykinase
MAAPNGLARIETHGKKKHENGVCHDDSAAPVRAQTIDELHSLQRKRSAPTTPIKDGAASPFAAALSEEERHRQQLQSISASLASLTRETGPKVVKGDPARKGEAAAKGAPPTPQKHHQHHHPAAPTIAVSDSSLKFTHVLYNLSPGELYEQAIKYEKGSFITSNGALATLSGAKTGRSPRDKRVVKDEAAAQDLWWGKGSPNIEMDEHTFLTNRERAVDYLNSLDKVFVNDQFLNWDPENRIKVRIISARAYHSLFMHNMCIRPTDEELESFGTPDFTIYNAGQFPCNRYTHYMTSSTSVDINLARREMVILGTQYAGEMKKGLFGVMHYLMPKRGILSLHSGCNMGKDGDVALFFGLSGTGKTTLSTDHNRLLIGDDEHCWSDNGVSNIEGGCYAKCIDLSQEKEPDIWNAIKFGTVLENVVFDEHTREVDYTDKSVTENTRAAYPIEYIPNAKIPCVGPHPKNVILLACDAFGVLPPVSKLNLAQTMYHFISGYTALVXRHCGRHKGAAGHVXSACFGAAFIMLHPTKYAAMLAEKMQKYGATGWLVNTGWSGGRYGVGKRIRLPYTRKIVDAIHSGELLTANYKKTEVFGLEIPTEIDGVPSEILDPINTWTDKAAYKETLLRLAGLFKNNFEVFASYKIGDDSSLTDEILAAGPNF

SEQ ID NO: 101616 - protein, 258 aa, Setaria italica
  Transcript Sequence Number=SeqID_35642
  Gene Ontology: Mol. function=cholestenol delta-isomerase activity; Cellular component=endoplasmic reticulum; Biological process=steroid biosynthetic process
  Homolog annotation: Hit_ID=Q2TU57; Match level="QueryCoverage=81%, HitCoverage=95%, E-value=9e-97, Identity=81%"; Hit description =Sterol-8,7-isomerase
  Pfam annotation: Domain name=EBP; Domain location=69-256; Score =316.4; E_value=6e-92; Accession=PF05241.4; Description=Emopamil binding protein
  Subcellular localization annotation: CTP_CleavageSite=34; ConfidenceScore=5.09e-01
SQHLSHLSASQVKLSLLLLRRRLFPDRRRQVLVVAGRAGRRAAAMGHPYAPADLELPGFVPLRLSQGEILVTYIGASLFVLLAVWLVSGRCGRLSKTERLLMCWWAFTGLTHIIIEGPFVFTPNFFKKENPNFFDEVWKEYSKGDSRYVARDTATVTVEGITAVLEGPASLLAVYAIASRKSYSHILQFSVCLGQLYGCLVYFITAYLDGFNFWASPFYFWAYFIGANASWVVIPTLIAMRSWKKICGAFQAEKVKNK

SEQ ID NO: 101617 - protein, 117 aa, Setaria italica
  Transcript Sequence Number=SeqID_35643
  Gene Ontology: Mol. function=RNA-directed DNA polymerase activity; Cellular component=chromatin; Biological process=RNA-dependent DNA replication
  Homolog annotation: Hit_ID=Q75K51; Match level="QueryCoverage=78%, HitCoverage=30%, E-value=3e-19, Identity=48%"; Hit description =Putative retrotransposon protein
QSNIIFYSHIFGEASGLQTNLSKSCVIPIQCEGEIIEAVNNTLQCTTTSFPCTYLGLPISDKKLRKCDLIPWIEKIANKLPGWKASLMNMSGWAVLVRFVPYYLFLTSFSFLFLLVR

SEQ ID NO: 101618 - protein, 219 aa, Setaria italica
  Transcript Sequence Number=SeqID_35644
  Gene Ontology: Mol. function=nucleic acid binding; Cellular component= intracellular
  Homolog annotation: Hit_ID=Q9ZQT8; Match level="QueryCoverage=95%, HitCoverage=57%, E-value=7e-35, Identity=42%"; Hit description=WREBP- 2 protein
  Pfam annotation: Domain name=zf-C2H2; Domain location=21-45; Score =28.8; E_value=2.2e-05; Accession=PF00096.18; Description=Zinc finger, C2H2 type
  Pfam annotation: Domain name=zf-C2H2; Domain location=82-107; Score =30.0; E_value=9.3e-06; Accession=PF00096.18; Description=Zinc finger, C2H2 type
  Pfam module annotation: Pfam domain module=zf-C2H2::zf-C2H2; Domain location=21-45::82-107
AFSLDFNLRSHLKTHALENYHICPFPACGKRFTSDSKLRVHVKSHEKTGTPVTVQHTPPAEKPHSTPKPSTPATTSFADRPYVCPYEGCDKAYIHSYKLNLHLKTQHPEHGQEENGKLSASAGHHGVNEPTYQYSYAEIGETASHPKRSKTHKSHSSKVYNAKISSVMPSNISGVKNQWSGKAGYEDDSEETEEDGGNNIEDDWRYGNNVDDEETQDED

SEQ ID NO: 101619 - protein, 212 aa, Setaria italica
  Transcript Sequence Number=SeqID_35645
  Homolog annotation: Hit_ID=A8YHY2; Match level="QueryCoverage=43%, HitCoverage=90%, E-value=9e-16, Identity=50%"; Hit description =Similar to tr|Q8Z082|Q8Z082
  Pfam annotation: Domain name=DUF2488; Domain location=75-166; Score =163.7; E_value=5.6e-46; Accession=PF10674.1; Description=Protein of unknown function (DUF2488)
  Subcellular localization annotation: CTP_CleavageSite=53; ConfidenceScore=5.69e-01
MVAPATLSLRPCAAPAPPRTALPRSRACFAPGTRPSPSVAVSHPPRHFGSLRRAVAVDSEQQGSHEPPEQEKKPKTYYFLVANAKFMLDEEEHFQEQLAEKLRNYAERDIERDFWLVIEPKFLDRFPNITKRLKRPAVALVSNDGNWITFMKLRLDRVLQGQFDAESVEEALASNPVELKFDKPEKWTAPYPKYEFGWWKPFLPPKSSNGTA

SEQ ID NO: 101620 - protein, 57 aa, Setaria italica
  Transcript Sequence Number=SeqID_35646
  Homolog annotation: Hit_ID=B6SPE7; Match level="QueryCoverage=100%, HitCoverage=7%, E-value=1e-16, Identity=85%"; Hit description=AFH1
  Subcellular localization annotation: CTP_CleavageSite=23; ConfidenceScore=5.26e-01
YTKPSSLPPANPVLYDGADQHARGSTATVSSTSSPELRPMPPLPRQFQQTRMNLPSC

SEQ ID NO: 101621 - protein, 296 aa, Setaria italica
  misc_feature (253)..(253): Xaa can be any naturally occurring amino acid
  misc_feature (264)..(264): Xaa can be any naturally occurring amino acid
  Transcript Sequence Number=SeqID_35647
  Gene Ontology: Cellular component=nucleus; Biological process =regulation of transcription, DNA-dependent
  Homolog annotation: Hit_ID=Q339D4; Match level="QueryCoverage=91%, HitCoverage=51%, E-value=4e-73, Identity=55%"; Hit description =Chitin-inducible gibberellin-responsive protein 2, putative, expressed
MSTQASNRSYRYPDNTQISYYNGNLVHVGGNGTYYMPQNHDDGHYISSDDGSQTSNSRAQGFQAQYCTLDSSSANCVYPAHSSTSSQSISGSPLSQQESHSDHAYGSSPSASCVTQVPSWTLKDLENVMLGPDSDIGSPDSSLLPGTALHENNWRELLGIKTGDLRQVIIACGKAVDENAFYMDALMSELRQMVSVSGEPMQRLGAYMLEGLIARLSFTGHALYKSLKCKEPVATSSELMSYMHLLYDICPFXKFGYMSANGAXADAVKGEEPVATSSELMSYMHLLYDICPNLKN

SEQ ID NO: 101622 - protein, 87 aa, Setaria italica
  Transcript Sequence Number=SeqID_35648
  Gene Ontology: Mol. function=oxidoreductase activity
  Homolog annotation: Hit_ID=B9RUX7; Match level="QueryCoverage=97%, HitCoverage=25%, E-value=4e-12, Identity=43%"; Hit description =Gibberellin 20 oxidase, putative
MEGLGVPEYHDAMRESMRHVFRMAHYNAPGGDAEGKEVRYGTHQDCSMLTVVCQHAVDGLEVQTGDGEWIHFRPSSPASLVVIAGND

SEQ ID NO: 101623 - protein, 152 aa, Setaria italica
  misc_feature (12)..(12): Xaa can be any naturally occurring amino acid
  misc_feature (23)..(23): Xaa can be any naturally occurring amino acid
  misc_feature (70)..(70): Xaa can be any naturally occurring amino acid
  Transcript Sequence Number=SeqID_35649
  Gene Ontology: Mol. function=transcription regulator activity; Cellular component=nucleus; Biological process=transcription
  Homolog annotation: Hit_ID=B9RB66; Match level="QueryCoverage=94%, HitCoverage=8%, E-value=1e-30, Identity=45%"; Hit description=DNA binding protein, putative
  Pfam annotation: Domain name=TFIIS; Domain location=68-151; Score =43.1; E_value=1.1e-09; Accession=PF08711.3; Description =Transcription factor S-II (TFIIS)
LDDMKSKVAKLXEKGGLLNAEAXEKLVHLLQLDQTEEKMDVSDRVKLADVIAATENPVWLDRLVQSRGLXELNSWVDEAHQKEADKPMQELLLALLRALAILPINLSALQSCSIGKSVNHLRSHRNLEIQKKAKSLVEDWKRRVDTEMKSNL

SEQ ID NO: 101624 - protein, 223 aa, Setaria italica
  Transcript Sequence Number=SeqID_35650
  Gene Ontology: Mol. function=ubiquitin-protein ligase activity; Cellular component=nucleotide-excision repair complex; Biological process=transcription-coupled nucleotide-excision repair
  Homolog annotation: Hit_ID=Q6Z0X1; Match level="QueryCoverage=100%, HitCoverage=49%, E-value=4e-92, Identity=74%"; Hit description =Putative cockayne syndrome 1 homolog
  Pfam annotation: Domain name=WD40; Domain location=157-195; Score =25.8; E_value=0.00018; Accession=PF00400.24; Description=WD domain, G-beta repeat
  Pfam annotation: Domain name=WD40; Domain location=70-108; Score =22.9; E_value=0.0013; Accession=PF00400.24; Description=WD domain, G- beta repeat
  Pfam module annotation: Pfam domain module=WD40::WD40; Domain location=157-195::70-108
  Subcellular localization annotation: CTP_CleavageSite=70; ConfidenceScore=5.29e-01
LDQSQSQLGRRPPLLKSTPENDHIDSLGHSTSTRSSAQKRTRNSKNSPKLRKSQNLTQGHMQQRLHPGLSSSQNRATSHYGAVTGLRTTKDGMYLLSSGSDSRLRLWDIDSGCNTLVNFEAMRLQTGKPLQLAVTEDPSLVFVPCMASIKAYNLWSGMTFRAFRGHYELVNCCYYSEQDQELYTGSNDRQILVWSPSTPAFTEMEDDEKRQGLSAADEDNWSD

SEQ ID NO: 101625 - protein, 316 aa, Setaria italica
  Transcript Sequence Number=SeqID_35651
  Gene Ontology: Mol. function=small conjugating protein ligase activity; Cellular component=cytoplasm; Biological process=ubiquitin- dependent protein catabolic process
  Homolog annotation: Hit_ID=Q8LRF5; Match level="QueryCoverage=99%, HitCoverage=99%, E-value=1e-153, Identity=84%"; Hit description =Autophagy-related protein 3
  Pfam annotation: Domain name=Autophagy_Cterm; Domain location=283 -307; Score=62.8; E_value=1.3e-15; Accession=PF10381.1; Description =Autophagocytosis associated protein,
  Pfam annotation: Domain name=Autophagy_N; Domain location=6-162; Score=245.3; E_value=1.5e-70; Accession=PF03986.5; Description =Autophagocytosis associated protein, N-terminal domain
  Pfam annotation: Domain name=Autophagy_act_C; Domain location=195 -262; Score=140.9; E_value=4e-39; Accession=PF03987.7; Description =Autophagocytosis associated protein,
  Pfam module annotation: Pfam domain module=Autophagy_Cterm::Autophagy_ N::Autophagy_act_C; Domain location=283-307::6-162::195-262
MQVKQKVYELYKGTVERVTGPRTVSAFLEKGVLSVPEFILAGDNLVAKCPTWSWEAGDPSKRKPYLPADKQFLVTRNVPCLRRAISLEEEYDAAGAEVVLDDDDDGEGWLATHGVQASKTNEEEDIPSMDTLDIGKSDGIKSIPTYFSGGKKEEEEEEDIPDMDTYEDTGDNLVAAEPSYFVAEEPEDDNILRTRTYDVSITYDKYYQTPRVWLTGYDESRMPLKPELVFEDISQDHARKTVTIEDHPHLLAGRHASVHPCKHADVMKKIVDVLVSRGVEPEVDKYLFIFLKFIASVIPTIEYDYTMDFDLGSTSS

SEQ ID NO: 101626 - protein, 104 aa, Setaria italica
  Transcript Sequence Number=SeqID_35652
  Subcellular localization annotation: CTP_CleavageSite=13; ConfidenceScore=5.65e-01
GQPSPIPATPRNSCAAASPLWFPVLASPPPSPPPFAPRPRRDFSNPTVPARAASCPRPYPPIRSPLFRAGGGPIAGRFDSGADPIGVARWVATPRRPRRRCPHR

SEQ ID NO: 101627 - protein, 158 aa, Setaria italica
  Transcript Sequence Number=SeqID_35653
  Gene Ontology: Mol. function=protein serine/threonine kinase activity; Biological process=protein amino acid phosphorylation
  Homolog annotation: Hit_ID=Q5N7S6; Match level="QueryCoverage=98%, HitCoverage=17%, E-value=2e-26, Identity=44%"; Hit description =Receptor serine/threonine kinase PR5K-like
YDTSMCVRQPYNCGNVNISYPFYSKMETLLGNDSSYCGYPGMEIQCEEGRAFLELDSGKYTVSRIDYEPPGVWLADPDVLNEGSCPRANHNVTLRNGSWLDYPNDTVDYLVFFINCNFLNVTDIARPPSNTDSTCKFDDEPAYGMSFVFEEECAPGHE

SEQ ID NO: 101628 - protein, 138 aa, Setaria italica
  Transcript Sequence Number=SeqID_35654
  Homolog annotation: Hit_ID=B6TUV8; Match level="QueryCoverage=95%, HitCoverage=40%, E-value=1e-31, Identity=59%"; Hit description=SHI
  Pfam annotation: Domain name=DUF702; Domain location=1-66; Score =34.1; E_value=5e-11; Accession=PF05142.4; Description=Domain of unknown function (DUF702)
TTSSGDQQMVTVAERFPREVSSEAVFRCVRLGPVDQAEAEVAYQTTVSIGGHVFKGILHDVGPHSLGNPGGSGGAIEYHFRHAGDGSPPSTAAAGDVGGGGVANVIVSSAVVMDPYPTPGPYGVFPAGAAFFHGHPRQ

SEQ ID NO: 101629 - protein, 60 aa, Setaria italica
  Transcript Sequence Number=SeqID_35655
  Gene Ontology: Mol. function=transferase activity; Biological process= metabolic process
  Homolog annotation: Hit_ID=Q5JK52; Match level="QueryCoverage=91%, HitCoverage=10%, E-value=8e-25, Identity=96%"; Hit description =Probable NAD kinase 1
HILSASEQYRDCLDNVLNGPFSITLRNRLQCHVIRDAAKDELVTEDPILVLNEVTIDRGI

SEQ ID NO: 101630 - protein, 566 aa, Setaria italica
  misc_feature (432)..(432): Xaa can be any naturally occurring amino acid
  Transcript Sequence Number=SeqID_35656
  Gene Ontology: Mol. function=transferase activity; Cellular component= chloroplast; Biological process=metabolic process
  Homolog annotation: Hit_ID=B6SWV6; Match level="QueryCoverage=100%, HitCoverage=100%, E-value=0.0, Identity=80%"; Hit description=NAD kinase 1
  Pfam annotation: Domain name=NAD_kinase; Domain location=255-536; Score=196.4; E_value=7.8e-56; Accession=PF01513.13; Description=ATP -NAD kinase
MSLDELADKEQSSPEEIQLDSKFRSFNPGPIPIPAAPTIRSLADSVSDERVDVMASHQSENGSGSISTASSTVSSIESEKAAYEYLAQTPIKSTDAHLVEFSEAMRTVAKALRRVAEGKAAAQAEAAEWKRKYELEMAHKQQSKIKGCGSCISNDLDKLASQLTLETSASDQLGCCGKHGICSHEVLQDEVPGPIPRSNHKMVGRKASFKLSWGCNGDKNGQHKHDFVSFEKGDITTAERSNKQILLKWESTPQTVLFITKPNSNSVHVLCAEMVRWLKEHKNINVFVEPRVSKELLTEDSNYNFIQTWDNDEEMKLLHTKVDLIVTLGGDGTVLWAASLFKGPVPPVVAFSLGSLGFMTPFPSEQYRDCLDNVLNGPFSITLRNRLQCHVIRDAAKDELVTEDPILVLNEVTIDRGISSYLTYLECYCDSXFVTCVQGDGLIISTTSGSTAYSLAAGGSMVHPQVPGILFTPICPHSLSFRPLILPEYVTLRVQVPYNSRGHAWASFDGKDRRQLSPGDALICSISPWPVPTACVMDSTTDFLRSIHEGLHWNLRKSQSSDGPRD

SEQ ID NO: 101631 - protein, 158 aa, Setaria italica
  misc_feature (35)..(35): Xaa can be any naturally occurring amino acid
  Transcript Sequence Number=SeqID_35657
  Gene Ontology: Mol. function=nucleoside-triphosphatase activity; Cellular component=integral to membrane; Biological process=transport
  Homolog annotation: Hit_ID=UPI000185C7FF; Match level="QueryCoverage =100%, HitCoverage=26%, E-value=4e-70, Identity=87%"; Hit description= ABC transporter component
  Pfam annotation: Domain name=ABC_tran; Domain location=2-158; Score =110.8; E_value=4.5e-30; Accession=PF00005.19; Description=ABC transporter
SGGLTAIVGPSGAGKTTLFRLMARFWGVDLGRCVXGLDVRDQTTEQLMSQLAMVFQDVYLYDSTLAENIRIGAPDATDEQVWKAGSLAGVDEIAARLPGGWDASVGEGGRRLSGGERQRVPVARALLKRAPILLFDEATSALDPEDEAHVEAALAQLR

SEQ ID NO: 101632 - protein, 79 aa, Setaria italica
  Transcript Sequence Number=SeqID_35658
  Gene Ontology: Mol. function=DNA binding; Cellular component=nucleus
  Homolog annotation: Hit_ID=Q69Y75; Match level="QueryCoverage=74%, HitCoverage=71%, E-value=2e-18, Identity=76%"; Hit description=Myb -related protein-like
  Pfam annotation: Domain name=Myb_DNA-binding; Domain location=2-52; Score=15.7; E_value=0.08; Accession=PF00249.23; Description=Myb-like DNA-binding domain
MNSSWTDELNKVFELALATYDKDTPDRWQNVARAVGGGKTADDVKMHYKWLTEDVADIDMQSRAGKDSQNGGSNSNSRG

SEQ ID NO: 101633 - protein, 335 aa, Setaria italica
  misc_feature (273)..(273): Xaa can be any naturally occurring amino acid
  Transcript Sequence Number=SeqID_35659
  Gene Ontology: Mol. function=acyltransferase activity; Cellular component=endoplasmic reticulum membrane; Biological process =metabolic process
  Homolog annotation: Hit_ID=B6SM73; Match level="QueryCoverage=100%, HitCoverage=100%, E-value=1e-155, Identity=81%"; Hit description =Diacylglycerol O-acyltransferase 1
  Pfam annotation: Domain name=Acyltransferase; Domain location=120 -237; Score=-12.5; E_value=0.016; Accession=PF01553.13; Description =Acyltransferase
  Pfam annotation: Domain name=DAGAT; Domain location=58-333; Score =269.6; E_value=7.3e-78; Accession=PF03982.5; Description =Diacylglycerol acyltransferase
  Pfam module annotation: Pfam domain module=Acyltransferase::DAGAT; Domain location=120-237::58-333
MGADGGLNRAAETPQDGKGGGGDARVFRCTDYSLPRTTLALALWLGGIHFNVLLVLASLFLLSRRAAAIVVAFQLFFMFVPVNDRDKWGRSIARFICRHAMGYFPISLHVEDYKAFDPSRVYVFGYEPHSVLPIGLSALADLVGFMPLTKIKVLASSAVFYTPFLRQIWTWLGLVPATRKNFYSYLRAGYSCIVVPGGVREMLHMDNDSEVAFLKSRKGFVKIAMQSGCPLVPVFCFGQSYAYKWWRPGGKLFVNIARAVKFTPIIFWGRFGXTPFPFPRPMHVVVGKPIEVDKNPQPAIDEINEVHEQFIMALRELFEKYKGKAGYPGLHLRVL

SEQ ID NO: 101634 - protein, 76 aa, Setaria italica
  Transcript Sequence Number=SeqID_35660
GSSGNNTPSQDSSSSLPVDAEATTWNNYIAFAGLTNLQIIMLAGIMLYILLLVGKKRDLKHKELCDTGTQAGLVSK

SEQ ID NO: 101635 - protein, 144 aa, Setaria italica
  Transcript Sequence Number=SeqID_35661
  Subcellular localization annotation: CTP_CleavageSite=6; ConfidenceScore=5.21e-01
PAPLPRAGGSGPGPGHRSSRLGGERRPSQAVAQDPAAPSRLAHQCGREGRAPASACSASTRGHASHARGHSPRSALTWPRSPRQNIRLPTIKVDEASCQQEFAAALLPAPCFPPVDLATLAMSENMLLIASLGNNIQGSNLILL

SEQ ID NO: 101636 - protein, 124 aa, Setaria italica
  Transcript Sequence Number=SeqID_35662
  Gene Ontology: Mol. function=phosphotransferase activity, alcohol group as acceptor
  Homolog annotation: Hit_ID=Q10D72; Match level="QueryCoverage=99%, HitCoverage=3%, E-value=2e-36, Identity=64%"; Hit description =Phosphatidylinositol 3-and 4-kinase family protein, expressed
HEKCALISSVVDEVHEVIGKTLAETSVAYAKPHPRHWASTFQAALHSSINMIEQMTEAFLPEFIRSFVSHNSEVMEAVGLISKIRGSVDKALEKLVEVELERTSLTELEQSYSVKVGRITEQQI

SEQ ID NO: 101637 - protein, 159 aa, Setaria italica
  misc_feature (108)..(108): Xaa can be any naturally occurring amino acid
  Transcript Sequence Number=SeqID_35663
  Gene Ontology: Mol. function=phosphotransferase activity, alcohol group as acceptor
  Homolog annotation: Hit_ID=Q10D72; Match level="QueryCoverage=100%, HitCoverage=4%, E-value=5e-43, Identity=59%"; Hit description =Phosphatidylinositol 3-and 4-kinase family protein, expressed
QSKERILSAFMNSIQLPSQKNDGDDTHLSHSESLRQGEIKIPAKGDIQETTSKVLSILGTAVGQLYSDIRAKVSDLSTKAIGKAKFRADDSGLQADAGMGLQFFEQHXEKCALISSVVDEVHEVIGKTLAETSVAYAKPHPRHWASTFQAALHSSIKMI

SEQ ID NO: 101638 - protein, 37 aa, Setaria italica
  misc_feature (26)..(26): Xaa can be any naturally occurring amino acid
  Transcript Sequence Number=SeqID_35664
RHHTEDAYESRHSEHRDRRRHGDRHXTKRSDSRDGSH

SEQ ID NO: 101639 - protein, 74 aa, Setaria italica
  Transcript Sequence Number=SeqID_35665
  Gene Ontology: Mol. function=nucleic acid binding; Cellular component= intracellular
  Subcellular localization annotation: CTP_CleavageSite=37; ConfidenceScore=5.30e-01
DAAKVGSSVNSTSNGPVGAKGPTVEGGMPNDRSVTPRVSYVFDIVARSIGTSGRTDIICYARRRGKRKLELLER

SEQ ID NO: 101640 - protein, 169 aa, Setaria italica
  Transcript Sequence Number=SeqID_35666
  Gene Ontology: Mol. function=protein serine/threonine kinase activity; Biological process=protein amino acid phosphorylation
  Homolog annotation: Hit_ID=B6TWH0; Match level="QueryCoverage=100%, HitCoverage=44%, E-value=4e-62, Identity=69%"; Hit description=ATP binding protein
RVAGTTGYLAPEYAWHGQLTTKADIYSFGVLVLEIVSGTSSSRSILIDDKILLEKIWELYEANKLKELIDPAIGDYPEEEVIRYIKVALFCIQAAANRRPSMPQVVTMLSKPIRINERELTAPGYIHEYKSNESKASTSSHSRSKNTASEDSNVFSTVVPPTVTEMSPR

SEQ ID NO: 101641 - protein, 323 aa, Setaria italica
  Transcript Sequence Number=SeqID_35667
  Gene Ontology: Mol. function=protein serine/threonine kinase activity; Biological process=protein amino acid phosphorylation
  Homolog annotation: Hit_ID=B6TWH0; Match level="QueryCoverage=81%, HitCoverage=67%, E-value=1e-146, Identity=93%"; Hit description=ATP binding protein
  Pfam annotation: Domain name=Pkinase; Domain location=104-323; Score =109.4; E_value=1.2e-29; Accession=PF00069.17; Description=Protein kinase domain
  Pfam annotation: Domain name=Pkinase_Tyr; Domain location=104-323; Score=63.8; E_value=5.7e-18; Accession=PF07714.9; Description =Protein tyrosine kinase
  Pfam module annotation: Pfam domain module=Pkinase::Pkinase_Tyr; Domain location=104-323::104-323
HANHRYLLLLASIIDSRLAAPPSLLAIDLIGGQRPACYRLPSQVPVLHVEFLKATITSEDMNWCCIPRTKKQENPYSNSIGDIYSEKNIRLFSYAELRSATDNFNRTNKVGRGGFGIVYKGTIRNGREVAVKVLSAESRQGIREFLTEIDVISNVKHPNLVELIGCCVEGNNRILVYEYLKNSSLDRALLGSNSEPADFTWSIRSAICLGVARGLAYLHEEIASPIVHRDIKASNILLDKNYIPKIGDFGLAKLFPDNVTHISTRVAGTTGYLAPEYAWHGQLTKKADIYSFGVLVLEIVSGTSSSRSILIDDKILLEKVSVF

SEQ ID NO: 101642 - protein, 127 aa, Setaria italica
  misc_feature (100)..(100): Xaa can be any naturally occurring amino acid
  Transcript Sequence Number=SeqID_35668
  Subcellular localization annotation: CTP_CleavageSite=31; ConfidenceScore=5.22e-01
ATRSRQCRKGRSMLPPRGRSPPPPHRALVTTAAQHQHWARRTQSTSYDATRSAHSQSMGPSCYPPAIRVPPSPSCDDMSIPSSPPSPRLCGDLSCRSAKXIRVIPRSQMINDSDSCLSACALVLMIG

SEQ ID NO: 101643 - protein, 42 aa, Setaria italica
  Transcript Sequence Number=SeqID_35669
RCLFPIENIWQQLFVEMHASLQHCAFKYPLSQLGLATNNFIY

SEQ ID NO: 101644 - protein, 127 aa, Setaria italica
  Transcript Sequence Number=SeqID_35670
  Gene Ontology: Mol. function=structural constituent of ribosome; Cellular component=intracellular; Biological process=metabolic process
  Homolog annotation: Hit_ID=Q7XQJ6; Match level="QueryCoverage=92%, HitCoverage=25%, E-value=4e-51, Identity=78%"; Hit description =OSJNBa0017B10.12 protein
  Pfam annotation: Domain name=Plant_tran; Domain location=71-126; Score=40.4; E_value=1.3e-11; Accession=PF04827.6; Description=Plant transposon protein
DNLTQFRRCTHWQWKNCPVAWKGQNTRGDHRVPTVMLEAVASQDLWIWHAFFGTAGSNNDINVLNRSPLFTEVLQGRAPEVQFMVNGTEYNMGYYLADGIYPEWATFVKTIQLPQCEKDKLYAEHQG

SEQ ID NO: 101645 - protein, 70 aa, Setaria italica
  Transcript Sequence Number=SeqID_35671
IQWASGRNNLASSHVTIHPCMFLCLANTLQYCGNDQCNNSIRNTISNSSLAAMVVLICVDKLDPGQENGS

SEQ ID NO: 101646 - protein, 326 aa, Setaria italica
  Transcript Sequence Number=SeqID_35672
  Gene Ontology: Mol. function=binding; Cellular component=plasma membrane
  Homolog annotation: Hit_ID=B6ST20; Match level="QueryCoverage=99%, HitCoverage=51%, E-value=2e-79, Identity=53%"; Hit description =Armadillo/beta-catenin-like repeat family protein
  Pfam annotation: Domain name=Arm; Domain location=120-160; Score =12.6; E_value=0.31; Accession=PF00514.15; Description=Armadillobeta -catenin-like repeat
  Pfam annotation: Domain name=Arm; Domain location=79-119; Score=35.5; E_value=2.1e-07; Accession=PF00514.15; Description=Armadillobeta -catenin-like repeat
  Pfam module annotation: Pfam domain module=Arm::Arm; Domain location =120-160::79-119
RGLPRTLAMLDTALEDIDWLIRISSPQADDDGDLRGLPNIAQNEPVLGMIWDNIARLHTGGLAARADSAATLASLARDNPHYAKYIIEEDGVPPLVKLLKEGTDDGQEAAAMALGLLFRDEESVEKLLHTGVCSVFAAALKEPPMRVQAAVADAIASLANHSQKCKDLFAQNYAVRHLVGHLASGTIQEHSRYSVSGNGSRNTPTPAAAMSSLDKLHSVVLAKSRSVHQGGSGSSTNEPPNQPEASNGGQQRERSNQMQSVVKSAIAAKTNVAAPPPSRPQLSSNGSSGRGSREAEDPATKAHMKAMAAKALWKLARGHVGVCTSI

SEQ ID NO: 101647 - protein, 44 aa, Setaria italica
  Transcript Sequence Number=SeqID_35673
EVSSLDTSSQQSLFRCNGHLCMERNVNFSSGGGVKQVYAYHQPR

SEQ ID NO: 101648 - protein, 162 aa, Setaria italica
  Transcript Sequence Number=SeqID_35674
  Homolog annotation: Hit_ID=B6U5X4; Match level="QueryCoverage=98%, HitCoverage=54%, E-value=6e-81, Identity=90%"; Hit description=F-box domain containing protein
DQFCKAIGEFHSLKGMAVDESLINYDVLLHVHQCCPDFVELKVSALYVDEEMASIICNSLPQLKKLEIPSSDMPAAAITKFLDCLEELEYLDISGYETSAISSTVLEKASRLKVFLWNSKFELGEFVDCSNCGEHNINPGEPCKCMMEHKVMDWLAGPSQAS

SEQ ID NO: 101649 - protein, 218 aa, Setaria italica
  Transcript Sequence Number=SeqID_35675
  Gene Ontology: Mol. function=amino acid transmembrane transporter activity; Cellular component=integral to membrane; Biological process=amino acid transport
  Homolog annotation: Hit_ID=Q94CQ4; Match level="QueryCoverage=100%, HitCoverage=34%, E-value=3e-86, Identity=72%"; Hit description =P0660F12.26 protein
LLALTSVMTDIPYFLDTSNDAGGYAIAQALYTTFHRRYGSGVGGIVCLGIIAVAVFLCGTACVTSNSRMGYAFSRDGAMPFSHVWHRVNKQEVPLNVVWLSVSVAFVMALTSLGSQVAFQAMVSITTLGLYISYALPIIFRVTTARKSFVPGPFHLGRYGVAVGSAAVLWVALVTVLFCLVRLVVIAFVLINYTPAAVGGVLLLTVGAWVLHARFWFR

SEQ ID NO: 101650 - protein, 120 aa, Setaria italica
  Transcript Sequence Number=SeqID_35676
QGDGGGGGRIGGATETAVHHHRIYRVRRRRRQDLCGDRGPGEASCWSFSSPFPLRFLTSAWNLRKVNPWRRAPPHGSMDGGSMEGGAGFSRWIHVLRAACFFFSSNFLCVVHGWVTSSTF

SEQ ID NO: 101651 - protein, 269 aa, Setaria italica
  Transcript Sequence Number=SeqID_35677
  Homolog annotation: Hit_ID=B9SRQ3; Match level="QueryCoverage=100%, HitCoverage=20%, E-value=7e-72, Identity=51%"; Hit description =Protein binding protein, putative
LQCLVPSVWWPGSSEDEVSMTLTMTTLSDAIKKIEEMHRELCSLVICFIPPVSPTQPPGSVFRSFVQSLVLKARGGDHRMIVNGTFNNTVLVSLYTVILHLLSEGFSMDSSGSASSSKVNCGNGVGFLHKGGKRKFPTQLLFRNDAYYSVIPRIGGSPSILMHHQFDDVEDEVQWDEGCMNDEETHVTHTTVQKPCCCSVTDATIGLRYKESAKYVPSTSKGPCKPMPERPAHVAAECSGRSLSDEIEDKASTSTQSEIEYGYQTLHNL

SEQ ID NO: 101652 - protein, 78 aa, Setaria italica
  Transcript Sequence Number=SeqID_35678
  Gene Ontology: Mol. function=methyltransferase activity; Cellular component=nucleus; Biological process=metabolic process
  Homolog annotation: Hit_ID=Q75G68; Match level="QueryCoverage=100%, HitCoverage=19%, E-value=1e-26, Identity=76%"; Hit description =Probable protein arginine N-methyltransferase 6.2
GTGVLSIFCAKAGASRVYAVDASDIAIQAMEIVRENELSDKVVVLHGRIEDVIIEEKVDVIISEWMGYMLLYESMLGS

SEQ ID NO: 101653 - protein, 293 aa, Setaria italica
  misc_feature (219)..(219): Xaa can be any naturally occurring amino acid
  Transcript Sequence Number=SeqID_35679
  Gene Ontology: Mol. function=methyltransferase activity; Cellular component=nucleus; Biological process=metabolic process
  Homolog annotation: Hit_ID=Q75G68; Match level="QueryCoverage=94%, HitCoverage=69%, E-value=1e-132, Identity=81%"; Hit description =Probable protein arginine N-methyltransferase 6.2
MYILIYVAKLENKPCIGKAMEIVRENELSDKVVVLHGRIEDVIIEEKVDVIISEWMGYMLLYESMLGSVIFARDKWLKPGGLILPSHASLYMAPITNSQRYQDGVYFWRDVYGIKMSSMMPLAKQCAFMEPSVETISGENVLTWPTVVSQVDCYTIQAQELETITAAFKFTSMLQAPLHGFAFWFDVEFNGPVRQKSRKQANQSLGGNTQNASPSSKKXKPDVSVVLSTAPEDAPTHWQQTLLYLFEPIELNKDQNIEGSVTISQSQQHARFLNICLKYFTGDQWYVKESVMR

SEQ ID NO: 101654 - protein, 110 aa, Setaria italica
  misc_feature (22)..(22): Xaa can be any naturally occurring amino acid
  Transcript Sequence Number=SeqID_35680
THNDTFSSSSQGEYDMILLLAXVLETETGDRQFTTSLDLMNPTLECGQQTCHLGCGLLSSSFSVYWFRLSMLAVIIILRHNVLNSHGKNCVLEVLGGNQPPSKTSKSKAA

SEQ ID NO: 101655 - protein, 144 aa, Setaria italica
  misc_feature (134)..(134): Xaa can be any naturally occurring amino acid
  Transcript Sequence Number=SeqID_35681
  Gene Ontology: Mol. function=electron carrier activity; Cellular component=extracellular region; Biological process=response to oxidative stress
  Homolog annotation: Hit_ID=B6UBB5; Match level="QueryCoverage=99%, HitCoverage=43%, E-value=1e-59, Identity=80%"; Hit description =Peroxidase 51
  Pfam annotation: Domain name=peroxidase; Domain location=1-116; Score= -22.1; E_value=3.4e-08; Accession=PF00141.15; Description=Peroxidase
LAVFKAHGLNMSDLVALSAAHSVGLAHCSKFSNRLYRYQPGQPTDPTLNPTYARFLESKCPDGGPDNLVLMDQASPAQLDNQYYRNLQDGGGLLGSDELLYTDNRTRAMVDALANSTTAFYKAFADAIVRLGRXVGVKSGRAGA

SEQ ID NO: 101656 - protein, 67 aa, Setaria italica
  Transcript Sequence Number=SeqID_35682
SMIAEAGILVGFNSAAEEAEYRSPNEPADDKSHQTKQGSGEKQGRRRCWSPWPAGRPARAAGLPRKG

SEQ ID NO: 101657 - protein, 118 aa, Setaria italica
  misc_feature (29)..(29): Xaa can be any naturally occurring amino acid
  Transcript Sequence Number=SeqID_35683
  Homolog annotation: Hit_ID=B3V945; Match level="QueryCoverage=99%, HitCoverage=30%, E-value=5e-41, Identity=65%"; Hit description=PAE
  Pfam annotation: Domain name=PAE; Domain location=1-97; Score=-152.7; E_value=2.6e-06; Accession=PF03283.5; Description=Pectinacetylesterase
ILVPGVADRRGTWHSCKHDIDQCSAAQLXGFRDDFLKAVAEQGNSTSRGLFINSCFVHCQSEIQELWFSSDSPMLGNTTIAAAVGDWFFDRSPFQKIDCPYPCDSTCHNRIHDDPSHA

SEQ ID NO: 101658 - protein, 130 aa, Setaria italica
  misc_feature (77)..(77): Xaa can be any naturally occurring amino acid
  Transcript Sequence Number=SeqID_35684
  Gene Ontology: Mol. function=amino acid transmembrane transporter activity; Cellular component=integral to membrane; Biological process=amino acid transport
  Homolog annotation: Hit_ID=Q6AST5; Match level="QueryCoverage=100%, HitCoverage=29%, E-value=1e-37, Identity=64%"; Hit description=Amino acid permease domain containing protein
  Subcellular localization annotation: CTP_CleavageSite=11; ConfidenceScore=5.13e-01
PRTGTPVNATVAMLAATAVIAFFTDLNILSSLLSISTLFIFTLVAVALLVRRYYVSGETTVADRNKLAACIAAILAXTSAATAGCWGVDVKGWVPYAVTVPAWLASTACLWAFVPQARAPKLWGVPLVPW

SEQ ID NO: 101659 - protein, 117 aa, Setaria italica
  Transcript Sequence Number=SeqID_35685
  Subcellular localization annotation: CTP_CleavageSite=5; ConfidenceScore=5.50e-01
VRQLPAAAAVHPHGYPTPAGSSFLSSVFFLGLLPFPCSPAHPPAHPTPPTGHERGVIARRLAALAPRRFGVGLATRVTVPVPCRSGAHTREALARGSPESSVSAAAALDRGEGGGDR

SEQ ID NO: 101660 - protein, 146 aa, Setaria italica
  Transcript Sequence Number=SeqID_35686
  Subcellular localization annotation: CTP_CleavageSite=29; ConfidenceScore=5.32e-01
NGRSGFSCAETKYTRPPRTVGRSWNRLPSAAGSGSGRSDPGLERNRLAAPVRSETNATASPASSANWALKLTDTPSVCRRSSSIFASGTSSGAAGGTATEKTSKPKLETPTEAKTIVPVGSIGAWEATGGCSLFVCVMDTTDGARE

SEQ ID NO: 101661 - protein, 137 aa, Setaria italica
  Transcript Sequence Number=SeqID_35687
  Homolog annotation: Hit_ID=Q9SF22; Match level="QueryCoverage=83%, HitCoverage=12%, E-value=5e-22, Identity=48%"; Hit description =F26K24.5 protein
YCDLIGIRSWFAWNQSAGCNQAYILKFDDNTTIHKVPAEKKEANPDSSGRLKDSSESSSSTEQDSGTDTEECELVLKGKDACKEYIKSFLAAIPIRELQADIKKGLMASTPLHHRLQIEFHYTESCPAEITMPAQFP

SEQ ID NO: 101662 - protein, 575 aa, Setaria italica
  Transcript Sequence Number=SeqID_35688
  Homolog annotation: Hit_ID=Q9SF22; Match level="QueryCoverage=88%, HitCoverage=70%, E-value=1e-126, Identity=50%"; Hit description =F26K24.5 protein
FFRTSVLITIVVAPLSPSSGDSVPSGKDEGSVIKVGLRNLKILRDLVSTRRFKKTNCDGTEEKYYVHSDGAEFSCDTDSLDDDLDDREQDDDLEGSTVRKSFSYGSLQTMNVGALLYAPRIDGDDEGWIHYSHRNSDASYHVEQVPSSTAEEHASIPVRRKRSILPVRWRKTKLPKAKGEPLLKPYGEEGGDDIDYDRRLLTPSDGSVSEGSNGSTNSMVSVFGDDDFVVGNWELKEVFSRDGHLKLSTQVFFASIDQRSERAAGESACTALVAVIADWFQANQDLMPIRSQFDNLIREGSLEWRKLCENETYRERFPDKHFDLETVLHAKIRPLTVAPSKSFIGFFHPEGTEDVSGFDFLDGAMSFDNIWDEISRAAECSTGKSTLYIVSWNDHFFVLKVDADAYYIIDTLGERLSEGCNQAYILKFDDNTTIHKVPAEKKEANPDSSGRLKDSSESSSSTEQDSGTDTEECELVLKGKDACKEYIKSFLAAIPIRELQADIKKGLMASTPLHHRLQIEFHYTESCPAEITMPAQFPTFEFCWPEPPSPTPAMEAVVTHPPPMEVAVTRAVAVV

SEQ ID NO: 101663 - protein, 59 aa, Setaria italica
  Transcript Sequence Number=SeqID_35689
KKKEENTTSMHNCQRKKCVVSKQLTSKSCLVICEKCINKSVTTITSLRTEILTCIFTSF

SEQ ID NO: 101664 - protein, 79 aa, Setaria italica
  misc_feature (8)..(8): Xaa can be any naturally occurring amino acid
  Transcript Sequence Number=SeqID_35690
ITTNSWRXLWHGSSTTTAAYSHQHAVNNKVRILTTNSHISQPIDIRHADQQHQFLSASVTFTVHQTHVSNTILFFYRKK

SEQ ID NO: 101665 - protein, 134 aa, Setaria italica
  Transcript Sequence Number=SeqID_35691
  Gene Ontology: Mol. function=nuclease activity; Cellular component =Mre11 complex; Biological process=response to DNA damage stimulus
  Homolog annotation: Hit_ID=A8IE00; Match level="QueryCoverage=91%, HitCoverage=9%, E-value=5e-56, Identity=86%"; Hit description=DNA repair protein Rad50
NKYYKQLQETKAEVDRLTRDIELLEERVLSIGSSSTIEADLKRHSQERERLNSEFNRCQGTLSVYQSNITKHKQELKQTQYKDIEMRYTNQLLQLKTTEMANKDLDRYYAALDKALMRFHTMKMEEINKIIQGT

SEQ ID NO: 101666 - protein, 178 aa, Setaria italica
  misc_feature (105)..(105): Xaa can be any naturally occurring amino acid
  Transcript Sequence Number=SeqID_35692
RRNLEDQFECFLAVQSQQQAERDFAVARLEQSRIMLAIRLKEHNGKNHEVIDEASDFVRNVYQDVWPSLSVNKPEKCADSSNDMVKGPNFFARMVSSSLSIAGSXFSMKDLGGALWNSAAFAIGIIALLQLRGLASGAHGPAVGNYPYRRINEKNSSRLGTSRGGSTMSHLDVSLAKG

SEQ ID NO: 101667 - protein, 78 aa, Setaria italica
  Transcript Sequence Number=SeqID_35693
TANRHFSLHACDCSCYSVLYLLSFHVTRTWPKRIMVYRHDMILLEPEDYCVLCNYQLPHHCNYQLHICLSNCIINLVS

SEQ ID NO: 101668 - protein, 139 aa, Setaria italica
  misc_feature (18)..(18): Xaa can be any naturally occurring amino acid
  misc_feature (25)..(25): Xaa can be any naturally occurring amino acid
  Transcript Sequence Number=SeqID_35694
  Gene Ontology: Mol. function=voltage-gated chloride channel activity; Cellular component=integral to membrane; Biological process=chloride transport
  Homolog annotation: Hit_ID=Q10ER3; Match level="QueryCoverage=98%, HitCoverage=26%, E-value=1e-61, Identity=83%"; Hit description =Chloride channel protein CLC-d, putative, expressed
QSFPCGPGVLNRHNFSDXVKPASSXGKSIDDIHLTDDELGLYLDLAPFLNPSPYIVPEDMSLAKVYNLFRQLGLRHIFVVPRPSRVVGLITRKDLLLEEDDNTVMAELQSTSVRGLLNGKLLGSNAHLERPLLDELVFE

SEQ ID NO: 101669 - protein, 41 aa, Setaria italica
  Transcript Sequence Number=SeqID_35695
GSAKYHLSSRWVRIFESDRDRRDLVSYFCSGNLLTYPLCSC

SEQ ID NO: 101670 - protein, 500 aa, Setaria italica
  Transcript Sequence Number=SeqID_35696
  Gene Ontology: Mol. function=voltage-gated chloride channel activity; Cellular component=integral to membrane; Biological process=chloride transport
  Homolog annotation: Hit_ID=Q10ER3; Match level="QueryCoverage=96%, HitCoverage=94%, E-value=0.0, Identity=88%"; Hit description =Chloride channel protein CLC-d, putative, expressed
  Pfam annotation: Domain name=CBS; Domain location=322-485; Score =72.5; E_value=1.6e-18; Accession=PF00571.20; Description=CBS domain
  Pfam annotation: Domain name=Voltage_CLC; Domain location=6-288; Score=-24.6; E_value=1.2e-07; Accession=PF00654.12; Description =Voltage gated chloride channel
  Pfam module annotation: Pfam domain module=CBS::Voltage_CLC; Domain location=322-485::6-288
MWRVFFTSAVVAVVVRSAMNWCNSGKCGHFGAGGFIIWDISGGQEDYSYQELFPMTIIGVIGGLLGALFNQLTLYITKWRRTYLHKKGKRVQIFEACLISLVTSTISFVLPLLRKCSQCPQLETNSGIECPHPPGTDGNFVNFYCSKDKEYNDLATIFFNTQDDAIRNLFSAKTFHEYSAQSLITFLVMFYSLAVVTFGTAVPAGQFVPGIMIGSTYGRLVGMFVVKHYKKLNIEEGTYALLGAASFLGGSMRMTVSLCVIMVEITNNLKLLPLIMLVLLVSKAVGDFFNEGLYEEQARLRGIPLLDSRPKQVMRNMNAKDACKNQKVVCLPRVSRVVDIVSVLRTNKHNGFPVVDRGQNGESVIGLILRSHLLVLLQAKVDFQNSPFPCGPGVLNRHNFSDFVKPASSKGKSIDDIHLTDDELGLYLDLAPFLNPSPYIVPEDMSLAKVYNLFRQLGLRHIFVVPRPSRVVGLITRKDLLLEEDDNTVMAELQSTSVRF

SEQ ID NO: 101671 - protein, 305 aa, Setaria italica
  Transcript Sequence Number=SeqID_35697
  Gene Ontology: Mol. function=voltage-gated chloride channel activity; Cellular component=integral to membrane; Biological process=chloride transport
  Homolog annotation: Hit_ID=Q10ER1; Match level="QueryCoverage=97%, HitCoverage=41%, E-value=1e-140, Identity=84%"; Hit description =Chloride channel protein CLC-d, putative, expressed
  Pfam annotation: Domain name=Voltage_CLC; Domain location=94-301; Score=-13.6; E_value=4e-08; Accession=PF00654.12; Description =Voltage gated chloride channel
ELFSAAAVESLDYEVIENYAYREEQAQRSKFWVPYYVMLKWLFSLLIGVGTGLAAIFINLAVENFSGWKYTATFAIIKHSYFVGFFVYTVFNLALVFSSVYIVTNFAPAAAGSGIPEIKGYLNGVDTHGILLFRTLVGKIFGSIGSVGGGLALGKEGPLVHTGACIASLLGQGGSAKYHLSSRWVRIFESDRDRRDLVTCGCAAGVAAAFRAPVGGVLFALEEVTSWWRSHLMWRVFFTSAVVAVVVRSAMNWCNSGKCGHFGAGGFIIWDISGGQEDYSYQELFPMTIIGVIGGLLETPLAKVG

SEQ ID NO: 101672 - protein, 69 aa, Setaria italica
  Transcript Sequence Number=SeqID_35698
AADKAEEGVWGEVIISTKPPKEYLQTKSHKEEAAADKAEEGVWGEEISDDRAPSRQMSEQYSGKYEAEE

SEQ ID NO: 101673 - protein, 148 aa, Setaria italica
  Transcript Sequence Number=SeqID_35699
  Gene Ontology: Mol. function=phosphoinositide phospholipase C activity; Cellular component=plasma membrane; Biological process =intracellular signaling cascade
  Homolog annotation: Hit_ID=Q43439; Match level="QueryCoverage=97%, HitCoverage=24%, E-value=3e-50, Identity=61%"; Hit description =Phosphatidylinositol-specific phospholipase C
  Pfam annotation: Domain name=PI-PLC-Y; Domain location=1-104; Score =69.9; E_value=9.5e-18; Accession=PF00387.11; Description =Phosphatidylinositol-specific phospholipase C, Y domain
DMDEDLKVDPEKVTRMSLGEKAYEKAIVSHGAHIIRFTQRNLLRIFPRSTRITSSNYNPMMGWRYGAQMVAANMQGHGRKLWLTQGMFRANGGCGYVKKPDILMNSDPDKLFDPTADLPVKTRLKVTVYMGDGWRFRLPQVRLFSYLS

SEQ ID NO: 101674 - protein, 594 aa, Setaria italica
  misc_feature (196)..(196): Xaa can be any naturally occurring amino acid
  misc_feature (216)..(216): Xaa can be any naturally occurring amino acid
  Transcript Sequence Number=SeqID_35700
  Gene Ontology: Mol. function=phosphoinositide phospholipase C activity; Cellular component=plasma membrane; Biological process =intracellular signaling cascade
  Homolog annotation: Hit_ID=Q1A531; Match level="QueryCoverage=98%, HitCoverage=99%, E-value=0.0, Identity=54%"; Hit description =Phospholipase C
  Pfam annotation: Domain name=C2; Domain location=461-554; Score=54.3; E_value=4.8e-13; Accession=PF00168.22; Description=C2 domain
  Pfam annotation: Domain name=PI-PLC-X; Domain location=108-251; Score= 131.8; E_value=2.2e-36; Accession=PF00388.11; Description =Phosphatidylinositol-specific phospholipase C, X domain
  Pfam annotation: Domain name=PI-PLC-Y; Domain location=323-441; Score= 71.4; E_value=3.3e-18; Accession=PF00387.11; Description =Phosphatidylinositol-specific phospholipase C, Y domain
  Pfam annotation: Domain name=efhand_like; Domain location=23-105; Score=51.6; E_value=3e-12; Accession=PF09279.3; Description =Phosphoinositide-specific phospholipase C
  Pfam module annotation: Pfam domain module=C2::PI-PLC-X::PI-PLC -Y::efhand_like; Domain location=461-554::108-251::323-441::23-105
MTTYRVCCFLRRFRAASNEPSEAVRDVFQAYTDGAGVVREEALRRFMREVQGETTDAGAEAAAREVMAFAAEQRLLKKGGLTAEGFHRWLCHNANAALDPRRGVYQDMGSPLSHYFIYTGHNSYLTGNQLSSGCSERPIVKALLDGVRVIELDLWPNAAKDQVEVLHGRTWTSPVELIKCLEAIKEHAFTSSPYPXILTLEDHLTPDLQAKVAKMXKETFGDMLYISESENMEEFPSPDELKGKVIISTKPPKEYLQTKSHKEEAAADKAEEGVWGEEISDDRAPSRQMSEQYSGKYEAEEAGEEEPPDGEAEKKARQGADNEYKRLIAIQLTRRKHDMDEDLKVDPEKVTRMSLGEKAYEKAIVSHGAHIIRFTQRNLLRIFPRSTRITSSNYNPMMGWRYGAQMVAANMQGHGRKLWLTQGMFRANGGCGYVKKPDILMNSDPDKLFDPTADLPVKTRLKVTVYMGDGWRFDFRKTHFDKCSPPDFYARVGIAGVAADTRMEQTRVMMDSWIPTWDHEFGEFPLAVPELALLRVEVHESDNHQKDDFGGQTCLPVWELRPGIRSVRLCDHKGQPLRSVKLLMRFKFFPSSSK

SEQ ID NO: 101675 - protein, 97 aa, Setaria italica
  Transcript Sequence Number=SeqID_35701
NPVLCCFHSYPVCCYGLELLNITFIFLTSRLSTGSFLVSVSASHLEDVSYQSTMVLLRGQNPDTGYAHGGKGGTVDNWAYCTAVLATLHLFCHSKLL

SEQ ID NO: 101676 - protein, 79 aa, Setaria italica
  Transcript Sequence Number=SeqID_35702
ETSHALAHLFPRMSTKMKENLQREIILNMGYTESKIWFYSRQNANMLSNIWSCISTLVLNLHFRIALMLFAIQFMTSNS

SEQ ID NO: 101677 - protein, 71 aa, Setaria italica
  Transcript Sequence Number=SeqID_35703
QVLKYIRDPALSAIAHRRCHMQLRSHLLPCIASTSLCQCRCQCMSLHVAQKVLVYLEFSANFVRFKGQTTT

SEQ ID NO: 101678 - protein, 109 aa, Setaria italica
  Transcript Sequence Number=SeqID_35704
  Gene Ontology: Cellular component=plasma membrane
VLTQTDEVSCMPYFHSSRSWGFFRNRTRLLCRKCSGHIGNAYEDEDFTLCEASDDLDMSSKSSSTSTRKKYVIKINALQPSSDDDSGALFSRDGNLNSELQPCVPCHVN

SEQ ID NO: 101679 - protein, 50 aa, Setaria italica
  Transcript Sequence Number=SeqID_35705
GAGYDAGVCKSRWEASGGITAGTYEYVDVVAPPAARGGPRGRYIVDADFR

SEQ ID NO: 101680 - protein, 61 aa, Setaria italica
  Transcript Sequence Number=SeqID_35706
  Gene Ontology: Mol. function=transferase activity; Biological process= amino acid biosynthetic process
  Homolog annotation: Hit_ID=Q9LQY8; Match level="QueryCoverage=88%, HitCoverage=16%, E-value=3e-12, Identity=67%"; Hit description =T24P13.2
EQLRTEIGRTKTKIQEAAVIARLGIDVYITKAGTEHSQRALKGDVSTDSEDWLGTIIRSSK

SEQ ID NO: 101681 - protein, 92 aa, Setaria italica
  Transcript Sequence Number=SeqID_35707
  Homolog annotation: Hit_ID=B6TKL5; Match level="QueryCoverage=66%, HitCoverage=26%, E-value=2e-12, Identity=63%"; Hit description =Mitochondrial glycoprotein
  Subcellular localization annotation: CTP_CleavageSite=35; ConfidenceScore=5.28e-01
MALARRLLRLRPHLGALPLPSPSPPRLLPSRTYISDMRRSAFIDRLLRSVRSEISFLDNSTPPRVPPPPRPSPSRTRPGEQWARLRGVFPSA

SEQ ID NO: 101682 - protein, 65 aa, Setaria italica
  Transcript Sequence Number=SeqID_35708
FFFWTSNMSYIHHEYVCFIHYTNHEFTGLICFIHYLKRDQLVLDYYKATLTEYIVFTRESTWKQE

SEQ ID NO: 101683 - protein, 79 aa, Setaria italica
  Transcript Sequence Number=SeqID_35709
  Gene Ontology: Mol. function=transporter activity; Cellular component= membrane; Biological process=oligopeptide transport
  Homolog annotation: Hit_ID=B6TII9; Match level="QueryCoverage=96%, HitCoverage=13%, E-value=8e-18, Identity=59%"; Hit description =Peptide transporter PTR2
RVSGLVEMKRLDSAARGEEISIAWQLPQYFFLAGAEVFCYIAQLEFFYAEAPDTMKSTCTSLALLTIALGSYLCSFIYA

SEQ ID NO: 101684 - protein, 134 aa, Setaria italica
  Transcript Sequence Number=SeqID_35710
  Gene Ontology: Mol. function=transporter activity; Cellular component= membrane; Biological process=oligopeptide transport
  Homolog annotation: Hit_ID=Q8LLN6; Match level="QueryCoverage=79%, HitCoverage=28%, E-value=1e-32, Identity=57%"; Hit description =Putative peptide transporter protein
TTARRRGRSPSRRTRIPPSIPQYFFLAGAEVFCYIAQLEFFYAEAPDTMKSTCTSLALLTIALGSYLSSFIYAIVAAFTATAGSPGWISDNLNQGHLDYFFWAMAAMCTLNFVVYSVFAKYYKPKNQDSALIVS

SEQ ID NO: 101685 - protein, 128 aa, Setaria italica
  misc_feature (109)..(109): Xaa can be any naturally occurring amino acid
  Transcript Sequence Number=SeqID_35711
MLSEHNPDSKPKSSRTRRKRLHRSSHGHDDTTHGRSSDEETLQVLKSRAKNKKLPLVDSSLSASQHQEAQQDPGSDDATIGSMIRTGKKKRLSTSEFEGKVQNHQESSXNRNTKDSSPSISQHKKLWK

SEQ ID NO: 101686 - protein, 66 aa, Setaria italica
  Transcript Sequence Number=SeqID_35712
NSMVRELGLCYTVMSSPELDLKCWRLVKPLILVVFLLILTPWLDNLYEIMRLRVSHTKVLPTPGFI

SEQ ID NO: 101687 - protein, 94 aa, Setaria italica
  Transcript Sequence Number=SeqID_35713
LPAALPVGRASRLKCGGCGEAFELTLPASGSTDHPKKIFSAPQPAVGGGEDTEYARAWSNLSGEQPGQVGPLHRVLGYSSVSSVLRSQRYGEHS

SEQ ID NO: 101688 - protein, 163 aa, Setaria italica
  misc_feature (103)..(103): Xaa can be any naturally occurring amino acid
  Transcript Sequence Number=SeqID_35714
  Gene Ontology: Mol. function=RNA-directed DNA polymerase activity; Cellular component=integral to membrane; Biological process=RNA -dependent DNA replication
  Homolog annotation: Hit_ID=Q8LJX1; Match level="QueryCoverage=91%, HitCoverage=7%, E-value=1e-50, Identity=62%"; Hit description =Putative reverse transcriptase
SLWSLSFQQIVKVNIFHMSDNLQCLEEPFSQQEIDSTVQSLPNDKAPGPDDFNNNFLKKCWPLIKQDFYDLCQAFHSGDICLQSINGSLITLIAKVEGAVKVXPISLLNSSMKLLTKLLANRLQKVNMDLIHKNQYGFIKSRTIQDCLAWTFEYLHLCHKSRK

SEQ ID NO: 101689 - protein, 86 aa, Setaria italica
  Transcript Sequence Number=SeqID_35715
  Gene Ontology: Mol. function=electron carrier activity; Biological process=oxidation reduction
  Homolog annotation: Hit_ID=B6SZ78; Match level="QueryCoverage=74%, HitCoverage=11%, E-value=7e-16, Identity=70%"; Hit description =Cytochrome P450 CYP71W7
  Subcellular localization annotation: CTP_CleavageSite=19; ConfidenceScore=5.27e-01
FSLPLLVIFFLLFKLITSRCTSPSRTNPPILRLPPGPWQLPLIGNLPQGPQFLLSCFSDLPHRALRELSQSYGPLMLLRLGAVPTL

SEQ ID NO: 101690 - protein, 48 aa, Setaria italica
  Transcript Sequence Number=SeqID_35716
MAQHLHGQSDLTDGECLRFSLSNSSSSSSSLFLLAAPADDGSLCRARR

SEQ ID NO: 101691 - protein, 266 aa, Setaria italica
  misc_feature (44)..(44): Xaa can be any naturally occurring amino acid
  Transcript Sequence Number=SeqID_35717
  Gene Ontology: Mol. function=heat shock protein binding; Biological process=response to stress
  Homolog annotation: Hit_ID=B9ST58; Match level="QueryCoverage=45%, HitCoverage=52%, E-value=4e-35, Identity=66%"; Hit description =Chaperone protein dnaJ, putative
  Pfam annotation: Domain name=DnaJ; Domain location=46-114; Score =101.1; E_value=3.9e-27; Accession=PF00226.23; Description=DnaJ domain
PSRHSAPPPRTEHAAAAFCALASADRHGRRPRRQPPGGGLGGSXADLYAVLGLNRECTDAELRGAYRRLAMIWHPDRCSASGSSARVEEAKERFQEIQGAYSVLSDSNKRFLYDVGVYDSEDDEADLSGMGDFLGEMADMMSQATPTETFEELQQLFVDMFQDDLDPGFFSGLPPGRRGQSQSPPSTSSPPLRPPPGRNSAQATPACNGVDKRGSSPAAMHSAAKRPRPGRPGLELDLGLSGFCFMVSETKQRPAPWTCEVSGGGD

SEQ ID NO: 101692 - protein, 49 aa, Setaria italica
  Transcript Sequence Number=SeqID_35718
HCTVQLQTILFSVVNICNLSNHHQSPNGFQGNAWILQCYAAKNLLLVAT

SEQ ID NO: 101693 - protein, 216 aa, Setaria italica
  misc_feature (16)..(16): Xaa can be any naturally occurring amino acid
  misc_feature (47)..(47): Xaa can be any naturally occurring amino acid
  Transcript Sequence Number=SeqID_35719
  Gene Ontology: Mol. function=protein serine/threonine kinase activity; Cellular component=integral to membrane; Biological process=protein amino acid phosphorylation
  Homolog annotation: Hit_ID=B6T6U0; Match level="QueryCoverage=100%, HitCoverage=57%, E-value=1e-104, Identity=85%"; Hit description =BRASSINOSTEROID INSENSITIVE 1-associated receptor kinase 1
  Pfam annotation: Domain name=Pkinase; Domain location=6-214; Score =0.4; E_value=1.6e-08; Accession=PF00069.17; Description=Protein kinase domain
  Pfam annotation: Domain name=Pkinase_Tyr; Domain location=6-215; Score=0.5; E_value=9.3e-14; Accession=PF07714.9; Description=Protein tyrosine kinase
  Pfam module annotation: Pfam domain module=Pkinase::Pkinase_Tyr; Domain location=6-214::6-215
KATKNFSDANIVGAGXFGLVYMGLLLDGTIVAIKRRLNTSSQDCADXVRWLSEIRHRNVVTLIGYCQEGGLQMLVYEYLPNGSVCGHLYGKGSTARLEFKQRLSIAIGAAKGLNHLHSRDVPLIHKNFKTNNVLVDENFIAKVADAGLVRLLRGSDEAGPSHGFSSSVYQDPEVQSVAQFSESSDVYSFGVFLLELITGREAASLMPPESREYLAH

SEQ ID NO: 101694 - protein, 186 aa, Setaria italica
  Transcript Sequence Number=SeqID_35720
  Homolog annotation: Hit_ID=Q6UUS2; Match level="QueryCoverage=68%, HitCoverage=17%, E-value=3e-46, Identity=67%"; Hit description =Putative gag-pol protein
GAFEVTDFRSMVEKALGVEMQLQVTADLNKSLSGDQSRGQGDKKVHSGGHVHRKGKFQRHQPYRGGSAQSRTPGGSTPQYRAIPKPGTGMVCFKCGDAHRLRECRWSGKCSICGQDHKDVVCRKNPDAKLRWELVSSSAPNGAFHMMAAASSTPHLPAPPPQQHLLAPPPQQYLPAPTPQYFLAPP

SEQ ID NO: 101695 - protein, 147 aa, Setaria italica
  misc_feature (121)..(121): Xaa can be any naturally occurring amino acid
  Transcript Sequence Number=SeqID_35721
  Gene Ontology: Cellular component=chloroplast envelope
  Homolog annotation: Hit_ID=Q9LI74; Match level="QueryCoverage=80%, HitCoverage=12%, E-value=2e-35, Identity=55%"; Hit description =Protein CHUP1, chloroplastic
LSCSSALKKMQALFEKLEHGVYSLVRVRDGAMSRYRGYQIPWEWMQDSGIVSQIKLQSMKLAMKYLRRVSSELEAIQGGPDEEELMLQGVRFAFRVHQFAGGFDGDTMRAFQEIKEKAFNXFKSQRESQNQHLHQQRLRWQKLKLMY

SEQ ID NO: 101696 - protein, 100 aa, Setaria italica
  Transcript Sequence Number=SeqID_35722
MALRRALGWSEGEVMRPESKPCSRLMRQTAGIFSVGGGLAFWVLCRLHYGPRITVPRSLRWASCGAVSVSATTALLVRLFSPECEPQNIAAFDIPELKPE

SEQ ID NO: 101697 - protein, 210 aa, Setaria italica
  Transcript Sequence Number=SeqID_35723
  Gene Ontology: Mol. function=zinc ion binding; Cellular component =intracellular
  Homolog annotation: Hit_ID=B9RHD7; Match level="QueryCoverage=100%, HitCoverage=100%, E-value=1e-66, Identity=59%"; Hit description=Salt- tolerance protein, putative
  Pfam annotation: Domain name=zf-B_box; Domain location=1-47; Score =39.0; E_value=1.9e-08; Accession=PF00643.16; Description=B-box zinc finger
  Pfam annotation: Domain name=zf-B_box; Domain location=51-96; Score =37.5; E_value=5.5e-08; Accession=PF00643.16; Description=B-box zinc finger
  Pfam module annotation: Pfam domain module=zf-B_box::zf-B_box; Domain location=1-47::51-96
MRTICDVCESAPAVLFCAADEAALCRPCDEKVHMCNKLASRHVRVGLANSNKLARCDICESFPAFFHCEIDGTSLCLSCDMTVHVGGKRTHGRYLLLRQSVEFPGDKLGHMDDVAMQSKDPETQIDQKPPHSVTKEQMANHHNGSDDPASDGNCEDQGNINSKMIDLNMRPVRTNGQGSNSQTQGVDHSVNNHDSPGVVPTSNYEGDANK

SEQ ID NO: 101698 - protein, 463 aa, Setaria italica
  Transcript Sequence Number=SeqID_35724
  Gene Ontology: Mol. function=protein serine/threonine kinase activity
  Homolog annotation: Hit_ID=B6SHM1; Match level="QueryCoverage=99%, HitCoverage=94%, E-value=0.0, Identity=74%"; Hit description =Serine/threonine-protein kinase RIO2
  Pfam annotation: Domain name=APH; Domain location=69-293; Score=-5.8; E_value=0.0047; Accession=PF01636.15; Description=Phosphotransferase enzyme family
  Pfam annotation: Domain name=Kdo; Domain location=55-264; Score= -64.6; E_value=0.0023; Accession=PF06293.6; Description =Lipopolysaccharide kinase (Kdo)
  Pfam annotation: Domain name=RIO1; Domain location=80-260; Score =258.4; E_value=1.6e-74; Accession=PF01163.14; Description=RIO1 family
  Pfam annotation: Domain name=Rio2_N; Domain location=1-63; Score =96.5; E_value=9.3e-26; Accession=PF09202.3; Description=Rio2, N -terminal
  Pfam module annotation: Pfam domain module=APH::Kdo::RIO1::Rio2_N; Domain location=69-293::55-264::80-260::1-63
SQHEIVPAELVDRIAGLKHGGTYKVLRNLLKNKLVHHDATKYDGYRLTYLGYDFLAIKTLVNRGVFASVGRQIGVGKESDIFEVATEDGTVLAMKLHRLGRTSFRAVKSKRDYLRHRRSFNWLYLSRLAALKEFAFMKALGDHGFPVPTAVDCNRHCVIMSLVQGYPLVQVKELQNPDDVFDTILGLIVRLAEHGLIHCDFNEFNIMIDDDEKITVIDFPQMVSVSHRNAQMFFDRDIECIYKFFNKRFNLKSEKNEEEVGSESDGEGTSRPSFLSVNKAAGSLDKELAASGFTRKAQVDMEKYIEEDAEGQDSSSDDDDEIGDAVPIYSLKIDQDRSDELDCNLTSRNSGGPGTFSEEHGTSCSGESRLESPPSDSNGDAKEPLESEGKVLPQEDDDNDDESSDSDDDDEEDAELTKKLNKQRKKAIAAAHGRRRPVSSRNAYKDKGKGTMNSKIQRQACKW

SEQ ID NO: 101699 - protein, 176 aa, Setaria italica
  Transcript Sequence Number=SeqID_35725
SSNKDCITLHHGRYVMLMLHASNLLNQPSPIHKSHHHLALSSTQTHALPPTSPHPSPYPCMPSSMHTTKSQIEGEPSDITHLRACPANQLETAISNSTHDDDHNDNEMQTSYRPAPTSTANDHQGSCQVMVSSKDELWHIRSPLCLKLIHAVCQTNLKETKTTVTFGSCIRIMWLL

SEQ ID NO: 101700 - protein, 99 aa, Setaria italica
  Transcript Sequence Number=SeqID_35726
CHFVTAYATSLCFYVIPIQGTNMKGSAPPISHKNNMVWISSEFFFNYYTKSSQSQDHTWHITKIGVRLGATNEPFQLITNLNDILKISLAESLNMVYIP

SEQ ID NO: 101701 - protein, 241 aa, Setaria italica
  misc_feature (96)..(96): Xaa can be any naturally occurring amino acid
  Transcript Sequence Number=SeqID_35727
  Subcellular localization annotation: CTP_CleavageSite=70; ConfidenceScore=5.53e-01
RLLPLRLRRPTAAPALSISVSGHCSLSHPSSLSDPLGRFQAPSSDPSSAVGFFSSRRRTALRPSMRELALANSLSKTIEGRTIAHPLLFILVSPSXSPNFSTHSYDYRTFLLLGSRLVPASISVVNVGPGFRDQYHAFYPESPMPCLPIPQPSSPEPTGQRHTHTNGEQKAVDEMVDGFGIGRLQGVLGSAAGQAAEMDDMYAGMLRKLEKLAREVEQSNLRVLEQENRNLLLRYRYAGMQ

SEQ ID NO: 101702 - protein, 101 aa, Setaria italica
  Transcript Sequence Number=SeqID_35728
  Gene Ontology: Mol. function=transferase activity, transferring glycosyl groups; Biological process=metabolic process
  Homolog annotation: Hit_ID=B6T3B8; Match level="QueryCoverage=94%, HitCoverage=19%, E-value=2e-24, Identity=60%"; Hit description =Anthocyanidin 3-O-glucosyltransferase
MINRSMAATIVFIPCWESGHFMSMIAAGKRMLDAGGGALSLTVLVMRAPTAAKASEVDDHVRREAASGLDISFRNLPAVEQPTGCVAPEEFNFRYTQLHAP

SEQ ID NO: 101703 - protein, 241 aa, Setaria italica
  Transcript Sequence Number=SeqID_35729
  Gene Ontology: Mol. function=phosphatidate cytidylyltransferase activity; Cellular component=integral to membrane; Biological process=phospholipid biosynthetic process
  Homolog annotation: Hit_ID=Q5N9J9; Match level="QueryCoverage=98%, HitCoverage=77%, E-value=1e-111, Identity=79%"; Hit description =Probable phytol kinase 2, chloroplastic
  Pfam annotation: Domain name=CTP_transf_1; Domain location=41-241; Score=4.8; E_value=1.6e-05; Accession=PF01148.12; Description =Cytidylyltransferase family
LEAGSGLAHDLGSAAVTAGVALALLKFYEELAKRGVFEEKLSRKLVHISVGLVFLLFWPLFSSGTYAPFLAALAPGVNIIRMFLLGIGLMKNEAMVKSMSRSGDYRELLKGPLYYATTITFATSVLWRSSPIAIALVCNLCAGDGIADVVGRHLGKEKLPYNPNKSYAGSIAMAVAGFLASVGYMHYFHTFGFIEETWYMALGFLVVSIAAALVESHPISTELDDNLTVPLTSFLVGSLIF

SEQ ID NO: 101704 - protein, 149 aa, Setaria italica
  misc_feature (87)..(87): Xaa can be any naturally occurring amino acid
  Transcript Sequence Number=SeqID_35730
  Gene Ontology: Biological process=cell volume homeostasis
  Homolog annotation: Hit_ID=B4FU22; Match level="QueryCoverage=93%, HitCoverage=60%, E-value=1e-31, Identity=51%"; Hit description =Methylosome subunit pICln
  Pfam annotation: Domain name=ICln_channel; Domain location=1-49; Score=11.3; E_value=0.0028; Accession=PF03517.5; Description =Nucleotide-sensitive chloride conductance regulator (ICln)
EGHTLHAVSRDLEAYPSPCLYTQIEAEVGTDEEAGESNPEANDELELSRVSEVRIILGDPAQLEALFDVFCHCAELNPDPNAERHGXNGWFNGEDMTDVGWVHGDEDMVDENVPQFFNANPIGQNGGFDLSHSVFLRHATEDRQGTQGI

SEQ ID NO: 101705 - protein, 181 aa, Setaria italica
  Transcript Sequence Number=SeqID_35731
  Gene Ontology: Biological process=cell volume homeostasis
  Homolog annotation: Hit_ID=B4FU22; Match level="QueryCoverage=91%, HitCoverage=71%, E-value=4e-46, Identity=59%"; Hit description =Methylosome subunit pICln
  Pfam annotation: Domain name=ICln_channel; Domain location=10-72; Score=54.8; E_value=3.2e-13; Accession=PF03517.5; Description =Nucleotide-sensitive chloride conductance regulator (ICln)
NQPRKGRFRLSEVEKGKGYAVDFLDITLHAVSRDLEAYPSPCLYTQIEAEVGTDEEAGESNPEANDELELSRVSEVRIILGDPAQLEALFDVFCHCAELNPDPNAERHGENGWFNGEDMTDVGWVHGDEDMVDENVPQFFNANPIGQNGGFDLSHSVFELQINDQRFEDAEEEQESHENGD

SEQ ID NO: 101706 - protein, 84 aa, Setaria italica
  Transcript Sequence Number=SeqID_35732
  Homolog annotation: Hit_ID=Q8LSK1; Match level="QueryCoverage=69%, HitCoverage=14%, E-value=8e-22, Identity=86%"; Hit description=YZ1
METATEVAASKVAAGSSGGGVPAPAGEYWSEALKSFLDHIPISSVPGTLQPTASPAVEIKLGGSVLDAIDAMYSGNAAGAVIID

SEQ ID NO: 101707 - protein, 80 aa, Setaria italica
  Transcript Sequence Number=SeqID_35733
LDIDLNLSISLAPYEPPEDSFKPLKQEAAATAGHGNATAAVCLCLNSLGYRPGVECVCGAARQEQWARNFLQAAPCYRGQ

SEQ ID NO: 101708 - protein, 39 aa, Setaria italica
  Transcript Sequence Number=SeqID_35734
AVSKIFLYVILYKICVAFNHYILICTCRYLMVLKMQQLV

SEQ ID NO: 101709 - protein, 207 aa, Setaria italica
  Transcript Sequence Number=SeqID_35735
  Homolog annotation: Hit_ID=Q5SMS6; Match level="QueryCoverage=100%, HitCoverage=50%, E-value=1e-103, Identity=83%"; Hit description =Fimbriata-like
  Pfam annotation: Domain name=Kelch_2; Domain location=86-134; Score =29.3; E_value=1.6e-05; Accession=PF07646.7; Description=Kelch motif
DFVRWEFSVYKYDSWSGTWVTSASEVFIGWRGGDDSVICDGVLYCLIHSTGVLGNVNPRHGLIMYDLVGGPSKTSLVQTSIPVPCSLTCGRLVNLKEKLVLVGGIAKHNRPDIIKGIGIWELHEKQWHEVTRMPHKFFQGFGEFDDVFACSGTDDLVYIQSYGATALLVFDMMHKQWKWSVKCPVSKRFPLQLFTGFCFEPRLDITA

SEQ ID NO: 101710 - protein, 160 aa, Setaria italica
  misc_feature (29)..(29): Xaa can be any naturally occurring amino acid
  misc_feature (56)..(56): Xaa can be any naturally occurring amino acid
  Transcript Sequence Number=SeqID_35736
  Gene Ontology: Mol. function=zinc ion binding
  Homolog annotation: Hit_ID=Q2QVL7; Match level="QueryCoverage=98%, HitCoverage=21%, E-value=2e-36, Identity=46%"; Hit description =Transposon protein, putative, unclassified, expressed
  Pfam annotation: Domain name=MULE; Domain location=25-122; Score =82.4; E_value=1.6e-21; Accession=PF10551.1; Description=MULE transposase domain
RNGQSANIFWADAKARMAYYHFGDAVGLXTAYRKNKETIPIVIFLGVNHHVQPVVXFGCALLLDESEASFTWLFEKWIEAMHMGPPISLVTELNREMTAAIAKVLPHTHHIFCGKHILDTVKEELHGTFPDLEPFITDLRKCIDGSRIEELFESGWSSTT

SEQ ID NO: 101711 - protein, 441 aa, Setaria italica
  misc_feature (259)..(259): Xaa can be any naturally occurring amino acid
  Transcript Sequence Number=SeqID_35737
  Gene Ontology: Mol. function=glucose-6-phosphate dehydrogenase activity; Cellular component=chloroplast; Biological process =carbohydrate metabolic process
  Homolog annotation: Hit_ID=Q10M94; Match level="QueryCoverage=99%, HitCoverage=69%, E-value=0.0, Identity=85%"; Hit description=Glucose- 6-phosphate 1-dehydrogenase
  Pfam annotation: Domain name=G6PD_C; Domain location=234-441; Score =123.4; E_value=7.4e-34; Accession=PF02781.8; Description=Glucose-6 -phosphate dehydrogenase, C-terminal domain
  Pfam annotation: Domain name=G6PD_N; Domain location=53-232; Score =204.3; E_value=3.3e-58; Accession=PF00479.14; Description=Glucose-6 -phosphate dehydrogenase, NAD bindi
  Pfam module annotation: Pfam domain module=G6PD_C::G6PD_N; Domain location=234-441::53-232
MASTSSDILDSSTVQENPMDLGSNPSETHSPVQEEEYALSNDHSDSEPSLCIAVIGATGELARSKVFPALFALYYSGFLPRSVGIFGYSRKKITDEGLRSMIEANLTCRVDHHENCGDKLNEFLKRTYYIDAGHDNKDGMARLNSRMAQIEGTRATNRIFYLAVPQEALLDVALPLADSAQTKRGWNRIIIEKPFGFTGLSSLRVTQSLLSRFEEKQIYRIDHLLGKDLIENLTVLRFSNLVFEPLWSRTYIRNVQVIXSEETATEIQGRYFGNYGIIRDIVHSHILQTIALFAMEPPVSLDGEDIRNEKVKVLRSIRKVDLEDVVLGQLKDTSDKVDRYTKSMTPTYFAAAMYIDNARWDGVPFLIKTGMGLMKNRAEIRIQFRHVPGNIYRERFGHDIDLDTNELVLRDQPEEAILLKVNNKVPGLGLQLDASELNLLY

SEQ ID NO: 101712 - protein, 42 aa, Setaria italica
  Transcript Sequence Number=SeqID_35738
MEEAVAAAGPLRTRVCIIGSGPAAHTAAVYAARAELKPVLFE

SEQ ID NO: 101713 - protein, 89 aa, Setaria italica
  Transcript Sequence Number=SeqID_35739
  Gene Ontology: Mol. function=protein serine/threonine kinase activity
  Homolog annotation: Hit_ID=B9S9Z6; Match level="QueryCoverage=87%, HitCoverage=17%, E-value=3e-09, Identity=41%"; Hit description =Serine/threonine-specific protein kinase, putative
DVEELNDMAAVAYRCVSRVSRKRPAMRDVAQALTRVLKHSRSRKHHSKRHPQARADDESVDLEGSEVQSSFSGLQREESVGSVSDLPDV

SEQ ID NO: 101714 - protein, 53 aa, Setaria italica
  Transcript Sequence Number=SeqID_35740
  Gene Ontology: Mol. function=formate-tetrahydrofolate ligase activity; Cellular component=plasma membrane; Biological process =folic acid and derivative biosynthetic process
  Homolog annotation: Hit_ID=Q8W525; Match level="QueryCoverage=75%, HitCoverage=13%, E-value=3e-15, Identity=100%"; Hit description =Formate tetrahyrofolate ligase (Fragment)
KLSLLKVYYPVLVHAGPFANIAHGNSSIVADKIALKLVGKGGFVVTEAGFTHG

SEQ ID NO: 101715 - protein, 702 aa, Setaria italica
  misc_feature (321)..(321): Xaa can be any naturally occurring amino acid
  Transcript Sequence Number=SeqID_35741
  Gene Ontology: Mol. function=formate-tetrahydrofolate ligase activity; Cellular component=plasma membrane; Biological process =folic acid and derivative biosynthetic process
  Homolog annotation: Hit_ID=Q9SPK5; Match level="QueryCoverage=90%, HitCoverage=99%, E-value=0.0, Identity=80%"; Hit description=Formate- -tetrahydrofolate ligase
  Pfam annotation: Domain name=FTHFS; Domain location=81-702; Score =1459.9; E_value=0; Accession=PF01268.11; Description=Formate- -tetrahydrofolate ligase
  Subcellular localization annotation: CTP_CleavageSite=48; ConfidenceScore=5.23e-01
AINSPGSQRLSRPILSSPRGSPVPGHHHHHSLLQPAPPGPGRDRVVARSSAVVAPAPLPPPLLLPEMPSPTIRRLDVASPVPADIDIANSVEPLGIVDIAAELGLGPEHYDLYGKYKAKVLLSVLDDIKEQQDGYYVVVGGITPTPLGEGKSTTTVGLCQALGAFLDKKVVTCLRQPSQGPTFGIKGGAAGGGYSQVIPMDEFNLHLTGDIHAITAANNLLAAAIDTRIFHENSQSDKALFNRLCPANKEGKRHFADVMLRRLTKLGISKTDPNELTPDEVRRFARLDIDPESITWRRVMDVNDRFLRKITIGQGPDEKGXMVRETGFDISVASEIMAVLALTTSLADMRERLGRMVIGNSKSGEPITADDLGVGGALTVLMKDAIHPTLMQTLEGTPVLVHAGPFANIAHGNSSIVADKIALKLVGKGGFVVTEAGFGADIGTEKFMDIKCRYSGLVPQCAIIVATIRALKMHGGGPDVVAGKPLDHAYVSENVALVEAGCVNLAKHISNTRSYGVNVVVAINKFATDTEAEMDVVRNAAMAAGAFDAVVCTHHAHGGRGAVELGLAVQRACESQAEPLKFLYPLESSIKEKIESIARSYGASGVEYSEQAEKQIEMYTKQGFSNLPICMAKTQYSFSHVPSMKGAPTGFVLPIRDVRASIGAGFIYPLVGTMSTMPGLPTRPCFYEIDIDTATGKVRGLS

SEQ ID NO: 101716 - protein, 328 aa, Setaria italica
  Transcript Sequence Number=SeqID_35742
  Gene Ontology: Mol. function=voltage-gated ion channel activity; Cellular component=integral to membrane; Biological process =potassium ion transport
  Homolog annotation: Hit_ID=Q40648; Match level="QueryCoverage=100%, HitCoverage=100%, E-value=0.0, Identity=94%"; Hit description =Probable voltage-gated potassium channel subunit beta
  Pfam annotation: Domain name=Aldo_ket_red; Domain location=7-318; Score=358.7; E_value=1.1e-104; Accession=PF00248.13; Description =Aldoketo reductase family
MQYKNLGRSGLRVSQLSYGAWVTFGNQLDVKEAKALLQACRDAGVNFFDNAEVYANGRAEEIMGQAIRDLGWRRSDVVISTKLFWGGQGPNDKGLSRKHIVEGLKGSLKRLDMDYVDVVYCHRPDASTPIEETVRAMNWVIDQGWAFYWGTSEWSAQQITEAWAVANRLDLVGPIVEQPEYNLFSRHKVESEFLPLYSTYGIGLTTWSPLASGVLTGKYGKGNIPADSRFALDNYKNLANRSLVDETLRKVNGLKPIAAELGVSLAQLSIAWCASNPNVSSVITGATKESQIVENMKALEVIPLLTPEVIDRIEAVVQSRPKRTESYR

SEQ ID NO: 101717 - protein, 431 aa, Setaria italica
  Transcript Sequence Number=SeqID_35743
  Gene Ontology: Mol. function=sequence-specific DNA binding; Cellular component=nucleus; Biological process=regulation of transcription, DNA-dependent
  Homolog annotation: Hit_ID=Q8RUM5; Match level="QueryCoverage=99%, HitCoverage=71%, E-value=1e-127, Identity=59%"; Hit description=QSH-1
  Pfam annotation: Domain name=Homeobox; Domain location=184-242; Score= 9.1; E_value=0.0015; Accession=PF00046.21; Description=Homeobox domain
  Pfam annotation: Domain name=POX; Domain location=3-136; Score=201.0; E_value=3.1e-57; Accession=PF07526.3; Description=Associated with HOX
  Pfam module annotation: Pfam domain module=Homeobox::POX; Domain location=184-242::3-136
GPYAIGRSRFLGPAQKLLEEICDVGGRPAQADRLSDDGLLDMDAMDAAGDHDMDGGERAAAEAVAVSGAEQQWRKTRLISLMEDVCRRYKQYYQQLQSVISSFETVAGLSNAAPFASMALRTMSKHFKCLKGMILNQLRNTSKVAANDGIGKEDMANFALMGGGSGLLRGNSVNAFGQPHNIWRPQRGLPERAVSVLRSWLFEHFLHPYPTDSDKQMLAKQTGLTRNQVSNWFINARVRLWKPMVEEIHNLEMRQQHKNPSLDKNQMGMQQTQHSSDSSGKPSDPSSSQRGQNSGTTTRNLSSPASRHILQDELSQMPHDMPGQVSFAYNGLATHHGLALSHSHPQQTEGISAGGATANGGVSLTLGLHQNNRTYIAEPLPAALPLNLAHRFGLEDVSDAYVMGSFGGQDRHFTKEIGGHHLVHDFVWFVF

SEQ ID NO: 101718 - protein, 134 aa, Setaria italica
  misc_feature (128)..(128): Xaa can be any naturally occurring amino acid
  Transcript Sequence Number=SeqID_35744
GQFDRWHWRWRLAGPCGRLFPIAPEVPNRQPPPTGIVGSKGRSPPFHFPPNLCPASIQIQPSSPASAASAPLFIHSRGGGERAGVRPTPPSGDWRGAGFFVFRVMFFSSGATVQLNRSIFCSTMAVEXDVFAIS

SEQ ID NO: 101719 - protein, 94 aa, Setaria italica
  Transcript Sequence Number=SeqID_35745
  Gene Ontology: Biological process=response to stress
  Homolog annotation: Hit_ID=B6SPH8; Match level="QueryCoverage=42%, HitCoverage=46%, E-value=4e-11, Identity=70%"; Hit description =Retrotransposon protein
  Pfam annotation: Domain name=LEA_3; Domain location=5-85; Score=44.1; E_value=5.4e-10; Accession=PF03242.5; Description=Late embryogenesis abundant protein
MSNISSVLSGLINRRSYGVYARAVNVHVSATAAVGRTADGAADGGGRATSNKDVFWMRDPKTGCWIPENRFQEVDAVELRNRLLQHNEHLTPGA

SEQ ID NO: 101720 - protein, 74 aa, Setaria italica
  Transcript Sequence Number=SeqID_35746
RSNLIKSTWQHVLFLLTKITDFVSALPSECKREIPLGVVDNGGKTTDEYCSPYVMYSCGVYFIRTHATKKKSLY

SEQ ID NO: 101721 - protein, 351 aa, Setaria italica
  misc_feature (4)..(4): Xaa can be any naturally occurring amino acid
  misc_feature (10)..(10): Xaa can be any naturally occurring amino acid
  Transcript Sequence Number=SeqID_35747
  Gene Ontology: Mol. function=protein binding
  Homolog annotation: Hit_ID=UPI0000162C4A; Match level="QueryCoverage =98%, HitCoverage=40%, E-value=2e-76, Identity=41%"; Hit description =protein binding
  Pfam annotation: Domain name=BTB; Domain location=14-132; Score=13.0; E_value=0.0012; Accession=PF00651.23; Description=BTBPOZ domain
FGLXGFPSKXGGKMRSALCDNELVDLELLLADGSSLSAHAAILSARCPKLLPSEKSLVRDGKSSDEWSRRSLYHVRMSDRVDSHALKKILEYAYTGFVTVDDDIVKPVKTLAKYCHLKSLREMLQKEQPRWNSDCPRYDLTAAVEPAEDSFSDIILEAQSNDEMECHHGSCELSTPHVHSHKVVLSMSCDYLRALFQSGMHESFAEAIRVPVGWEALNKLVQWFYSGELPRVPPDCRWKNMSAEEQLSRLKPYAELSSLAEFWFLEGVKEESLEVVASCLNSSTNASLDTISFAANLGQWELVDAAIGSVAHLYPRLRDSGQLEQLDEDVLNMLRAEYVRYLQHRGLVSLP

SEQ ID NO: 101722 - protein, 96 aa, Setaria italica
  Transcript Sequence Number=SeqID_35748
RGCGKGLVPFHGGAGDPRQEGRRRRRGVAMEAALKLQPIERLALPLVEGGISKLVYLHIGEGNLDHSLKILGIAIHIAILLEQFSRRLVGLRIAIQ

SEQ ID NO: 101723 - protein, 51 aa, Setaria italica
  Transcript Sequence Number=SeqID_35749
CVSLSYTFTYSLIVCSKLQCMRRKRPCIILYGLLQHWGLSPQIYTWSRKNT

SEQ ID NO: 101724 - protein, 118 aa, Setaria italica
  Transcript Sequence Number=SeqID_35750
GNLFTQVSNGKTFVLTRPYGSLTMQRPEVDDTDTAIHTTFGAHPQDIYSTTMKGASMLIEPFDLPGTVITNNLTLSAQKGSDSLFNTDSLFNIVPGLDGNPNSVSLELGDRRGLLCGD

SEQ ID NO: 101725 - protein, 737 aa, Setaria italica
  Transcript Sequence Number=SeqID_35751
  Gene Ontology: Mol. function=catalytic activity; Biological process =polysaccharide catabolic process
  Homolog annotation: Hit_ID=C1F598; Match level="QueryCoverage=69%, HitCoverage=75%, E-value=4e-91, Identity=37%"; Hit description=Tat pathway signal sequence domain protein
  Pfam annotation: Domain name=DUF1680; Domain location=1-512; Score =640.3; E_value=1.8e-189; Accession=PF07944.4; Description=Putative glycosyl hydrolase of unknown f
QAQQTNLEYLLLLDVDRLVWSFRKQAGLTAPGTPYGGWEGPNVQLRGHFVGHYLSATAKMWASTHNDTLNVKMSSVVDALYDCQKKMGTGYLSAFPSEFFDWVEAIRPVWAPYYTIHKIMQGLLDQYTVAGNSKALDMVVKMANYFSDRVKNVIQKYSIERHWESLNEETGGMNDVLYQLYTITNDLKHLTLAHLFDKPCFLGLLAVQADSISGFHSNTHIPVVIGAQMRYEVTGDPLYKQIATFFMDTINSSHSYATGGTSAGEFWTDPKHLAETLSTENEESCTTYNMLKISRNLFRWTKEISYADYYERALINGVLSIQRGTDPGVMIYMLPQAPGHSKAVSYHGWGTKYDSFWCCYGTGIESFSKLGDSIYFEEKEDTPALNIIQYIPSTFNWKAAGLTVTQQIKTLSSSDLYLQISLSISAETTSQSAKLNVRIPSWTFADGAGANLNGKDLGSLSPGSFLSVTKQWNSEDHLSLRFPIRLRTEAIKDDRPEYASLQAILFGPFVLAGLSTGDWDAKVGNSSTISDWITTVPSVYNSQLATFTQVSNGKTFVLSSANGSLTMQERPEVDGTDIAIHATFRAHPQDSTELHDTYSTTMKGASVLIEPFDLPGTVITNNLTLSAQKGSDSLFNIIPGLDGNPNSVSLELGTKPGCFLVTGVDYSAETKIQVSCKSSLQSIGGILEQAASFVQTAPLRQYHPISFIAKGVRRNFILEPLYSLRDEFYTVYFNIGA

SEQ ID NO: 101726 - protein, 61 aa, Setaria italica
  Transcript Sequence Number=SeqID_35752
RGVARCLLGGRGSGLRGRLCRLRTHGLPRTDVCSAPRRHSPVADTSPRTRPAPSPRWTIAG

SEQ ID NO: 101727 - protein, 112 aa, Setaria italica
  misc_feature (17)..(17): Xaa can be any naturally occurring amino acid
  Transcript Sequence Number=SeqID_35753
  Gene Ontology: Mol. function=helicase activity; Cellular component =plasma membrane
  Homolog annotation: Hit_ID=B9SVN3; Match level="QueryCoverage=100%, HitCoverage=20%, E-value=9e-22, Identity=45%"; Hit description =Pentatricopeptide repeat-containing protein, putative
  Pfam annotation: Domain name=PPR; Domain location=40-74; Score=34.1; E_value=5.5e-07; Accession=PF01535.12; Description=PPR repeat
  Pfam annotation: Domain name=PPR; Domain location=75-109; Score=20.2; E_value=0.0085; Accession=PF01535.12; Description=PPR repeat
  Pfam module annotation: Pfam domain module=PPR::PPR; Domain location =40-74::75-109
REFGVDYNRFIGVACNXMLTICVDKYYDMALDKGFCLTPFTYSRWISALCQSNRIELVEELLADMDKFGCFPDIWACNIYVDYLCRQNRLPDALKMLEKMGIKGTGPDVVTY

SEQ ID NO: 101728 - protein, 102 aa, Setaria italica
  Transcript Sequence Number=SeqID_35754
EDRNTAVPIQDNRSSLTCQLSPRKIVRVALIHASSHRAEKLSAATQYHELVTARNSCGITTNPRWQNWGGIKNGCVAGRRSKLNISKSTTLYSLYRLVHQLP

SEQ ID NO: 101729 - protein, 83 aa, Setaria italica
  Transcript Sequence Number=SeqID_35755
  Gene Ontology: Mol. function=transferase activity, transferring glycosyl groups; Cellular component=cell wall
  Homolog annotation: Hit_ID=Q9M2R0; Match level="QueryCoverage=100%, HitCoverage=10%, E-value=6e-36, Identity=85%"; Hit description =Anthranilate phosphoribosyltransferase-like protein
  Pfam annotation: Domain name=PRT_C; Domain location=1-83; Score =119.6; E_value=1.1e-32; Accession=PF08372.2; Description=Plant phosphoribosyltransferase C-ter
DTKMSWAEAAHPDELDEEFDTFPTSRPQDVVYMRYDRLRSVAGRIQTVVGDMATQGERLQSLLSWRDPRATCLFVLFCLLAAV

SEQ ID NO: 101730 - protein, 71 aa, Setaria italica
  Transcript Sequence Number=SeqID_35756
  Homolog annotation: Hit_ID=Q7XTS7; Match level="QueryCoverage=98%, HitCoverage=11%, E-value=1e-25, Identity=80%"; Hit description =OSJNBa0008M17.6 protein
MRPSDDRAQLSGFAQSEESTLDVEGHCYHQQSFPCSPSMQPIASGCTHTENSAAYFLWPTSNLQHCAAGGA

SEQ ID NO: 101731 - protein, 81 aa, Setaria italica
  Transcript Sequence Number=SeqID_35757
  Gene Ontology: Mol. function=nucleic acid binding; Cellular component= chromatin; Biological process=chromatin assembly or disassembly
  Homolog annotation: Hit_ID=Q8LMQ2; Match level="QueryCoverage=81%, HitCoverage=5%, E-value=4e-11, Identity=51%"; Hit description =Putative plant disease resistance polyprotein
  Pfam annotation: Domain name=F-box; Domain location=29-76; Score =21.4; E_value=0.0037; Accession=PF00646.25; Description=F-box domain
RKASDLPTVAAASPCKRMRAGKEYNSYEDRISTLPEEILLIIVRKLDTRTTITTIILSKRWRDLPRCLPTSYNLAADDLLP

SEQ ID NO: 101732 - protein, 39 aa, Setaria italica
  Transcript Sequence Number=SeqID_35758
IRMGKKDDSYEDRISTLPEEILLIIVRKLDTRTTITTII

SEQ ID NO: 101733 - protein, 161 aa, Setaria italica
  Transcript Sequence Number=SeqID_35759
  Gene Ontology: Mol. function=RNA-directed DNA polymerase activity; Cellular component=chromatin; Biological process=chromatin assembly or disassembly
  Homolog annotation: Hit_ID=Q10RT2; Match level="QueryCoverage=97%, HitCoverage=31%, E-value=6e-44, Identity=54%"; Hit description =Retrotransposon protein, putative, unclassified, expressed
MQMWIEPFAVLSEFSQLKKLFIANVPANWDVLWILLLLDATPALESFHVHIDNSSEERSAGDLCASLDVGARQDRYRRLKELVVAGFEGLGWQTSFVRLIMKRSPLLRRVHLLDGHVRDDEQELGALQIVPHRREWHECEWAEVLDDLTAGFRWPPQIILE

SEQ ID NO: 101734 - protein, 497 aa, Setaria italica
  misc_feature (20)..(20): Xaa can be any naturally occurring amino acid
  Transcript Sequence Number=SeqID_35760
  Gene Ontology: Mol. function=nucleic acid binding; Cellular component= chromatin; Biological process=chromatin assembly or disassembly
  Homolog annotation: Hit_ID=Q8LMQ2; Match level="QueryCoverage=96%, HitCoverage=41%, E-value=1e-148, Identity=57%"; Hit description =Putative plant disease resistance polyprotein
GADPVLKLDTRTTITTIILXKRWRDLPRCLPTSYNLAADDLLPPRYHRLKRLTIEAKAAYEAEKNVHKLTDIYAIKARHERWMTKIRPLTAILERYERRAMRRYVKQVNAFLLAPKDVRQRRPVQKLRLQMLGRWHQNIDEWITTAIAKWDVEDFELVVDGYCLYYDLKQLDAYRNLRLKRLALSNCQGICAWNCLTAKRLTKLSLGEASYIGLVNDILANCVQLTDFRVASSSFYRAKFLIFAPSSKLKNLQVDRCNFGKICLISLPCLETFVCRGRPTKLSYGEVPQLRRVSLDYLQTEDNDIDDESGSRRTYPPSKFFKRTPQLDCLVLQFKGTQMWIEPFAVLSEFSQLKKLFIANVPANWDVLWILLLLDATPALESFHVHIDNSSEERSAGDLCASLDVGARQDRYRRLKELVVAGFEGLGWQTSFVRLIMKRSPLLRRVHLLDGQVRDDERELGALQIVPRRREWHECERAEVLDDLTAGFRWPPQIILE

SEQ ID NO: 101735 - protein, 134 aa, Setaria italica
  misc_feature (91)..(91): Xaa can be any naturally occurring amino acid
  Transcript Sequence Number=SeqID_35761
  Gene Ontology: Mol. function=aspartic-type endopeptidase activity; Biological process=DNA integration
  Homolog annotation: Hit_ID=Q6F2U2; Match level="QueryCoverage=97%, HitCoverage=8%, E-value=6e-29, Identity=51%"; Hit description =Putative polyprotein
  Pfam annotation: Domain name=zf-CCHC; Domain location=63-80; Score =23.4; E_value=7.3e-05; Accession=PF00098.15; Description=Zinc knuckle
MAIIFSMCVQEEDRLRSSHGGSLHYVKDNRKKIANPFSTCLERGISNLSRHQNHQKLLPVDKDQCLHCKKKGHFKKDCPDWLKSIMAKRGXFHSTRTTQRSERCVEVANGVQAEVEAVGDVSLELVDGFMLVLK

SEQ ID NO: 101736 - protein, 115 aa, Setaria italica
  Transcript Sequence Number=SeqID_35762
  Homolog annotation: Hit_ID=Q8H2N8; Match level="QueryCoverage=93%, HitCoverage=20%, E-value=8e-32, Identity=65%"; Hit description =Proteophosphoglycan-like
  Pfam annotation: Domain name=DUF566; Domain location=1-81; Score= -113.1; E_value=0.035; Accession=PF04484.4; Description=Family of unknown function (DUF566)
RDYTDSLSGIVEALTASILCLPVTDGAKADIQDVKNAVGSAVDIMQTIGSSICTLLAKLAGTSILVSDLSKVATQEGTLMEQSRELLSTLATMHVKYCSLQGQRVQTTDRRSMHT

SEQ ID NO: 101737 - protein, 82 aa, Setaria italica
  Transcript Sequence Number=SeqID_35763
  Homolog annotation: Hit_ID=Q1PEF1; Match level="QueryCoverage=92%, HitCoverage=26%, E-value=1e-14, Identity=51%"; Hit description=RNA splicing factor-like protein
NKLMLNRIDWAAAVGGEDDADEEPDKPVNSCVLVWQGSVAKPTFHRFTVHNCRSEAAAKKVFADASVPHYWDLAVNFSEDSS

SEQ ID NO: 101738 - protein, 528 aa, Setaria italica
  Transcript Sequence Number=SeqID_35764
  Gene Ontology: Mol. function=protein binding; Cellular component =nuclear speck; Biological process=nuclear mRNA splicing, via spliceosome
  Homolog annotation: Hit_ID=B9SGG8; Match level="QueryCoverage=72%, HitCoverage=74%, E-value=1e-102, Identity=54%"; Hit description =U4/U6 small nuclear ribonucleoprotein Prp3, putative
  Pfam annotation: Domain name=PRP3; Domain location=139-516; Score =628.3; E_value=7.4e-186; Accession=PF08572.2; Description=pre-mRNA processing factor 3 (PRP3)
  Subcellular localization annotation: CTP_CleavageSite=45; ConfidenceScore=5.24e-01
PGRVPTSTGAVSSLPTSSVSGTPAAAGAIGIPGLTNISNLDAVKRAQELAAKMGFRQDPQFAPLINLFPGTSTELTVPQRPPKAPVLRLDAQGREIDEQGNVINMTKPTNLSTLKVNINKQKKEAFQIIKPDLDSLAKSSAHFDERMGINQNKLLRPKRPGFQFIEEGRLTRQAELHRIKSQFGEAQAKELKVKQAQLAKAKAEVDMNPNLIEVAPGMRAPKQKQKETIPDIEPWDAKILLSATYEDFTMEKLNMDRITIYVEHPEPLDPPAEPAPPPPQPLKLTKKEQKKLRTQRRLAKEKDRQEMIRQGLLEPPKPKVKMSNLMKVLGSEAVQDPTRLEMEIRTAAAEREQAHVDRNIARKLTPSERREKKERKLFDDPTNTVDTIVCVYKIRDLSHPQTRFKVDVNAQENRLTGAAVITDDVSVVVVEGGKKSIKRYNKLMLNRIDWAAAVGGEDDADEEPDKPVNSCVLVWQGSVAKPTFHRFTVHNCRSEAAAKKVFADASVPHYWDLAVNFQKIHRECRSRY

SEQ ID NO: 101739 - protein, 158 aa, Setaria italica
  Transcript Sequence Number=SeqID_35765
  Homolog annotation: Hit_ID=B9SGG8; Match level="QueryCoverage=89%, HitCoverage=33%, E-value=3e-33, Identity=49%"; Hit description=U4/U6 small nuclear ribonucleoprotein Prp3, putative
ERRCKTLSAVEVQPLPKGEAKSTGAVSSLPTSSVSGTPAAAGAIGIPGLTNISNLDAVKRAQELAAKMGFRPPKAPVLRLDAQGREIDEQGNVINMTKPTNLSTLKVNINKQKKEAFQIIKPDLDSLAKSSAHFDERMGINQNKLLRPKRPGFSKFLF

SEQ ID NO: 101740 - protein, 49 aa, Setaria italica
  Transcript Sequence Number=SeqID_35766
YNSSRKIGMTYNLNEMEVLRKKFLQRVNYSCNKRNVTGFTATILLQPLY

SEQ ID NO: 101741 - protein, 326 aa, Setaria italica
  misc_feature (306)..(306): Xaa can be any naturally occurring amino acid
  misc_feature (317)..(317): Xaa can be any naturally occurring amino acid
  Transcript Sequence Number=SeqID_35767
IDEASPIIIQGAETPSDDTIGPLDAHETPESMLNVSGSAASTDSVSLPCSSNDHEVPVTSSSVASTESRTLLPNHAPASADFGSETAESKERFRQRLWCFLFENLNRAVDELYLLCELECDMEQINESILVLEEAISDFQELKSRAEHFDNTKKSPGVAKEGMPMAVKADHRRPHALSWEVRRMTSSPHRQEILSSSLEAFQRIQLELACKQAGITAERFTSSSSGEVLSSSSELTTASATVRNISLKVESQVKLPDSGSEKKIAGEKQIRDAFKSDKSHPQSMPSYSARSRRGSLEPISEIEKHXFKNDRELPENXFDRLKSADV

SEQ ID NO: 101742 - protein, 74 aa, Setaria italica
  Transcript Sequence Number=SeqID_35768
MRGAVEVHAIGRDVASASPLRLRDPPALDMMRYQRLSPDCLPLGNGGGGGGAVPRKSASRSSFKDDDVPAVATD

SEQ ID NO: 101743 - protein, 54 aa, Setaria italica
  Transcript Sequence Number=SeqID_35769
  Homolog annotation: Hit_ID=B6U0T1; Match level="QueryCoverage=100%, HitCoverage=10%, E-value=3e-23, Identity=92%"; Hit description =Leucine Rich Repeat family protein
SCNKIKDEEITPALSELFSNLKELKWRPDNKSLLAASLVGTGMGKKGRVFFKRV

SEQ ID NO: 101744 - protein, 265 aa, Setaria italica
  Transcript Sequence Number=SeqID_35770
  Gene Ontology: Mol. function=protein binding; Cellular component =cytoplasm; Biological process=ubiquitin-dependent protein catabolic process
  Homolog annotation: Hit_ID=B6U0T1; Match level="QueryCoverage=100%, HitCoverage=52%, E-value=1e-129, Identity=88%"; Hit description =Leucine Rich Repeat family protein
IVAAAPALYGTGEGGGVTDIGLTILAHGCKRLVKLELVGCEGSYDGIAAVGRCCAMLEELTIADHRMDGGWLAALAFCGNLKTLRLQGCSRIDDDPGPAEHLGACLTLESLQLHRCLLNDRRALHALFLVCEGAREIQVQNCWGLEDDMFALVGLCRRVKFLSLERCSLLTTRGLESVITSWSDLQSLEVVSCNKIKDEEITPALSELFSNLKELKWRPDNKSLLAASLVGTGMGKKGRVFFKRILPAHQRIKGKVLNYSAGVAA

SEQ ID NO: 101745 - protein, 135 aa, Setaria italica
  Transcript Sequence Number=SeqID_35771
  Pfam annotation: Domain name=CHD5; Domain location=5-135; Score= -36.8; E_value=0.0066; Accession=PF04420.6; Description=CHD5-like protein
  Pfam annotation: Domain name=DivIC; Domain location=3-81; Score=2.2; E_value=0.055; Accession=PF04977.7; Description=Septum formation initiator
  Pfam module annotation: Pfam domain module=CHD5::DivIC; Domain location=5-135::3-81
MSLAAIFVFVLVFALQLLDGYLDLAKKRGSQSEEQIKLRLEIKQLLTEANQLSTPSTFAQAAKLKRLAVAKEKELGKIQEQDTKGTQSLYDKYGKFMLVTKVLIYALLVLWFWSTPVTTVPRHLLQPFGKMFSLR

SEQ ID NO: 101746 - protein, 63 aa, Setaria italica
  Transcript Sequence Number=SeqID_35772
  Homolog annotation: Hit_ID=B9STU6; Match level="QueryCoverage=84%, HitCoverage=2%, E-value=1e-11, Identity=58%"; Hit description =Mom(Plant), putative
HIWVVIVIPVNDLRALQRVSMESPFERVPIFRLYSSCTVEEKALILSKHDHILDSNILNVKSL

SEQ ID NO: 101747 - protein, 66 aa, Setaria italica
  misc_feature (8)..(8): Xaa can be any naturally occurring amino acid
  misc_feature (39)..(39): Xaa can be any naturally occurring amino acid
  Transcript Sequence Number=SeqID_35773
DLGSSFPXPLFINGLLTSTKECGSFDKFLPLYLSLRCLXFAKLHRHAEEKCYPHSDQDKTFTKSLL

SEQ ID NO: 101748 - protein, 58 aa, Setaria italica
  Transcript Sequence Number=SeqID_35774
PQLTRSSKVCGNLSVSSSLFTLLTMTTVNEKLESLWAFVRRAISEHKYQCISRHFEKI

SEQ ID NO: 101749 - protein, 47 aa, Setaria italica
  Transcript Sequence Number=SeqID_35775
FGTLHPPPTKKNIYEVINYPAAFRYVLVQVTFAYNWLETKQRKELLS

SEQ ID NO: 101750 - protein, 97 aa, Setaria italica
  Transcript Sequence Number=SeqID_35776
  Gene Ontology: Mol. function=structural constituent of ribosome; Cellular component=intracellular; Biological process=translation
  Homolog annotation: Hit_ID=B4FU53; Match level="QueryCoverage=80%, HitCoverage=40%, E-value=8e-37, Identity=96%"; Hit description=50S ribosomal protein L9
  Pfam annotation: Domain name=Ribosomal_L9_C; Domain location=15-97; Score=133.5; E_value=6.5e-37; Accession=PF03948.6; Description =Ribosomal protein L9, C-terminal domain
KSRGCLDYPLDPPLQQLAQVFETIGAFKIPRKGGKGKQIFGSVTAQDIVDIIKSQLNRDVDKRLVTVPEIREIGEYVAEIKLHPDVTARVRLNVYAK

SEQ ID NO: 101751 - protein, 198 aa, Setaria italica
  Transcript Sequence Number=SeqID_35777
  Gene Ontology: Mol. function=structural constituent of ribosome; Cellular component=ribonucleoprotein complex; Biological process =translation
  Homolog annotation: Hit_ID=B4FU53; Match level="QueryCoverage=100%, HitCoverage=100%, E-value=2e-97, Identity=91%"; Hit description=50S ribosomal protein L9
  Pfam annotation: Domain name=Ribosomal_L9_C; Domain location=112-198; Score=148.5; E_value=2.1e-41; Accession=PF03948.6; Description =Ribosomal protein L9, C-terminal domain
  Pfam annotation: Domain name=Ribosomal_L9_N; Domain location=51-98; Score=78.9; E_value=1.8e-20; Accession=PF01281.11; Description =Ribosomal protein L9, N-terminal domain
  Pfam module annotation: Pfam domain module=Ribosomal_L9_C::Ribosomal _L9_N; Domain location=112-198::51-98
  Subcellular localization annotation: CTP_CleavageSite=42; ConfidenceScore=5.58e-01
MASPSCASTLPLTSAFPSRSSSRPLAGRLLTASRRAPSLVIVAQGKVKKYRQVILTDDIEEVGRKGDTLKVRAGFYRNFLLPKGKATLLTPEVLKEMQLEQERIEAEKKRVKEEAQQLAQVFETIGAFKIPRKGGKGKQIFGSVTAQDIVDIIKSQLNRDVDKRLVTVPEIREIGEYVAEIKLHPDVTARVRLNVYAK

SEQ ID NO: 101752 - protein, 95 aa, Setaria italica
  Transcript Sequence Number=SeqID_35778
  Gene Ontology: Mol. function=structural constituent of ribosome; Cellular component=ribonucleoprotein complex; Biological process =translation
  Homolog annotation: Hit_ID=B4FU53; Match level="QueryCoverage=100%, HitCoverage=46%, E-value=1e-37, Identity=87%"; Hit description=50S ribosomal protein L9
  Pfam annotation: Domain name=Ribosomal_L9_N; Domain location=51-95; Score=65.4; E_value=2.1e-16; Accession=PF01281.11; Description =Ribosomal protein L9, N-terminal domain
  Subcellular localization annotation: CTP_CleavageSite=42; ConfidenceScore=5.58e-01
MASPSCASTLPLTSAFPSRSSSRPLAGRLLTASRRAPSLVIVAQGKVKKYRQVILTDDIEEVGRKGDTLKVRAGFYRNFLLPKGKATLLTPEVLK

SEQ ID NO: 101753 - protein, 172 aa, Setaria italica
  misc_feature (160)..(160): Xaa can be any naturally occurring amino acid
  Transcript Sequence Number=SeqID_35779
  Gene Ontology: Mol. function=transferase activity, transferring glycosyl groups; Biological process=metabolic process
  Homolog annotation: Hit_ID=Q69X81; Match level="QueryCoverage=100%, HitCoverage=34%, E-value=1e-40, Identity=56%"; Hit description =Putative anthocyanin 3'-glucosyltransferase
SGVEDGAAPFRIPGFPGNLTITKDEVPHAVAMAADPDDPVTRFLSDEVRDWDYRSWGVLVNSFDALDGDYAAILESFYLPGARAWLVGPLFLLAAGEEQEDDDGDGDTEGCLPWLDERAAERPGSVVYVSFGTQVHVSTAQLDELAHGLVGSGHAFLWAXRTSDASWSPPVD

SEQ ID NO: 101754 - protein, 143 aa, Setaria italica
  misc_feature (111)..(111): Xaa can be any naturally occurring amino acid
  Transcript Sequence Number=SeqID_35780
  Homolog annotation: Hit_ID=Q7X8Z9; Match level="QueryCoverage=100%, HitCoverage=19%, E-value=1e-43, Identity=57%"; Hit description =OSJNBa0006A01.19 protein
QGVEIHFIKWRSLNHALGVMLLYRVRLCLDGVMGHTWTEDIAEKIISKSCGLKQIGTNLMHPAETTTIDLWAWTADPSTISKKVWLTFTSWAKDKQLASVLVAVMPSEHWXHGCKYCVYVQLDGIHDYTRATVDQDSATPAKR

SEQ ID NO: 101755 - protein, 178 aa, Setaria italica
  misc_feature (82)..(82): Xaa can be any naturally occurring amino acid
  misc_feature (115)..(115): Xaa can be any naturally occurring amino acid
  Transcript Sequence Number=SeqID_35781
  Homolog annotation: Hit_ID=Q7X8Z9; Match level="QueryCoverage=79%, HitCoverage=22%, E-value=2e-38, Identity=48%"; Hit description =OSJNBa0006A01.19 protein
QGVEIHFIKWRSLNHALGVMLLYRVRLCLDGVMGHTWTEDIAEKIINPSTISKKVWLTFTSWAKDKQLASVLVAVMPSEHWXHGCKYCVYVQLDGIHDYTRATVDQDSATPAKRXASPWHLGVADGAEVPSHLFEAFPHHLPAVAVLPAQEEQGPGRRGTGRTQGQGQGGAQPPGIQQ

SEQ ID NO: 101756 - protein, 79 aa, Setaria italica
  Transcript Sequence Number=SeqID_35782
QRRRHAKNCARTHGGTGRRHVPGRQPAGRQAGRPGGGDSSRRRGAAADRAGMAKAAGGSKQERQAVGAVRWRLSGSGSS

SEQ ID NO: 101757 - protein, 106 aa, Setaria italica
  Transcript Sequence Number=SeqID_35783
MNNFFLQCLKFYLPPSYDNQGGKSSSRIRGHDDMLQAARTDSPLSQLPSQTTEGESSLSGQASEYEETESDIYSGGAGYHPFSWMQQHENGGGPVMGASILSSYIP

SEQ ID NO: 101758 - protein, 313 aa, Setaria italica
  misc_feature (137)..(137): Xaa can be any naturally occurring amino acid
  Transcript Sequence Number=SeqID_35784
  Gene Ontology: Mol. function=calcium ion binding; Cellular component =nucleus; Biological process=regulation of transcription, DNA -dependent
  Homolog annotation: Hit_ID=Q7XI44; Match level="QueryCoverage=88%, HitCoverage=25%, E-value=1e-42, Identity=39%"; Hit description =Putative anther ethylene-upregulated protein ER1
  Pfam annotation: Domain name=CG-1; Domain location=1-77; Score=131.9; E_value=2.1e-36; Accession=PF03859.8; Description=CG-1 domain
PTQSILWYFRKDGHNWRKKRDGKTVKEAHERLKSGSIDVLHCYYAHGEENENFQRRSYWMLEEDFMHIVLVHYLEVKGGKSSSRIRGHDDMLQAARTDSPLSQLPSQTTEGESSLSGQASEYEETESAYLKPNSLQXDIYSGGAGYHPFSWMQQHENGGGPVMGASILSSYIPAPSVGNHQGFLATTTTTDFYSHGQDALPVALNEPGFGIAFDEADNQLDPSSLNGLVKPDQGVHRMAPPQIADPSKQFPFTEGSGIESFTFDEVYSNGLSIKDADTVGTDEESLWQLPGAISSFPTEDSSQQNGRSLEEAI

SEQ ID NO: 101759 - protein, 61 aa, Setaria italica
  Transcript Sequence Number=SeqID_35785
  Gene Ontology: Mol. function=protein disulfide oxidoreductase activity; Cellular component=cytoplasm; Biological process=electron transport chain
  Homolog annotation: Hit_ID=Q0D840; Match level="QueryCoverage=100%, HitCoverage=50%, E-value=7e-21, Identity=77%"; Hit description =Thioredoxin H-type
  Pfam annotation: Domain name=Thioredoxin; Domain location=8-59; Score= -10.9; E_value=0.0016; Accession=PF00085.12; Description=Thioredoxin
MAAEEGQVIACHTKEEFDSQMKKAEEAKKLVVIDFTASWCGPCRFIAPIFAELAKKFAHIV

SEQ ID NO: 101760 - protein, 119 aa, Setaria italica
  Transcript Sequence Number=SeqID_35786
  Gene Ontology: Mol. function=protein disulfide oxidoreductase activity; Cellular component=cytoplasm; Biological process=electron transport chain
  Homolog annotation: Hit_ID=Q0D840; Match level="QueryCoverage=100%, HitCoverage=98%, E-value=8e-43, Identity=70%"; Hit description =Thioredoxin H-type
  Pfam annotation: Domain name=AhpC-TSA; Domain location=9-97; Score= -21.0; E_value=0.044; Accession=PF00578.13; Description=AhpCTSA family
  Pfam annotation: Domain name=Redoxin; Domain location=4-115; Score= -15.6; E_value=0.07; Accession=PF08534.2; Description=Redoxin
  Pfam annotation: Domain name=Thioredoxin; Domain location=8-112; Score=152.2; E_value=1.6e-42; Accession=PF00085.12; Description =Thioredoxin
  Pfam module annotation: Pfam domain module=AhpC-TSA::Redoxin::Thioredo xin; Domain location=9-97::4-115::8-112
MAAEEGQVIACHTKEEFDSQMKKAEEAKKLVVIDFTASWCGPCRFIAPIFAELAKKFAHIVFLKVDVDELKEVAAEYKVEAMPTFLLIKEGKEVHKIVGARKEELQGKVAELGALTTSA

SEQ ID NO: 101761 - protein, 136 aa, Setaria italica
  Transcript Sequence Number=SeqID_35787
  Gene Ontology: Mol. function=protein disulfide oxidoreductase activity; Cellular component=cytoplasm; Biological process=electron transport chain
  Homolog annotation: Hit_ID=Q0D840; Match level="QueryCoverage=79%, HitCoverage=88%, E-value=3e-42, Identity=75%"; Hit description =Thioredoxin H-type
  Pfam annotation: Domain name=AhpC-TSA; Domain location=9-97; Score= -21.0; E_value=0.044; Accession=PF00578.13; Description=AhpCTSA family
  Pfam annotation: Domain name=DUF953; Domain location=10-112; Score= -34.3; E_value=0.031; Accession=PF06110.3; Description=Eukaryotic protein of unknown function (DUF953)
  Pfam annotation: Domain name=Thioredoxin; Domain location=8-112; Score=153.8; E_value=5.1e-43; Accession=PF00085.12; Description =Thioredoxin
  Pfam module annotation: Pfam domain module=AhpC-TSA::DUF953::Thioredox in; Domain location=9-97::10-112::8-112
MAAEEGQVIACHTKEEFDSQMKKAEEAKKLVVIDFTASWCGPCRFIAPIFAELAKKFAHIVFLKVDVDELKEVAAEYKVEAMPTFLLIKEGKEVHKIVGARKEELQGTLLSSAPLPLPPKDIASPVIAHKGQHTAW

SEQ ID NO: 101762 - protein, 119 aa, Setaria italica; identical to SEQ ID NO: 101760
  Transcript Sequence Number=SeqID_35788
  Gene Ontology: Mol. function=protein disulfide oxidoreductase activity; Cellular component=cytoplasm; Biological process=electron transport chain
  Homolog annotation: Hit_ID=Q0D840; Match level="QueryCoverage=100%, HitCoverage=98%, E-value=8e-43, Identity=70%"; Hit description =Thioredoxin H-type
  Pfam annotation: Domain name=AhpC-TSA; Domain location=9-97; Score= -21.0; E_value=0.044; Accession=PF00578.13; Description=AhpCTSA family
  Pfam annotation: Domain name=Redoxin; Domain location=4-115; Score= -15.6; E_value=0.07; Accession=PF08534.2; Description=Redoxin
  Pfam annotation: Domain name=Thioredoxin; Domain location=8-112; Score=152.2; E_value=1.6e-42; Accession=PF00085.12; Description =Thioredoxin
  Pfam module annotation: Pfam domain module=AhpC-TSA::Redoxin::Thioredo xin; Domain location=9-97::4-115::8-112

SEQ ID NO: 101763 - protein, 129 aa, Setaria italica
  Transcript Sequence Number=SeqID_35789
MVHSLQCCSAHTPLRPLFFSILLLLTSSMEVAHSDARRVPMSLLEIGASKGQEAAGMRGEMTKGRRALIGSRPPRCERVCMSCGHCEAVQVPIVPQDHHHLQKKAAATTNAAISAAMFTYRVDGITNYK

SEQ ID NO: 101764 - protein, 44 aa, Setaria italica
  Transcript Sequence Number=SeqID_35790
LILVQKHIKFSVQPYFFSFITFKIFSLNFGSFTTPISGHLNFLQ

SEQ ID NO: 101765 - protein, 63 aa, Setaria italica
  Transcript Sequence Number=SeqID_35791
  Gene Ontology: Mol. function=protein serine/threonine kinase activity; Cellular component=integral to membrane; Biological process=protein amino acid phosphorylation
  Homolog annotation: Hit_ID=B9RXX5; Match level="QueryCoverage=100%, HitCoverage=4%, E-value=5e-14, Identity=55%"; Hit description =Negative regulator of the PHO system, putative
ILEIVSGRRNSSFVDEEWSMNLLGYAWTLWKEGSVSELIDPLMGTAYTYDEVCRCIQVGLLCV

SEQ ID NO: 101766 - protein, 182 aa, Setaria italica
  Transcript Sequence Number=SeqID_35792
  Gene Ontology: Mol. function=transcription factor activity; Cellular component=nucleus; Biological process=regulation of transcription, DNA-dependent
  Homolog annotation: Hit_ID=B9GZ21; Match level="QueryCoverage=57%, HitCoverage=44%, E-value=1e-20, Identity=54%"; Hit description =AP2/ERF domain-containing transcription factor
  Pfam annotation: Domain name=AP2; Domain location=34-85; Score=79.3; E_value=1.4e-20; Accession=PF00847.12; Description=AP2 domain
GGGAPPGQGDYQQAAPPAAAAAAAEEEQAAGRRRHYRGVRQRPWGKWAAEIRDPKKAARVWLGTFDTAEDAAIAYDEAALRFKGTKAKLNFPERVQGRTDMGFLVTRGIPDRHHHQGGAAVTLAAMPPPHRQHHQTVVPYPDLMQYAQLLQGGGRGGGGAGDHHAEAAAQQAQARLMMMARG

SEQ ID NO: 101767 - protein, 228 aa, Setaria italica
  Transcript Sequence Number=SeqID_35793
  Gene Ontology: Mol. function=nucleic acid binding; Biological process= thiamin biosynthetic process
  Homolog annotation: Hit_ID=B9S9T2; Match level="QueryCoverage=39%, HitCoverage=12%, E-value=7e-41, Identity=85%"; Hit description=RNA -binding protein, putative
  Pfam annotation: Domain name=GRP; Domain location=119-214; Score= -24.4; E_value=0.027; Accession=PF07172.3; Description=Glycine rich protein family
  Pfam annotation: Domain name=RRM_1; Domain location=60-130; Score =67.9; E_value=3.6e-17; Accession=PF00076.14; Description=RNA recognition motif. (a.k.a. RRM, RBD, o
  Pfam module annotation: Pfam domain module=GRP::RRM_1; Domain location=119-214::60-130
PTSPPPPQPPAAPAPPLPQHHQIQQGDGINRPGGNFGGGPIVVGNGGPAGGGDGPGGTTLFVGELHWWTTDADLESELSKYGPVKEVRFFDEKASGKSKGYCQVDFYDPGAAAACKEGMNGHLFNGRPCVVAFATPNTVRRMGEAQVKNQQAMAAQTSAMQPKGGRGGGGSAGPQVGGNYGGGRGGAAGPGAGGGGGGGGGNWGRGGGGMGSRGPVGNMRNRMGPAGG

SEQ ID NO: 101768 - protein, 115 aa, Setaria italica
  misc_feature (27)..(27): Xaa can be any naturally occurring amino acid
  misc_feature (87)..(87): Xaa can be any naturally occurring amino acid
  misc_feature (104)..(104): Xaa can be any naturally occurring amino acid
  Transcript Sequence Number=SeqID_35794
RAANISYPRAQGQPVMPTQIPSDPDYXNGIPGDGSPIMPMQTPGDATPVMPMQIPLDGTPLTAMEYRSFFENPDMKPEAQIIMKLQXLDGWKYFGRNMFWLGVXGGGLILLHLLT

SEQ ID NO: 101769 - protein, 93 aa, Setaria italica
  Transcript Sequence Number=SeqID_35795
  Gene Ontology: Cellular component=chloroplast
  Homolog annotation: Hit_ID=Q5JKQ7; Match level="QueryCoverage=98%, HitCoverage=14%, E-value=2e-37, Identity=83%"; Hit description =Putative PPR protein
  Pfam annotation: Domain name=PPR; Domain location=29-63; Score=23.8; E_value=0.0007; Accession=PF01535.12; Description=PPR repeat
NAYSENADYGKAELLMKDLRSSGLTPNKVMLTTLLKVYSKGGIFEKAKDLLAELEASGFAQDEMPYCILIDGLVKGGKIEEANMLFNEMKRKK

SEQ ID NO: 101770 - protein, 107 aa, Setaria italica
  Transcript Sequence Number=SeqID_35796
  Gene Ontology: Mol. function=nucleic acid binding; Cellular component= nucleus; Biological process=DNA replication
  Homolog annotation: Hit_ID=B3VTD1; Match level="QueryCoverage=98%, HitCoverage=10%, E-value=5e-39, Identity=74%"; Hit description =Replication protein A1-like protein
QLLCDSDSNPILALKGGRISDFKGRSVVTISSTQLKVNPDVPVAERLKQWYMVEGKNAPCVTLSQDISSLSRICVQKTIAQIKDENLGQSDKPDFITVRAVISYVAA

SEQ ID NO: 101771 - protein, 317 aa, Setaria italica
  misc_feature (24)..(24): Xaa can be any naturally occurring amino acid
  Transcript Sequence Number=SeqID_35797
  Gene Ontology: Mol. function=nucleic acid binding; Cellular component= nucleus; Biological process=DNA replication
  Homolog annotation: Hit_ID=B3VTD1; Match level="QueryCoverage=89%, HitCoverage=27%, E-value=1e-103, Identity=63%"; Hit description =Replication protein A1-like protein
  Pfam annotation: Domain name=Rep_fac-A_C; Domain location=89-234; Score=211.8; E_value=1.8e-60; Accession=PF08646.2; Description =Replication factor-A C terminal domai
GSNPILALKGGRISDFSGKSVVFXSTTQLKVNPDVPVAEMLKQWYMAEGKTAPCVSLSQDISSLSRIYVQKTIAQIKDENLGQSDKPELITVRAVISYVAVDKFCYPACTLELDGKRCNRKVTSSGDGTWYCDRCNQCSEKCEYRYLLLCQIKDHTGSTYATASQEAAEEIFGHTAQELFMIRNVEQDDAKLAAIMRKILWRECLFKLRIKAQTYNGELRVKCCIVGVEKLDVLGIDHHLLEEIDNLLNDITHPILMDDSSYIPDVGYAKLEARQTMLSSSSACGPLKGLADLAGYGRLNRMPPPLPASSKGFIPMM

SEQ ID NO: 101772 - protein, 88 aa, Setaria italica
  misc_feature (1)..(9): Xaa can be any naturally occurring amino acid
  Transcript Sequence Number=SeqID_35798
XXXXXXXXXPKIHIYDHIRAKPKHKTNTNKLKLEFALRRKGNLLSNYGCLLAIMQLNDSPLITNVFLQPLRSSLISTAPGRTRPAPGR

SEQ ID NO: 101773 - protein, 560 aa, Setaria italica
  Transcript Sequence Number=SeqID_35799
  Gene Ontology: Mol. function=catalytic activity; Cellular component =endoplasmic reticulum; Biological process=metabolic process
  Homolog annotation: Hit_ID=B5L347; Match level="QueryCoverage=100%, HitCoverage=90%, E-value=0.0, Identity=76%"; Hit description=TCER1
  Pfam annotation: Domain name=FA_hydroxylase; Domain location=72-194; Score=93.8; E_value=6.1e-25; Accession=PF04116.5; Description=Fatty acid hydroxylase
NQIWIKTWSRYQTARRKNVIVDRSIEFEQVDRERSWDDQIIFNGLEFYLAYAMIPNVRLLPVWRTDGAIITVLLHMGPVEFLYYWFHRALHHHFLYSRYHSHHHASIVTEPITSVIHPFAEHVVYFMLFSIPTLTPIFMGCGSVLGVVLYIAYIDFMNNMGHCNFELVPKWIFKAFPPLKYLMYTPSFHSLHHTQFRTNYSLFMPFYDYMYNTMDKSSDELYEKSLKVTDETPDLVHLTHMTNLQSTYHLRIGIASIASKPSDNPVWYSWMIWPVAWLSMVLAWVYGSSAFVIERLQMKKFKMQTWAIPRYNFQYGMSWERESINSLIEKAILDADERGVKVLSLGLLNQAKPLNRSGELFIQKYPKLRVRLVDGSGLATAVVLKSIPLGTKKVFLSGSTSKVAHATAMALCEKGFQVIMNQKKEYDMLKSRLPVGTTVYLKFSNKDIPQIWIGDYIDDKQQQRAPKGTTFVPTSQFPLKKIRKDCTYLSTPAMKIPATMENVHTCENWLPRRVMSAWRIAGILHAVEGWDMHECGDDMMDIEKTWSAAIKHGFVPLTKG

SEQ ID NO: 101774 - protein, 268 aa, Setaria italica
  misc_feature (8)..(8): Xaa can be any naturally occurring amino acid
  misc_feature (35)..(35): Xaa can be any naturally occurring amino acid
  Transcript Sequence Number=SeqID_35800
  Subcellular localization annotation: CTP_CleavageSite=90; ConfidenceScore=5.23e-01
VEQKSIEXPAEMRGKRVALVKPISSGGKRSSSPPXSGSQRKPKYSFISAMAKTRTPSSDTGCMKGTSLRKEAAVALNPQSPGSTRPSPASSMEKGEKRALFILANVVNQNNVAEDSVSNALLDQRVRDDPPKEADPTQSIAERVQHQEAIKESAPIAVPNPEEINSEVIWERMQKVYSEFLSSRETTFSELLEQAKKLVVASKHPNDEHIMLEQQVKDLKGNISLLKDMMTKAKQETLKGIEENTKLKDEIRDQKKISNELSKQNEST

SEQ ID NO: 101775 - protein, 146 aa, Setaria italica
  Transcript Sequence Number=SeqID_35801
PASSQAGRPAGRRPPRRRRLSCDFSRQNDETIPFSTLPGGSRREAQKIGEAWAPEHTRMCKDYIQEGLVLLVVRRHRRRLSSTCCFKVECAGGARDMRLVCASKVEDDRQLQKGGRKRLKRDRDQRAQAVLRSSDRRHDRSSFPSP

SEQ ID NO: 101776 - protein, 57 aa, Setaria italica
  misc_feature (47)..(57): Xaa can be any naturally occurring amino acid
  Transcript Sequence Number=SeqID_35802
IAGSYTYQLPPEIDRLIATLTWASKSLCIREVLPLILLRASKKKKKXXXXXXXXXXX

SEQ ID NO: 101777 - protein, 141 aa, Setaria italica
  Transcript Sequence Number=SeqID_35803
  Subcellular localization annotation: CTP_CleavageSite=57; ConfidenceScore=5.54e-01
SSIDQGSSRQSVHLERLKSSNRYDFERSQISSTVSCQSIASVSDVSTSNRSVSVCPRSNAIVDTGFLTDNTESSASRSMICTEELDESCKYTLSSAIECWSAAQAIVNDDIDSFGVVAVQNQSTGGMAYKDNSSANSYYSH

SEQ ID NO: 101778 - protein, 258 aa, Setaria italica
  misc_feature (245)..(245): Xaa can be any naturally occurring amino acid
  Transcript Sequence Number=SeqID_35804
SVSICPRRNAIVDIGFLTDNSEITTKPIMISTEELDESCKCTLSSAIECWSAAKAIVNDDIDSFGDAIQNLSANTCSSDTETHNNIPLSLAPEESCIQKTEEGTSAVSQCYSVGIPEHPGDECGVDNYQMQYEAVPASNEAKRLDDGCVSVISEEDVLFSATEANTMELPDNEGLLATVEGSREQIQRCFTLEEVTDTILFCSSIAHDIAFRAATIGLEREQQSEFASAPRPTVTMVDNPFRRGXSSLKPDPRGESTK

SEQ ID NO: 101779 - protein, 92 aa, Setaria italica
  Transcript Sequence Number=SeqID_35805
  Subcellular localization annotation: CTP_CleavageSite=56; ConfidenceScore=5.82e-01
CPTLSLLATTPLPPGHRSPAASPAVPSPRSRALPILPSTRFLTLSTQCCTPQEPTVARSPPALGVGVALAIGRSNPRAPTLPVRNSTAVSST

SEQ ID NO: 101780 - protein, 101 aa, Setaria italica
  Transcript Sequence Number=SeqID_35806
  Subcellular localization annotation: CTP_CleavageSite=22; ConfidenceScore=5.18e-01
PALMRFKFSAFVNVLSFVFSCYATGGTVGNGTLPCLQDVVFPGFCECFIILSFSCYGTRLLVAHKVAIAASSCRHRQTLCNKENYAIYCVKRISSTHSERT

SEQ ID NO: 101781 - protein, 71 aa, Setaria italica
  Transcript Sequence Number=SeqID_35807
  Homolog annotation: Hit_ID=B6TAD5; Match level="QueryCoverage=92%, HitCoverage=12%, E-value=1e-15, Identity=65%"; Hit description=KOB1
MLTAVNEKLSPKKMDAQSQNITRPGNLPIDLIRSSDSKASARKILQAAELAFRDTVVSAVPPLSPPGVETR

SEQ ID NO: 101782 - protein, 367 aa, Setaria italica
  Transcript Sequence Number=SeqID_35808
  Gene Ontology: Mol. function=N-acetyltransferase activity; Cellular component=intracellular; Biological process=metabolic process
  Homolog annotation: Hit_ID=B6TAD5; Match level="QueryCoverage=99%, HitCoverage=69%, E-value=0.0, Identity=90%"; Hit description=KOB1
CCKGVKVVYRTKDLEEQQARSRIWNETWLSGFFYKPCNYELFVKQSLNMEMAIVMARDYGMDWIIHLDTDELLYPGGASEYSVRHLLAEVPHDVDMVIFPNYESSVERDNIKDPFSEVSMFKKNYDHLPKDTYFGMYKEATRGNPNYFLTYGNGKSAARIQDHLRPNGAHRWHNYAKSPNEIKLEEAAVLHYTYTKFSDLTSRRDRCGCKPTKEDVKRCFMLDFDRAAFIIASTASEEEMLRWYNERVVWNDKQLNLKLMRKGVLTRIYTPMAIVQGLRESGVFTSVIAGGQAAVNEKLSPKKMDAQSQNITRPGNLPIDLIRSSDSKASARKILQAAELAFRDTVVSAVPPLSPPGLDDEHRHHSE

SEQ ID NO: 101783 - protein, 92 aa, Setaria italica
  Transcript Sequence Number=SeqID_35809
EPDSLHISRGEKANRENFKKKSFQHKKGTEKSSGAWTVGTWADVGSGRSDPPQLGPTKAHSPVGQYGWNWMDSSWVLLFIQSFRHCDDKIKF

SEQ ID NO: 101784 - protein, 159 aa, Setaria italica
  Transcript Sequence Number=SeqID_35810
  Gene Ontology: Mol. function=peptidase activity; Biological process =protein catabolic process
  Homolog annotation: Hit_ID=B4FRF7; Match level="QueryCoverage=100%, HitCoverage=100%, E-value=1e-78, Identity=90%"; Hit description=ATP -dependent Clp protease adaptor protein ClpS containing protein
  Pfam annotation: Domain name=ClpS; Domain location=76-152; Score =126.2; E_value=1.1e-34; Accession=PF02617.9; Description=ATP -dependent Clp protease adaptor protein C
MEAAVPSRVALSAASRFPNRHAVAGDRSTIYKGRCQSLAIPMALSAAAPGKGGVLDRPVEKTTPGRQSEFDVKKKRKMTPPYRVILHNDNYNRREYVVKVLMKVIPGMTVDNAVNIMQEAHVNGLSVVIVCSQSEAEEHCTSLRGNGLRSSIEPASGGC

SEQ ID NO: 101785 - protein, 66 aa, Setaria italica
  Transcript Sequence Number=SeqID_35811
  Subcellular localization annotation: CTP_CleavageSite=42; ConfidenceScore=5.03e-01
MQDSILCTHCQCAMFVSQHTLSLAAVIQHKGLVHLVSLGHCSSNTMVAVIRTLFMTSRLFSFVLWR

SEQ ID NO: 101786 - protein, 98 aa, Setaria italica
  misc_feature (4)..(4): Xaa can be any naturally occurring amino acid
  Transcript Sequence Number=SeqID_35812
  Gene Ontology: Mol. function=electron carrier activity; Biological process=oxidation reduction
  Homolog annotation: Hit_ID=B6SXS5; Match level="QueryCoverage=55%, HitCoverage=10%, E-value=7e-18, Identity=81%"; Hit description =Cytochrome P450 CYP72A123
EGKXVLAALASEVASTPWSFLIYGLLGALLLWQAARLLERLWLGPRRLERALRAQGLRGTPYRFLTGDLKEYARFNKAAWSRPLPLRCHDIAGHVAPF

SEQ ID NO: 101787 - protein, 340 aa, Setaria italica
  misc_feature (43)..(43): Xaa can be any naturally occurring amino acid
  Transcript Sequence Number=SeqID_35813
  Gene Ontology: Mol. function=translation elongation factor activity
  Homolog annotation: Hit_ID=Q9SHN5; Match level="QueryCoverage=72%, HitCoverage=66%, E-value=5e-87, Identity=68%"; Hit description =F7F22.5
RSRRQFKQQDFYPRCTQRGPAPQSRDTPPKRDTGIASEKEWGXINLLDEAVKESGTNEDGSTWYRESGEDLGENGFRCRWARMGGQSHDGSTEWKETWWEKSDWTGYKELGAEKSGKNALGDSWWEKWKEVLYQDEWSNLARIERSAEKQAKSGAENAGWYEKWWEKYDAKGWTEKGAHKYGRLNEQSWWERWGEHYDGRGFVLKWTDKWAETDLGTKWGDKWEEKFFAGIGSRQGETWHVSPGGGRWSRTWGEEHFGNGKVHKYGKSTTGESWDLVVDEETYYEAEPHYGWADVVGDSTQLLSIQPLERPPGVFPNIDFSSAPPLNDDPPGMTPSSPLE

SEQ ID NO: 101788 - protein, 108 aa, Setaria italica
  Transcript Sequence Number=SeqID_35814
NNKQDPVSARPHMQRQLTSKDNYTSAIHGLVDQNLTVCMVSMFLRQDVCPHISKHIGAAILAPAMLHDEVTWQNRKIHLFGLYPARQILCYYTHEAYSHRPTGCQKMS

SEQ ID NO: 101789 - protein, 64 aa, Setaria italica
  Transcript Sequence Number=SeqID_35815
  Gene Ontology: Mol. function=ribonuclease H activity; Biological process=DNA integration
  Homolog annotation: Hit_ID=Q7XBD9; Match level="QueryCoverage=96%, HitCoverage=3%, E-value=5e-11, Identity=53%"; Hit description =Putative gag-pol
EFDIDFCPHHAIKFQILADFIVGWTEIQVLPSLERPEHWMMYFDATLNLEGAGVGVLFISLKGE

SEQ ID NO: 101790 - protein, 156 aa, Setaria italica
  misc_feature (12)..(12): Xaa can be any naturally occurring amino acid
  misc_feature (113)..(113): Xaa can be any naturally occurring amino acid
  misc_feature (121)..(121): Xaa can be any naturally occurring amino acid
  Transcript Sequence Number=SeqID_35816
TLNRQDLERNHXPLDDASMQPTGNKVTMIPGKTKVFGKICCNQNVSVADTDNLSTFSSGGVVRSVSNEDSCPKSSGKQTADVPARVQLSHNDDVHETLMENGPVEAVAVEEDXGCGDSLSXSCQLAGQTVAKLPVTDAQSHASSADHCVAGSFDQA

SEQ ID NO: 101791 - protein, 70 aa, Setaria italica
  misc_feature (59)..(59): Xaa can be any naturally occurring amino acid
  Transcript Sequence Number=SeqID_35817
LHTKRPPFFCRSAQSHGSTDKNRVCGAEVLEELESMTPAVYSEPPRNIQLSLRSASAKXEPSTLPRRSAR

SEQ ID NO: 101792 - protein, 358 aa, Setaria italica
  Transcript Sequence Number=SeqID_35818
HLNSTPASWAKTFMAEMCIAPPEHGNFSSFISSLATKDDHSTVSPSGNIIVDIQSKGAVNIIPSTNSSRASDVGENSRSVPYPADTITVNSVSSTSTLAGAPVELSGYQEGAPVVSSSCLTADVRNNVTSEPSALDNEVLPPESANVFMQPERITVPLDDASMQPTGNKVTMIPRGVVRSVSNEDSCPKSSGKQTADVPARVQLSHNDDVHETLMENGPVEAVAVEEDIGCGDSLSISCQLAGQTVAKLPVTDAQSHASSADHCVAGSFDQAHPTSSSAASDNAINSLTSKYGAESAQSHGSTDKNRVCGAEVLEELESMTPAVYSEPPRNIQLSLRSASAKKKPSTLPRRSARLIPK

SEQ ID NO: 101793 - protein, 314 aa, Setaria italica
  Transcript Sequence Number=SeqID_35819
MGYEESKNHLLSLSYQELQCLCKRYNLPAKKTHTQLASLLASLLEASPPAALTIPLATVKETATCDHVSNKRGPYNGRDDGRPPAQVKHQKGSQTPVDETTKGGIDTGTSISPVSINHGRPDCHGHSSSERGTDHNLQSQRDVGIASKSANPGLVSKHHRSPDNIIDQICPPIVEKYPEASTPFSHTEDTAVKGCGPSDKMSANAPAVQFSVMSDEGIDLVVDLNSTPASWAKTFMAEMCIAPPEHGNFSSFISSLATKDDHSTVSPSGNIIVDIQSKGAVNIIPSTNSSRASDVGENSRSVPYPADTTNLLVC

SEQ ID NO: 101794 - protein, 116 aa, Setaria italica
  Transcript Sequence Number=SeqID_35820
TKLKRLHQDHHGQQHQHHRIISCTITNIDTNDKDLTARTSTTVDPVQYHSTSKQQPISRTDNLNSSSVLLPLCSVNLLQSHGRLFLGITRSTSFTPCCLCLGYGSLHALVMEKHCV

SEQ ID NO: 101795 - protein, 290 aa, Setaria italica
  Transcript Sequence Number=SeqID_35821
  Gene Ontology: Mol. function=nucleic acid binding; Cellular component= nuclear speck; Biological process=nuclear mRNA splicing, via spliceosome
  Homolog annotation: Hit_ID=B6UG76; Match level="QueryCoverage=39%, HitCoverage=44%, E-value=8e-58, Identity=97%"; Hit description =Splicing factor, arginine/serine-rich 2
  Pfam annotation: Domain name=RRM_1; Domain location=18-88; Score =88.5; E_value=2.4e-23; Accession=PF00076.14; Description=RNA recognition motif. (a.k.a. RRM, RBD, o
MSHFGRSGPPDIRDTFSLLVLNISFRTTADDLFPLFERYGKVVDVFIPRDRRTGDSRGFAFVRYKYADEAQKAIDRLDGRNVDGRNIMVQFAKYGPNAEPIRKGRVKEAVEKSQDRSRSRSPRPRHRDRDHRRRSRSRSRERHGRDRDRDYRRQSRSRSRSRSPSSSPDLKSRRRARDDCKRQSRSKSRSRSRSRSRSRSRSYHSGSPARRSASPRKSPPPRRSPTPEKHTNGKDSPPSRSVSPSPKRAGSRSPRSVSPSPKRAGSRSPRSVSPSPKRAGSHSPGRDSKE

SEQ ID NO: 101796 - protein, 63 aa, Setaria italica
  Transcript Sequence Number=SeqID_35822
PIISVNQIFTNSNPCHCAMSYFMHMMFFILECSAISCCCSSFGVLSLHWLSGDFLFLVTSLDS

SEQ ID NO: 101797 - protein, 107 aa, Setaria italica
  Transcript Sequence Number=SeqID_35823
KLQVIFVTLDKLKIVVTLAFRGCLFQLLQPILVKIIEQAPQTARFSTDSSRSDFSRSKGMHCGAKIGPPVALGKIPPISLPSATRLPSAWAHLSVSPAAPPSPAAAR

SEQ ID NO: 101798 - protein, 163 aa, Setaria italica
  Transcript Sequence Number=SeqID_35824
  Gene Ontology: Mol. function=ARF GTPase activator activity; Cellular component=plasma membrane; Biological process=regulation of ARF GTPase activity
  Homolog annotation: Hit_ID=B2Z3Q0; Match level="QueryCoverage=90%, HitCoverage=79%, E-value=2e-38, Identity=51%"; Hit description =Pollen-specific C2 domain containing protein
  Pfam annotation: Domain name=C2; Domain location=8-87; Score=105.6; E_ value=1.7e-28; Accession=PF00168.22; Description=C2 domain
MEGLVGLLKVRVVRGINLAYRDARGSDPYVVLRLGKKKLKTSVKKRSVNPIWHEELTLTVTHPSQTLKLEVFDKDTFSRDDPMGDAEIDVAPLMEVVTMNPDDIKNGAIIKSVRPSTRNCLADESHVCWRNGRFVQDMILRLKNVESGEIQLQLQWVTIPGAK

SEQ ID NO: 101799 - protein, 103 aa, Setaria italica
  Transcript Sequence Number=SeqID_35825
  Homolog annotation: Hit_ID=B6U078; Match level="QueryCoverage=89%, HitCoverage=23%, E-value=2e-15, Identity=53%"; Hit description=F-box domain containing protein
KVSSGFHPAEAPHPNATAARSIAHPAAGFSFDYLPPTRCNRKPWDACDVRDGRVLLKSGPVGYTGFNFPDLAVCDPVFRRYRLLPPIPDDLLASVHQYQQIFP

SEQ ID NO: 101800 - protein, 57 aa, Setaria italica
  Transcript Sequence Number=SeqID_35826
YIVTTTHVAIHAQLHTEYTVQRMPLGYHRKHADLWLKCKLLLALNQTCFIDCRGAKI

SEQ ID NO: 101801 - protein, 84 aa, Setaria italica
  Transcript Sequence Number=SeqID_35827
  Subcellular localization annotation: CTP_CleavageSite=59; ConfidenceScore=5.70e-01
PDPIREFSACRALPTSRVRPPLPRGSPSDAAPSPVRLPLPAPRRRCSSSPPRRLPVLPVASPPPPRRLSISVPARSPPLLRDCP

SEQ ID NO: 101802 - protein, 69 aa, Setaria italica
  Transcript Sequence Number=SeqID_35828
  Gene Ontology: Mol. function=protein serine/threonine kinase activity; Cellular component=intrinsic to membrane; Biological process=regulation of transcription, DNA-dependent
  Homolog annotation: Hit_ID=Q7XQ05; Match level="QueryCoverage=100%, HitCoverage=9%, E-value=1e-25, Identity=84%"; Hit description =OSJNBa0036B21.17 protein
FGVSSDVVTVVSNPGQQAHRRHPKKCRFKGCSKGARGASGLCIAHGGGQRCQKPGCHKGAESRTAYCKA

SEQ ID NO: 101803 - protein, 126 aa, Setaria italica
  Transcript Sequence Number=SeqID_35829
  Gene Ontology: Mol. function=acyl-CoA thioesterase activity; Cellular component=cAMP-dependent protein kinase complex; Biological process =acyl-CoA metabolic process
  Homolog annotation: Hit_ID=Q7XPS0; Match level="QueryCoverage=96%, HitCoverage=26%, E-value=8e-60, Identity=90%"; Hit description =OSJNBa0065O17.11 protein
  Pfam annotation: Domain name=cNMP_binding; Domain location=33-121; Score=33.9; E_value=6.4e-07; Accession=PF00027.21; Description =Cyclic nucleotide-binding domain
MDREEVTEFLGQVPLLQCLPGSSIRRIADAVQVKRYEPGDYVAREGEPVDGLYIILDGQAEVSAPANAEEANRPDYVLNKYDYFGYGTNSSDHQVNVVALSKLTCFILPNQYGHLLQPKTIWNAED

SEQ ID NO: 101804 - protein, 451 aa, Setaria italica
  Transcript Sequence Number=SeqID_35830
  Gene Ontology: Mol. function=acyl-CoA thioesterase activity; Cellular component=mitochondrion; Biological process=acyl-CoA metabolic process
  Homolog annotation: Hit_ID=Q7XPS0; Match level="QueryCoverage=100%, HitCoverage=100%, E-value=0.0, Identity=84%"; Hit description =OSJNBa0065O17.11 protein
  Pfam annotation: Domain name=Acyl_CoA_thio; Domain location=169-269; Score=48.9; E_value=1.9e-11; Accession=PF02551.7; Description=Acyl -CoA thioesterase
  Pfam annotation: Domain name=Acyl_CoA_thio; Domain location=308-436; Score=82.4; E_value=1.6e-21; Accession=PF02551.7; Description=Acyl -CoA thioesterase
  Pfam annotation: Domain name=cNMP_binding; Domain location=60-148; Score=33.9; E_value=6.4e-07; Accession=PF00027.21; Description =Cyclic nucleotide-binding domain
  Pfam module annotation: Pfam domain module=Acyl_CoA_thio::Acyl_CoA _thio::cNMP_binding; Domain location=169-269::308-436::60-148
MDREEGKSAPAQSPPNLGPILANLRPGCHWCAVTEFLGQVPLLQCLPGSSIRRIADAVQVKRYEPGDYVAREGEPVDGLYIILDGQAEVSAPANAEEANRPDYVLNKYDYFGYGTNSSDHQVNVVALSKLTCFILPNQYGHLLQPKTIWNAEDTPEHSLLEQILHLEPLEVDIFRGFTLPEAPTFRQVFGGQLIGQALAAASKTVDCLKMVHSLHAIFLIAGDNNMPIIYQVHRARDGSSFATRKVEAKQKGLVIFTLIASFQKEEVGFQHQAATMPNVPPPEQLLNLEEIRERRLTDPRFPSQYRNLAAKKKFTPWPIEMRFCEDSASQYKPSLNYWFRARGKLSDDQALHRCVVAYASDLLYSGVSLNPHREKGLKTYSLSLDHSIWFHKPVKADDWLLYVIESPSAHGGRGFVTGRMFNRQGELIMSLTQEALIRREKTRGPNPRPKL

SEQ ID NO: 101805 - protein, 105 aa, Setaria italica
  Transcript Sequence Number=SeqID_35831
  Pfam annotation: Domain name=PSK; Domain location=19-104; Score=21.1; E_value=1.6e-05; Accession=PF06404.4; Description=Phytosulfokine precursor protein (PSK)
GASCVLIARAAVRSHRRHACMALETTARVVQQQPQSLSISLRALQVVDSKGGAMTGFTAAVAEDDPCGGAAAGEGGEAEQEECLIRSVRLVAHTDYIYTQGGGHN

SEQ ID NO: 101806 - protein, 106 aa, Setaria italica
  Transcript Sequence Number=SeqID_35832
  Pfam annotation: Domain name=PSK; Domain location=15-105; Score=55.9; E_value=1.6e-13; Accession=PF06404.4; Description=Phytosulfokine precursor protein (PSK)
MAQSPPRRTAALLLSLLLLFSVAAHAAREAAASSRGHAELQEGQDSEVVDSKGGAMTGFTAAVAEDDPCGGAAAGEGGEAEQEECLMRRTLVAHTDYIYTQGGGHN

SEQ ID NO: 101807 - protein, 176 aa, Setaria italica
  misc_feature (16)..(16): Xaa can be any naturally occurring amino acid
  Transcript Sequence Number=SeqID_35833
  Gene Ontology: Mol. function=metal ion binding
  Homolog annotation: Hit_ID=B4FDW4; Match level="QueryCoverage=100%, HitCoverage=100%, E-value=2e-90, Identity=90%"; Hit description =Protein binding protein
  Pfam annotation: Domain name=zf-C3HC4; Domain location=130-170; Score= 28.5; E_value=2.8e-05; Accession=PF00097.17; Description=Zinc finger, C3HC4 type (RING finger)
MATPTTYSVRISSETXHKIETWLSSDEALARQLQEEENTRDAAADTREFTGNVSLEPSSPAVEYRPAQNAAQVAREDNVDPDNMSYEQLQALGEAVGTQSRGLSDELISYLEPFRHKCTLFSRNKNNEECVICKTTYKSRQKMIRLPCSHCYHANCITRWLKINKACPVCNEEVFG

SEQ ID NO: 101808 - protein, 98 aa, Setaria italica
  Transcript Sequence Number=SeqID_35834
  Gene Ontology: Mol. function=metal ion binding
  Homolog annotation: Hit_ID=B4FDW4; Match level="QueryCoverage=87%, HitCoverage=49%, E-value=2e-38, Identity=91%"; Hit description =Protein binding protein
MATPTTYSVRISSETHKIETWLSSDEALARQLQEEENTRDAAADTREFTGNVSLEPSSPAVEYRPAQNAAQVAREDNVDPDNMSYEVCQLHSFMRWKR

SEQ ID NO: 101809 - protein, 292 aa, Setaria italica
  Transcript Sequence Number=SeqID_35835
  Gene Ontology: Mol. function=ATPase activity, coupled to transmembrane movement of ions, phosphorylative mechanism; Cellular component=integral to membrane; Biological process=phospholipid transport
  Homolog annotation: Hit_ID=B9SF77; Match level="QueryCoverage=95%, HitCoverage=23%, E-value=1e-114, Identity=67%"; Hit description =Phospholipid-transporting ATPase, putative
KSSFTCPNFNQPGDIGVGISGAEGMQAVMASDFAIAQFRFLERLLLVHGHWCYRRIAAMICYFFFKNITFGITLFWFEAHAMFSAQPAYNDWFISFYNVAFTSLPVIALGVFDKDVSSRVCLEVPSLHQDGVNNVFFSWSRILSWMLNGLCCSIIIYFGSLNAILIQAVRQDGRVAGFDILGVTMYTCVVWTVNCQLALYISYFTWIQHFVIWGSILIWYAFLVIYGLFPPAISTTAYHVFLEACASSPLYWLSTLMIVVTALIPFFVYKISRTLYYPQYHDKVQRTNSKNW

SEQ ID NO: 101810 - protein, 97 aa, Setaria italica
  Transcript Sequence Number=SeqID_35836
VAHPKVAQEQIGKGGYLAGTRYSCAMVSSYNPSFAQYSTTCIKLYLHEFSKSAATKRFPNWLGTIFDQMPLKEGSTGGSKLRHIKITLSSAVATENA

SEQ ID NO: 101811 - protein, 50 aa, Setaria italica
  Transcript Sequence Number=SeqID_35837
CPIFLSLRYLEKEIDRTQYGMFLYRIFCRFHHYLAMFIFFLLFLVNKMAI

SEQ ID NO: 101812 - protein, 154 aa, Setaria italica
  Transcript Sequence Number=SeqID_35838
  Gene Ontology: Mol. function=oxidoreductase activity; Biological process=oxidation reduction
  Homolog annotation: Hit_ID=B6T2N7; Match level="QueryCoverage=94%, HitCoverage=41%, E-value=1e-68, Identity=85%"; Hit description =Nucleic acid binding protein
SLLVSLSASELGIPGIYMVEEFVTATEEQELLAAVDSRPWKNLAKRRVQHYGYEFLYDARNVDSKQFLGELPAFVSIVLEKIASFPGVKNCTTGLVDQLTVNEYPCGVGLSPHIDTHSAFEEMIFSLSLAGPCIMEFRKYPKGSWLSLCTLVLD

SEQ ID NO: 101813 - protein, 452 aa, Setaria italica
  Transcript Sequence Number=SeqID_35839
  Gene Ontology: Biological process=protein modification process
  Homolog annotation: Hit_ID=B6VC47; Match level="QueryCoverage=35%, HitCoverage=42%, E-value=6e-29, Identity=44%"; Hit description =Ubiquitin family protein (Fragment)
MAEAPQYQILVRLLDGRTRCLRFTTPTVSGAALLDAVASLSRVPAAALRLVTGRLDVSPSAVLTSAADGQFPSASALLRLRGGKGGFGSLLRGAASKAGQKKTSNFDACRDINGRRLRHVNAERRLEEWKAEAADRQLEKLAEDFIKKKAKEAGRGKGPSAAEVDKYLEKFRKDAEICVNAVEESVRASLGKRKTAPKPPPGADSKKLRIWLGKNKVEDDESDSDSDEDDEDREGDEGTDAKSIVLDDGNCSNGSSKSDDKKHDLGSVSGSHSEGESSGEKSGHNDSEENGKCVQSIVELTMRSEAEGGDFESDGSVETEVGMVDQPISEKSDEVKADVDNTASAALDEVKADVGNTVSAASNQNNPEVPQVEESADVNKSSPSEPLDLAKYGSAAELETLGLEKLKMELQTRGLKCGGTLQERAARLFLLKTTPLDKLPKKLLAKPAAGGK

SEQ ID NO: 101814 - protein, 101 aa, Setaria italica
  misc_feature (86)..(86): Xaa can be any naturally occurring amino acid
  Transcript Sequence Number=SeqID_35840
  Subcellular localization annotation: CTP_CleavageSite=53; ConfidenceScore=5.57e-01
WLFMAGSWAAFGTSMLLTLGLLTGVPAKSRLVRYAFLVAYSSLVLTFVTSQPRTSLAMDLAIWGALMAVLTVFTKYLRVDTLPSWXRSLCPPPASCCCSGS

SEQ ID NO: 101815 - protein, 36 aa, Setaria italica
  Transcript Sequence Number=SeqID_35841
VSDSFFTAAMDDGNAVTPYQARVLEVESPEAGEAAA

SEQ ID NO: 101816 - protein, 289 aa, Setaria italica
  Transcript Sequence Number=SeqID_35842
  Gene Ontology: Mol. function=protein serine/threonine kinase activity; Cellular component=plasma membrane; Biological process =protein amino acid phosphorylation
  Homolog annotation: Hit_ID=Q4LB28; Match level="QueryCoverage=99%, HitCoverage=55%, E-value=1e-152, Identity=90%"; Hit description =B0222C05.2 protein
  Pfam annotation: Domain name=Pkinase; Domain location=1-211; Score =52.6; E_value=1.5e-12; Accession=PF00069.17; Description=Protein kinase domain
  Pfam annotation: Domain name=Pkinase_Tyr; Domain location=1-233; Score=5.6; E_value=4.2e-14; Accession=PF07714.9; Description=Protein tyrosine kinase
  Pfam module annotation: Pfam domain module=Pkinase::Pkinase_Tyr; Domain location=1-211::1-233
REFKVEVEAIGRVRHKNLVRLLGYCAEGNQRMLVYEYVNNGNLEQWLHGDVGPVSPLTWDIRMKIILGTAKGLMYLHEGLEPKVVHRDVKSSNILLDKRWNAKLSDFGLAKLLGSERSYVTTRVMGTFGYVAPEYAGTGMLNETSDVYSFGILIMEIISGRVPVDYNRPPGEVNLVEWLKTMVSNRNSEGVLDPKMTEKPTSRALKKALLVALRCVDPEARKRPKIGHVIHMLEVDDFPYRDERRGGKAPTQARSVETPASDPGDSSGNNTPKDTPKGGEPFKWRTQET

SEQ ID NO: 101817 - protein, 101 aa, Setaria italica
  Transcript Sequence Number=SeqID_35843
YLNISDYLGFPSAAPANAEQYQDLEQQVPSTEEQQVMTPQLMVHTSADEERSQLVPTDDIFLLSPLLDISDYLSFPSAATANAEQGQELEQQVPSTAESMS

SEQ ID NO: 101818 - protein, 81 aa, Setaria italica
  Transcript Sequence Number=SeqID_35844
IKHAYLYSVLNEFHAKFHYNVFLIIEVISKQRTRTRHAQEATSMKLDEPYTFSREQQLNFCEATAHQTKPNIAQQYNHSWR

SEQ ID NO: 101819 - protein, 87 aa, Setaria italica
  Transcript Sequence Number=SeqID_35845
  Homolog annotation: Hit_ID=B6TEB6; Match level="QueryCoverage=100%, HitCoverage=26%, E-value=3e-35, Identity=86%"; Hit description =Thaumatin-like protein 1
MGVARVFVVVLALICIFVREGRAATFTFVNRCTGTVWPGIQSNAGSSRLDPTGFVLPPGTSRAVPAPSGWSGRVWARTGCAQDATGK

SEQ ID NO: 101820 - protein, 67 aa, Setaria italica
  Transcript Sequence Number=SeqID_35846
GSGSFWKFNIKIVKTRNDGQLVLRVVKVQRDEVNIYKCYCIYAVFGGLYVSMYHHRLFLYHALLHRV

SEQ ID NO: 101821 - protein, 264 aa, Setaria italica
  Transcript Sequence Number=SeqID_35847
  Gene Ontology: Mol. function=protein tyrosine phosphatase activity; Cellular component=integral to plasma membrane; Biological process =protein amino acid dephosphorylation
  Homolog annotation: Hit_ID=Q53NQ7; Match level="QueryCoverage=86%, HitCoverage=100%, E-value=8e-86, Identity=64%"; Hit description =Protein-tyrosine phosphatase
  Pfam annotation: Domain name=Y_phosphatase; Domain location=26-253; Score=312.5; E_value=8.8e-91; Accession=PF00102.19; Description =Protein-tyrosine phosphatase
AKEFWNLPDIGTVPPSSQKSAREAVNRGRNRYTDVLPIDKTRVRLQSPTGNDYINASFINTGGRYQTKFISTQGPLARTIEDFWQMIYENHCPVIVMLTKFDGYKCDEYLPLSKGQGAFGKFNIKIVKTRNDGQLVLRVVKVQRDESDSVHSLLHIEHSEWPDHGVPSNSNAVRQILKRLYHIPREHPIVAHCSAGIGRTGAYITIHNAIDRILLGDQGAVNLAETLKKFRSERPGMVQTEEQFKFCHQAIADELKDLISNSKH

SEQ ID NO: 101822 - protein, 77 aa, Setaria italica
  Transcript Sequence Number=SeqID_35848
VGRRERRVGGARVHPADRAPEQLRRAVRVKHDPVLKSQSLRFCTLSCSLLREVFGSLFGILATITEKYGMVLVLYKL

SEQ ID NO: 101823 - protein, 49 aa, Setaria italica
  Transcript Sequence Number=SeqID_35849
  Gene Ontology: Mol. function=electron carrier activity; Cellular component=integral to membrane; Biological process=oxidation reduction
  Homolog annotation: Hit_ID=Q43257; Match level="QueryCoverage=83%, HitCoverage=7%, E-value=8e-12, Identity=75%"; Hit description =Cytochrome P450 71C4
ANLMYCFDWTLPAGMEKEDIDMTEVFGLTVHRKEKLILVPKPHGTLLTP

SEQ ID NO: 101824 - protein, 103 aa, Setaria italica
  Transcript Sequence Number=SeqID_35850
  Gene Ontology: Mol. function=hydrolase activity, hydrolyzing O -glycosyl compounds; Biological process=carbohydrate metabolic process
  Homolog annotation: Hit_ID=B6U0V2; Match level="QueryCoverage=94%, HitCoverage=16%, E-value=2e-28, Identity=63%"; Hit description =Hydrolase, hydrolyzing O-glycosyl compounds
RPDLTWALVPAMANVQKALADLGLADAVKVSTPVAFSAVDVSWPPSDGRFRNDLAEPVMRPMLDLLQRTGSYLTINLYPYFAYAAQSASAISRDYFLGNPQPR

SEQ ID NO: 101825 - protein, 65 aa, Setaria italica
  Transcript Sequence Number=SeqID_35851
EGCGARHRNSQDGGAVLREEMGCGARHRNSQDGGAVLREERIGRWPSSEDGKKKERRIEGQKGVT

SEQ ID NO: 101826 - protein, 81 aa, Setaria italica
  Transcript Sequence Number=SeqID_35852
AGSLADIFVKRPTKLEQAKLASAAEEKLASGLNPVEERRRAREKELLDVWGGMGLGNSMKPHVSKIERDKAAYRIAEAEQK

SEQ ID NO: 101827 - protein, 79 aa, Setaria italica
  Transcript Sequence Number=SeqID_35853
  Gene Ontology: Mol. function=protein serine/threonine kinase activity; Cellular component=integral to membrane; Biological process=protein amino acid phosphorylation
  Homolog annotation: Hit_ID=Q9LJF3; Match level="QueryCoverage=98%, HitCoverage=6%, E-value=1e-09, Identity=47%"; Hit description =Receptor-like protein kinase BRI1-like 3
  Pfam annotation: Domain name=LRR_1; Domain location=11-34; Score=6.2; E_value=20; Accession=PF00560.25; Description=Leucine Rich Repeat
  Pfam annotation: Domain name=LRR_1; Domain location=36-59; Score =11.7; E_value=1.7; Accession=PF00560.25; Description=Leucine Rich Repeat
  Pfam annotation: Domain name=LRR_1; Domain location=61-79; Score=2.2; E_value=1.1e+02; Accession=PF00560.25; Description=Leucine Rich Repeat
  Pfam module annotation: Pfam domain module=LRR_1::LRR_1::LRR_1; Domain location=11-34::36-59::61-79
VSAYDFGGCANLTVLDWSNNGLSGARLPPGLASCHRLETLDMSGNKLLAGPIPAFLTGFSSLRRLALAGNELSGQIPDE

SEQ ID NO: 101828 - protein, 41 aa, Setaria italica
  Transcript Sequence Number=SeqID_35854
RSLILVKHLTVHDSMLMYKLSGNIRFILEGNGVMSIGYDQK

SEQ ID NO: 101829 - protein, 129 aa, Setaria italica
  Transcript Sequence Number=SeqID_35855
  Gene Ontology: Mol. function=structural constituent of ribosome; Cellular component=ribonucleoprotein complex; Biological process =translation
  Homolog annotation: Hit_ID=B4FDT0; Match level="QueryCoverage=98%, HitCoverage=99%, E-value=3e-54, Identity=81%"; Hit description=40S ribosomal protein S20
  Pfam annotation: Domain name=Ribosomal_S10; Domain location=30-126; Score=139.3; E_value=1.2e-38; Accession=PF00338.14; Description =Ribosomal protein S10pS20e
MAAADVAYAPPMKSGKAGYEAGLLEAQHRIRITLSSRSVKNLEKVVGDLVKGAKGKELKLKGPVRMPTKVLHITTRKSPCGEGTNTWDRFEMRIHKRVIDLVSTPDVVKQITSITIEPGVEVEVTISEA

SEQ ID NO: 101830 - protein, 249 aa, Setaria italica
  Transcript Sequence Number=SeqID_35856
  Gene Ontology: Mol. function=transferase activity, transferring phosphorus-containing groups; Cellular component=TORC2 complex; Biological process=negative regulation of cell cycle arrest in response to nitrogen starvation
  Homolog annotation: Hit_ID=Q5EFI5; Match level="QueryCoverage=100%, HitCoverage=10%, E-value=1e-122, Identity=87%"; Hit description =Target of rapamycin
  Pfam annotation: Domain name=HEAT; Domain location=135-171; Score =21.6; E_value=0.0033; Accession=PF02985.14; Description=HEAT repeat
  Pfam annotation: Domain name=HEAT; Domain location=94-130; Score=3.1; E_value=21; Accession=PF02985.14; Description=HEAT repeat
  Pfam module annotation: Pfam domain module=HEAT::HEAT; Domain location=135-171::94-130
ARDLSGVSFLRFMDQLYEQISSLLQSNDIAENLLALRAIDALIDMPFGEGASKVSKFASFLRNVFDVKRDPEILVPASAVLGHLAKAGGAMTADEVERQIKTALGWLGGDRVEYRRFAAVLILKEMAENASTVFNVHVPEFVDAIWVALRDPKQAVRERAVEALRACLHVIEKRETRWRVQWYYRMCEAAQVGLGRNASVHSIHGSLLAVGELLRNTGEFMMSRYREVADIVLDYLKHRDQLVRRSITS

SEQ ID NO: 101831 - protein, 196 aa, Setaria italica
  misc_feature (61)..(61): Xaa can be any naturally occurring amino acid
  Transcript Sequence Number=SeqID_35857
  Homolog annotation: Hit_ID=Q9SRR5; Match level="QueryCoverage=84%, HitCoverage=91%, E-value=3e-39, Identity=53%"; Hit description =F21O3.22 protein
MDESDEHSNGNHHHGYEWKFPAALSANTTSVHVTALDGVVNVNSLFTVAVFVGLSPGDPGXLRSLAGDPSCDAGPGVARSLLVLEVVAFSSFLFSSLVAQGLKLALNLINSKDPHDALRAHIDARVLRLGMLASAVGSVVGCVFLMVSMVMVVQIRLGTLGCASNRAAAKAAAGLVGLVTTALAVYVGTVFYTFTH

SEQ ID NO: 101832 - protein, 106 aa, Setaria italica
  Transcript Sequence Number=SeqID_35858
TGARLPYKHLSSEAEVLFSILPSDYAIARKRKTIRYKERGLWLSSSSHTLNKPKRERWMKPMSILELLLLPDPLAPPRDESRCCCGWTASSALHLLLWLPLLPLSV

SEQ ID NO: 101833 - protein, 356 aa, Setaria italica
  Transcript Sequence Number=SeqID_35859
  Gene Ontology: Mol. function=hydrolase activity
  Homolog annotation: Hit_ID=B4FRE0; Match level="QueryCoverage=98%, HitCoverage=99%, E-value=1e-156, Identity=74%"; Hit description =Monoglyceride lipase
  Pfam annotation: Domain name=Abhydrolase_1; Domain location=60-284; Score=20.7; E_value=0.00012; Accession=PF00561.12; Description =alphabeta hydrolase fold
MDVQYHEEYVRNPRGVQLFTCGWLPASSSPKALVFLCHGYGMECSDFMRACGIKLATAGYGVFGIDYEGHGKSMGARCYIQKFENLVADCDRFFKSICAMEDYRNKSRFLYGESMGGAVALLLHRKDPIFWDGAVLVAPMCKISEKVKPHPVVITLLTQVEEIIPKWKIVPTKDVIDSAFKDPVKREKIRKNKLIYQDKPRLKTALELLRTSMDVEDSLSEVRMPFFILHGEADMVTDPEVSRALYERAASTDKTIKLYPGMWHGLTAGEPDENVELVFSDIVAWLDERSRHWKPEERVRPPSEPEMFHQVAPTKITRVASSGGTEGPVPAQGRPQRRGSFLCGLGGRPHQQQCRM

SEQ ID NO: 101834 - protein, 107 aa, Setaria italica
  misc_feature (57)..(57): Xaa can be any naturally occurring amino acid
  Transcript Sequence Number=SeqID_35860
  Gene Ontology: Mol. function=hydrolase activity
  Homolog annotation: Hit_ID=B4FRE0; Match level="QueryCoverage=45%, HitCoverage=13%, E-value=1e-14, Identity=77%"; Hit description =Monoglyceride lipase
LLPALLFDDYSLSDGLLDRASSDGRLVDDVCRAQEYVRNPRGVQLFTCGWLPASSSXPKALVFLCHGYGMECSDFMRGALQLSCSCRHFLMLFPYRCANQRGSSGHA

SEQ ID NO: 101835 - protein, 140 aa, Setaria italica
  misc_feature (24)..(24): Xaa can be any naturally occurring amino acid
  misc_feature (65)..(65): Xaa can be any naturally occurring amino acid
  Transcript Sequence Number=SeqID_35861
  Gene Ontology: Cellular component=protein complex; Biological process= protein polymerization
QEHNFLSNSPGFGIAQLWAKERYXASGSSKNDELDIVTLPVGVKLSKVQSDHSTKITTRLRKLPXNAGTTVATGHAAFAATFSDVRLEKVMDMCSSAVTFLRGRMDRSRKRGSNSISSRAALMLVSFSISCILISDVMLT

SEQ ID NO: 101836 - protein, 186 aa, Setaria italica
  Transcript Sequence Number=SeqID_35862
  Gene Ontology: Cellular component=protein complex; Biological process= protein polymerization
  Homolog annotation: Hit_ID=B9S7B0; Match level="QueryCoverage=97%, HitCoverage=24%, E-value=2e-26, Identity=40%"; Hit description=1 -phosphatidylinositol-4-phosphate 5-kinase, putative
  Pfam annotation: Domain name=MORN; Domain location=133-155; Score =15.8; E_value=0.12; Accession=PF02493.12; Description=MORN repeat
  Pfam annotation: Domain name=MORN; Domain location=156-178; Score =25.9; E_value=0.00017; Accession=PF02493.12; Description=MORN repeat
  Pfam module annotation: Pfam domain module=MORN::MORN; Domain location=133-155::156-178
RQLIAQLWAKERTMASGSSKNDELDIVTLPVGVKLSKVQSDHSPNTQLETPDAGTTVATGHAAFAATFSDVRLEKVMDMCSSAVTFLRGRMDRSRKRGSNSISSRAALMLDAEREPEKTWSPVVEIRYRGGIYRGRCQEGVPEGKGRLTFSAGSFYDGLWRYGKRSGLGTLFHSNGDVYHGTWRTL

SEQ ID NO: 101837 - protein, 155 aa, Setaria italica
  Transcript Sequence Number=SeqID_35863
  Gene Ontology: Mol. function=kinase activity; Cellular component =protein complex; Biological process=protein polymerization
  Homolog annotation: Hit_ID=Q9SSG9; Match level="QueryCoverage=99%, HitCoverage=21%, E-value=1e-53, Identity=61%"; Hit description =F25A4.3
  Pfam annotation: Domain name=MORN; Domain location=115-137; Score =14.1; E_value=0.2; Accession=PF02493.12; Description=MORN repeat
  Pfam annotation: Domain name=MORN; Domain location=23-45; Score=15.8; E_value=0.12; Accession=PF02493.12; Description=MORN repeat
  Pfam annotation: Domain name=MORN; Domain location=46-68; Score=25.9; E_value=0.00017; Accession=PF02493.12; Description=MORN repeat
  Pfam annotation: Domain name=MORN; Domain location=69-91; Score=32.4; E_value=1.8e-06; Accession=PF02493.12; Description=MORN repeat
  Pfam annotation: Domain name=MORN; Domain location=92-114; Score=9.8; E_value=0.76; Accession=PF02493.12; Description=MORN repeat
  Pfam module annotation: Pfam domain module=MORN::MORN::MORN::MORN::MOR N; Domain location=115-137::23-45::46-68::69-91::92-114
DAEREPEKTWSPVVEIRYRGGIYRGRCQEGVPEGKGRLTFSAGSFYDGLWRYGKRSGLGTLFHSNGDVYHGTWRDDLIHGKGWYYFHSGDRWFANFWKGKANGEGRFYAKDGSIFFGHFQNGWRHGESLLVDANGLRWIEVWDEGVLVGRTKMEK

SEQ ID NO: 101838 - protein, 71 aa, Setaria italica
  Transcript Sequence Number=SeqID_35864
MVLVGCILGGDHGSYIKKSDTGSQLMPLVILLDSTCVLSQFMVIFLGPAKGYFVLKLWICSIDDLIHSNCG

SEQ ID NO: 101839 - protein, 48 aa, Setaria italica
  Transcript Sequence Number=SeqID_35865
AHCLYILSQEHTEVQTMAASAAFHCSARRCYIKLMMCVCYVYFYCISF

SEQ ID NO: 101840 - protein, 730 aa, Setaria italica
  misc_feature (160)..(160): Xaa can be any naturally occurring amino acid
  Transcript Sequence Number=SeqID_35866
  Gene Ontology: Cellular component=nucleus; Biological process =regulation of transcription, DNA-dependent
  Homolog annotation: Hit_ID=Q7X9T5; Match level="QueryCoverage=95%, HitCoverage=93%, E-value=0.0, Identity=52%"; Hit description =SCARECROW-like protein
  Pfam annotation: Domain name=GRAS; Domain location=355-726; Score =551.3; E_value=1.2e-162; Accession=PF03514.6; Description=GRAS family transcription factor
YGELSGMFCGGLSYDGYADHSSSSDYFRFIDPLPAVVPQIAAEPYSNPSSTVSRANTETDNPEDWEFISDESLNYISRMLMEEDIDEKCSMYQAESAALRAAAKPFYDILGHKFPPSPDHQLTPWSVDSPSESGSSSRTQSVASTVTSSSVGGAVDSNAXRRYDAGRSGQMESYRGLCGQSSQPLVGPSSDACSAAGVLEDPLITNGRIPEYLFESLPTWDFRRGIEEAQKFLPVRNKLVIDLEAGGVARPQEARKDVSLNARKADVLNSRKNRQSEDLDLMEGRNIKQSAFCSDEPDWIEMFDDLLRQTEKKATDLRELMRNEASKNSQVTQTKGPSGPRTRGRKPTKKDVVDLRTILIHCAQAVAADDRRTANELLKQIRHHSKPNGDGAQRLAHCFADGLEARLAGTGSQLYHKLVAKRTTASDMLKAYHLYLAACPFKRLSHFLSNQTILSMIKNASKVHIIDFGIYFGFQWPCLIRRLSKREGGPPVLRITGIDVPQPGFRPTERIEETGQRLAEYAKKFNVPFEYQGIASKWETIRVEDLKIGKDEVVIVNCLYRFRNLIDETVAVDSPRNRVLNTIRQVNPAIFIHGIVNGSYSVPFFITRFREALFHFSALFDMLETTVPRDDAQRALIERDLFGREALNVIACEGSDRVERPETYKQWQVRNLRAGFVQSPLNQEIVMKAKDKVKDIYHKDFVIDEDSGWLLQGWKGRIIYAISTWKPKNN

SEQ ID NO: 101841 - protein, 122 aa, Setaria italica
  Transcript Sequence Number=SeqID_35867
  Gene Ontology: Mol. function=transferase activity; Biological process= glutamine metabolic process
  Homolog annotation: Hit_ID=B9SQW3; Match level="QueryCoverage=95%, HitCoverage=46%, E-value=7e-20, Identity=43%"; Hit description=GMP synthase [glutamine-hydrolyzing] subunit A, putative
AGEFPAAEDLGSYDGFVVSGSPHDAHGEEPWVRCLCALVQALHAMGKRVLGICFGHQVLCRALGGRVGRARGGWDVGVRTVTFARGLQDHRSLLGSLGELPRSAAIVEVHRDEVWEAPPGAT

SEQ ID NO: 101842 - protein, 73 aa, Setaria italica
  Transcript Sequence Number=SeqID_35868
MVAEAEVMHQAPVPVLEVQYHRCVTKGVDEVVGMSAAAAAVAAPAEVEVEVEVAVEVSRMGLEQPEAAPSVSV

SEQ ID NO: 101843 - protein, 222 aa, Setaria italica
  Transcript Sequence Number=SeqID_35869
  Gene Ontology: Mol. function=two-component response regulator activity; Cellular component=endoplasmic reticulum membrane; Biological process=two-component signal transduction system (phosphorelay)
  Homolog annotation: Hit_ID=B0LSM7; Match level="QueryCoverage=99%, HitCoverage=30%, E-value=9e-44, Identity=42%"; Hit description =Ethylene receptor (Fragment)
  Pfam annotation: Domain name=Response_reg; Domain location=104-216; Score=37.3; E_value=5.9e-08; Accession=PF00072.16; Description =Response regulator receiver domain
HSSVKFVIGVKRQESADSSSSLAQFLRKPSTEGFDLRLSFSMCRKLVQMMQGNIWAILDGQGLPESMTLVLRFQLQPSLSGSSLRGSFDLQYPSPSSQIAGLKVLLIDDDDINLVVARKLLEKLGCTVSSLPSGSGFMNSVGPTSTLFQLVVVNLEITAVNPLDVASRIRQYRSTQWPLVMTMTSEHNVWEKCAQSGINGVLKKPLVLQEIKDELTRILQNT

SEQ ID NO: 101844 - protein, 72 aa, Setaria italica
  Transcript Sequence Number=SeqID_35870
NGHNDVSAQILTCWQIFLHIYIYVNYDYNRIDRGVTELRIIMKAPISNSINELLYHNSHLYMFALQVLSCMQ

SEQ ID NO: 101845 - protein, 442 aa, Setaria italica
  misc_feature (123)..(123): Xaa can be any naturally occurring amino acid
  Transcript Sequence Number=SeqID_35871
  Gene Ontology: Mol. function=metal ion transmembrane transporter activity; Cellular component=membrane; Biological process=metal ion transport
  Homolog annotation: Hit_ID=B9HF71; Match level="QueryCoverage=91%, HitCoverage=100%, E-value=1e-101, Identity=51%"; Hit description =Magnesium transporter (Fragment)
  Pfam annotation: Domain name=CorA; Domain location=23-441; Score =370.1; E_value=4e-108; Accession=PF01544.10; Description=CorA-like Mg2+ transporter protein
MRPHATGTGGGVGRRKAGAAAAAASREWMVVPASGPARVEEAGKHAVMARTGLPARDLRVLDPLLSYPSTIMGRERAIVVNLERVKAVITAAEVLLPNSKDPAFTRFVRDLQTRVLASSSDQXADLTDMEGESSAVASPFPVPNSSKGHELEMTKSTSVVPEMTSSSSMPNLAAAAKDGNTKVLPFEFRALEVCLESACRSLEEETSTLEQEAYPALDELTSKISTLNLERVRQIKSRLVAISGRVQKVRDELEHLLDDEMDMAEMYLTEKLTQQEISEASSRVEVDDPSQTEEDRDEDYRSEPDGSNGSFIGYKPHIEELEMLLEAYFVQIDGTLNKLSHLREYVDDTEDYINIMLDDKQNQLLQMGVMLSTATVVITAGVAVVGLFGMNIGISLYTTPTTAEETRAANVKFWETTSGTVAGCVILYIIAMGWGKRSGLLQ

SEQ ID NO: 101846 - protein, 160 aa, Setaria italica
  misc_feature (48)..(48): Xaa can be any naturally occurring amino acid
  Transcript Sequence Number=SeqID_35872
  Gene Ontology: Mol. function=protein dimerization activity; Cellular component=nucleus; Biological process=regulation of transcription, DNA-dependent
  Homolog annotation: Hit_ID=B4FRB4; Match level="QueryCoverage=99%, HitCoverage=44%, E-value=1e-77, Identity=89%"; Hit description=BZIP transcription factor ABI5
  Pfam annotation: Domain name=bZIP_1; Domain location=78-141; Score =41.7; E_value=2.8e-09; Accession=PF00170.13; Description=bZIP transcription factor
  Pfam annotation: Domain name=bZIP_2; Domain location=78-133; Score =41.9; E_value=2.4e-09; Accession=PF07716.7; Description=Basic region leucine zipper
  Pfam module annotation: Pfam domain module=bZIP_1::bZIP_2; Domain location=78-141::78-133
  Subcellular localization annotation: CTP_CleavageSite=96; ConfidenceScore=5.22e-01
AMGFAPVGIGDQAMGNGLMPGVAGMASAAVTVSPVDTSMAQLDSVGNXERDLSSPMAPVPYPFEGVIRGRRSGAGVEKVVERRQRRMIKNRESAARSRARKQAYTMELEAEVQKLKELNAELQKKQDEMMEMQKNQVLEVVSNPYAQKKRCLRRTLTGPW

SEQ ID NO: 101847 - protein, 69 aa, Setaria italica
  Transcript Sequence Number=SeqID_35873
  Gene Ontology: Mol. function=protein serine/threonine kinase activity; Biological process=protein amino acid phosphorylation
  Homolog annotation: Hit_ID=Q65X94; Match level="QueryCoverage=100%, HitCoverage=7%, E-value=5e-27, Identity=82%"; Hit description =Putative receptor like protein kinase
LGQGGFGKVYSGSLADGTPVAVKLRSQTSNQGVKEFLAEAQILTRIHHKNLVSMIGYCKDGHHMGLVYE

SEQ ID NO: 101848 - protein, 96 aa, Setaria italica
  Transcript Sequence Number=SeqID_35874
CRTNYKTGIHTDNYISQELKQASWFGDQCKISKLTKGVKYETVLNRRICRSSLCSSRTTELFSCFIQLFLMQHRKMHLEVTKSSDVKRRWVRDSPS

SEQ ID NO: 101849 - protein, 53 aa, Setaria italica
  Transcript Sequence Number=SeqID_35875
KKSRTTVRASTLVSSNRWSHALTRNLETIQQATRTMGCPISCLIVVYNSLICA

SEQ ID NO: 101850 - protein, 137 aa, Setaria italica
  Transcript Sequence Number=SeqID_35876
  Gene Ontology: Mol. function=hydrolase activity, acting on acid anhydrides, catalyzing transmembrane movement of substances; Cellular component=integral to membrane; Biological process=calcium ion transport
  Homolog annotation: Hit_ID=B9HAX0; Match level="QueryCoverage=100%, HitCoverage=38%, E-value=1e-50, Identity=70%"; Hit description =Autoinhibited calcium ATPase
  Pfam annotation: Domain name=Cation_ATPase_N; Domain location=1-64; Score=32.6; E_value=1.6e-06; Accession=PF00690.18; Description =Cation transporterATPase, N-terminus
LKTNSEKGIHGDEADLSCRANAFGANRYPRKKGRSFWVFLWEACQDMTLVILIIAAIISLVLGIATEGIKEGWYDGTSIAFAVFLVIVVTAVSDYKQSLQFQHLNEEKQNIQVEVIRGGRRIQVSIFDIVVGDVVVL

SEQ ID NO: 101851 - protein, 54 aa, Setaria italica
  Transcript Sequence Number=SeqID_35877
AGGQQLTQGNGLTTLKQKPIGSSTRLMTPSRLLSCYLQTPAIYCHQNKDISRVF

SEQ ID NO: 101852 - protein, 550 aa, Setaria italica
  Transcript Sequence Number=SeqID_35878
  Gene Ontology: Mol. function=DNA binding
  Homolog annotation: Hit_ID=B9T3J5; Match level="QueryCoverage=23%, HitCoverage=9%, E-value=3e-28, Identity=45%"; Hit description=Nfrkb, putative
MGIVKIASGEPAAKSGYSCGDEDLTRDERMLLQSFPVHEPDDSELAEVDCELAMSRGQICNVPYGLYDLPDLMEVLSLETWNSCLTEDDRFCLAASLPDMEQHDFVTTMKELFNGDAMFFGSPLRSFFLRLKGGLYSPQVSQARELLMTFQKRRHYHFLKLYHDGMVGKFASVAKVSRSSDMSTSLRAKVPISHNWAYEKSLPCVGLSISTLPTTIKGETATVLPMKRAKLMDVSSTTHCSTIHNETDYAAKSAEMNSLESPIFHPPSHPRQNCSKVPKGVLKIRTGCASLINESKGSHHRPGLILVDQLGMQSSSFCAPPHAFAHDVHGFSENSSSHINTVSGTSASQQPSPLQWKGTLETYALIGKSPPGVQMTVPEEHNAVYPSMMLRDFYPAANLRLTCVNDAYDTRKCAHMKDLLKNFGHQNNIAHQSSPDPCARASDDHQMNGYKTTHSSRNAESISEMLNLGTRMYPPHNSFPEQLETMSKYHDGIKLEAPPAKPVTEVGEARQFAYTYARRKPHKRSTMVEDAVSPSVLNSMTNMKAKAIKL

SEQ ID NO: 101853 - protein, 260 aa, Setaria italica
  misc_feature (31)..(31): Xaa can be any naturally occurring amino acid
  Transcript Sequence Number=SeqID_35879
  Gene Ontology: Mol. function=nucleic acid binding; Cellular component= ribonucleoprotein complex; Biological process=endonucleolytic cleavage in ITS1 to separate SSU-rRNA from 5.8S rRNA and LSU-rRNA from tricistronic ...
  Gene Ontology: Biological process=rRNA transcript (SSU-rRNA, 5.8S rRNA, LSU-rRNA)
  Homolog annotation: Hit_ID=B9SYR4; Match level="QueryCoverage=98%, HitCoverage=49%, E-value=7e-62, Identity=51%"; Hit description=WD -repeat protein, putative
  Pfam annotation: Domain name=BING4CT; Domain location=80-160; Score =172.0; E_value=1.7e-48; Accession=PF08149.3; Description=BING4CT (NUC141) domain
MLCHHGPVTAVAFDRGGHLMATAGVDRKIKXIWDLRKYEVVNSYAARAQSLDFSQKGLLACSNGSLVEIYRDFGGHDYRLYMKHRMMKGYQVGKVLFRPYEDILGIGHSMGLSSILVPGSGEPNFDTFVANPMETTKQKREKEVHALMDKLLPDTIMLNPNLIATVRAPKKKEKKTKKEIEEEMEEAIEAAKNTERKKKTKGRSKPSKRTRKKEEDVFRAKRPFLDQSKEVDGRPDKKQRIGEDMELPKALQRFAKKPQS

SEQ ID NO: 101854 - protein, 71 aa, Setaria italica
  Transcript Sequence Number=SeqID_35880
TRSRPTTSRRSFRVQGAAAPMTETRSSWASMAWHRISPLNVQTSLELVPDMNNPINLNTVIIARSSHPASI

SEQ ID NO: 101855 - protein, 174 aa, Setaria italica
  misc_feature (42)..(42): Xaa can be any naturally occurring amino acid
  misc_feature (94)..(94): Xaa can be any naturally occurring amino acid
  Transcript Sequence Number=SeqID_35881
MMPKSRASPEQIETYLNQERSKRREMLQKFLDQCRKFQVSSXTSSLTVLTSEQVLNRRTKLKTQISFFLYIQVTVDVYLIESDQIANAIIELVXCPLYCEVKIICDGKEVTTETTTDPTPPLSPAPIDNNSRSNNTTPLSSTPNHDKPDANGEEKDGECRERKKITKFLRCFSF

SEQ ID NO: 101856 - protein, 167 aa, Setaria italica
  misc_feature (29)..(29): Xaa can be any naturally occurring amino acid
  Transcript Sequence Number=SeqID_35882
  Gene Ontology: Mol. function=protein serine/threonine kinase activity; Cellular component=ubiquitin ligase complex
  Homolog annotation: Hit_ID=B9SWQ4; Match level="QueryCoverage=80%, HitCoverage=52%, E-value=7e-36, Identity=53%"; Hit description=ATP binding protein, putative
  Subcellular localization annotation: CTP_CleavageSite=75; ConfidenceScore=5.16e-01
RRWSRRRRGRRAAASPQRSARPPPAVAAXDVYVAVGKGGSSMAALSWALGRLTRPRSFVYLVHVFPVVTSIPTPLGMMPKSRASPEQIETYLNQERSKRREMLQKFLDQCRKFQVTVDVYLIESDQIANAIIELVPVLHIKQLVLGISKSNVRKLKRGNTIAGQVQK

SEQ ID NO: 101857 - protein, 317 aa, Setaria italica
  misc_feature (137)..(137): Xaa can be any naturally occurring amino acid
  misc_feature (181)..(181): Xaa can be any naturally occurring amino acid
  misc_feature (203)..(203): Xaa can be any naturally occurring amino acid
  Transcript Sequence Number=SeqID_35883
  Homolog annotation: Hit_ID=B6TS32; Match level="QueryCoverage=75%, HitCoverage=64%, E-value=1e-28, Identity=37%"; Hit description=F-box domain containing protein
PHADRREWRALDATAASSSRVRSRGLLRVRSWGPRHLVVWDPVTDEWSQLPTGQLLADYWNVAVLCVACGTGGACDHIDCHHGHFFFVFLGTGAEHMTLWVYSSEAGTWSEPTSVVQFPKYHVDEPPSAIVGNALYXSSRRILKYDLATREINVHLQPPGSYRTCTTIMTVEDGGLGVARXKGPDSLWSMEASPDGGMGWAQXVIDLPKLLSVDANSICSDFLGFAHGVGVIFVGTGDGLFSFDLKSGQVRNVCEAACYFNSIRGVVPSMSFHTPGVDDSGVVLLDLLLLSIGAGDNGGVGSVVVSVVTSLPSQMIL

SEQ ID NO: 101858 - protein, 78 aa, Setaria italica
  Transcript Sequence Number=SeqID_35884
CCCPLVELLGTYGWRLHIPANMSMDDAYSTGRPAAGSQTSSFAGSSNVLAAAGSIDDAPKGKLAQSTLCNKQEGLRTN

SEQ ID NO: 101859 - protein, 159 aa, Setaria italica
  misc_feature (96)..(96): Xaa can be any naturally occurring amino acid
  misc_feature (121)..(121): Xaa can be any naturally occurring amino acid
  misc_feature (142)..(142): Xaa can be any naturally occurring amino acid
  Transcript Sequence Number=SeqID_35885
  Gene Ontology: Mol. function=RNA binding
  Homolog annotation: Hit_ID=B6TW67; Match level="QueryCoverage=93%, HitCoverage=37%, E-value=1e-37, Identity=59%"; Hit description=CFM6
  Subcellular localization annotation: CTP_CleavageSite=68; ConfidenceScore=5.38e-01
MLWQRSCKVMATRVLSRQNLRKLATFTLQNISQSQLISPFPPGLRSGAVSPSKCFSPLYLFGHSWAVRWATYGSVNLVVSDDGKPKFQIEEVEPSXKGRYLTKKRLKLQRKRVKKKRKEAXIKNDPRRIRPKGKKIKQKFPXAEARLKYKIDKAKIKGS

SEQ ID NO: 101860 - protein, 151 aa, Setaria italica
  Transcript Sequence Number=SeqID_35886
  Gene Ontology: Mol. function=receptor activity; Cellular component =integral to membrane
  Homolog annotation: Hit_ID=B9T3A9; Match level="QueryCoverage=88%, HitCoverage=25%, E-value=5e-32, Identity=51%"; Hit description=Ptm1, putative
RFLLAVALALLLRPGEASVHEYRGLGFANKGNAFILHAGSEGLYAASSANATAEDDEDAAAAADAFIRFDKITFRRPEDAIDSVKEATSAKVQVLVFEIEDREIIGGSAYGGQKAICCTSDLAKLGACTEGSVIYRPSQVNPGWPKLLCIF

SEQ ID NO: 101861 - protein, 231 aa, Setaria italica
  Transcript Sequence Number=SeqID_35887
  Gene Ontology: Mol. function=chalcone isomerase activity; Biological process=flavonoid biosynthetic process
  Homolog annotation: Hit_ID=Q84T92; Match level="QueryCoverage=95%, HitCoverage=93%, E-value=1e-98, Identity=83%"; Hit description =Chalcone--flavonone isomerase
  Pfam annotation: Domain name=Chalcone; Domain location=15-213; Score =279.0; E_value=1.1e-80; Accession=PF02431.7; Description=Chalcone -flavanone isomerase
GTVVRKLGRSNGVVFPPVARPPGSARPHFLAGAGVRGLEIGGNFIKFTAIGVYLEEDAAVSALAKKWAGKSADELASDVAFFRDVVTGDFEKFTRVTMILPLTGEQYSDKVTENCVAYWKATGVYTDAEGAAVDKFKEAFKPETFPPGASILFTHSPAGVLTVAFSKDSSVPEAGGVAIENRPLCEAVLESIIGKHGVSPAAKLSIAARVSELLNGAETSPAGDAQQAEPV

SEQ ID NO: 101862 - protein, 137 aa, Setaria italica
  Transcript Sequence Number=SeqID_35888
  Gene Ontology: Mol. function=chalcone isomerase activity; Biological process=flavonoid biosynthetic process
  Homolog annotation: Hit_ID=Q08704; Match level="QueryCoverage=89%, HitCoverage=52%, E-value=2e-56, Identity=86%"; Hit description =Chalcone--flavonone isomerase
  Pfam annotation: Domain name=Chalcone; Domain location=1-137; Score =65.4; E_value=2.1e-16; Accession=PF02431.7; Description=Chalcone -flavanone isomerase
YYNAAAVSALAKKWAGKSADELASDVAFFRDVVTGDFEKFTRVTMILPLTGEQYSDKVTENCVAYWKATGVYTDAEGAAVDKFKEAFKPETFPPGASILFTHSPAGVLTVAFSKDSSVPEAGGVAIENRPLCEAVLE

SEQ ID NO: 101863 - protein, 233 aa, Setaria italica
  Transcript Sequence Number=SeqID_35889
  Gene Ontology: Mol. function=chalcone isomerase activity; Biological process=flavonoid biosynthetic process
  Homolog annotation: Hit_ID=Q84T92; Match level="QueryCoverage=99%, HitCoverage=99%, E-value=1e-103, Identity=83%"; Hit description =Chalcone--flavonone isomerase
  Pfam annotation: Domain name=Chalcone; Domain location=13-211; Score =279.0; E_value=1.1e-80; Accession=PF02431.7; Description=Chalcone -flavanone isomerase
MAVSELAVDGVVFPPVARPPGSARPHFLAGAGVRGLEIGGNFIKFTAIGVYLEEDAAVSALAKKWAGKSADELASDVAFFRDVVTGDFEKFTRVTMILPLTGEQYSDKVTENCVAYWKATGVYTDAEGAAVDKFKEAFKPETFPPGASILFTHSPAGVLTVAFSKDSSVPEAGGVAIENRPLCEAVLESIIGKHGVSPAAKLSIAARVSELLNGAETSPAGDAQQAEPVPVSA

SEQ ID NO: 101864 - protein, 60 aa, Setaria italica
  misc_feature (14)..(14): Xaa can be any naturally occurring amino acid
  Transcript Sequence Number=SeqID_35890
EDDKKDVPMPTILXKRRGQGTARRRRELQAPAAAKPDAAAAQNEKKFSSIWFSLVASFDQ

SEQ ID NO: 101865 - protein, 440 aa, Setaria italica
  Transcript Sequence Number=SeqID_35891
  Gene Ontology: Mol. function=metal ion binding
  Homolog annotation: Hit_ID=Q60DL1; Match level="QueryCoverage=82%, HitCoverage=66%, E-value=1e-132, Identity=68%"; Hit description=Zinc finger, C3HC4 type (RING finger) containing protein
  Pfam annotation: Domain name=zf-C3HC4; Domain location=34-74; Score =28.2; E_value=3.4e-05; Accession=PF00097.17; Description=Zinc finger, C3HC4 type (RING finger)
LPFPRRGAGARARGAGGGAVVMVKRDLLARCMTCPLCRRLLRDATTISECLHTFCRKCIYQKFNDEEVECCPVCKIDLGCTPTEKLRADHSLQDVRSKLFPFKRKKIKAEEVPSPISLPTKRKERSISSLVVNTPKVKPTGLTGRRTRAVARKAAAAAALRGLGPIVDPVKKEIDSCDSNSQSSSLPANSSKAPQTRRQILSNAEASNHSSNKDTEGDSKELADKAELWQPLNCLVEAANRTKSFRSSSQNPIVKGEQLNGSPSSTYASKTKARENLQRSKIEDDKKDVPMPTILPKRRGQGTARRRRELQAPAAAKPDAAAAQNEKKFSSIWFSLVASFDQQGDPPLPQIPSHYLRIKDGNVPASSIQKYLMQKLSLPSESEVEIKCCEQPVNPMQPLRNLVELWLKGKATQATQTMTGSSAKEFVMVLTYGRPKAPGL

SEQ ID NO: 101866 - protein, 116 aa, Setaria italica
  Transcript Sequence Number=SeqID_35892
  Subcellular localization annotation: CTP_CleavageSite=59; ConfidenceScore=5.89e-01
TMTTAPPAARSPPPPPPRPPAPTRHPNPPRATPCRSVAAATSGRRCSSRTRSSGPRRPRCSSSPPPAAATTTTSCSSSRPTCRCRTSPAGCRASPTASRRRPPPSSGASTTSWRMQ

SEQ ID NO: 101867 - protein, 230 aa, Setaria italica
  Transcript Sequence Number=SeqID_35893
  Gene Ontology: Mol. function=translation initiation factor activity; Cellular component=cytoplasm; Biological process=translational initiation
  Homolog annotation: Hit_ID=B6T450; Match level="QueryCoverage=82%, HitCoverage=82%, E-value=1e-100, Identity=93%"; Hit description =Eukaryotic translation initiation factor 4E type 3
  Pfam annotation: Domain name=IF4E; Domain location=25-230; Score =341.2; E_value=2.1e-99; Accession=PF01652.10; Description=Eukaryotic initiation factor 4E
MEPAVEKKEAEQEEQQLPQARKEDATAAVVEEDEADSEETERRNRDLKAGLHPLRRKLMLWYTRRTPGARSQSYEDNIKKIIDFSTVESFWVCYCHLARPSSLPSPTDLHLFKDGIRPLWEDPANQNGGKWIIRFKKAVSGRFWEDLVLVLVGDQLDFSDDVCGVVLSVRFNEDILSVWNRNASDHQAVMTLRDSIKRHLKLPHSYLMEYKPHDASRRDNSSYRNTWLRG

SEQ ID NO: 101868 - protein, 81 aa, Setaria italica
  Transcript Sequence Number=SeqID_35894
REMGSPPPLPPPPPPRTNKQGNKLLFDFFVPFSLAAVGFYDFPHIILHMGPAVHRLSPRVLHFHHLEKLLVPKQPHSPLFA

SEQ ID NO: 101869 - protein, 46 aa, Setaria italica
  Transcript Sequence Number=SeqID_35895
VMTQYKQILWDQLAHRKPNHFLIPSKIQQPSCRCTFHKCAEEMEST

SEQ ID NO: 101870 - protein, 65 aa, Setaria italica
  Transcript Sequence Number=SeqID_35896
DRYSLGVIIMDLLVGCDKKKNFLWKEQGGRYKVDEVLQFWEGAFQTLAEEHRKLVKQQVKLCAEI

SEQ ID NO: 101871 - protein, 88 aa, Setaria italica
  Transcript Sequence Number=SeqID_35897
RAWMQRRRRRRWMQRMEEAIRLTTQRISAALERLATERLGGPTAESTARYWAAVRGTNPSLGRLVWPPPFRMRASPTTRVQDEELRPR

SEQ ID NO: 101872 - protein, 45 aa, Setaria italica
  Transcript Sequence Number=SeqID_35898
  Gene Ontology: Mol. function=hydrolase activity
  Homolog annotation: Hit_ID=B6TCT5; Match level="QueryCoverage=100%, HitCoverage=12%, E-value=1e-16, Identity=91%"; Hit description =Catalytic/ hydrolase
VQLSRYISKKLPWVIYHELPTAGHLFPAADGMPDVIVRSLLLGDE

SEQ ID NO: 101873 - protein, 127 aa, Setaria italica
  Transcript Sequence Number=SeqID_35899
  Gene Ontology: Mol. function=dihydrodipicolinate reductase activity; Cellular component=cytoplasm; Biological process=lysine biosynthetic process via diaminopimelate
  Homolog annotation: Hit_ID=B6TVJ6; Match level="QueryCoverage=100%, HitCoverage=40%, E-value=2e-67, Identity=96%"; Hit description =Dihydrodipicolinate reductase
  Pfam annotation: Domain name=DapB_C; Domain location=1-127; Score =98.6; E_value=2.1e-26; Accession=PF05173.6; Description =Dihydrodipicolinate reductase, C-terminus
QAAIQASFHYSNVEIVESRPNPLDLPSQDAIQIANNISDLGQIYNREDMDTSSPARGQLLGEDGVRVHSMVLPGLVSSTSINFSGPGEMYTLRHDVTNVQCLMPGLIMAIRKVVRLKNLIYGLEKFL

SEQ ID NO: 101874 - protein, 53 aa, Setaria italica
  Transcript Sequence Number=SeqID_35900
VPAAEGLQSRLTMVLDRLTKFSEASLKCYEELKQNYEIAHDDYKRVGPNAQLA

SEQ ID NO: 101875 - protein, 99 aa, Setaria italica
  Transcript Sequence Number=SeqID_35901
  Gene Ontology: Mol. function=transcription regulator activity; Cellular component=nucleus
  Homolog annotation: Hit_ID=B6T4L8; Match level="QueryCoverage=83%, HitCoverage=30%, E-value=8e-25, Identity=72%"; Hit description =Amelogenin like protein
ASTVFPSQPPLAPSAVIEQSYATPPSLELKLFPGAESVEVHERSEDQEAPNHVARPQARYPPQSASWPVTLFSGLPRMEDEQCSSSTTSSSKETSTGRD

SEQ ID NO: 101876 - protein, 86 aa, Setaria italica
  Transcript Sequence Number=SeqID_35902
PRAQADGAEAEPAEAAAVAEKPPSPVRSKRASSPAKSPKSPADGAAGEKKRSTSPAKSKGPAAAAQLDGAKENSPSPKRSKTLAAK

SEQ ID NO: 101877 - protein, 177 aa, Setaria italica
  misc_feature (28)..(28): Xaa can be any naturally occurring amino acid
  misc_feature (114)..(114): Xaa can be any naturally occurring amino acid
  Transcript Sequence Number=SeqID_35903
  Gene Ontology: Mol. function=chlorophyll synthase activity; Cellular component=integral to membrane; Biological process=bacteriochlorophyl l biosynthetic process
  Homolog annotation: Hit_ID=Q5W6H5; Match level="QueryCoverage=87%, HitCoverage=39%, E-value=7e-67, Identity=83%"; Hit description =Chlorophyll synthase, chloroplastic
  Pfam annotation: Domain name=UbiA; Domain location=8-177; Score= -10.6; E_value=0.0011; Accession=PF01040.10; Description=UbiA prenyltransferase family
DVAKSIVCMIMSGPCLTGYTQPNILVCXTINDWYDRDIDAINEPYRPIPSGAISENEVITQIWVLLLAGLGLGALLDVWAGHDFPIVFYLAVGGSLLSYIYSAPPLKLKQNGWXIGNFALGASYISLPWWAGQALFGTLTPDIVVLTTLYSIAGVFLLHLLFPFFCSLYRHDASLFS

SEQ ID NO: 101878 - protein, 380 aa, Setaria italica
  Transcript Sequence Number=SeqID_35904
  Gene Ontology: Mol. function=chlorophyll synthase activity; Cellular component=integral to membrane; Biological process=bacteriochlorophyl l biosynthetic process
  Homolog annotation: Hit_ID=Q5W6H5; Match level="QueryCoverage=95%, HitCoverage=94%, E-value=1e-160, Identity=81%"; Hit description =Chlorophyll synthase, chloroplastic
  Pfam annotation: Domain name=UbiA; Domain location=103-376; Score =284.7; E_value=2.1e-82; Accession=PF01040.10; Description=UbiA prenyltransferase family
  Subcellular localization annotation: CTP_CleavageSite=48; ConfidenceScore=5.65e-01
MAAALLLAASTSSSSSAAFRPPLRLRSPTHPPHPRLIRTGRRPFPVVRAAETDATKDAKPKAPEKAPAADGSSFNQLLGIKGAKQETDIWKIRLQLTKPVTWPPLVWGVLCGAAASGNFHWTVEDVAKSIVCMIMSGPCLTGYTQTINDWYDRDIDAINEPYRPIPSGAISENEVITQIWVLLLAGLGLGALLDVWAGHDFPIVFYLAVGGSLLSYIYSAPPLKLKQNGWIGNFALGASYISLPWWAGQALFGTLTPDIVVLTTLYSIAGLGIAIVNDFKSIEGDRALGLQSLPVAFGMETAKWICVGAIDITQLSVAGYLLSTGKLYYALALLGLTIPQVVFQFQYFLKDPVKYDVKYQASAQPFFVLGLLVTALATSH

SEQ ID NO: 101879 - protein, 534 aa, Setaria italica
  misc_feature (15)..(15): Xaa can be any naturally occurring amino acid
  misc_feature (396)..(396): Xaa can be any naturally occurring amino acid
  Transcript Sequence Number=SeqID_35905
  Gene Ontology: Mol. function=hydrolase activity, hydrolyzing O -glycosyl compounds; Cellular component=cell wall; Biological process= carbohydrate metabolic process
  Homolog annotation: Hit_ID=B6UFQ7; Match level="QueryCoverage=100%, HitCoverage=93%, E-value=0.0, Identity=86%"; Hit description =Hydrolase, hydrolyzing O-glycosyl compounds
  Pfam annotation: Domain name=Glyco_hydro_10; Domain location=179-472; Score=120.8; E_value=4.6e-33; Accession=PF00331.12; Description =Glycosyl hydrolase family 10
GVRYDYRAYTECKPXTPEPALYNGGILRWASKITDFRTEDEGNYSPAFVLYNMSAAIAYSFSCWVKIEGPATAHVKAKILTLENAASKCIGTALVRNDCWSFLKGGFALNSSSQTSVLYFQTASPNASTISIRSASLQPFSPDQWNQHREDRIQLIRKRFVNVHVSNANGSRVVGANVSVHQIARDFPFGSAISKSILGNKPYQDWFNKRFNAAVFENELKWYATEPSPGKEDYTVADQLLQFVQSNDVMARGHNIFWEDPKYTPAWVKNLTGSELRAAVAGRIESLLSRYKGDFVHWDVSNEMLHFDFYENRLGGNATAEFFSTAKRADPLATLFLNDFNVVEVCDDLSSSADSYVSRLRQLADGGVTFEGIGLEGHFGKPNIPYVRAVLDKLGXLRLPIWLTEIDISSSFDQKTQAAYLEEVLREGFAHPSVDGIMLWTAMGRNASCYQMCLTDANFTNLPAGDVVDRLLEEWQTREVLGATNDRGSFNFSAFLGEYKLSVTYQNLTSEGTFSLARSDDTKHINVRLQGPAA

SEQ ID NO: 101880 - protein, 87 aa, Setaria italica
  misc_feature (86)..(86): Xaa can be any naturally occurring amino acid
  Transcript Sequence Number=SeqID_35906
TKTSCLFRLFFWFQPTHSFGTIVRTLLLSALLYFIVTLGRPRPPLSYRMTYGNAAIICFCTILNMQSIDSNPRSPKIHHFYLSDEXS

SEQ ID NO: 101881 - protein, 100 aa, Setaria italica
  Transcript Sequence Number=SeqID_35907
  Gene Ontology: Mol. function=glutamate-5-semialdehyde dehydrogenase activity; Cellular component=cytoplasm; Biological process=amino acid biosynthetic process
  Homolog annotation: Hit_ID=A1Z0K1; Match level="QueryCoverage=100%, HitCoverage=13%, E-value=4e-39, Identity=81%"; Hit description=Delta- 1-pyrroline-5-carboxylate synthetase
MATADRNRSFMKDVKRVIIKVGTAVVTRHDGRLALGRLGALCEQVKELNTLGYEVIMVTSGAVGVGRQRLKYRKLVNSSFADLQKPQMELDGKACAAVGQ

SEQ ID NO: 101882 - protein, 86 aa, Setaria italica
  Transcript Sequence Number=SeqID_35908
  Gene Ontology: Mol. function=zinc ion binding
  Homolog annotation: Hit_ID=Q2R175; Match level="QueryCoverage=100%, HitCoverage=34%, E-value=4e-25, Identity=66%"; Hit description=NIN -like protein 2, putative
YRTVSLTHAFPVGGAGVPGERGLPGRVFDAGAPEWTPNVQYYGTGEYARISYALIYDIQAALALPILEPATGSCVAVIELVTTSPR

SEQ ID NO: 101883 - protein, 48 aa, Setaria italica
  Transcript Sequence Number=SeqID_35909
RNKHILNKQACSFPISLSYPRKIHMLNIEKMITKIFLWASKTPVKTRQ

SEQ ID NO: 101884 - protein, 64 aa, Setaria italica
  Transcript Sequence Number=SeqID_35910
FFLEGWHHTAECIYICRGRPQLLISLVIMGEEEEGPFRWLELRHVVRRGHLLLELRQVCAPSCT

SEQ ID NO: 101885 - protein, 73 aa, Setaria italica
  Transcript Sequence Number=SeqID_35911
GDRRAAQRGRHYSLGRKMGAGKAAVLVEKGEAFKSDAAAPGKSRCATSTATLLRSPIALCSTPSHHAPPKSTR

SEQ ID NO: 101886 - protein, 65 aa, Setaria italica
  Transcript Sequence Number=SeqID_35912
  Gene Ontology: Mol. function=protein tyrosine kinase activity; Biological process=protein amino acid phosphorylation
  Homolog annotation: Hit_ID=Q00RM8; Match level="QueryCoverage=86%, HitCoverage=5%, E-value=1e-17, Identity=73%"; Hit description =H0814G11.12 protein
NAEFPVQNQDNTFHHNQSWRYPEGQSPMFQRYSYKETMKATDNFSTVIGKGGLETLSILFTAATE

SEQ ID NO: 101887 - protein, 43 aa, Setaria italica
  Transcript Sequence Number=SeqID_35913
  Gene Ontology: Mol. function=transferase activity, transferring groups other than amino-acyl groups
  Homolog annotation: Hit_ID=B6SRZ2; Match level="QueryCoverage=100%, HitCoverage=9%, E-value=4e-13, Identity=81%"; Hit description =Anthranilate N-benzoyltransferase protein 1
AQMFGSGTAYVTQHASKDDDGITVQFALEPEYLQCFEKVFYGE

SEQ ID NO: 101888 - protein, 385 aa, Setaria italica
  Transcript Sequence Number=SeqID_35914
  Gene Ontology: Mol. function=protein transporter activity; Cellular component=nuclear pore; Biological process=regulation of mitotic cell cycle
  Homolog annotation: Hit_ID=B9T1E9; Match level="QueryCoverage=100%, HitCoverage=35%, E-value=1e-166, Identity=74%"; Hit description =Importin beta-3, putative
  Pfam annotation: Domain name=Arm; Domain location=285-328; Score =10.0; E_value=0.65; Accession=PF00514.15; Description=Armadillobeta -catenin-like repeat
  Pfam annotation: Domain name=Arm; Domain location=331-370; Score =12.8; E_value=0.29; Accession=PF00514.15; Description=Armadillobeta -catenin-like repeat
  Pfam annotation: Domain name=Arm; Domain location=60-98; Score=3.1; E_ value=5; Accession=PF00514.15; Description=Armadillobeta-catenin-like repeat
  Pfam annotation: Domain name=HEAT; Domain location=18-54; Score=14.4; E_value=0.47; Accession=PF02985.14; Description=HEAT repeat
  Pfam annotation: Domain name=HEAT; Domain location=210-246; Score =5.7; E_value=9.8; Accession=PF02985.14; Description=HEAT repeat
  Pfam annotation: Domain name=HEAT; Domain location=251-287; Score =30.4; E_value=7.1e-06; Accession=PF02985.14; Description=HEAT repeat
  Pfam annotation: Domain name=HEAT; Domain location=293-330; Score =17.4; E_value=0.058; Accession=PF02985.14; Description=HEAT repeat
  Pfam annotation: Domain name=HEAT; Domain location=336-372; Score =15.6; E_value=0.2; Accession=PF02985.14; Description=HEAT repeat
  Pfam annotation: Domain name=HEAT; Domain location=64-100; Score=2.3; E_value=26; Accession=PF02985.14; Description=HEAT repeat
  Pfam annotation: Domain name=HEAT_PBS; Domain location=231-256; Score= 0.4; E_value=1e+02; Accession=PF03130.8; Description=PBS lyase HEAT -like repeat
  Pfam annotation: Domain name=HEAT_PBS; Domain location=272-309; Score= 19.2; E_value=0.018; Accession=PF03130.8; Description=PBS lyase HEAT -like repeat
  Pfam annotation: Domain name=HEAT_PBS; Domain location=315-341; Score= 0.7; E_value=91; Accession=PF03130.8; Description=PBS lyase HEAT-like repeat
  Pfam annotation: Domain name=HEAT_PBS; Domain location=357-382; Score= 1.7; E_value=64; Accession=PF03130.8; Description=PBS lyase HEAT-like repeat
  Pfam module annotation: Pfam domain module=Arm::Arm::Arm::HEAT::HEAT:: HEAT::HEAT::HEAT::HEAT::HEAT_PBS::HEAT_PBS::HEAT_PBS::HEAT_PBS; Domain location=285-328::331-370::60-98::18-54::210-246::251 -287::293-330::336-372::...
  Pfam module annotation: Domain location=64-100::231-256::272-309::315- 341::357-382
ALLIFARLADYIAESLLDHLMTIHNLLAAALAHPTSPDVRIAALGAAVNLVQCLPTNADRDKMQDLLPAMMRALTDCLNSGQEASAQEALELLVELAGAEPRFLRRQIADVVGAMLQVAEAAQLEDGTRHLAVEFVITLAEARERAPGMMRRLPQFVGRLFAVLMQMLLDVEDDPAWHSAETEDEDAGEGNNYGVAQECLDRLAIAIGGNAIVPIASELLPQYLSAPEWQKHHAALITLAQIAEGCAKVMLKNLEQVVSMILNGFQHPHPRVRWAAINAIGQLSTDLGPDLQVHYHQKVLPALANAMDDFQNPRVQAHAASAILNFSENCTPEILTPYLDGIVNKLLVLLQNGKQMVQEGALTALASVADSSQEHFKKYYDAVMP

SEQ ID NO: 101889 - protein, 113 aa, Setaria italica
  Transcript Sequence Number=SeqID_35915
  Gene Ontology: Mol. function=metallopeptidase activity; Cellular component=mitochondrial inner membrane; Biological process=protein complex assembly
  Homolog annotation: Hit_ID=B6TZZ7; Match level="QueryCoverage=99%, HitCoverage=55%, E-value=9e-54, Identity=84%"; Hit description=Ku70 -binding protein
  Pfam annotation: Domain name=Peptidase_M76; Domain location=1-111; Score=154.8; E_value=2.6e-43; Accession=PF09768.1; Description =Peptidase M76 family
SHMTLQDEINQVIIHEMIHAYDDCVGKNMDWKNCAHHACSEIRANHLSGDCHYKRELLRGFMKIRGHEQDCVRRRALMSLKNNPYCSEAAAKDAIEAVWNICYNDTRPFDRAP

SEQ ID NO: 101890 - protein, 78 aa, Setaria italica
  Transcript Sequence Number=SeqID_35916
  Gene Ontology: Mol. function=protein binding
  Homolog annotation: Hit_ID=B6TJW6; Match level="QueryCoverage=100%, HitCoverage=22%, E-value=5e-35, Identity=88%"; Hit description =Leucine Rich Repeat family protein
MAAPAADEAWCRETVPRVLELVSPRLPQRDVCALLAVSPWCYRTLVSNPRLWEVLDMREMKNAGDRLISALSLARYRH

SEQ ID NO: 101891 - protein, 324 aa, Setaria italica
  Transcript Sequence Number=SeqID_35917
  Gene Ontology: Mol. function=sequence-specific DNA binding; Cellular component=nucleus; Biological process=regulation of transcription, DNA-dependent
  Homolog annotation: Hit_ID=B6SYC5; Match level="QueryCoverage=100%, HitCoverage=65%, E-value=1e-159, Identity=83%"; Hit description=SPF1- like DNA-binding protein
  Pfam annotation: Domain name=WRKY; Domain location=215-274; Score =157.8; E_value=3.2e-44; Accession=PF03106.7; Description=WRKY DNA -binding domain
  Pfam annotation: Domain name=WRKY; Domain location=58-116; Score =140.7; E_value=4.6e-39; Accession=PF03106.7; Description=WRKY DNA -binding domain
  Pfam module annotation: Pfam domain module=WRKY::WRKY; Domain location=215-274::58-116
  Subcellular localization annotation: CTP_CleavageSite=18; ConfidenceScore=5.04e-01
SATNDAASSGALQHMNSSANMTGMPEMAITTANNDNASFQSAEPSQRYQVNAPVDKPADDGYNWRKYGQKVVKGSDCPRSYYKCTHPNCPVKKKVEHAEDGQISEIIYKGKHNHQRPPNKRAKDGNSSAADQNEQSNDTTSGLSGAKRDQDAIYGMSEQVSGLSDGDDMDDGESRPHEVDDADNESKRRNIQISSQRTLSEPKIIVQTTSEVDLLDDGYRWRKYGQKVVKGNPHPRSYYKCTFAGCNVRKHIERASSDPKAVITTYEGKHNHEPPVGRGSNQNAGVSQQRGQNSISSNQASLSIADYSITNQRPIGLLQFKSEQ

SEQ ID NO: 101892 - protein, 63 aa, Setaria italica
  Transcript Sequence Number=SeqID_35918
EKIRGILGTTEMESRRVSSVHCVCVTICSEDRGENEAPMLISKKTKKKRRERSINGTARVYHH

SEQ ID NO: 101893 - protein, 108 aa, Setaria italica
  Transcript Sequence Number=SeqID_35919
VQRAAGDPLLYDVVYHGAHTCAQAAHPGAEQLRQQLQLQPEPGHADAGQEQSSPPLALQETEGLQAGPEPMTPYWFGAPAPGDGADFPLLSPTGLEWQLRSMDHETQV

SEQ ID NO: 101894 - protein, 76 aa, Setaria italica
  Transcript Sequence Number=SeqID_35920
RPGARHRSRRRGRRQRREPGAAFCGTAWGASSRVMDAAVLAGERESSASPAIISWTAVSVRVAVGCAEETAGAVCG

SEQ ID NO: 101895 - protein, 93 aa, Setaria italica
  Transcript Sequence Number=SeqID_35921
  Gene Ontology: Mol. function=sulfotransferase activity
  Homolog annotation: Hit_ID=B6TRN9; Match level="QueryCoverage=94%, HitCoverage=27%, E-value=1e-18, Identity=53%"; Hit description =Flavonol 4-sulfotransferase
MAHPNNEGSSAESHIDDLVSKLPPKEGLVLYKNYWLWPQTAKNIMLLQDIFKPRHDDIILATNPKCGTTWLKALAFTITTRHRYNFHDHPLLT

SEQ ID NO: 101896 - protein, 73 aa, Setaria italica
  Transcript Sequence Number=SeqID_35922
  Subcellular localization annotation: CTP_CleavageSite=29; ConfidenceScore=5.53e-01
MASPIRPPPPPPAADPVAPSSPPSQQPSRDGSLSPEHPAPAPPSPPAVPTTTPPPHSPGDSSPSSPPHPPTPP

SEQ ID NO: 101897 - protein, 322 aa, Setaria italica
  Transcript Sequence Number=SeqID_35923
  Gene Ontology: Mol. function=hydrolase activity, hydrolyzing O -glycosyl compounds; Cellular component=chloroplast; Biological process=carbohydrate metabolic process
  Homolog annotation: Hit_ID=Q84UE5; Match level="QueryCoverage=100%, HitCoverage=46%, E-value=1e-172, Identity=90%"; Hit description =Isoamylase-type starch debranching enzyme ISO3
  Pfam annotation: Domain name=CBM_48; Domain location=21-117; Score =66.7; E_value=8.9e-17; Accession=PF02922.10; Description =Carbohydrate-binding module 48 (Isoam
MGHISSDSEVPLKYSSGKAFPLGVSQVEVGLNFAIFSQHASSVTLCLKLPERGTQDDVQVVEFALDLQKNKTGDIWHVSVEGLPASGVLYGYRINGPQGWQQGHRFDDRVILLDPYAKLVSGRKYFGVEEEKPSQLFGTYDFDSSPFDWGDDYKLPNLPETDLVIYEMNVRAFTADESSRIGPAVRGSYLGVIDKIPHLLELGVNAVELLPVFEFDELEFKRYANPRDHMVNTWGYSTINFFAPMSRYASAGGGPVAACKELKQMVKALHNAGIEVILDVVYNHTNEADDANPYMTSFRGIDNKVYYMLDLNNNAELLNFSG

SEQ ID NO: 101898 - protein, 154 aa, Setaria italica
  Transcript Sequence Number=SeqID_35924
  Gene Ontology: Mol. function=transporter activity; Cellular component= membrane; Biological process=sodium ion transport
  Homolog annotation: Hit_ID=B6T0F4; Match level="QueryCoverage=91%, HitCoverage=26%, E-value=6e-52, Identity=73%"; Hit description =Tonoplast dicarboxylate transporter
MDDVISLVLGSFILALAIEHYSIHRRLALNITALFCGDPVKPHLLLLGICGTTMFISMWIHNTACTVMMMPVSTGILQRLPRDELEGGSDAREVQRFSKAVVLGVVYASAIGGIATLTGTGVNIILVGMWSTYFPEQRPNTTLQDYLGIVPYGT

SEQ ID NO: 101899 - protein, 56 aa, Setaria italica
  Transcript Sequence Number=SeqID_35925
CRLSGFWHGLEVVGTCTGYSRMFWNISIVDWRFSKRGQSSHSSMSKLYSSFTAITP

SEQ ID NO: 101900 - protein, 79 aa, Setaria italica
  Transcript Sequence Number=SeqID_35926
  Gene Ontology: Mol. function=transporter activity; Cellular component= membrane; Biological process=sodium ion transport
  Homolog annotation: Hit_ID=B6T0F4; Match level="QueryCoverage=77%, HitCoverage=10%, E-value=3e-20, Identity=80%"; Hit description =Tonoplast dicarboxylate transporter
LLIGMNTRSLTDDIPGWAVLFDGKVGDGTVTIMMATLLFIIPSGKNDVEKLMDWGKCRKLQWHIILLPPRRWRSPRRAG

SEQ ID NO: 101901 - protein, 54 aa, Setaria italica
  Transcript Sequence Number=SeqID_35927
  Gene Ontology: Mol. function=transporter activity; Cellular component= membrane; Biological process=sodium ion transport
  Homolog annotation: Hit_ID=B6T0F4; Match level="QueryCoverage=98%, HitCoverage=9%, E-value=6e-19, Identity=84%"; Hit description =Tonoplast dicarboxylate transporter
PTGSPSNVFGFSTGHITIKDLVTTGLPLKIVGIASLTILLPSLGSQIFGTNSRS

SEQ ID NO: 101902 - protein, 80 aa, Setaria italica
  Transcript Sequence Number=SeqID_35928
  Gene Ontology: Mol. function=transporter activity; Cellular component= membrane; Biological process=sodium ion transport
  Homolog annotation: Hit_ID=B9HCT6; Match level="QueryCoverage=68%, HitCoverage=11%, E-value=7e-16, Identity=72%"; Hit description =Sodium-dicarboxylate cotransporter
NLTKQRKEPNLTALGRLRGLLGPMAFAEKMVLAVFGGLIVLWMTRSLTDDIPGWAVLFDGKVGDGTVTMATCTLMHVCRS

SEQ ID NO: 101903 - protein, 175 aa, Setaria italica
  misc_feature (15)..(15): Xaa can be any naturally occurring amino acid
  Transcript Sequence Number=SeqID_35929
  Gene Ontology: Mol. function=transporter activity; Cellular component= membrane; Biological process=sodium ion transport
  Homolog annotation: Hit_ID=B6T0F4; Match level="QueryCoverage=97%, HitCoverage=31%, E-value=1e-65, Identity=73%"; Hit description =Tonoplast dicarboxylate transporter
RLALNITALFCGDPXVKPHLLLLGICGTTMFISMWIHNTACTVMMMPVATGILQRLPRDELEGGSDAREVQRFSKAVVLGVVYASAIGGIATLTGTGVNIILVGMWSTYFPEQRPITFSSWMSFGLPISLVLFVALWATLCLMYCSKNTGKALSAYLDRSHLRRELSLLGNYFCS

SEQ ID NO: 101904 - protein, 577 aa, Setaria italica
  Transcript Sequence Number=SeqID_35930
  Gene Ontology: Mol. function=transporter activity; Cellular component= membrane; Biological process=sodium ion transport
  Homolog annotation: Hit_ID=B6T0F4; Match level="QueryCoverage=93%, HitCoverage=99%, E-value=0.0, Identity=76%"; Hit description =Tonoplast dicarboxylate transporter
  Pfam annotation: Domain name=BCCT; Domain location=83-336; Score= -441.2; E_value=0.041; Accession=PF02028.9; Description=BCCT family transporter
  Pfam annotation: Domain name=Caa3_CtaG; Domain location=256-485; Score=-128.1; E_value=0.048; Accession=PF09678.2; Description =Cytochrome c oxidase caa3 assembly fa
  Pfam annotation: Domain name=CitMHS; Domain location=109-517; Score= -89.2; E_value=0.00093; Accession=PF03600.8; Description=Citrate transporter
  Pfam annotation: Domain name=DUF1538; Domain location=367-515; Score=- 143.7; E_value=0.053; Accession=PF07556.3; Description=Protein of unknown function (DUF1538)
  Pfam annotation: Domain name=Na_sulph_symp; Domain location=74-573; Score=-15.5; E_value=2.1e-11; Accession=PF00939.11; Description =Sodium:sulfate symporter transmembrane region
  Pfam module annotation: Pfam domain module=BCCT::Caa3_CtaG::CitMHS::DU F1538::Na_sulph_symp; Domain location=83-336::256-485::109-517::367 -515::74-573
MFLLCSPAYKTRQAFRTPHFINKHTHGFVQLPIPWTMDPRRACWESSSEDVTRALLPVHDDRPTRGRSCAGLRAMLANKYLAVASGPAACALICALGDLGGHPAARNMLGVLAWVFLWWITDAVPLAVASMAPLFLFPAFGISSSDAVAKAYMDDVISLVLGSFILALAIEHYSIHRRLALNITALFCGDPVKPHLLLLGICGTTMFISMWIHNTACTVMMMPVATGILQRLPRGGAGAPGCQEEEEEEVRRFSKAVVLGVVYASAIGGMATLTGTGVNIILVGMWSTYFPDQEPITFSSWMSFGLPMALIMFVALWATLCLMYCSKNTGRALSAYLDRSHLRRELGLLGPMAFAEKMVLAVFGGLIVLWMTRSLTDDIPGWAVLFDGKVGDGTVTIMMATLLFIIPSGKNDVEKLMDWGKCRKLQWHIILLLGAGFAIADGFSSSGLTDILSDGLRFLKDAQTVVIVPVACVVAAVITEFTSDDATTTLVLPLFAELAKSINVHPVLLMISGAVGAQLSYLLPTGSPSNVVGFSTGHITIKDLVTTGLPLKIVGIASLTILLPSLGSQIFGTNSRS

SEQ ID NO: 101905 - protein, 104 aa, Setaria italica
  Transcript Sequence Number=SeqID_35931
  Gene Ontology: Cellular component=integral to membrane
  Homolog annotation: Hit_ID=Q2MJU2; Match level="QueryCoverage=56%, HitCoverage=23%, E-value=5e-20, Identity=67%"; Hit description =Cadmium tolerance factor
VDRKDGSTRGQDQASPENEEEEKAKQLEKRRKRLLLFAILAATITYQAGLTPPSGFLLKDDQATGHLAGDPVLLNNYPRRYTAFFYCNSVSFMLSIALIIVLVN

SEQ ID NO: 101906 - protein, 60 aa, Setaria italica
  Transcript Sequence Number=SeqID_35932
LYKFPTRGYLPPEIHSGIITFKSDIYSLGVIIKEILTGQEVLPEDYDVSFTIVTLFQDKE

SEQ ID NO: 101907 - protein, 100 aa, Setaria italica
  Transcript Sequence Number=SeqID_35933
TYMHEKKFHQEIECMMKVKAQKYSTFLGYCANTQGKMESFNGKLVMADVQQRLLCFEYVAKGSLRDQITGTIVLPPFQIIDRFGFSRCIDIIMHLDTVYV

SEQ ID NO: 101908 - protein, 211 aa, Setaria italica
  misc_feature (55)..(55): Xaa can be any naturally occurring amino acid
  Transcript Sequence Number=SeqID_35934
  Gene Ontology: Mol. function=protein serine/threonine kinase activity; Biological process=protein amino acid phosphorylation
  Homolog annotation: Hit_ID=Q53P17; Match level="QueryCoverage=98%, HitCoverage=71%, E-value=2e-51, Identity=47%"; Hit description =Protein kinase domain
  Pfam annotation: Domain name=Pkinase; Domain location=2-211; Score =82.9; E_value=1.2e-21; Accession=PF00069.17; Description=Protein kinase domain
  Pfam annotation: Domain name=Pkinase_Tyr; Domain location=2-211; Score=-4.8; E_value=2.1e-13; Accession=PF07714.9; Description =Protein tyrosine kinase
  Pfam module annotation: Pfam domain module=Pkinase::Pkinase_Tyr; Domain location=2-211::2-211
FSSADKEIGRGGFAVVYKGMIRSGTIAVKKLSHTYMHEKKFHQEIECMMKVKHKXNIVRFLGYCANTQGKMESFNGKLVMADVQQRLLCFEYVAKGSLRDQITDASSGLEWRQRYEIIKGICIGLNYLHRNRIVHSDLKPANILLDYDMVPKIADFGLSRCFDEKQSWAITSNIWGSLGYLPPEIHSGIITFKSDIYSLGVIIKEILTGRS

SEQ ID NO: 101909 - protein, 91 aa, Setaria italica
  Transcript Sequence Number=SeqID_35935
  Gene Ontology: Mol. function=transcription factor activity; Cellular component=nucleus; Biological process=regulation of transcription, DNA-dependent
  Homolog annotation: Hit_ID=Q6ETB0; Match level="QueryCoverage=92%, HitCoverage=33%, E-value=9e-17, Identity=63%"; Hit description =Putative AP2 domain-containing protein
AAAGQQQDDELEAIVELPRLDEDAAELVTTVTAFGAAPFSFHDVATPASWCDPVWVDDASGYVAAAHDDLFGFVDGDHGWAQSVGALLWNM

SEQ ID NO: 101910 - protein, 71 aa, Setaria italica
  Transcript Sequence Number=SeqID_35936
  Gene Ontology: Mol. function=oxidoreductase activity; Cellular component=cytoplasm; Biological process=oxidation reduction
  Homolog annotation: Hit_ID=B6TD57; Match level="QueryCoverage=85%, HitCoverage=15%, E-value=6e-26, Identity=86%"; Hit description =Alcohol dehydrogenase 1
MENHGPKPIRCKAAVCRAAGEPLAIEEIVVDPPKAYEVRIRVVCTSVCHSDVTFWRMKDFPAPSHVFTPKN

SEQ ID NO: 101911 - protein, 59 aa, Setaria italica
  Transcript Sequence Number=SeqID_35937
KWLLWGSRKKPPQNPFTNLETEPEPEKPAPRGSLPAYACARTKLPLKLAETTPEIATRL

SEQ ID NO: 101912 - protein, 169 aa, Setaria italica
  Transcript Sequence Number=SeqID_35938
  Gene Ontology: Mol. function=nucleic acid binding; Cellular component= intracellular; Biological process=regulation of transcription from RNA polymerase III promoter
  Homolog annotation: Hit_ID=Q10RP4; Match level="QueryCoverage=71%, HitCoverage=18%, E-value=9e-40, Identity=54%"; Hit description=Zinc finger, C2H2 type family protein, expressed
  Pfam annotation: Domain name=zf-C2H2; Domain location=111-135; Score =23.0; E_value=0.0012; Accession=PF00096.18; Description=Zinc finger, C2H2 type
  Pfam annotation: Domain name=zf-C2H2; Domain location=141-165; Score =22.2; E_value=0.0022; Accession=PF00096.18; Description=Zinc finger, C2H2 type
  Pfam annotation: Domain name=zf-C2H2; Domain location=58-83; Score =23.4; E_value=0.00094; Accession=PF00096.18; Description=Zinc finger, C2H2 type
  Pfam annotation: Domain name=zf-C2H2; Domain location=86-105; Score =4.5; E_value=3.9; Accession=PF00096.18; Description=Zinc finger, C2H2 type
  Pfam module annotation: Pfam domain module=zf-C2H2::zf-C2H2::zf -C2H2::zf-C2H2; Domain location=111-135::141-165::58-83::86-105
LELEDGVVCEEGTLERTGRCESVLSNAGSVDVKLADIKKELMDDSAASKVKKTKKNRFECNIDYCQMTFKTKTELSVHKKNMCTVKSCSRQFRSHRYLRRHQSVHNDDMPYKCPWDGCGMAFKWSWDRTEHFKVHAGVKPYKCTTPGCNKIYKFVSDFTRHRRRCKPQR

SEQ ID NO: 101913 - protein, 120 aa, Setaria italica
  misc_feature (35)..(35): Xaa can be any naturally occurring amino acid
  misc_feature (82)..(82): Xaa can be any naturally occurring amino acid
  Transcript Sequence Number=SeqID_35939
  Gene Ontology: Mol. function=aspartyl esterase activity; Cellular component=cell wall; Biological process=cell wall modification
  Pfam annotation: Domain name=Pectinesterase; Domain location=2-99; Score=-188.7; E_value=2.8e-07; Accession=PF01095.11; Description =Pectinesterase
MGFISSRCVITGNGEAAYMYLGRPWEPFGRVVFGXTFMDHCIEPAGWHNGDKPENERTACFCEYRCSGPGSSMSERVAWCKXIGDEAIPFLVKTFIDPDVQNPWLLHRLGTKLPVSTASP

SEQ ID NO: 101914 - protein, 483 aa, Setaria italica
  misc_feature (35)..(35): Xaa can be any naturally occurring amino acid
  misc_feature (55)..(55): Xaa can be any naturally occurring amino acid
  Transcript Sequence Number=SeqID_35940
  Gene Ontology: Mol. function=oxidoreductase activity, acting on paired donors, with incorporation or reduction of molecular oxygen, NADH or NADPH as one donor, and incorporation of one atom of oxygen; Cellular component=...
  Gene Ontology: Cellular component=mitochondrion; Biological process =cellular aromatic compound metabolic process
  Homolog annotation: Hit_ID=B9RWL0; Match level="QueryCoverage=96%, HitCoverage=88%, E-value=1e-173, Identity=63%"; Hit description =Monoxygenase, putative
  Pfam annotation: Domain name=FAD_binding_3; Domain location=15-432; Score=-67.6; E_value=7.7e-08; Accession=PF01494.11; Description=FAD binding domain
DRTQEVGGVKAAPDVLDVAIVGGGMVGLAVACALXANMPLTKHLRVAIIDSNPAXPKSRNHLTKNSIPDSRVSTVTPATISFFKDIGAWEHVQQQRHAFFGKMQVWDYTGLGYTRYNARDVGKEYLGCVVENKVLCNSLLLRFQEELDDIESVIYPTRLVSLTFPSISKQAGMKPTSSEPLSAGHATEELHRSNLVKLDLSDGRTLYSKLVIGADGSKSNVRQIAGIKTTGWNYPQSAIICTVEHVVENDCAWQRFLPSGPIALLPIGNNFSNIVWTMSPEESLRHKSMSPEEFVKSVNHALDFGYGPHPRSSALDHYMEKFFSGIGNTAASTKECFEVPPKATGVVSERMAFPLSLMHSHDYVSKRLALVGDAAHTVHPLAGQGVNLGFGDAAALAKVIAEGVSVGSDVGDLTLLQRYEKDRKAANVAMTAVLDGFQKMYSVDFGPLNVVRAAAFHGAQYISPLKRNIISYAMGDTKWPIFS

SEQ ID NO: 101915 - protein, 109 aa, Setaria italica
  Transcript Sequence Number=SeqID_35941
  Gene Ontology: Mol. function=hydrolase activity, hydrolyzing O -glycosyl compounds; Cellular component=vacuole; Biological process =carbohydrate metabolic process
  Homolog annotation: Hit_ID=Q75IS8; Match level="QueryCoverage=99%, HitCoverage=17%, E-value=4e-45, Identity=73%"; Hit description =Putative beta-glucosidase
  Pfam annotation: Domain name=Glyco_hydro_1; Domain location=3-109; Score=-324.4; E_value=0.024; Accession=PF00232.10; Description =Glycosyl hydrolase family 1
NPNERSGDIACDGYHKYKEDVKLIKDIGLKAYRFSISWSRLIPNGRGAINPKGLQFYNDLINELVKEGIQVHAVIYHLDLPQILEDEYGGWLSPRIVDDFTAYSDVCFA

SEQ ID NO: 101916 - protein, 499 aa, Setaria italica
  Transcript Sequence Number=SeqID_35942
  Gene Ontology: Mol. function=heat shock protein binding; Biological process=response to stress
  Homolog annotation: Hit_ID=B6SKE0; Match level="QueryCoverage=94%, HitCoverage=81%, E-value=1e-170, Identity=67%"; Hit description=Heat shock protein binding protein
  Pfam annotation: Domain name=DnaJ; Domain location=228-289; Score =77.2; E_value=6e-20; Accession=PF00226.23; Description=DnaJ domain
MLGSVPGVLGGPRRRRIRAAAAEEAREIVRDILGEFPAVAGELRQLLQMIDSGEGIDISGISDKPLVKRLKKLFRSLRLKESASGAYLLPPKHVPTLDIVGPLLLASSKLADNENGKSVSPIREELPPSNFDVQTKDKDDTTSEGPKIVGVEEPPKRRIIGPAMPSRELLAAAAEMTEALRCRDAELEADDDLLIGPPPPAVVAEAASANEAERFEEVTRILAADTNSPYDILGVNWKMSTDNMKKRYWKLSLLVHPDKCPHPSAQEAFVRLNNAFKDLQDPDKRGAIDEKIKKKEEMEQFEIELKAMREAAEWRRLQGISLAGDEELLAGPKEAQAPKRDEWMTTLPPERKAGVPMHSTKSFSMNGKEGRGDTSVWTDTPLDRAQKAQQSYLEAYNKTKAIAEGDDVKNKNPDASIVDKYNTSKRSVSLVQKHRESKKEKKKQKQHEKEEWEGNHPWKPWDRENDLSAGRQKVALDPENMSQGLSSRFASGAVQRNFL

SEQ ID NO: 101917 - protein, 123 aa, Setaria italica
  Transcript Sequence Number=SeqID_35943
  Gene Ontology: Mol. function=protein serine/threonine kinase activity; Biological process=protein amino acid phosphorylation
  Homolog annotation: Hit_ID=UPI00005DC28C; Match level="QueryCoverage =85%, HitCoverage=12%, E-value=1e-17, Identity=44%"; Hit description =ATP binding / carbohydrate binding / kinase/ protein kinase/ protein ...
  Homolog annotation: Hit description=serine/threonine kinase/ protein tyrosine kinase/ sugar binding
RPSILLLLSARTADAGPLATEFAYPDLVASSILYVDTGGAFLESRNRAFRAAVTNPGKQQDRFYLAVLHTPSATVVWSANRAAPTTSSGSVNLTAQGITVSDPNGTVLWSTPSPLRSPVTALR

SEQ ID NO: 101918 - protein, 105 aa, Setaria italica
  Transcript Sequence Number=SeqID_35944
  Gene Ontology: Mol. function=protein serine/threonine kinase activity; Cellular component=integral to membrane; Biological process=protein amino acid phosphorylation
  Homolog annotation: Hit_ID=B9RAX9; Match level="QueryCoverage=100%, HitCoverage=50%, E-value=2e-30, Identity=42%"; Hit description =Receptor protein kinase, putative
  Pfam annotation: Domain name=LRR_1; Domain location=14-36; Score =15.6; E_value=0.21; Accession=PF00560.25; Description=Leucine Rich Repeat
  Pfam annotation: Domain name=LRR_1; Domain location=38-60; Score =13.0; E_value=0.97; Accession=PF00560.25; Description=Leucine Rich Repeat
  Pfam annotation: Domain name=LRR_1; Domain location=87-105; Score =5.7; E_value=25; Accession=PF00560.25; Description=Leucine Rich Repeat
  Pfam module annotation: Pfam domain module=LRR_1::LRR_1::LRR_1; Domain location=14-36::38-60::87-105
ISGVIPSDIGRLGSLTKLVLGGNRLTGQIPPEIGSCSRLQLLDLGGNALSGAIPASIGKIPGLEIALNLSCNGLSGAITREFAGLVRLGVLDVSHNQLSGDLQPL

SEQ ID NO: 101919 - protein, 80 aa, Setaria italica
  Transcript Sequence Number=SeqID_35945
  Homolog annotation: Hit_ID=B6T6S7; Match level="QueryCoverage=100%, HitCoverage=29%, E-value=2e-38, Identity=91%"; Hit description =Ser/Thr-rich protein T10 in DGCR region
MCIAAWAWECHPAHRLLLLFNRDEYHSRPTQPAQWWAPGEDGKEILGGRDELGGGTWMGCTRDGKLAFLTNVRESGSLIG

SEQ ID NO: 101920 - protein, 170 aa, Setaria italica
  misc_feature (152)..(152): Xaa can be any naturally occurring amino acid
  Transcript Sequence Number=SeqID_35946
  Gene Ontology: Mol. function=nucleic acid binding; Cellular component= cytoplasm; Biological process=transcription-coupled nucleotide -excision repair
  Homolog annotation: Hit_ID=Q7F2E4; Match level="QueryCoverage=98%, HitCoverage=14%, E-value=4e-91, Identity=93%"; Hit description =Cockayne syndrome group B
AVVLRDLIMPYLLRRMKADVNAQLPKKTEHVLFCSLTPEQRATYRAFLASSEVEQIFDGNRNSLYGIDVLRKICNHPDLLEREHAAQNPDYGNPERSGKMKVVEQVLRVWKDQGHRVLLFTQTQQMLDILENFLTACDYQYRRMDGLTPAKXRMARNDEFNNTDEILFTF

SEQ ID NO: 101921 - protein, 93 aa, Setaria italica
  Transcript Sequence Number=SeqID_35947
YHFFSFNVLDGGVSHFAATNIDDPCAQMRLMHENYVFLTLLGCSTSVSCFVFVHFVCLMAYEFIRRHLIFKFDWEMASSLWLEFYRAFLLFTL

SEQ ID NO: 101922 - protein, 313 aa, Setaria italica
  misc_feature (276)..(276): Xaa can be any naturally occurring amino acid
  misc_feature (303)..(303): Xaa can be any naturally occurring amino acid
  Transcript Sequence Number=SeqID_35948
  Homolog annotation: Hit_ID=Q9LNA8; Match level="QueryCoverage=97%, HitCoverage=35%, E-value=1e-110, Identity=60%"; Hit description =F5O11.10
PFNGNGSDFRAAFEMLEDILNSAHPLHRAVQEDSYKLVCIDDSVAREMGEMVHNEAFWIEVDAVHSLVKLIMDMVKEMEGDRPLVGQCLPLWEELRSKVRDWCEKFNVDEGIALNVVEKRFRKNYHPAWSAAFILDPLYLVKDASGRYLPPFKCLAPDQEKDVDRLITRMVSQEEAHLALMELMKWRSDGLDPLYAQAVQVRQPDPSTGKMKVANKQSSRLVWETCLSEFKSLGKVAVRLIFLHATSRGFRCTPSMVRWLSSPGSLASSTNRAHRXLVFVAANSKLERRDFSSDEDKDAELLXEGADDFANEP

SEQ ID NO: 101923 - protein, 93 aa, Setaria italica
  misc_feature (22)..(22): Xaa can be any naturally occurring amino acid
  misc_feature (41)..(41): Xaa can be any naturally occurring amino acid
  Transcript Sequence Number=SeqID_35949
RIAQQQRLKISSDLPFRSNKKXFDSQMAAISQESQAIAPTXSIVESYASRLRSPSEDVTAKSSGSQQNPLFKWVKESAGPTQSSEQKHFELPG

SEQ ID NO: 101924 - protein, 133 aa, Setaria italica
  misc_feature (67)..(67): Xaa can be any naturally occurring amino acid
  misc_feature (77)..(77): Xaa can be any naturally occurring amino acid
  misc_feature (85)..(85): Xaa can be any naturally occurring amino acid
  misc_feature (113)..(113): Xaa can be any naturally occurring amino acid
  Transcript Sequence Number=SeqID_35950
ARSQLNPLFKWVKESAGPTQSSEQKHFELPGQMKSTAQSSKLAPSSPAFSYTHKGAQDSISPSSPAXGTTHIVPKSXLTFKTTTXTPKSNANTEPNIPSMATDKTPQSPLSVXKTLTGESGDLSTLAMKNRQD

SEQ ID NO: 101925 - protein, 84 aa, Setaria italica
  Transcript Sequence Number=SeqID_35951
  Subcellular localization annotation: CTP_CleavageSite=39; ConfidenceScore=5.06e-01
METSRVKPGFNGVAAGGFDGSSRRAGGYMGGVALRAFVLAATLVAAVVMGVDRQTRTIQITLADTLPPLEVPVTAKWSYSSAFV

SEQ ID NO: 101926 - protein, 178 aa, Setaria italica
  Transcript Sequence Number=SeqID_35952
  Gene Ontology: Cellular component=integral to membrane
  Homolog annotation: Hit_ID=B4FAP1; Match level="QueryCoverage=79%, HitCoverage=64%, E-value=5e-62, Identity=86%"; Hit description =UPF0497 membrane protein 5
  Pfam annotation: Domain name=DUF588; Domain location=9-159; Score =178.6; E_value=1.8e-50; Accession=PF04535.4; Description=Domain of unknown function (DUF588)
APPPAGGRGAPVDACGVALRAFVLAATLVAAVVMGVDRQTRTIQITLADTLPPLEVPVTAKWSYSSAFVYFVVANAMVCVFSALALATCRRRGAVVPVMVGDLLALALLFSAVGAAAEFGILGERGNSHVRWAKVCNVYGAFCERAMAAVIVSLLAAFANLVMLMLTILTIHKSSSYY

SEQ ID NO: 101927 - protein, 157 aa, Setaria italica
  misc_feature (34)..(34): Xaa can be any naturally occurring amino acid
  misc_feature (134)..(134): Xaa can be any naturally occurring amino acid
  Transcript Sequence Number=SeqID_35953
  Gene Ontology: Mol. function=transferase activity, transferring glycosyl groups; Cellular component=1,3-beta-glucan synthase complex; Biological process=cell wall organization and biogenesis
  Homolog annotation: Hit_ID=B9SKY2; Match level="QueryCoverage=93%, HitCoverage=8%, E-value=2e-36, Identity=47%"; Hit description =Transferase, transferring glycosyl groups, putative
MISHDVAEHKKQQLKLLHIGLYLLIWGEASNVRXMPECLCYIFHHMAKQLHDMVDGNYFQPPPGFEEEGSFLENVIEPIFKVLQKEAQKSRGGTAGHSAWRNYDDLNELFWSEKCFTKLKWPWDLTSDFFLSRXVVQQESPKQIFVEVRTFLHIFRS

SEQ ID NO: 101928 - protein, 66 aa, Setaria italica
  Transcript Sequence Number=SeqID_35954
  Gene Ontology: Mol. function=transferase activity, transferring glycosyl groups; Biological process=metabolic process
  Homolog annotation: Hit_ID=B6U0X3; Match level="QueryCoverage=100%, HitCoverage=13%, E-value=5e-16, Identity=66%"; Hit description =Cytokinin-O-glucosyltransferase 1
MATAEQSKKLRILLIPFFATSHIGPYTDLAVRLAAARPGFVEPAVAVTPANVPVVRSLLERHGPAA

SEQ ID NO: 101929 - protein, 78 aa, Setaria italica
  misc_feature (16)..(16): Xaa can be any naturally occurring amino acid
  misc_feature (28)..(28): Xaa can be any naturally occurring amino acid
  Transcript Sequence Number=SeqID_35955
  Gene Ontology: Cellular component=membrane
  Homolog annotation: Hit_ID=B9RMQ5; Match level="QueryCoverage=97%, HitCoverage=26%, E-value=2e-18, Identity=57%"; Hit description =Prenyl-dependent CAAX protease, putative
CLVLGLNWISALIIGXFFGVLHLGNGRXYSLQSGQLFVGFAYGIGTIASSSVIVPMVSHSINNIIGGLLWRFTKNSQK

SEQ ID NO: 101930 - protein, 91 aa, Setaria italica
  Transcript Sequence Number=SeqID_35956
DGRDKQGRDGRQQAEQEGGRDGRRQSRRESRLGSRQSSQILACPLCAYRNCRFLSEERCRTWTWLPSALCDMLFTQLCMFSRLATFSMSEC

SEQ ID NO: 101931 - protein, 301 aa, Setaria italica
  Transcript Sequence Number=SeqID_35957
MALDQEEEVQQEEPKAVASDVKCEDPDEDEVTKLLEGDNKEEEPEEGEEADSSDVTIGSAVASDKSCDDTKMEDKATKPQEGIVEEKEPASVQKPASLATMEDSPILGVLSKDEASEPVIEKTQDASLEDDEGCAEWSPVMEMADEINEEAIKEDACTTTGETDHSPEEILPTAAEDETSEEDCLTEVKEGAADEMTQAELAGDETSEEDEDDDLAELKGAVDEMRHAELADDKTSEEDEEDGLAELKGAVDEMRQAELTDVEAIGEDEEWASDDAESSEEIYSTEESDEEADETSDEGDT

SEQ ID NO: 101932 - protein, 183 aa, Setaria italica
  Transcript Sequence Number=SeqID_35958
  Gene Ontology: Mol. function=nucleoside diphosphate kinase activity; Cellular component=chloroplast; Biological process=CTP biosynthetic process
  Homolog annotation: Hit_ID=B4G0R1; Match level="QueryCoverage=84%, HitCoverage=69%, E-value=1e-73, Identity=86%"; Hit description =Nucleoside diphosphate kinase
  Pfam annotation: Domain name=NDK; Domain location=36-170; Score =340.3; E_value=3.8e-99; Accession=PF00334.11; Description=Nucleoside diphosphate kinase
ATRSAAGSGGVCARSGRSAGARRAVPRGIVASAEVEQSYIMIKPDGVQRGLVGEIISRFEKKGFLLKGLKLFQCSTDLAQEHYQDLKDKPFFPTLIDYITSGPVVCMAWEGVGVVASARKLIGATNPLQAEPGTIRGDLAVQTGRNVVHGSDSPDNGKREIALWFKEGELCQWESVQTPWLIE

SEQ ID NO: 101933 - protein, 444 aa, Setaria italica
  misc_feature (340)..(340): Xaa can be any naturally occurring amino acid
  Transcript Sequence Number=SeqID_35959
  Gene Ontology: Biological process=biosynthetic process
  Homolog annotation: Hit_ID=B9RE01; Match level="QueryCoverage=99%, HitCoverage=47%, E-value=1e-137, Identity=53%"; Hit description =Transferase, transferring glycosyl groups, putative
  Pfam annotation: Domain name=Glycos_transf_1; Domain location=3-173; Score=-15.1; E_value=0.008; Accession=PF00534.12; Description =Glycosyl transferases group 1
DPKDFVIAIVGTPFSYRENLMEETLILQAVGPLLQQYHSDNSTESELKVKFFTRNITEKHRMILESIALSVGFPRGAVEHVADGDKDSLLGTADLVIYGSCLEEQSFPSVLVQAMSLEKLVIAPDLAIIKKHIDDGVNGLLFPRKNIGMLTQVLLRALSNGKVSVSGQKIASVGKAYAKNLMASETIEGYAMLLENVIKFPTDVLSPLTAGEIPLALKQEWKWHLFEDVKHLHHMNESLSGYKILQKLEQEWHSNLMERPPVSTSKISEAFSAIAWEEQRANEVMDIKRKMEEDELKDRNDQLHGTWEEVYRNVKRVERLKNELHERDDKTTQRTGQPLXIYEPFFGEGTWPFLHQSSLYRGVGLSSKGRRPGADDIDASSRLPLLNNVYYRDILGEFGAFFALANRIDRIHKNPWIGFQSWRVTALKANLSNNAETAILEAIQ

SEQ ID NO: 101934 - protein, 383 aa, Setaria italica
  misc_feature (111)..(111): Xaa can be any naturally occurring amino acid
  misc_feature (143)..(143): Xaa can be any naturally occurring amino acid
  Transcript Sequence Number=SeqID_35960
  Gene Ontology: Biological process=steroid metabolic process
  Homolog annotation: Hit_ID=Q9AV10; Match level="QueryCoverage=98%, HitCoverage=51%, E-value=1e-175, Identity=75%"; Hit description =Oxysterol-binding protein, expressed
  Pfam annotation: Domain name=Oxysterol_BP; Domain location=1-367; Score=212.6; E_value=1e-60; Accession=PF01237.10; Description =Oxysterol-binding protein
DLTRRKEKGISLWSIIKDSVGKDLTRVCLPVYFNEPLSSLQKCFEDLEYSYLLDQAYQYGKMGNSLMRILKVAAFAVSGYASSVARPCKPFNPLLGETYEADYPDRGVRFXAEKVSHHPMLIACHCEGKGWKFWGDSNLKSKXFWGQSIQVEPVGILTVEFDDGEIFQWNKVTTTIHNLILGKLYCSHHGTMHIKGNRQYSCKLKFKEPSLLDRNPHLVQGFVEDNGGNRASYLIGKWDESMYYSNSDTFKVRSADQLKGASLLWEKNKPAPNPTRYNLSSFAITLNELTPGLQEKLPPTDSRLRPDQRHLENGEYEKANAEKLRLERRQRMSTKLQDNGWKPQWFEQDSEDGTYRYKGGYWETREKGRWDGCPDIFGEFTET

SEQ ID NO: 101935 - protein, 65 aa, Setaria italica
  Transcript Sequence Number=SeqID_35961
PGQMPRVAGPWVRQCLTSRRSQIHTRNYKSTGINHSTLSPLILHYKFPFIFKQQTTLEQQDCLNF

SEQ ID NO: 101936 - protein, 67 aa, Setaria italica
  Transcript Sequence Number=SeqID_35962
PFQELAVGYEYGQQLSAKKPVAQSEFIPPWNLLLPATSGRPNCQYSLRSFQDGQELSYRRVQIVHIA

SEQ ID NO: 101937 - protein, 161 aa, Setaria italica
  misc_feature (26)..(26): Xaa can be any naturally occurring amino acid
  Transcript Sequence Number=SeqID_35963
  Gene Ontology: Mol. function=phosphatidylinositol phosphate kinase activity; Biological process=phosphatidylinositol metabolic process
  Homolog annotation: Hit_ID=Q94LF4; Match level="QueryCoverage=97%, HitCoverage=9%, E-value=2e-73, Identity=83%"; Hit description =Putative phosphoinositide kinase
SLTELDDCTSELLRSVISTEDNILSXSGSKNPLASDPLVPRKVSHIKVNFGDEGPLGQVKYTVICYYAKQFDALRRMCCPSERDFIKSLSRCKKWGAQGGKSNVFFAKSMDDRFIIKQVTKTELESFMKFAPDYFQYVSESIYTGSPTCIAKILGYFTRFK

SEQ ID NO: 101938 - protein, 181 aa, Setaria italica
  misc_feature (56)..(56): Xaa can be any naturally occurring amino acid
  misc_feature (72)..(72): Xaa can be any naturally occurring amino acid
  Transcript Sequence Number=SeqID_35964
  Gene Ontology: Mol. function=nucleic acid binding
  Homolog annotation: Hit_ID=Q6J735; Match level="QueryCoverage=89%, HitCoverage=19%, E-value=2e-91, Identity=96%"; Hit description=AML1
  Pfam annotation: Domain name=RRM_2; Domain location=48-144; Score =217.9; E_value=2.6e-62; Accession=PF04059.4; Description=RNA recognition motif 2
ERSLLDLQYDATNDRIRSRRHDGNAAQSENKKQFDLDLDHIANGEDSRTTLMIKNXPNKYNCKLLLAVIDEXHRGTYDFIYLPIDFKNKCNVGYAFINMTDPQHIIPFYKTFNGKKWEKFNSEKVASLAYARIQGRNALIAHFQNSSLMNEEKWCRPMLFHKDGPHAGDQVRLMLLLLSSL

SEQ ID NO: 101939 - protein, 927 aa, Setaria italica
  misc_feature (267)..(267): Xaa can be any naturally occurring amino acid
  Transcript Sequence Number=SeqID_35965
  Gene Ontology: Mol. function=nucleic acid binding
  Homolog annotation: Hit_ID=Q6J736; Match level="QueryCoverage=100%, HitCoverage=98%, E-value=0.0, Identity=61%"; Hit description=AML6
  Pfam annotation: Domain name=RRM_1; Domain location=268-333; Score =36.5; E_value=1.1e-07; Accession=PF00076.14; Description=RNA recognition motif. (a.k.a. RRM, RBD, o
  Pfam annotation: Domain name=RRM_1; Domain location=353-418; Score =21.0; E_value=0.0022; Accession=PF00076.14; Description=RNA recognition motif. (a.k.a. RRM, RBD, o
  Pfam annotation: Domain name=RRM_2; Domain location=771-867; Score =221.8; E_value=1.7e-63; Accession=PF04059.4; Description=RNA recognition motif 2
  Pfam module annotation: Pfam domain module=RRM_1::RRM_1::RRM_2; Domain location=268-333::353-418::771-867
SGAVDGRHLSPFATLPESSSSSFFSEDLVPAERQVGFWKSESMVDHKGSKSAFASPLDKVHPTGANPAGGLEHPRGQAFKGQLDMLSLSKLMGQEENTSSLSSISWGDILGSSRSSLGSSTRGTAFVEPSSADQLVHDYGNYPSSSSLSEVFSIKSRMMASGFPGQSVDAINSGCEGDEPLGSMKEMEAQTIGDLLPDDDDLISGITDGFECTGLSNQDDADEDIFYTGGGMELENDDFSNGGKIHEGSFKSQLSGKHSINEHPSRXLIVKNINPSIEDAELRVQFQQYGEIQTLHTSCKNHGFVTVSYYDIRAAQNAMRALHNKPLGLMNLDVQFSIPKENGQNKDPNNGRLVVSIIDSSISNHDLLQIFSVYGDVKEIRKAPTSCNKKFVQFYDVRAAEVAVNNLNKGDVSCSKIKVEHSCSGVAGLCFTEQCSGEWKQNTVTHQLKNSPPGTIGRTDPKSWENGSVHDLYSPVRPQLHGFSVNSAQKLSSPIRIGPTRQHNNQANLCEPNGSLGHGNFGRGLQAFHPHSLPECHNGICNGSKSMTLGTRNSGVRLTEGADYNNHKVCSSDHHGHSSDQSEALGVTGIGSCPLHGHHHTWNNSNGFPQSPCAPMLWSNFHQPMHIHGYPAMPPHMRNTGAHPMDQHHLGSAPSNVGGFTNAHSFHPGSLENVGFPGSPQLYPSDLSVFAPARGHYRETMFSPVNAGFPSLQQMFHATNGRSPMMRVSASYDATNDRIRSRRHDGNAAQSENKKQFDLDLDHIANGEDSRTTLMIKNIPNKYNCKLLLAVIDENHRGTYDFIYLPIDFKNKCNVGYAFINMTDPQHIIPFYKTFNGKKWEKFNSEKVASLAYARIQGRNALIAHFQNSSLMNEEKWCRPMLFHKDGPHAGDQEPFPVGNNVRTRSGRNRPIASSDTKEGSPSTSPN

SEQ ID NO: 101940 - protein, 133 aa, Setaria italica
  Transcript Sequence Number=SeqID_35966
ARTSILEVELKFWIAGWSICASRRRINWGRRPPCIDTKNWRMDAWRGSTTRPCGTTDGRKAAADWSTGGRFEDGRSRSGGRGKCVRKKRRFAPPPKNWGVLFLDVKFNSCHIKYIFRSKLDWLNYKTNCMDGR

SEQ ID NO: 101941 - protein, 210 aa, Setaria italica
  Transcript Sequence Number=SeqID_35967
RGGAPAAKKQPSKSRKVEVNEKYAKKVKPLYEKLSQIPKNQNNVNVNVNGASAGANNQPQQGFKKPFTFSIRKKRADDDHAVVAAAAAVDADVVSGKYAHSNSFSGNLRFPRQKRCAASCPSSMRSSPSHSGLLTFGGAGGAGFPDVPAAAAAAVAGGIGVGPVSLSTASSMEELQSAIEGAIAHCKNTMGGAVSVCPRKAATGDEICAF

SEQ ID NO: 101942 - protein, 75 aa, Setaria italica
  Transcript Sequence Number=SeqID_35968
  Gene Ontology: Mol. function=protein kinase activity; Biological process=protein amino acid phosphorylation
  Homolog annotation: Hit_ID=B6SV38; Match level="QueryCoverage=66%, HitCoverage=8%, E-value=8e-19, Identity=74%"; Hit description =BRASSINOSTEROID INSENSITIVE 1-associated receptor kinase 1
  Pfam annotation: Domain name=LRRNT_2; Domain location=22-66; Score =19.4; E_value=0.0094; Accession=PF08263.4; Description=Leucine rich repeat N-terminal domain
MTDHFPLSALLLLLLSTTCFSSDLDVQCLRDIMKSVIDPNGILKSSWIFENNTVGFICRFTGVECWHPDENRVLS

SEQ ID NO: 101943 - protein, 38 aa, Setaria italica
  Transcript Sequence Number=SeqID_35969
MSASATLIPAAGGKSSFTGFTKLCKGLAVILFLAHILV

SEQ ID NO: 101944 - protein, 321 aa, Setaria italica
  misc_feature (146)..(146): Xaa can be any naturally occurring amino acid
  Transcript Sequence Number=SeqID_35970
  Gene Ontology: Mol. function=ATP-dependent helicase activity; Cellular component=intracellular; Biological process=RNA processing
  Homolog annotation: Hit_ID=Q10HL3; Match level="QueryCoverage=99%, HitCoverage=22%, E-value=1e-104, Identity=61%"; Hit description =Endoribonuclease Dicer homolog 2a
  Pfam annotation: Domain name=Ribonuclease_3; Domain location=146-255; Score=98.8; E_value=1.8e-26; Accession=PF00636.18; Description=RNase3 domain
LACNSAWQGYIHGERFNLNKWIVPGLGYDNCGSTKSFLLPTNNMYSLKAISMKSKRIADTVEALIGAYLSASGEQAAFHFIKSLGMGVELHSEMQEERKIITKSEEIIDVRSLETMLDYVFNDRSLLIEALTHSSYNIAGPCYEVXRLEFLGDAVLDHIITDYFYKLYYPGCTPALLTNLRKASVNNCCYAHAAVKAGLHKHILHSSSKQMINDLENSGWSFSGPSHGWEPGIGLPEDLADLIESIAGAIYLDSKHKKEVVWRAMRRLLEPLATPKTVEVYPVSELKEICERRKYPKPSYSPTRDDGVGVTRVVAKVKAAL

SEQ ID NO: 101945 - protein, 87 aa, Setaria italica
  Transcript Sequence Number=SeqID_35971
SLIGERVTHQCRRRKCILSRCLGASFFGDIMLRFPFTLPREERNDLCLVLCTYKQFHSVVLNLMYIIWFGQNWNTLQLMAFFQIKKK

SEQ ID NO: 101946 - protein, 79 aa, Setaria italica
  Transcript Sequence Number=SeqID_35972
NKQSYFHQSWPDAAVMYVQKARGLVRVVWLFLVGLLGSNLHVYMAGAHGRWQQDRLLRSLEIQGSQEAGGPIPAENGVR

SEQ ID NO: 101947 - protein, 73 aa, Setaria italica
  Transcript Sequence Number=SeqID_35973
HVLVSKVLVLTVDNTRSSSRAICQYPFGGSSSIIWQLLFIHHVSPCAFILNHIELTYSCTCRLLCINNPVMAL

SEQ ID NO: 101948 - protein, 72 aa, Setaria italica
  Transcript Sequence Number=SeqID_35974
MPGAGAGLPMGGLHQQQQQQQRGGIDGVADLVGAGGPDSMAFPSSSQGSLGSNQLGGENLQQQQHQQQMDAP

SEQ ID NO: 101949 - protein, 136 aa, Setaria italica
  misc_feature (48)..(48): Xaa can be any naturally occurring amino acid
  misc_feature (95)..(95): Xaa can be any naturally occurring amino acid
  Transcript Sequence Number=SeqID_35975
  Gene Ontology: Mol. function=binding; Cellular component=chloroplast
  Homolog annotation: Hit_ID=Q7XBT9; Match level="QueryCoverage=100%, HitCoverage=21%, E-value=5e-40, Identity=63%"; Hit description =Pentatricopeptide, putative, expressed
  Pfam annotation: Domain name=PPR; Domain location=25-59; Score=29.5; E_value=1.3e-05; Accession=PF01535.12; Description=PPR repeat
  Pfam annotation: Domain name=PPR; Domain location=60-94; Score=22.2; E_value=0.0021; Accession=PF01535.12; Description=PPR repeat
  Pfam module annotation: Pfam domain module=PPR::PPR; Domain location =25-59::60-94
QARLVEEACRLFDQMKQLGMASNTCTYNVMLRGLCRTRDICAVKQLLXEMELADVEMDSISFNTVVVFLIKSRLIDSAAAMIREMLNLGMKPSAXKTSSLLSQSVGYKFVLEDNTTTTVESDGSDSSSDLLVCSAS

SEQ ID NO: 101950 - protein, 214 aa, Setaria italica
  misc_feature (92)..(92): Xaa can be any naturally occurring amino acid
  misc_feature (100)..(100): Xaa can be any naturally occurring amino acid
  misc_feature (125)..(125): Xaa can be any naturally occurring amino acid
  misc_feature (147)..(147): Xaa can be any naturally occurring amino acid
  misc_feature (160)..(160): Xaa can be any naturally occurring amino acid
  Transcript Sequence Number=SeqID_35976
  Gene Ontology: Mol. function=protein serine/threonine kinase activity; Biological process=protein amino acid phosphorylation
  Homolog annotation: Hit_ID=Q0D4J7; Match level="QueryCoverage=100%, HitCoverage=62%, E-value=1e-111, Identity=89%"; Hit description =Serine/threonine-protein kinase SAPK2
  Pfam annotation: Domain name=Pkinase; Domain location=1-178; Score =77.8; E_value=4.1e-20; Accession=PF00069.17; Description=Protein kinase domain
ELFERICNAGRFSEDEARFFFQQLISGVSYCHSMQICHRDLKLENTLLDGSIAPRLKICDFGYSKSSVLHSQPKSTVGTPAYIAPEVLARKXYDGKVADXWSCGVTLYVMLVGAYPFEDPDEPKXFRKTLTRILSVQYAIPDLSEFXDECRHLLSRIFVXANPEQRITIPEIKNHPWFLKNLPIEMTDEYQMSVLTADMNFPSQSLEEIMAIIQ

SEQ ID NO: 101951 - protein, 339 aa, Setaria italica
  Transcript Sequence Number=SeqID_35977
  Gene Ontology: Mol. function=protein serine/threonine kinase activity; Biological process=protein amino acid phosphorylation
  Homolog annotation: Hit_ID=Q0D4J7; Match level="QueryCoverage=100%, HitCoverage=100%, E-value=0.0, Identity=90%"; Hit description =Serine/threonine-protein kinase SAPK2
  Pfam annotation: Domain name=Pkinase; Domain location=4-260; Score =311.5; E_value=1.7e-90; Accession=PF00069.17; Description=Protein kinase domain
  Pfam annotation: Domain name=Pkinase_Tyr; Domain location=4-258; Score=-36.3; E_value=2.6e-11; Accession=PF07714.9; Description =Protein tyrosine kinase
  Pfam module annotation: Pfam domain module=Pkinase::Pkinase_Tyr; Domain location=4-260::4-258
MERYEVIKDIGSGNFGVAKLVRDVRTKDLFAVKFIERGMKIDENVQREIMNHRSLRHPNIVKFKEVVLTPTHLAIVMEYASGGELFERICNAGRFSEDEARFFFQQLISGVSYCHSMQICHRDLKLENTLLDGSIAPRLKICDFGYSKSSVLHSQPKSTVGTPAYIAPEVLARKEYDGKVADVWSCGVTLYVMLVGAYPFEDPDEPKNFRKTLTRILSVQYAIPDFVRVSMECRHLLSRIFVANPEQRITIPEIKNHPWFLKNLPIEMTDEYQMSVLTADMNFPSQSLEEIMAIIQEARKPGDGMKLTGQLPGLGSMELDDIDVDDIDVDDSGDFVCAL

SEQ ID NO: 101952 - protein, 111 aa, Setaria italica
  misc_feature (63)..(63): Xaa can be any naturally occurring amino acid
  Transcript Sequence Number=SeqID_35978
  Gene Ontology: Mol. function=oxidoreductase activity; Cellular component=plasma membrane; Biological process=oxidation reduction
  Homolog annotation: Hit_ID=Q9ZUH5; Match level="QueryCoverage=71%, HitCoverage=27%, E-value=4e-16, Identity=55%"; Hit description=Short- chain dehydrogenase/reductase 2
LGASTALPDATKLALLHRLDAVRHDRAEVIPERLAVVTGGNKGVGLEVCRQLAPQGVTVILTXPRDEKRGTYAAESLCREYELPNIIFHQLDVRDDNSVTSLAHICFQYTG

SEQ ID NO: 101953 - protein, 168 aa, Setaria italica
  Transcript Sequence Number=SeqID_35979
  Gene Ontology: Mol. function=oxidoreductase activity; Cellular component=plasma membrane; Biological process=oxidation reduction
  Homolog annotation: Hit_ID=B9S6K7; Match level="QueryCoverage=80%, HitCoverage=44%, E-value=2e-39, Identity=58%"; Hit description =Carbonyl reductase, putative
  Pfam annotation: Domain name=KR; Domain location=37-145; Score=-90.3; E_value=0.074; Accession=PF08659.2; Description=KR domain
  Pfam annotation: Domain name=adh_short; Domain location=34-151; Score= -26.3; E_value=0.00074; Accession=PF00106.17; Description=short chain dehydrogenase
  Pfam module annotation: Pfam domain module=KR::adh_short; Domain location=37-145::34-151
MEKAAQAATGGTQGSPQHRLCAVRHDRAEVIPERLAVVTGGNKGVGLEVCRQLALQGVAVILTARDEKRGTYAAESLCCEYELTNIIFHQLDVRDDNSVTSLAQYIESRYGKLDILVNNAAITGIVADEEGLKALNIDLETWTSGRAANLLKEVFQNTYDEAFNCLNT

SEQ ID NO: 101954 - protein, 336 aa, Setaria italica
  misc_feature (37)..(37): Xaa can be any naturally occurring amino acid
  Transcript Sequence Number=SeqID_35980
  Gene Ontology: Mol. function=oxidoreductase activity; Cellular component=plasma membrane; Biological process=oxidation reduction
  Homolog annotation: Hit_ID=B9S6K7; Match level="QueryCoverage=86%, HitCoverage=95%, E-value=1e-102, Identity=61%"; Hit description =Carbonyl reductase, putative
  Pfam annotation: Domain name=KR; Domain location=40-151; Score=-83.7; E_value=0.032; Accession=PF08659.2; Description=KR domain
  Pfam annotation: Domain name=adh_short; Domain location=40-217; Score= -1.4; E_value=1.7e-05; Accession=PF00106.17; Description=short chain dehydrogenase
  Pfam module annotation: Pfam domain module=KR::adh_short; Domain location=40-151::40-217
MEKAAQAATGGTQGSPQHRLCAVRHDRAEVIPESLKXIPGLAVVTGGNKGVGLEVCRQLALQGVAVILTARDEKRGKDAAESLRCESELTNIIFHQLDVRDDNSVTSLAWYIESRYGKLDILVNNAAVSGIVADEEGLKALNIDAETWTSGRAANLLKEVFQNTYDEALNCLNTNYYGCKRVTEALLPLLKLSTSGARIVNASSLASELKRMPNEKLRNDLCDINIWDEDRIEAVLNTFLEDLKNGRLEEAGWPMMLPTYSVSKMVINLYTRIMARRYPEMRINCVRPGFVKTDICWNLGLLTPEQGARGPVMLALLPDDGPTGCYFDQTEMVKIW

SEQ ID NO: 101955 - protein, 227 aa, Setaria italica
  misc_feature (173)..(173): Xaa can be any naturally occurring amino acid
  Transcript Sequence Number=SeqID_35981
  Subcellular localization annotation: CTP_CleavageSite=76; ConfidenceScore=5.04e-01
RSRWGGFLSSSPWMSMTRRNWEAWRKPRSLPWMHLPPDLLRPSTKSQMMERSLGSALLSWTYRLVVEPRTARRRTVAGASTSVLSWLSTKLASCASSCAKACSRSCTTTVCTAPKSSLSTSCTMHREMSCLRYSCPTSSMVLPRRGRTNPSATHSRTSRAASTGVLSRIAARXRKHDLRWCGRSSKASDMIRRPLWLPAPPPLCCCSRAGASCAITSSHSAGSSFDR

SEQ ID NO: 101956 - protein, 57 aa, Setaria italica
  Transcript Sequence Number=SeqID_35982
LVWLKYFTKNESRLTIIASHKQDLVILPLSLKHAGSIMLSFPLRITSRRYSIFSVQL

SEQ ID NO: 101957 - protein, 69 aa, Setaria italica
  Transcript Sequence Number=SeqID_35983
  Homolog annotation: Hit_ID=Q7XVU7; Match level="QueryCoverage=98%, HitCoverage=7%, E-value=1e-28, Identity=82%"; Hit description =OSJNBa0035B13.4 protein
MGFVLQHQVILFCIGETFTDQPPIYPPIDLPVNTRANAADFDGPVPKPGVEVNLVDAVPCRIAFERGKE

SEQ ID NO: 101958 - protein, 142 aa, Setaria italica
  Transcript Sequence Number=SeqID_35984
  Homolog annotation: Hit_ID=Q7XVU7; Match level="QueryCoverage=85%, HitCoverage=13%, E-value=1e-52, Identity=86%"; Hit description =OSJNBa0035B13.4 protein
DSSVAVAERVHEMVKGFVLQHQVILFCIGETFTDQPPIYPPIDLPVNTRANAADFDGPVPKPGVEVNLVDAVPCRIAFERGKERHFCFLALSNGTSGWILLLEELPLKQQRGIVRVMAPLAGSDPRIDEKHEKWLHSSLFRS

SEQ ID NO: 101959 - protein, 520 aa, Setaria italica
  Transcript Sequence Number=SeqID_35985
  Gene Ontology: Mol. function=binding
  Homolog annotation: Hit_ID=Q7XVU7; Match level="QueryCoverage=98%, HitCoverage=44%, E-value=1e-100, Identity=74%"; Hit description =OSJNBa0035B13.4 protein
  Pfam annotation: Domain name=FPL; Domain location=5-156; Score=282.6; E_value=8.5e-82; Accession=PF09758.1; Description=Uncharacterised conserved protein
VIEALRSIAELMIYGDQHDPSFFEYFMEKQIMGEFARILRISKLSRVSLQLLQTMGIMIQNLRNEHSIYYIFSNEHINFLITYSFDFRIDEMLSYYISFLRAISGKLNKNTISLLVKTKNDEVTSFPLYVEALKFAFHEDSMIRVAIRTLTLNVYHVGDESVNRFVSRVPLSDYFSDIVQHFQKQCIDLDKLVTRSSRNANCSLPSSSVEDAIVQIEDTLYYFSDVMSSGIPDLERFITENILQVLVFRLLLPSLQRQSTDLDISVTTSMYLLCCILHIFKNKDMASTVAAALFHQPDCPDRKQVTPNGYTSEHDASENQCSSDSTCEQANEDQPTSLSAVSSPPSDCCQGNTPREHLLSYITGGDDSEALGSLCLFATLLQTKELDESMLDALGILPQRKQHKKLLLQALVGEDLAERRLFSSSSGLTDDSICSDFDVYVRKLQDKYGLQCHHPRQMTSKVHRYQVLDALVDLFCRSKVSADVRLVGGWLFRQLLPHGEEEFTAFHLRRLKVHPFINTA

SEQ ID NO: 101960 - protein, 237 aa, Setaria italica
  Transcript Sequence Number=SeqID_35986
  Homolog annotation: Hit_ID=Q7XVU7; Match level="QueryCoverage=97%, HitCoverage=44%, E-value=7e-57, Identity=71%"; Hit description =OSJNBa0035B13.4 protein
QYFVAIFDVYVRKLQDKYGLQCHHPRQMTSKVHRYQVLDALVDLFCRSKVSADVRLVGGWLFRQLLPHGEEEFTAFHLRRLKDSHKDCSAKLSEESGGCWCDMLLPVIKEAWKNCKKAIEASSPPKGSKSIIVPMDLYSFGGDSSVAVAERVHEMVKGFVLQHQVILFCIGETFTDQPPIYPPIDLPVNTRANAADFDGPVPKPGVEVNLVDAVPCRIAFERGKERLFLDQILPKGS

SEQ ID NO: 101961 - protein, 202 aa, Setaria italica
  Transcript Sequence Number=SeqID_35987
  Homolog annotation: Hit_ID=Q7XVU7; Match level="QueryCoverage=81%, HitCoverage=18%, E-value=2e-73, Identity=85%"; Hit description =OSJNBa0035B13.4 protein
TIRKKTLQQDQPPIYPPIDLPVNTRANAADFDGPVPKPGCEVNLVDAVPCRIAFERGKERHFCFLALSNGTSGWILLLEELPLKQQRGIVRVMAPLAGSDPRIDEKHEKWLHLRIRPSTLPFLDSGKQKGKTKKYLVDGRWTLAFSDEQSCKAAEAMVIEEMKLQQVAVGKQLQPLVEFDMPEDGLQHPQPSSHDIPSDDGS

SEQ ID NO: 101962 - protein, 115 aa, Setaria italica
  Transcript Sequence Number=SeqID_35988
  Homolog annotation: Hit_ID=Q6K9U1; Match level="QueryCoverage=87%, HitCoverage=15%, E-value=1e-22, Identity=62%"; Hit description=C2 domain-containing protein-like
MVVKIYNQLRLTQLSELGGGYISDEDVLDYVQGDMSKGSDFLGKERETFMDLLAALLASEEFQGIVSLETGTSRDPEQVGSGSGSADSVVSPAVANAETVSNSSTDTALVWLAAI

SEQ ID NO: 101963 - protein, 648 aa, Setaria italica
  Transcript Sequence Number=SeqID_35989
  Gene Ontology: Cellular component=integral to membrane
  Homolog annotation: Hit_ID=Q6K9U1; Match level="QueryCoverage=87%, HitCoverage=87%, E-value=0.0, Identity=80%"; Hit description=C2 domain-containing protein-like
  Pfam annotation: Domain name=C2; Domain location=391-476; Score=50.0; E_value=9e-12; Accession=PF00168.22; Description=C2 domain
  Pfam annotation: Domain name=DUF2404; Domain location=176-264; Score =4.1; E_value=0.00017; Accession=PF10296.1; Description=Putative integral membrane protein con
  Pfam module annotation: Pfam domain module=C2::DUF2404; Domain location=391-476::176-264
  Subcellular localization annotation: CTP_CleavageSite=43; ConfidenceScore=5.79e-01
MLTPSAGIPPPPPPSLSAASPSTSYFLPSLRPRRRCRCLPVPRAAAFPSKRTTPLPTTSLPPEAPAPSTAPQLDTPFTPAGAYRGAEDPLVSKLRTQLGVIHPLPAPPVSRFVIGLFALFFFVGAAFDKLWTLRKRRRAERELKVNGSWPQVPTSSFSFFLEEKDLQRKESVEWVNMVLGKLWKVYRTGIENWIVGLLQPVIDNLQKPDYVNRVEIRQFYLGEEPLSVRNVERRTSRRANDLQYQIGIRYAGGARMALALSLKFTKVPIVVPVWVRDFDIDGELWVKLRLIPTEPWVGAVSWAFVSLPKIKFELSLFRLFNLMAIPVLSMFLTKLLTEDLPRLFVRPKKIVLDFQKGRAMGPVSGSIASDIIQNVASDIIQDGNKDFVGELSVTLVDARKLSFTLFGKTDPYVVMILGDQVIKSKKNSQTTVIGLPGEPIWNQDFHLLVANPRKQKLTIQVKDSIGLTDVTIGTGEVELGSLKDTVPTDKIVTLYGEWGLFGKCAAGEVLLRLTFKAYVEDEEDETVRSELGGGYISDEDVLDYVQGDMSKGSDFLGKERETFMDLLAALLASEEFQGIVSLETGTSRDPEQVGSGSGSADSVVSPAVANAETVSNSSTDTALVWLAAITSVVVLVSSNLGASGYFNP

SEQ ID NO: 101964 - protein, 198 aa, Setaria italica
  misc_feature (106)..(106): Xaa can be any naturally occurring amino acid
  Transcript Sequence Number=SeqID_35990
DKTAEESGEASAAAAAADGTDTTSAWTGGKKPKIQSTPTSGSGDMGKVARDDDDDHSSAKIIVREQEQGPEQIEGIDWDQDKLDEKIDCYLQQLNRGLPDSDDDDXWVHCDDRQRREMNERLALCRIRAHEEEHRKLDDESLKAIYPANVLEDEEYYESYELDFEWYFDPQYCNYARLQDYQRLMLRNNAGIYVECSL

SEQ ID NO: 101965 - protein, 206 aa, Setaria italica
  Transcript Sequence Number=SeqID_35991
MYCFGMALMPCRLLAMGVLGNVFIVHGEYEDWEEYRKTCSTLEGDQASVQLWERLLSNTKLIEFFLTDNSCELLKIESVAFYHALKIAAELSCLFKALIHFGFTEFMWSVRYDNTWYKYYVVFFGEIWKRVAKQKMNFKEALKEVYYEGKYTLCNSEWKTEFESDDPNPGPLERLVCYPIRLSFHLSISLVLSSVSNSHWFTLMKR

SEQ ID NO: 101966 - protein, 59 aa, Setaria italica
  Transcript Sequence Number=SeqID_35992
  Subcellular localization annotation: CTP_CleavageSite=30; ConfidenceScore=5.43e-01
MAPVVHAAGLGTSGSGLTLNPVAERALSRRASTLSTPMSPPPAFGSIVTVLSIDGGGVR

SEQ ID NO: 101967 - protein, 155 aa, Setaria italica
  Transcript Sequence Number=SeqID_35993
  Gene Ontology: Mol. function=protein serine/threonine kinase activity; Biological process=protein amino acid phosphorylation
  Homolog annotation: Hit_ID=Q2RA93; Match level="QueryCoverage=59%, HitCoverage=20%, E-value=2e-39, Identity=82%"; Hit description =Probable serine/threonine-protein kinase WNK6
TDRTTTTRLRITRLIPIAGSDSDLAGGEEAAAEEEERRSAPARWLPIRRRRAAGRRSRPTRRTDPDVDEVDPTGRYLRYKEIVGSGAFKTVYKGFDAVDGIEVAWAKVEITGRIMGSPKELQRLKTEIQLLRSLQHKHILKLYASWVDSKKRTVN

SEQ ID NO: 101968 - protein, 44 aa, Setaria italica
  Transcript Sequence Number=SeqID_35994
VGTFYIVPDLNDFIRFLLPRDTHVIFITFCRHLTNIFVIMNPLI

SEQ ID NO: 101969 - protein, 73 aa, Setaria italica
  Transcript Sequence Number=SeqID_35995
  Gene Ontology: Mol. function=phosphotransferase activity, phosphate group as acceptor; Cellular component=flagellum; Biological process =nucleobase, nucleoside, nucleotide and nucleic acid metabolic process
  Homolog annotation: Hit_ID=B6T904; Match level="QueryCoverage=73%, HitCoverage=25%, E-value=1e-22, Identity=90%"; Hit description=UMP -CMP kinase family protein
  Pfam annotation: Domain name=ADK; Domain location=1-52; Score=-83.9; E_value=0.068; Accession=PF00406.14; Description=Adenylate kinase
YSFDCSEEEMERRLLGRNQGRVDDNIETIKKRFKTFVESSLPVIEHYNSKDKVKKVLVNYLVRETPIALWCIV

SEQ ID NO: 101970 - protein, 60 aa, Setaria italica
  Transcript Sequence Number=SeqID_35996
IKLLNDCKGGAYFLFLLPIAFVMSSFGILVLGVPTLSRWRQIAASQSLIKKFIGRSLGLS

SEQ ID NO: 101971 - protein, 85 aa, Setaria italica
  Transcript Sequence Number=SeqID_35997
  Gene Ontology: Mol. function=structural constituent of ribosome; Cellular component=intracellular; Biological process=translation
  Homolog annotation: Hit_ID=Q9SDG6; Match level="QueryCoverage=49%, HitCoverage=37%, E-value=3e-12, Identity=88%"; Hit description=60S ribosomal protein L30
  Subcellular localization annotation: CTP_CleavageSite=4; ConfidenceScore=5.05e-01
ATLVATKKSKKSTDNINNKLQFVTKSGKYTLGYKTVLRTLRNSKCDGGGGKDVNKVGEHLKGLGIPDGSTSSAAITCNNVLVLRC

SEQ ID NO: 101972 - protein, 72 aa, Setaria italica
  Transcript Sequence Number=SeqID_35998
  Gene Ontology: Mol. function=structural constituent of ribosome; Cellular component=intracellular; Biological process=translation
  Homolog annotation: Hit_ID=B6U9H6; Match level="QueryCoverage=97%, HitCoverage=61%, E-value=7e-33, Identity=91%"; Hit description=60S ribosomal protein L30
  Pfam annotation: Domain name=Ribosomal_L7Ae; Domain location=2-66; Score=32.7; E_value=1.5e-06; Accession=PF01248.18; Description =Ribosomal protein L7AeL30eS12eGadd45 family
FTAKLVIIANNCPPLRKSEIEYYAMLAKVTVHHFHGNNVDLGTACGKYFRVCCLSIIDPGDSDIIKTTPGDQ

SEQ ID NO: 101973 - protein, 112 aa, Setaria italica
  Transcript Sequence Number=SeqID_35999
  Gene Ontology: Mol. function=structural constituent of ribosome; Cellular component=intracellular; Biological process=translation
  Homolog annotation: Hit_ID=Q9SDG6; Match level="QueryCoverage=100%, HitCoverage=100%, E-value=1e-55, Identity=94%"; Hit description=60S ribosomal protein L30
  Pfam annotation: Domain name=Ribosomal_L7Ae; Domain location=12-106; Score=114.7; E_value=3e-31; Accession=PF01248.18; Description =Ribosomal protein L7AeL30eS12eGadd45 family
  Subcellular localization annotation: CTP_CleavageSite=19; ConfidenceScore=5.14e-01
MVATKKSKKSTDNINNKLQLVMKSGKYTLGYKTVLRTLRNSKSKLVIIANNCPPLRKSEIEYYAMLAKVTVHHFHGNNVDLGTACGKYFRVCCLSIIDPGDSDIIKTTPGDQ

SEQ ID NO: 101974 - protein, 32 aa, Setaria italica
  Transcript Sequence Number=SeqID_36000
MQITVQQIYMINWLKCCITDTQRWLNSKINMP

SEQ ID NO: 101975 - protein, 70 aa, Setaria italica
  Transcript Sequence Number=SeqID_36001
MRWAAFLWEGASGGARRRPGVSNLLLVVAAASSGGLVAYADSGSDAAVEKPQLPQRKKVVVLGTGWGGTT

SEQ ID NO: 101976 - protein, 237 aa, Setaria italica
  misc_feature (226)..(226): Xaa can be any naturally occurring amino acid
  Transcript Sequence Number=SeqID_36002
  Gene Ontology: Mol. function=electron carrier activity; Cellular component=cytoplasm; Biological process=tRNA wobble uridine modification
  Homolog annotation: Hit_ID=Q9SHS2; Match level="QueryCoverage=97%, HitCoverage=31%, E-value=1e-122, Identity=86%"; Hit description =Similar to glucose inhibited division protein A from prokaryotes
  Pfam annotation: Domain name=GIDA; Domain location=2-237; Score =203.7; E_value=5.1e-58; Accession=PF01134.14; Description=Glucose inhibited division protein A
  Subcellular localization annotation: CTP_CleavageSite=31; ConfidenceScore=5.07e-01
FFGMDFYAPSVVLTTGTFMSGKIWVGRTSMPAGRAGESASHGLTENLQQLGFETDRLKTGTPPRIDRRTVDFSGLEPQHGDEEVGWFSFDPEFHVEREQMCCYLTRTTKETHQIVRDNLDETPTYGGWVEAKGPRYCPAIEDKIVRFKDKESHQIFLEPEGRNVPELYLQGFSTGLPERLQLSLVRTIPGLENCLMLRPAYAVEYDYLPAYQCSRSLMTKKFEGLXFFSGQIKWNNR

SEQ ID NO: 101977 - protein, 147 aa, Setaria italica
  Transcript Sequence Number=SeqID_36003
  Gene Ontology: Mol. function=metal ion binding
  Homolog annotation: Hit_ID=B6T287; Match level="QueryCoverage=94%, HitCoverage=33%, E-value=2e-50, Identity=73%"; Hit description =Protein binding protein
MFCRIDELSPEQRPCLSRRATVQEQISSSFMDSPPPPHLDAPFFGADLIPSGRLRRMRGYRHSPGGLEEEIMMFQTRVLLGGMNMYDRYQDWRLDVDNMTYEVCIPFCCILHPAYYHCHQTVISHFALQELLDLGDKIGYVSTGLRE

SEQ ID NO: 101978 - protein, 262 aa, Setaria italica
  misc_feature (21)..(21): Xaa can be any naturally occurring amino acid
  Transcript Sequence Number=SeqID_36004
  Gene Ontology: Mol. function=metal ion binding
  Homolog annotation: Hit_ID=B6T287; Match level="QueryCoverage=86%, HitCoverage=66%, E-value=1e-120, Identity=89%"; Hit description =Protein binding protein
  Pfam annotation: Domain name=PHD; Domain location=214-258; Score =10.2; E_value=0.002; Accession=PF00628.21; Description=PHD-finger
  Pfam annotation: Domain name=zf-C3HC4; Domain location=215-255; Score= 43.9; E_value=6.5e-10; Accession=PF00097.17; Description=Zinc finger, C3HC4 type (RING finger)
  Pfam annotation: Domain name=zf-RING-like; Domain location=215-255; Score=2.0; E_value=0.091; Accession=PF08746.3; Description=RING-like domain
  Pfam module annotation: Pfam domain module=PHD::zf-C3HC4::zf-RING -like; Domain location=214-258::215-255::215-255
ADWHGRRRRRGREGAIGERRXGGGAGGGGLVTGGIGADVWCAPGIPFAAEASSVDCVVARHQMVGRGGRGADGERSHRERPCLSRRATVQEQISSSFMDSPPPPHLDAPFFGADLIPSGRLRRMRGYRHSPGGLEEEIMMFQTRVLLGGMNMYDRYQDWRLDVDNMTYEELLDLGDKIGYVSTGLREDEITRSIRKVTQPSFGSFRFATEMERKCSICQEEFEANEEMGRLDCGHSYHVYCIKKWLSQKNTCPVCKTAVTKT

SEQ ID NO: 101979 - protein, 134 aa, Setaria italica
  Transcript Sequence Number=SeqID_36005
  Gene Ontology: Mol. function=protein disulfide oxidoreductase activity; Cellular component=plasma membrane; Biological process =cell redox homeostasis
  Homolog annotation: Hit_ID=B6SUA0; Match level="QueryCoverage=99%, HitCoverage=100%, E-value=8e-71, Identity=95%"; Hit description =Thioredoxin H-type
  Pfam annotation: Domain name=Thioredoxin; Domain location=22-127; Score=102.4; E_value=1.6e-27; Accession=PF00085.12; Description =Thioredoxin
MGGCAGKARRDDEDKLDFKGGNVHIITSKEGWDQKIAEANRDGKTVVANFSASWCGPCRVIAPVYAEMSKTYPQLMFLTIDVDDLMDFSSSWDIRATPTFFFLKNGQQIDKLVGANKPELEKKVLAAADGSSSK

SEQ ID NO: 101980 - protein, 62 aa, Setaria italica
  Transcript Sequence Number=SeqID_36006
MESSAKQETQPKPRLIVRLGVFLASHHILFSVICCFAGIIALLLLPSLAKNTYLSENALIPG

SEQ ID NO: 101981 - protein, 718 aa, Setaria italica
  Transcript Sequence Number=SeqID_36007
  Gene Ontology: Cellular component=GPI-anchor transamidase complex
  Homolog annotation: Hit_ID=Q8GUL0; Match level="QueryCoverage=96%, HitCoverage=96%, E-value=1e-160, Identity=45%"; Hit description =GPAA1-like protein
  Pfam annotation: Domain name=Gaa1; Domain location=147-707; Score =29.6; E_value=2.4e-13; Accession=PF04114.6; Description=Gaa1-like, GPI transamidase component
MESSAKQETQPKPRLIVRLGVFLASHHILFSVICCFAGIIALLLLPSLAKNTYLSENALIPGSANPLYSTEDAIEANRFMKGIEAAAGDSMGGINMAKFIAQQIEDLGAEVCYHKFLPHSKHFHPLKFFTSTSNHMAIQPNGTDINFGINTIGIIRAPRGDGKEAIVLVTPYNSQRVHSNELLSLALGFSVFSLLSRAAWLSKDIVWLSADSQFGEYTAVSAWLNQYHNPVFLSHSVILDTKIYGADHIYDGNTEKAEFESFKRAGTMAAALIFKVGETRRYGDRDSVMMYAEASNGQMPNLDLLNVVHYLAVHRQGFRVNIAAFSSLLSSAWLRVIAEFFHTIGTVLRKINPDWKLDITVPDYVEGTANLANSIYNQALGVPTGSHGAFRDYQVDAVSLEFSPTFNVRNENAKSLFLLRGGRLVEGVVRSVNNLLEKFHQSFFLYFLTAPSKFISVGVYMIPFALLLAPLPIVAAALADGSKTMEKLAEKSIDDSKANGSAHFLQSNKGGSWKWLQAAKVLLVIQLWAVVVSLLPYYITQIPDATPMQSAVIWAMLSIVILVALYVMFGSPYSAGVEWKLLKATMITSISIGLGLMSIINFATAQLGALIVIPMCLFSRPLKARSGINFLPRAALLASNITLAVLGFPPAALLIMKGLSKGSWTVDIGEFWVWMEFLWEWSSATYLYLFLVHLPCWLLCIHVLLHPCRQSESKMKQE

SEQ ID NO: 101982 - protein, 75 aa, Setaria italica
  Transcript Sequence Number=SeqID_36008
RSSISIPYDQFKLFISSTQKFHHKVQVFLHDALESNTYSRCLANEPVTFVLAYLLVVSPMWIAWFLYSWRFGSRK

SEQ ID NO: 101983 - protein, 401 aa, Setaria italica
  Transcript Sequence Number=SeqID_36009
  Gene Ontology: Mol. function=nucleotide binding; Cellular component =chromatin; Biological process=defense response
  Homolog annotation: Hit_ID=Q2QZH5; Match level="QueryCoverage=100%, HitCoverage=42%, E-value=1e-119, Identity=55%"; Hit description=NB -ARC domain containing protein, expressed
  Pfam annotation: Domain name=NACHT; Domain location=178-326; Score= -34.8; E_value=0.039; Accession=PF05729.4; Description=NACHT domain
  Pfam annotation: Domain name=NB-ARC; Domain location=155-398; Score =39.9; E_value=1e-11; Accession=PF00931.14; Description=NB-ARC domain
  Pfam module annotation: Pfam domain module=NACHT::NB-ARC; Domain location=178-326::155-398
NGCILPKGVENEIPLIKHDLEEILAILSNLDDDHAMVVRCWRKEVRELSYDIEDFINQYEHAKAGSWTGSIPRRKIIQRHNSRTTLYRLREKLRHRLWIANKIREFSVRAQEVLQRHSMYNLDSIAGSSSRRYAGAHFTSSHPTPCWDGNALVGISATMDKLEEGLMKMDDEGHQKLKVVSIVGFGGIGKTTLANELYRKLGRQFECRAFLRTSQKPDMRRILISMLSQVRPQQPPDNWTVHSLISTIRTHLQHKRYFVIVEDLWATSSWDILKCALPDDSCCSRILITTEIEDLALQSCGYDPNYIFKLNPLGEDDSRKLFFSSVFGPQQECPPEHREVYCDIVRKCGGLPLAIVTIASIFAGQLNVKEQMDYLNKSLGCSLITNATLEGIKQVIDLSYN

SEQ ID NO: 101984 - protein, 55 aa, Setaria italica
  Transcript Sequence Number=SeqID_36010
QERSCTVDSSKERGILSCVESIFRPIYRNRPQHGEVTFDILGASSVSLSHDCIVM

SEQ ID NO: 101985 - protein, 138 aa, Setaria italica
  misc_feature (17)..(17): Xaa can be any naturally occurring amino acid
  Transcript Sequence Number=SeqID_36011
  Gene Ontology: Mol. function=protein serine/threonine kinase activity; Biological process=protein amino acid phosphorylation
  Homolog annotation: Hit_ID=Q94EN6; Match level="QueryCoverage=100%, HitCoverage=44%, E-value=9e-67, Identity=92%"; Hit description =Phosphoenolpyruvate carboxylase kinase
  Pfam annotation: Domain name=Pkinase; Domain location=1-125; Score= -72.6; E_value=0.00036; Accession=PF00069.17; Description=Protein kinase domain
APRARLADFGSAAWVGXGGLGRAEGLVGTPHYVAPEVVSGGEYGAKADVWSAGVVMYTLLSGGALPFGGESGAEVLAAVMRGSVRFPPRLFGGVSPAAKDLMRRMICRDEWRRFTAEQVLAHPWIVSGGGARAVGQPT

SEQ ID NO: 101986 - protein, 91 aa, Setaria italica
  Transcript Sequence Number=SeqID_36012
  Gene Ontology: Mol. function=L-ascorbate peroxidase activity; Cellular component=cytoplasm; Biological process=hydrogen peroxide catabolic process
  Homolog annotation: Hit_ID=Q10N21; Match level="QueryCoverage=85%, HitCoverage=31%, E-value=6e-37, Identity=94%"; Hit description=L -ascorbate peroxidase 1, cytosolic
MGLSDQDIVALSGGHTLGRCHKERSGFEGAWTRNPLVFDNSYFKELVSGDKEGLLQLPSDKALLSDPAFRPLVEKYAAVCLQFNCHPEFGD

SEQ ID NO: 101987 - protein, 251 aa, Setaria italica
  misc_feature (17)..(17): Xaa can be any naturally occurring amino acid
  misc_feature (52)..(52): Xaa can be any naturally occurring amino acid
  misc_feature (178)..(178): Xaa can be any naturally occurring amino acid
  Transcript Sequence Number=SeqID_36013
  Gene Ontology: Mol. function=nucleic acid binding; Cellular component= intracellular; Biological process=regulation of transcription, DNA -dependent
  Homolog annotation: Hit_ID=Q60F45; Match level="QueryCoverage=98%, HitCoverage=64%, E-value=6e-82, Identity=61%"; Hit description =Putative transcription factor IIIA
  Pfam annotation: Domain name=zf-C2H2; Domain location=11-34; Score =6.5; E_value=2.4; Accession=PF00096.18; Description=Zinc finger, C2H2 type
  Pfam annotation: Domain name=zf-C2H2; Domain location=116-141; Score =22.9; E_value=0.0013; Accession=PF00096.18; Description=Zinc finger, C2H2 type
  Pfam annotation: Domain name=zf-C2H2; Domain location=153-177; Score =26.8; E_value=8.8e-05; Accession=PF00096.18; Description=Zinc finger, C2H2 type
  Pfam annotation: Domain name=zf-C2H2; Domain location=186-211; Score =6.5; E_value=2.4; Accession=PF00096.18; Description=Zinc finger, C2H2 type
  Pfam annotation: Domain name=zf-C2H2; Domain location=214-235; Score =7.1; E_value=2; Accession=PF00096.18; Description=Zinc finger, C2H2 type
  Pfam annotation: Domain name=zf-C2H2; Domain location=59-81; Score =27.9; E_value=4.1e-05; Accession=PF00096.18; Description=Zinc finger, C2H2 type
  Pfam annotation: Domain name=zf-C2H2; Domain location=87-111; Score =30.2; E_value=8.3e-06; Accession=PF00096.18; Description=Zinc finger, C2H2 type
  Pfam module annotation: Pfam domain module=zf-C2H2::zf-C2H2::zf -C2H2::zf-C2H2::zf-C2H2::zf-C2H2::zf-C2H2; Domain location=11-34::116- 141::153-177::186-211::214-235::59-81::87-111
GQKGFKDIRRYKCEFCXTVVRSKKCLIQAHMVAHHKDELDKSETYNSNGEKXIICEEEHRCPECGACFQKPAHLKQHMQSHSNERLFICPLEDCPFSYKRKDHLNRHMLKHQGKLFGCTVDGCDRRFSIKANMQRHVKEFHEDENVTKSSQEFICKEEGCNKAFKYLSKLRKHEESHXVKLDYVEVVCCEPGCMKMFTNVECLKAHNQSCHQHVQCEICGEKHLKKNIKRHLQAHDEVPTGARMKCTFEGC

SEQ ID NO: 101988 - protein, 134 aa, Setaria italica
  misc_feature (74)..(74): Xaa can be any naturally occurring amino acid
  Transcript Sequence Number=SeqID_36014
  Gene Ontology: Mol. function=nucleic acid binding; Cellular component= intracellular; Biological process=regulation of transcription, DNA -dependent
  Homolog annotation: Hit_ID=C0J7J9; Match level="QueryCoverage=100%, HitCoverage=32%, E-value=3e-49, Identity=67%"; Hit description =Transcription factor IIIA ES isoform (Fragment)
  Pfam annotation: Domain name=zf-C2H2; Domain location=101-126; Score =1.4; E_value=8.4; Accession=PF00096.18; Description=Zinc finger, C2H2 type
  Pfam annotation: Domain name=zf-C2H2; Domain location=3-27; Score =30.2; E_value=8.3e-06; Accession=PF00096.18; Description=Zinc finger, C2H2 type
  Pfam annotation: Domain name=zf-C2H2; Domain location=32-57; Score =22.9; E_value=0.0013; Accession=PF00096.18; Description=Zinc finger, C2H2 type
  Pfam annotation: Domain name=zf-C2H2; Domain location=69-93; Score =26.6; E_value=0.0001; Accession=PF00096.18; Description=Zinc finger, C2H2 type
  Pfam module annotation: Pfam domain module=zf-C2H2::zf-C2H2::zf -C2H2::zf-C2H2; Domain location=101-126::3-27::32-57::69-93
RLFICPLEDCPFSYKRKDHLNRHMLKHQGKLFGCTVDGCDRRFSIKANMQRHVKEFHEDENVTKSSQEFICKEXGCNKAFKYLSKLRKHEESHVKLDYVEVVCCEPCCMKMFTNVECLKAHNQSCHQHVQCEIC

SEQ ID NO: 101989 - protein, 202 aa, Setaria italica
  misc_feature (56)..(56): Xaa can be any naturally occurring amino acid
  misc_feature (66)..(66): Xaa can be any naturally occurring amino acid
  Transcript Sequence Number=SeqID_36015
  Gene Ontology: Mol. function=peroxidase activity; Cellular component =cytoplasm; Biological process=hydrogen peroxide catabolic process
  Homolog annotation: Hit_ID=A4ZYP9; Match level="QueryCoverage=100%, HitCoverage=80%, E-value=1e-111, Identity=97%"; Hit description =Asorbate peroxidase
  Pfam annotation: Domain name=peroxidase; Domain location=19-200; Score=145.1; E_value=2.2e-40; Accession=PF00141.15; Description =Peroxidase
MAKCYPTVSAEYQEAVEKARRKLRALIAEKSCAPLMLRLAWHSAGTFDVSTKTGGXPFGTMKNPAXEQAHGANAGLDIAVRMLEPVKEEFPILSYADLYQLAGVVAVEVTGGPEIPFHPGREDKPQPPPEGRLPDATKGSDHLRQVFGKQMGLSDQDIVALSGGHTLGRCHKERSGFEGAWTRNPLVFDNSYFKELVSGDKE

SEQ ID NO: 101990 - protein, 75 aa, Setaria italica
  Transcript Sequence Number=SeqID_36016
WLRSSLASDRGDAAVLEKMSARLLVSCCFYVTRQFAQIVVQIDAFFVSRFGSELVELLYPDTVASISFCILLVQD

SEQ ID NO: 101991 - protein, 70 aa, Setaria italica
  Transcript Sequence Number=SeqID_36017
TRRTLTDKLTEAPKFLLHECSPRLDYCYRHYCPSTIARNEAKIHCKRSLPTPLRRTPLSYLHCGRMKRSI

SEQ ID NO: 101992 - protein, 144 aa, Setaria italica
  Transcript Sequence Number=SeqID_36018
  Gene Ontology: Mol. function=protein serine/threonine kinase activity; Biological process=protein amino acid phosphorylation
  Homolog annotation: Hit_ID=Q2EF47; Match level="QueryCoverage=100%, HitCoverage=50%, E-value=9e-71, Identity=89%"; Hit description =Phosphoenolpyruvate carboxylase kinase 1
  Pfam annotation: Domain name=Pkinase; Domain location=1-136; Score =17.6; E_value=1.5e-09; Accession=PF00069.17; Description=Protein kinase domain
AHRDVKPDNLFFDAGGALRLGDFGSAGWFGDGRPMTGLVGTPYYVAPEVVAGREYTEKVDVWSAGVVLYVMLSGTVPFGGATAGEIFEAVLRGNLRFPPRAFAGVSPEAKDLMRRMLCKDVSRRFSAEQVLRHPWIVTRGGSAA

SEQ ID NO: 101993 - protein, 93 aa, Setaria italica
  Transcript Sequence Number=SeqID_36019
  Subcellular localization annotation: CTP_CleavageSite=44; ConfidenceScore=5.74e-01
MAASAPLRLLSPSSSPRSPQDPSPRPVPPLHAWLPRRRQLRAVRCASSLPPPPLSSLDLPLLPFQPAEVLIPSESKTLHLYEARYIALLEGRP

SEQ ID NO: 101994 - protein, 64 aa, Setaria italica
  Transcript Sequence Number=SeqID_36020
TNRLPQCINQASKAFRWPLHSAVCNNGGTSTPIMGGHLHRPAGHRRPLPHGRPPLPPPAASTQA

SEQ ID NO: 101995 - protein, 58 aa, Setaria italica
  Transcript Sequence Number=SeqID_36021
  Gene Ontology: Cellular component=cytoplasm
  Homolog annotation: Hit_ID=Q3MQ01; Match level="QueryCoverage=72%, HitCoverage=10%, E-value=1e-10, Identity=78%"; Hit description =Autophagy protein 5
MAAAHEEAAAWSEEAARRVWGGAVPLQVHLHDADVTALPPPPPFLTLGPRIGVFCPLL

SEQ ID NO: 101996 - protein, 155 aa, Setaria italica
  Transcript Sequence Number=SeqID_36022
  Gene Ontology: Cellular component=integral to membrane
  Homolog annotation: Hit_ID=B9RP61; Match level="QueryCoverage=97%, HitCoverage=33%, E-value=3e-34, Identity=52%"; Hit description =Triose phosphate/phosphate translocator, non-green plastid, chloroplast, putative
  Pfam annotation: Domain name=TPT; Domain location=1-117; Score=78.9; E_value=1.8e-20; Accession=PF03151.8; Description=Triose-phosphate Transporter family
PIQPTTLTNIAPCCLAFLTIPWYAVELPRLRAAAASAAGLARPDVFVFGTNSLCAFALNLAVFLLVGKTSALTMNVAGVVKDWLLITFSWTVIKDTVTPINLAGYGIAFLGVAYYNHAKLQGLKAKEAERKAAATAVPKPDDAEAAARLLPEKDG

SEQ ID NO: 101997 - protein, 273 aa, Setaria italica
  Transcript Sequence Number=SeqID_36023
  Gene Ontology: Cellular component=chromosome, centromeric region; Biological process=chromosome segregation
  Homolog annotation: Hit_ID=Q4QSC8; Match level="QueryCoverage=98%, HitCoverage=54%, E-value=7e-70, Identity=55%"; Hit description =Shugoshin-1
  Pfam annotation: Domain name=Shugoshin_C; Domain location=246-273; Score=23.8; E_value=0.00071; Accession=PF07557.3; Description =Shugoshin C terminus
QTNEQRRRSSRLNQVPCEIAEVSHKTLHEDIIVPSPSSTLSVQKHHGPTAGKDTGKSLQNECSAVVHEELMSSVVEEIEINEQPQKGVNLKVQEACSSVTRVEAHQIDVKACDTKHSHLASQSSVPFNITEPPKPPEDTCIKRSSNKQKLALCETGEAVEDVNSKCGVTISEQLRQEKKRKSQRRGTARLNSVSAENTDSAFETLQEDVIAPLASSSSIASMEQKTTQKQNDACSSMKSTEGQVVAGRRSLRRAAEKVVSYKEIPLNVKMRRP

SEQ ID NO: 101998 - protein, 66 aa, Setaria italica
  Transcript Sequence Number=SeqID_36024
EADCQSSCYWLLLASIDIDHTRSTYRGCLIIRIYYIEIRPVDMPMALESWLTKVRSAMSSAKSSGA

SEQ ID NO: 101999 - protein, 159 aa, Setaria italica
  misc_feature (55)..(55): Xaa can be any naturally occurring amino acid
  Transcript Sequence Number=SeqID_36025
  Gene Ontology: Mol. function=hydroxymethylglutaryl-CoA lyase activity; Cellular component=mitochondrial inner membrane; Biological process=metabolic process
  Homolog annotation: Hit_ID=B6U7B9; Match level="QueryCoverage=87%, HitCoverage=34%, E-value=2e-61, Identity=82%"; Hit description =Hydroxymethylglutaryl-CoA lyase
  Pfam annotation: Domain name=HMGL-like; Domain location=1-139; Score=- 53.7; E_value=3e-06; Accession=PF00682.11; Description=HMGL-like
ECRYVSCVVGCPVDGPVPPSNVAYVAKVLDYLACSVYPGTVVPMLEATMSAVPVXKLAVHFHDTYGQSLSNILISLQMGISVVDSSVAGLGGCPYAKGASGNVATEDVVYMLNGLGIKMGVDLGKVMAAGEFICKHLGRQSGSKAATALSKVTANASKL

SEQ ID NO: 102000 - protein, 128 aa, Setaria italica
  Transcript Sequence Number=SeqID_36026
  Gene Ontology: Mol. function=hydroxymethylglutaryl-CoA lyase activity; Biological process=metabolic process
  Homolog annotation: Hit_ID=B6U7B9; Match level="QueryCoverage=65%, HitCoverage=19%, E-value=2e-28, Identity=77%"; Hit description =Hydroxymethylglutaryl-CoA lyase
QGFEAAIAAGAKEIAIFASASEGFSKSNINCTIKESLARYNDVALAAKEREIPVRGYVSCVVGCPVDGPVPPSNVAYVAKELYDMGCYEVSLGDTIGVGTPGDVHYICNHPLPPPFSCVSERNPYDSL

SEQ ID NO: 102001 - protein, 448 aa, Setaria italica
  Transcript Sequence Number=SeqID_36027
  Gene Ontology: Mol. function=hydroxymethylglutaryl-CoA lyase activity; Cellular component=mitochondrial inner membrane; Biological process=metabolic process
  Homolog annotation: Hit_ID=B6U7B9; Match level="QueryCoverage=88%, HitCoverage=91%, E-value=1e-168, Identity=77%"; Hit description =Hydroxymethylglutaryl-CoA lyase
  Pfam annotation: Domain name=HMGL-like; Domain location=157-428; Score=265.8; E_value=1e-76; Accession=PF00682.11; Description=HMGL -like
  Subcellular localization annotation: CTP_CleavageSite=29; ConfidenceScore=5.32e-01
MLAASARVCSRLASPHASSPAGAAAAATAAAALASSPVLGSGMSALERQPAPPGAGFGDTGRGPAADDPPPRHCTSSGESREGYQLSRVPYQRHPMLDRGTVTAGSNHHVSAASCSSQYHQSYRYFSSSSDQQRIWAGNKHICDLPRCVKIVEVGPRDGLQNEKDIVPTPVKVELIRRLAASGLPVVEATSFVSPKWVPQLADAKNVMEAVRNIEGVRLPVLTPNLKGFEAAIAAGAKEIAIFASASEGFSKSNINCTIKESLARYNDVALAAKEREIPVRGYVSCVVGCPVDGPVPPSNVAYVAKELYDMGCYEVSLGDTIGVGTPGTVVPMLEATMSAVPVEKLAVHFHDTYGQSLSNILISLQMGISVVDSSVAGLGGCPYAKGASGNVATEDVVYMLNGLGIKMGVDLGKVMAAGEFICKHLGRQSGSKAATALSKVTANASKL

SEQ ID NO: 102002 - protein, 63 aa, Setaria italica
  Transcript Sequence Number=SeqID_36028
  Homolog annotation: Hit_ID=B6UET0; Match level="QueryCoverage=61%, HitCoverage=6%, E-value=2e-11, Identity=82%"; Hit description =Peptidase, M50 family
  Subcellular localization annotation: CTP_CleavageSite=46; ConfidenceScore=5.68e-01
MASASLASSVLCSSSGSTSRSAAVPRAIRIPLFPKNQHRPPLRPLRSSSVARRSLQQEQEERA

SEQ ID NO: 102003 - protein, 133 aa, Setaria italica
  misc_feature (52)..(52): Xaa can be any naturally occurring amino acid
  Transcript Sequence Number=SeqID_36029
  Gene Ontology: Mol. function=protein serine/threonine kinase activity; Biological process=protein amino acid phosphorylation
  Homolog annotation: Hit_ID=B9SIQ7; Match level="QueryCoverage=86%, HitCoverage=14%, E-value=2e-38, Identity=62%"; Hit description =Serine-threonine protein kinase, plant-type, putative
  Pfam annotation: Domain name=Pkinase; Domain location=1-132; Score= -78.1; E_value=0.00077; Accession=PF00069.17; Description=Protein kinase domain
  Pfam annotation: Domain name=Pkinase_Tyr; Domain location=1-133; Score=-127.5; E_value=3e-05; Accession=PF07714.9; Description =Protein tyrosine kinase
  Pfam module annotation: Pfam domain module=Pkinase::Pkinase_Tyr; Domain location=1-132::1-133
GGGGFGSVFKGKIGKQTIAVKRLEGLEQGMEEFLAEVKTIGRIHHFNLIRLXLLVYEYLSNGSLDKWIFPKSTVFTLSWKTRRDIILGIARGLSYLHEECEQRIAHLDIKPQNILLDDKFSAKVSDLGLSKMY

SEQ ID NO: 102004 - protein, 102 aa, Setaria italica
  Transcript Sequence Number=SeqID_36030
TEADIRSPLTTPTTADLRCTGALQTTAIQRLTEFKVSLSFSLFASATCLGGVPSRIEEVHGGGVRGATQGWEGGGRGRSSAQQIAKKMTMPTLASQSTLISR

SEQ ID NO: 102005 - protein, 110 aa, Setaria italica
  Transcript Sequence Number=SeqID_36031
  Subcellular localization annotation: CTP_CleavageSite=24; ConfidenceScore=5.04e-01
ARTSLCPRSRPALMYLVTRHLNCTANSGSPPLPIALVCEGVSRHVVLASTRRVIRGDPFFPCLLHAPQGQVREQVKENTRMPSTAAASGPLGEVSSAAGLRWASPIGTRT

SEQ ID NO: 102006 - protein, 62 aa, Setaria italica
  Transcript Sequence Number=SeqID_36032
ARIQLQRKWDPCVSLLLFLSSSLEKLPTSTNFTAAGHYSVADWCRPSNGMRRQQPPAGFRAA

SEQ ID NO: 102007 - protein, 96 aa, Setaria italica
  Transcript Sequence Number=SeqID_36033
  Gene Ontology: Biological process=lipid transport
  Homolog annotation: Hit_ID=B6TGQ7; Match level="QueryCoverage=70%, HitCoverage=68%, E-value=3e-26, Identity=85%"; Hit description =Nonspecific lipid-transfer protein AKCS9
  Pfam annotation: Domain name=Tryp_alpha_amyl; Domain location=30-96; Score=27.4; E_value=6e-05; Accession=PF00234.14; Description =Protease inhibitorseed storageLTP f
MRPAVFLLVAVVVSLLASHAAADFSALAPCDVMQLNPCASAFAGKGSPTPACCARLKSHGPNCLCRFKDDANLKRLVDTRHKRRVFTACKVPVPSC

SEQ ID NO: 102008 - protein, 194 aa, Setaria italica
  Transcript Sequence Number=SeqID_36034
  Gene Ontology: Mol. function=methyltransferase activity; Cellular component=endoplasmic reticulum membrane; Biological process=GPI anchor biosynthetic process
  Homolog annotation: Hit_ID=B6SML3; Match level="QueryCoverage=100%, HitCoverage=87%, E-value=9e-85, Identity=79%"; Hit description =Glycosylphosphatidylinositol anchor biosynthesis protein 11
  Pfam annotation: Domain name=PIG-F; Domain location=3-194; Score =103.0; E_value=1e-27; Accession=PF06699.3; Description=GPI biosynthesis protein family Pig-F
MRAEATQISAFTTAAAHALCFAGLAVAHSLAGRGILVSDPALALRLLVVCEAPVVIAVFSYLRRDPRSCSFFKAAARGLIGLPVGAFLNAFGAIVLGAPVGIKYWTVTIYWSLLMSLFTFVPAACVFGTSKIDWQNVLSHSIYFTPTDIENYMISAPCHGAVLGAWLGAWPIAPDWERPWQEWPICVTYGAVAG

SEQ ID NO: 102009 - protein, 127 aa, Setaria italica
  Transcript Sequence Number=SeqID_36035
  Gene Ontology: Mol. function=methyltransferase activity; Cellular component=endoplasmic reticulum membrane; Biological process=GPI anchor biosynthetic process
  Homolog annotation: Hit_ID=B6SML3; Match level="QueryCoverage=100%, HitCoverage=57%, E-value=2e-61, Identity=88%"; Hit description =Glycosylphosphatidylinositol anchor biosynthesis protein 11
  Pfam annotation: Domain name=PIG-F; Domain location=1-114; Score=6.6; E_value=1.4e-05; Accession=PF06699.3; Description=GPI biosynthesis protein family Pig-F
GAIVLGAPVGIKYWTVTIYWSLLMSLFTFVPAACVFGTSKIDWQNVLSHSIYFTPTDIENYMISAPCHGAVLGAWLGAWPMPLDWERPWQEWPICVTYGAVAGHLVGMVVSWVLIAVHKRSGRAKAD

SEQ ID NO: 102010 - protein, 90 aa, Setaria italica
  Transcript Sequence Number=SeqID_36036
PPDAPPARVHKLGTACLIQVPIQFHLLKNLKCEDSRARNNLQCLDLQRDYLPESFLKHCFRKVWYEGKELAFRCEFVPLLPWTNFADHHW

SEQ ID NO: 102011 - protein, 87 aa, Setaria italica
  Transcript Sequence Number=SeqID_36037
  Subcellular localization annotation: CTP_CleavageSite=34; ConfidenceScore=5.40e-01
MRGLRQMVSGHAVASRAPWMALQGKGRRRRKMAVARLGGDVRPRRRFLGTALRRLHLRWRLAAMYRRALRRLRAACASGAVQRILES

SEQ ID NO: 102012 - protein, 61 aa, Setaria italica
  Transcript Sequence Number=SeqID_36038
VDKMQMNSSIDQTPSVRRGRKEENSVKGDKTDATSAPLTPTPLTPTPLRRSNRLRNKVISP

SEQ ID NO: 102013 - protein, 53 aa, Setaria italica
  Transcript Sequence Number=SeqID_36039
FFLSKTFCTRLQTSMVQNSRQLNTHWIKGTDAVTRKVQGNKGVKKQSLYPSYL

SEQ ID NO: 102014 - protein, 116 aa, Setaria italica
  misc_feature (107)..(107): Xaa can be any naturally occurring amino acid
  Transcript Sequence Number=SeqID_36040
  Gene Ontology: Mol. function=isomerase activity; Cellular component =integral to membrane; Biological process=protein folding
  Homolog annotation: Hit_ID=B6T929; Match level="QueryCoverage=69%, HitCoverage=12%, E-value=1e-35, Identity=87%"; Hit description =Peptidyl-prolyl isomerase PASTICCINO1
  Pfam annotation: Domain name=TPR_1; Domain location=31-64; Score =20.6; E_value=0.0065; Accession=PF00515.20; Description =Tetratricopeptide repeat
  Pfam annotation: Domain name=TPR_1; Domain location=65-98; Score =34.9; E_value=3.2e-07; Accession=PF00515.20; Description =Tetratricopeptide repeat
  Pfam annotation: Domain name=TPR_2; Domain location=31-64; Score =13.3; E_value=0.74; Accession=PF07719.9; Description=Tetratricopeptid e repeat
  Pfam annotation: Domain name=TPR_2; Domain location=65-98; Score =30.4; E_value=7.2e-06; Accession=PF07719.9; Description =Tetratricopeptide repeat
  Pfam module annotation: Pfam domain module=TPR_1::TPR_1::TPR_2::TPR _2; Domain location=31-64::65-98::31-64::65-98
MLGSIDNFPCASSNKQQWKICSPSLLLHLQSSLHLNVAFCYQRIGEYRKSIETCNKVLDANPVHVKALYRRGMSYMLLGEFDDARNDFKKMITIDKSSEPEATAALXKLKQKEQEA

SEQ ID NO: 102015 - protein, 77 aa, Setaria italica
  Transcript Sequence Number=SeqID_36041
  Gene Ontology: Mol. function=nucleic acid binding; Cellular component= intracellular
  Homolog annotation: Hit_ID=Q8GSF4; Match level="QueryCoverage=97%, HitCoverage=8%, E-value=3e-26, Identity=78%"; Hit description=SNF2P
SGIEPEPYVEGEHLVQVSGKLIVLDLVLKKLHELGHRVLLFAQMTQTLDILQDFLELRNYTYERLDGSVRAEERLQQ

SEQ ID NO: 102016 - protein, 60 aa, Setaria italica
  Transcript Sequence Number=SeqID_36042
  Gene Ontology: Mol. function=serine-type endopeptidase inhibitor activity; Cellular component=extracellular region; Biological process=response to wounding
  Homolog annotation: Hit_ID=Q6E648; Match level="QueryCoverage=98%, HitCoverage=78%, E-value=9e-17, Identity=76%"; Hit description=MPI
  Pfam annotation: Domain name=potato_inhibit; Domain location=15-60; Score=67.5; E_value=4.9e-17; Accession=PF00280.10; Description =Potato inhibitor I family
MSSSTEQVRCAGGGKTSWPEVVGMSVEEAKKVILKDKPDADIVVLPVGSPVTLDLRLDRV

SEQ ID NO: 102017 - protein, 35 aa, Setaria italica
  Transcript Sequence Number=SeqID_36043
QSVACWSDTPALECFKAIEQRPGRADQLLFWCEYW

SEQ ID NO: 102018 - protein, 68 aa, Setaria italica
  Transcript Sequence Number=SeqID_36044
  Gene Ontology: Mol. function=isomerase activity
  Homolog annotation: Hit_ID=Q9FMK4; Match level="QueryCoverage=57%, HitCoverage=5%, E-value=3e-09, Identity=70%"; Hit description =Topoisomerase-like protein
LAEHSVADGAGGKGTWGKLIDTDAEACLDRNDPNYDSGEVTYVGVERSTPTICSFALPQKIVYHMFNL

SEQ ID NO: 102019 - protein, 99 aa, Setaria italica
  misc_feature (8)..(8): Xaa can be any naturally occurring amino acid
  misc_feature (18)..(18): Xaa can be any naturally occurring amino acid
  Transcript Sequence Number=SeqID_36045
  Gene Ontology: Mol. function=isomerase activity; Biological process =protein amino acid phosphorylation
  Homolog annotation: Hit_ID=Q8LDN5; Match level="QueryCoverage=98%, HitCoverage=56%, E-value=6e-35, Identity=61%"; Hit description =Topoisomerase-like protein
  Pfam annotation: Domain name=MA3; Domain location=1-90; Score=77.0; E_ value=6.8e-20; Accession=PF02847.9; Description=MA3 domain
CNCIRELXMSFFNHEVVXKKALVMAMEKKNERTLSLLQECFGEGIITINQMTKGFSRVRDGLDDLALDIPDAREKFLSYVERAKKSGWLLPSFGISAVA

SEQ ID NO: 102020 - protein, 729 aa, Setaria italica
  Transcript Sequence Number=SeqID_36046
  Gene Ontology: Mol. function=isomerase activity; Cellular component =cytoplasm; Biological process=negative regulation of transcription
  Homolog annotation: Hit_ID=Q8LDN5; Match level="QueryCoverage=88%, HitCoverage=91%, E-value=0.0, Identity=69%"; Hit description =Topoisomerase-like protein
  Pfam annotation: Domain name=MA3; Domain location=150-261; Score =156.4; E_value=8.3e-44; Accession=PF02847.9; Description=MA3 domain
  Pfam annotation: Domain name=MA3; Domain location=314-425; Score =152.4; E_value=1.4e-42; Accession=PF02847.9; Description=MA3 domain
  Pfam annotation: Domain name=MA3; Domain location=448-559; Score =146.5; E_value=8e-41; Accession=PF02847.9; Description=MA3 domain
  Pfam annotation: Domain name=MA3; Domain location=611-720; Score =158.8; E_value=1.6e-44; Accession=PF02847.9; Description=MA3 domain
  Pfam module annotation: Pfam domain module=MA3::MA3::MA3::MA3; Domain location=150-261::314-425::448-559::611-720
MASPKKDGGFLTQDQREKLRIAVQNAETLSLASPRSPTGGSTSALLQQYELQMLEQKRAAAAAAVAAGRGGGGGGGGGGGGGGGPRHVRRSHSGKTIKVKKDGAGGKGTWGKLIDTDAEACLDRNDPNYDSGEEPYELVEAPVTTPLEVYKKSVVPIIEEYFSNGDVKLAASDLKELGYDDFHRYFVKKLVSMAMDRHDKEKEMASVLLSSLYGNVISSTQIRLGFVLLLEAVDDLAVDIPDVVDVLALFIARAVVDDILPPAFLSKAKVTLSESSKGLQVVQIAEKSYLSAPHHAELIERRWGGSTHITVEEVKKRIADLLKEYIRNGDTAEACRCIRELAVPFFHHEVVKRALTLGMESPAAEALIVKLLKEASEECLISSSQMMKGFSRVAESLDDLILDIPSAKSEFQLLVSKATSEGWLDSSYMSSGANGSVEDDEHEKLARYKREAVSIVHEYFLSDDTAEVIRSLKELGYPEYNPIFIKKLITIALDRKNREKEMASVLLSSLSMELFSTEDIVKGFIMLLESAEDTALDILDASDELGLFLARAVIDDVLAPLNLDEISSKLPPNCSGAETLNMARSLASARHAGERLLRCWGGGTGWAVEDAKDKITKLLEEYESGGDVGEACNCIRELGMSFFNHEVVKKALVMAMEKKNERTLSLLQECFGEGIITINQMTKGFSRVRDGLDDLALDIPDAREKFLSYVERAKKSGWLLPSFGIAAVA

SEQ ID NO: 102021 - protein, 202 aa, Setaria italica
  Transcript Sequence Number=SeqID_36047
  Homolog annotation: Hit_ID=O80941; Match level="QueryCoverage=99%, HitCoverage=36%, E-value=1e-65, Identity=58%"; Hit description =Putative zinc finger protein
  Pfam annotation: Domain name=DUF604; Domain location=86-202; Score =94.7; E_value=3.1e-25; Accession=PF04646.4; Description=Protein of unknown function, DUF604
PPYRVSADASRFGDRASAARMARIAADSFLAVAAELGNDTARDELRWFVMGDDDTVFFPDNLVAVLRKYDHGEMYYVGAPSESVEQDVMHSYGMAFGGGGFAVSYPAAAALAKAIDGCLDRYVYFYGSDQRVQACLAELGVPLTREPGFHQVDIRGDAYGMLAAHPVAPLVSLHHLDHIQPISPRGKTALEAVRPLVGASRR

SEQ ID NO: 102022 - protein, 220 aa, Setaria italica
  Transcript Sequence Number=SeqID_36048
  Gene Ontology: Mol. function=protein transporter activity; Cellular component=clathrin adaptor complex; Biological process=intracellular protein transport
  Homolog annotation: Hit_ID=Q10LA0; Match level="QueryCoverage=94%, HitCoverage=22%, E-value=1e-105, Identity=93%"; Hit description =Adapter-related protein complex 1 beta 1 subunit, putative, expressed
LSTSSWGPKFFLFLGISFVQDYKAADAREAENIVERVTPRLQHANCAVVLSAVKIILLQMELITSTDVVRNLCKKMAPPLVTLLSAEPEIQYVALRNINLIVQKRPTILAHEIKVFFCKYNDPIYVKMEKLEIMIKLASDRNIDQVLLEFKEYATEVDVDFVRKAVRAIGRCAIKLERAAERCISVLLELIKIKVNYVVQEAIIVIKDIFRTTNPNNVTK

SEQ ID NO: 102023 - protein, 269 aa, Setaria italica
  misc_feature (15)..(15): Xaa can be any naturally occurring amino acid
  Transcript Sequence Number=SeqID_36049
  Gene Ontology: Mol. function=protein transporter activity; Cellular component=clathrin adaptor complex; Biological process=intracellular protein transport
  Homolog annotation: Hit_ID=Q10LA0; Match level="QueryCoverage=100%, HitCoverage=29%, E-value=1e-145, Identity=94%"; Hit description =Adapter-related protein complex 1 beta 1 subunit, putative, expressed
  Pfam annotation: Domain name=Adaptin_N; Domain location=14-269; Score= -54.2; E_value=1.4e-06; Accession=PF01602.12; Description=Adaptin N terminal region
  Pfam annotation: Domain name=HEAT; Domain location=119-155; Score =29.3; E_value=1.6e-05; Accession=PF02985.14; Description=HEAT repeat
  Pfam annotation: Domain name=HEAT; Domain location=157-194; Score =17.3; E_value=0.064; Accession=PF02985.14; Description=HEAT repeat
  Pfam module annotation: Pfam domain module=Adaptin_N::HEAT::HEAT; Domain location=14-269::119-155::157-194
MSGHDSKYFSTTKKXGEIPELKEELNSQYKDKRKDAVKKVIAAMTVGKDVSSLFTDVVNCMQTENLELKKLVYLYLINYAKSQPDLAILAVNTFVKDSQDPNPLIRALAVRTMGCIRVDKITEYLCDPLQRCLKDDDPYVRKTAAICVAKLYDINAELVEDRGFLEALKDLISDNNPMVVANAVAALAEIQDSSVRPIFEITSHTLSKLLTALNECTEWGQVFILDSLSRYKAADAREAENIVERVTPRLQHANCAVVLSAVNTMLLQM

SEQ ID NO: 102024 - protein, 708 aa, Setaria italica
  Transcript Sequence Number=SeqID_36050
  Gene Ontology: Mol. function=protein transporter activity; Cellular component=clathrin adaptor complex; Biological process=intracellular protein transport
  Homolog annotation: Hit_ID=Q10LA0; Match level="QueryCoverage=98%, HitCoverage=77%, E-value=0.0, Identity=85%"; Hit description=Adapter- related protein complex 1 beta 1 subunit, putative, expressed
  Pfam annotation: Domain name=Adaptin_N; Domain location=2-345; Score =174.6; E_value=2.9e-49; Accession=PF01602.12; Description=Adaptin N terminal region
  Pfam annotation: Domain name=Alpha_adaptinC2; Domain location=476 -588; Score=53.2; E_value=9.8e-13; Accession=PF02883.12; Description =Adaptin C-terminal domain
  Pfam annotation: Domain name=B2-adapt-app_C; Domain location=597-708; Score=123.1; E_value=8.8e-34; Accession=PF09066.2; Description=Beta2 -adaptin appendage, C-terminal su
  Pfam module annotation: Pfam domain module=Adaptin_N::Alpha _adaptinC2::B2-adapt-app_C; Domain location=2-345::476-588::597-708
RNRQTSTKTTLDSTLAKLLKALNECTEWGQVFILDSLSRYKAADAREAENIVERVTPRLQHANCAVVLSAVKIILLQMELITSTDVVRNLCKKMAPPLVTLLSAEPEIQYVALRNINLIVQKRPTILAHEIKVFFCKYNDPIYVKMEKLEIMIKLASDRNIDQVLLEFKEYATEVDVDFVRKAVRAIGRCAIKLERAAERCISVLLELIKIKVNYVVQEAIIVIKDIFRRYPNTYESIIATLCESLDTLDEPEAKASMIWIIGEYAERIDNADELLESFLETFPEEPALVQLQLLTATVKLFLKKPTEGPQQMIQAVLNNATVETDNPDLRDRAYIYWRLLSTDPEAAKDVVLAEKPVISDDSNQLDSSLLDELLANISTLSSVYHKPPESFVSRVKAAPRADDEEFADTAEGGYSESPSQGVDGASPSSSVGTSSNVPVKQPGAGSPPAPAAMPDLLGDLMGMDNAIVPVDEAAAPSSPPPPVLLPSTTGQGLQISAQLTRRDGQIYYDISFENGTQGVLDGFMIQFNKNTFGLAAGEALKVPPLQPGATTRTLLQMVPFQNIAPGAPNSILQVAVKNNQQPVWYFNDKIPLHVFFGEDGKMERASFLEGWKSLPDDHEFTKEFPGSVISSIDATVERLAAANVFFIAKRKNANMDVLYLSAKMPRGIPFLIEITAAVGVPGVKCAVKTANKEMVPLFFEAMEALTK

SEQ ID NO: 102025 - protein, 200 aa, Setaria italica
  misc_feature (43)..(43): Xaa can be any naturally occurring amino acid
  Transcript Sequence Number=SeqID_36051
KGKNVGDGPEALLDLLAVAEEAELAGRDGGRHDVQLLVHHDQXIAPAAQAVHEDIDGVRPGHDAGEELHPLVRVHEDVDERDGAHEDERRVPGPLDIDVRRAELAAGLGEEAVVGGDVERLPRVPGDALGPELLAGLREADELVHGARRHVDHHGPLHLRHGRRHLERHPRRAPAEEVEVQRRPAAAEPMPGHPAHGQVQ

SEQ ID NO: 102026 - protein, 45 aa, Setaria italica
  Transcript Sequence Number=SeqID_36052
CNETTPCDKQNQTLQIKTTNPVELVYAKPAPEHCTSLQNWKHWQK

SEQ ID NO: 102027 - protein, 50 aa, Setaria italica
  misc_feature (11)..(11): Xaa can be any naturally occurring amino acid
  Transcript Sequence Number=SeqID_36053
  Gene Ontology: Mol. function=transferase activity, transferring glycosyl groups; Biological process=metabolic process
  Homolog annotation: Hit_ID=B6TL37; Match level="QueryCoverage=100%, HitCoverage=10%, E-value=6e-14, Identity=64%"; Hit description =Cytokinin-O-glucosyltransferase 2
SGWNSTTESIXVGVPMVCWPGFADQYINSRYTCGDWGIGLRLDEALRREQ

SEQ ID NO: 102028 - protein, 198 aa, Setaria italica
  Transcript Sequence Number=SeqID_36054
  Gene Ontology: Mol. function=metal ion binding; Cellular component =nucleus; Biological process=regulation of transcription, DNA -dependent
  Homolog annotation: Hit_ID=Q0JGI1; Match level="QueryCoverage=98%, HitCoverage=55%, E-value=6e-56, Identity=61%"; Hit description =Squamosa promoter-binding-like protein 2
  Pfam annotation: Domain name=SBP; Domain location=8-86; Score=175.8; E_value=1.2e-49; Accession=PF03110.6; Description=SBP domain
QAQQAVPACSVEGCAADLSKGRDYHRRHKVCEAHSKTPVVTVAGQQQRFCQQCSRFHSLGEFDDTKRSCRKRLDGHNRRRRKPQPDPLNPGGLFANHHGVTRFAAYPQLFASSLADPKWPVVKTEADVFQDQYYPAVHLNGAGSLFHGKDRKHFPFLTNHHHGGESAGAFGSQPFTITTASSESCSKQSNGNCALSLL

SEQ ID NO: 102029 - protein, 74 aa, Setaria italica
  Transcript Sequence Number=SeqID_36055
QQKKKSKYNCRLFLYDLDAIIKYLVRAPRNFEFTGKKTSKELAINFAKRESSTLVLCDMLHYGDYLRVKSSYQL

SEQ ID NO: 102030 - protein, 109 aa, Setaria italica
  misc_feature (8)..(8): Xaa can be any naturally occurring amino acid
  misc_feature (13)..(13): Xaa can be any naturally occurring amino acid
  Transcript Sequence Number=SeqID_36056
  Gene Ontology: Mol. function=nucleotide binding; Cellular component =integral to membrane; Biological process=protein insertion into membrane
  Homolog annotation: Hit_ID=B6UBJ7; Match level="QueryCoverage=83%, HitCoverage=19%, E-value=5e-37, Identity=83%"; Hit description=Inner membrane protein ALBINO3
  Pfam annotation: Domain name=60KD_IMP; Domain location=1-104; Score= -94.9; E_value=0.0011; Accession=PF02096.12; Description=60Kd inner membrane protein
SNVANEGXLTEGXFFWIPSLGGPTTIAARQSGAGISWLFPFVDGHPPLGWHDTICYLVLPVLLVASQFVSMEIMKPPQVNASLYTFSLCILPIVQCYGLTSNLWSATER

SEQ ID NO: 102031 - protein, 169 aa, Setaria italica
  misc_feature (35)..(35): Xaa can be any naturally occurring amino acid
  misc_feature (75)..(75): Xaa can be any naturally occurring amino acid
  misc_feature (148)..(148): Xaa can be any naturally occurring amino acid
  Transcript Sequence Number=SeqID_36057
  Gene Ontology: Mol. function=nucleotide binding; Cellular component =integral to membrane; Biological process=protein insertion into membrane
  Homolog annotation: Hit_ID=B6UBJ7; Match level="QueryCoverage=100%, HitCoverage=31%, E-value=1e-34, Identity=53%"; Hit description=Inner membrane protein ALBINO3
  Subcellular localization annotation: CTP_CleavageSite=57; ConfidenceScore=5.15e-01
FMIGYFSLSVPSGLSIYWFTNNVLSTAQQVWLRKXGGAKPAVSEGGSGIITAGRAKRSNAQPAGERCSGLHFNTXTFYVLVPFFTYNLASRFRELKEEENRRKLNKALAAGDSKASASTYDSEDEESDDETTEEGGPVEKASSTGSDXKKLPSYSGKKGKRSKRKRMVQ

SEQ ID NO: 102032 - protein, 415 aa, Setaria italica
  misc_feature (309)..(309): Xaa can be any naturally occurring amino acid
  Transcript Sequence Number=SeqID_36058
  Gene Ontology: Mol. function=nucleotide binding; Cellular component =integral to membrane; Biological process=protein insertion into membrane
  Homolog annotation: Hit_ID=B6UBJ7; Match level="QueryCoverage=99%, HitCoverage=90%, E-value=1e-169, Identity=75%"; Hit description =Inner membrane protein ALBINO3
  Pfam annotation: Domain name=60KD_IMP; Domain location=89-308; Score =362.5; E_value=8e-106; Accession=PF02096.12; Description=60Kd inner membrane protein
ACAVRAGLHGLDSLAGPHLQAALERAEAALYTLADAAVVAADAAAGGGDAGEAVTAVQKNGGWFGFISEALEVVLKVLKDGLSAVHVPYSYGFAIILLTIIVKAATLPLTKKQVESTLAMQNLQPQIKAIQQRYAGNQERIQLETARLYRQAGVNPLAGCFPTLATIPVWIGLYQALSNVANEGLLTEGFFWIPSLGGPTTIAARQSGAGISWLFPFVDGHPPLGWHDTICYLVLPVLLVASQFVSMEIMKPPQSDDPSQKTSLLVLKFLPFMIGYFSLSVPSGLSIYWFTNNVLSTAQQVWLRKMGGXAKPAVSEGGSGIITAGRAKRSNAQPAGERFRELKEEENRRKLNKALAAGDSKASASTYDSEDEESDDETTEEGGPVEKASSTGSDKKLPSYSGKKGKRSKRKRMVQ

SEQ ID NO: 102033 - protein, 77 aa, Setaria italica
  Transcript Sequence Number=SeqID_36059
QQQRPTPALASSRRPLFYKSLASASSFDKSVERGWGKTIKSICLIWVGLVLARSEKAAASSSSPEGGKLARRGEERG

SEQ ID NO: 102034 - protein, 134 aa, Setaria italica
  Transcript Sequence Number=SeqID_36060
MGCLFSVEVVAAQGLPPSMNGLRLAVAVRKKESRDGAVQTMPSRVQQGGADFEETLFVRCYLYCSGGGATGKPLKFEPRPFLVSAVAVEAPELDLGRNAVDLSLLVKESSEKSQQGERVRQWDMAYPLAGKAKG

SEQ ID NO: 102035 - protein, 240 aa, Setaria italica
  Transcript Sequence Number=SeqID_36061
  Gene Ontology: Mol. function=amino acid binding; Biological process =metabolic process
  Homolog annotation: Hit_ID=B6TPR3; Match level="QueryCoverage=97%, HitCoverage=52%, E-value=1e-116, Identity=90%"; Hit description=ACR8
  Pfam annotation: Domain name=ACT; Domain location=164-227; Score =37.6; E_value=5e-08; Accession=PF01842.17; Description=ACT domain
  Pfam annotation: Domain name=ACT; Domain location=86-157; Score=18.2; E_value=0.035; Accession=PF01842.17; Description=ACT domain
  Pfam module annotation: Pfam domain module=ACT::ACT; Domain location =164-227::86-157
RDEETGAPIDDAARVRRVESRLRHVLRGGARGARTVLLADAAAVNMDRRLHQLLNEDGEAGSRADQAEAPTTTAVAVQDWGERGYSVVTVSCRDRPKLLFDVVCTLTDLDYVVYHGTFDTDGDHAQQEFYIRRLDGRPICSAAERRRVIQCLQAAIERRASEGVRLELRITDRRGLLAYVTRVFRENSLSVTHAEITTRGDMAMNVFHVTDVAGRPADPKTIDDVIQKIGTESNGRRPTG

SEQ ID NO: 102036 - protein, 86 aa, Setaria italica
  Transcript Sequence Number=SeqID_36062
  Subcellular localization annotation: CTP_CleavageSite=62; ConfidenceScore=5.48e-01
MAFNPNPPGLGFPYFPPNPYYPRPTPRPQAPPPPQRFPPPIRAPPPPQRAPPPPTLPPPPPRRAPPPPALPPPPPRRAPPPPSLPP

SEQ ID NO: 102037 - protein, 125 aa, Setaria italica
  Transcript Sequence Number=SeqID_36063
  Gene Ontology: Mol. function=nucleotide binding; Biological process =catabolic process
  Homolog annotation: Hit_ID=B9SRI2; Match level="QueryCoverage=96%, HitCoverage=15%, E-value=2e-57, Identity=85%"; Hit description=GTP binding protein, putative
  Pfam annotation: Domain name=Dynamin_N; Domain location=1-112; Score=- 8.5; E_value=0.0012; Accession=PF00350.15; Description=Dynamin family
QAYIEAENMRLENDPCQFSEKEIIIKVEYKHCPNLTVIDTPGLILPAPGRKNRVLQSQASAVESLVRAKIQHKETIILCLEDCSDWSNATTRRVVMQVDPDLARTVLVSTKLDTKIPQFARPYSH

SEQ ID NO: 102038 - protein, 285 aa, Setaria italica
  Transcript Sequence Number=SeqID_36064
DTGDDQAALLNPGFKALTQIVQDDVFREFEFRQYIFACQAKLLFKLSRPIEVAARGHAFVVGFSKTLALHENSLPFCFREVWVITACLGLIKSTTSHYDGGAVSVDSEKEFYRLQGDLYSLCRIKFMRLAYLIGYGVEIEKSPVNSASLSMLPWPKPATWPSIPPDSSAEVMEKEKMVLQAKSREKLFNIHRKPLPLEPSLLLREANRRRAFLSVGNLSELYDSADGSGLDANSKLSPNRSASNFMARTMSGPATSETSLPVDRPMRLSEIHVAAEHALKQTISD

SEQ ID NO: 102039 - protein, 148 aa, Setaria italica
  Transcript Sequence Number=SeqID_36065
  Gene Ontology: Mol. function=kinase activity; Cellular component =integral to membrane; Biological process=transport
  Homolog annotation: Hit_ID=Q6EPM0; Match level="QueryCoverage=99%, HitCoverage=25%, E-value=5e-31, Identity=48%"; Hit description =Ankyrin-like protein
  Pfam annotation: Domain name=Ank; Domain location=124-148; Score=4.7; E_value=7.7; Accession=PF00023.22; Description=Ankyrin repeat
  Pfam annotation: Domain name=Ank; Domain location=54-87; Score=17.1; E_value=0.075; Accession=PF00023.22; Description=Ankyrin repeat
  Pfam annotation: Domain name=Ank; Domain location=88-123; Score=6.4; E_value=4.4; Accession=PF00023.22; Description=Ankyrin repeat
  Pfam module annotation: Pfam domain module=Ank::Ank::Ank; Domain location=124-148::54-87::88-123
TPLHFMSSRSRLNTTWVIHTILWIRVPFPASLGAQEVRRLLEANPAALYQPDKCGLYPIHIAASVGNKKVVAIFIRYCPSSAGLRDSIGRTFLHVAVEKSRRNIVSFACRTRSLAWILNMQDNDGNTALHLAAQAGSLRMFCSLFGNP

SEQ ID NO: 102040 - protein, 171 aa, Setaria italica
  Transcript Sequence Number=SeqID_36066
  Gene Ontology: Mol. function=transporter activity; Cellular component= integral to membrane; Biological process=transport
  Homolog annotation: Hit_ID=Q6EPK9; Match level="QueryCoverage=82%, HitCoverage=20%, E-value=4e-36, Identity=56%"; Hit description =Ankyrin-like protein
  Pfam annotation: Domain name=Ank; Domain location=32-62; Score=22.5; E_value=0.0017; Accession=PF00023.22; Description=Ankyrin repeat
  Pfam annotation: Domain name=Ank; Domain location=99-130; Score=10.6; E_value=1.1; Accession=PF00023.22; Description=Ankyrin repeat
  Pfam module annotation: Pfam domain module=Ank::Ank; Domain location =32-62::99-130
ARAGKTKMVSHLIGLSKDNNIVEELLRKENNSKETALHEAVRIGNKDIVKVLLEADPSLACFPEKGSSALYLAILQEEESIAQTLYDKSEGILSYWGPDGQNALHAAVLRSTEMVKKLLDWNQKLTSQGDCNGSTALHFMSSRIRLDERSFTLLLINRDGILFHSLAELGR

SEQ ID NO: 102041 - protein, 248 aa, Setaria italica
  Transcript Sequence Number=SeqID_36067
  Gene Ontology: Mol. function=phosphatidylinositol phosphate kinase activity; Biological process=phosphatidylinositol metabolic process
  Homolog annotation: Hit_ID=Q9M1K2; Match level="QueryCoverage=85%, HitCoverage=26%, E-value=2e-71, Identity=65%"; Hit description =Putative phosphatidylinositol-4-phosphate 5-kinase 4
  Subcellular localization annotation: CTP_CleavageSite=24; ConfidenceScore=5.11e-01
APSSNSASPRKSRTSSGNRMTNGRASSVSGLSNSSGGDRKYDKICIWESDGDITCDIVDGPALGDEVVAARRSVRTDDGGDDRGLPPSSPAPHITQWVPPREAKRQGETIAKGHKHYELMLNLQLGIRHAVGKQGPIVLDLKSSAFDPKEKVWTKFPPEGSKYTPPHNSCDFRWKDYCPQVFRTLRKLFKVDAADYMLSLCGNEALRELSSPGKSGSFFYLTNDDRYMIKTMKKSEVKMLLKMLPAYY

SEQ ID NO: 102042 - protein, 93 aa, Setaria italica
  Transcript Sequence Number=SeqID_36068
ASATNHLAAGVAHRAELNRKTCSSLGLAHSGRLPESNRAPIKKNQSPERPPAESEGVKKMEIGGEGGDEKRQRRRRRRGRPWAACLPRPGCFT

SEQ ID NO: 102043 - protein, 81 aa, Setaria italica
  Transcript Sequence Number=SeqID_36069
  Gene Ontology: Mol. function=zinc ion binding; Cellular component =intracellular
  Homolog annotation: Hit_ID=B6UD41; Match level="QueryCoverage=96%, HitCoverage=22%, E-value=2e-10, Identity=51%"; Hit description =Cys2/His2 zinc-finger transcription factor
HTCKLCFRRFHNGRALGGHMRSHVMAAAVTAAYSPPPPLPRPQSPPLSLASTSSTEMDDKPAQHKPVASCGLRDGAKKRSR

SEQ ID NO: 102044 - protein, 86 aa, Setaria italica
  Transcript Sequence Number=SeqID_36070
  Gene Ontology: Mol. function=transferase activity, transferring hexosyl groups; Cellular component=integral to membrane; Biological process=cell wall organization and biogenesis
  Homolog annotation: Hit_ID=Q2P9N4; Match level="QueryCoverage=100%, HitCoverage=17%, E-value=6e-31, Identity=70%"; Hit description =Putative glycosyltransferase
TKNKIDYCRLHGIELAHITARLDGQLTGGWAKLPLLRRLMLAHPEVEWLWWVDGDALVTDMGFELPLARYEGAHLVVHGNSYLLFQ

SEQ ID NO: 102045 - protein, 81 aa, Setaria italica
  Transcript Sequence Number=SeqID_36071
HQILHEHNSLHHLYIYIFWLNILYIFWRFLFVGVQEHPKVLEHLKCSPTLKWRKESVHNSKWTIFVSILFFTLLYQNNSLT

SEQ ID NO: 102046 - protein, 81 aa, Setaria italica
  Transcript Sequence Number=SeqID_36072
IVWVVRFFLYPQPTTVYRLISPFYFSSYKYFHPPLKIDACLFYLYIFFCNSPCASTVVLLNGSTGALEPREYSRCIVCIRW

SEQ ID NO: 102047 - protein, 103 aa, Setaria italica
  misc_feature (8)..(8): Xaa can be any naturally occurring amino acid
  Transcript Sequence Number=SeqID_36073
GLRQSFPXAAGEMDSGSGKPEEVAAYQSSEAKQARLQSMLAALLDDPILADVPRKPSLADVDTLINLELGSAMRVTVVKLDNTSFDIALSNAATVKDLKLAIR

SEQ ID NO: 102048 - protein, 72 aa, Setaria italica
  misc_feature (18)..(18): Xaa can be any naturally occurring amino acid
  Transcript Sequence Number=SeqID_36074
NDAAQCDRSGWRPERGRXTGGARQILSRASERAGRPARGQPPRRAGWWWWWEGREEQCKLLRALASGSRTGR

SEQ ID NO: 102049 - protein, 142 aa, Setaria italica
  misc_feature (124)..(124): Xaa can be any naturally occurring amino acid
  Transcript Sequence Number=SeqID_36075
YDSAPSSRLPPSPHRKDKQQCPFKIENPTHSPYDKSIVTNNLVRLGEVQNEKSLQKVLSFGKDDLVYFRGLKLTRTSSKLFIMDELDERELVFAWEDKDTIIDQLSRIDLSDRENHDSSQEAGXSLTRSPDAAIGILMRYSL

SEQ ID NO: 102050 - protein, 125 aa, Setaria italica
  Transcript Sequence Number=SeqID_36076
MTGTAGGDGCGEQYSRMIRELCALLLTIVSPSPAALGRPAPGMSPAAAAAMLLGASMALMLCGSVTFAIGLLLMPWVAGLALLFGFAGAVSTLSSGFFGKDAALPCKDETRGRICSPIGSDMLVA

SEQ ID NO: 102051 - protein, 109 aa, Setaria italica
  Transcript Sequence Number=SeqID_36077
  Gene Ontology: Mol. function=DNA-directed RNA polymerase activity; Cellular component=DNA-directed RNA polymerase III complex; Biological process=regulation of transcription
  Homolog annotation: Hit_ID=Q6EU09; Match level="QueryCoverage=99%, HitCoverage=98%, E-value=8e-46, Identity=75%"; Hit description=DNA -directed RNA polymerase subunit
  Pfam annotation: Domain name=RNA_POL_M_15KD; Domain location=1-54; Score=10.9; E_value=0.016; Accession=PF02150.8; Description=RNA polymerases M15 Kd subunit
  Pfam annotation: Domain name=TFIIS_C; Domain location=68-108; Score =48.5; E_value=2.6e-11; Accession=PF01096.10; Description =Transcription factor S-II (TFIIS)
  Pfam module annotation: Pfam domain module=RNA_POL_M_15KD::TFIIS_C; Domain location=1-54::68-108
MEFCPSCGLLLQIDPGTGSHRLRLFCPLCPYVCAIQNKIVRKAKLVKKEVEPIFSNADAMKLAPKTATSCPRCNHGEAYFKQMQIRSADEPMTTFYRCCREECQLEWRG

SEQ ID NO: 102052 - protein, 107 aa, Setaria italica
  misc_feature (36)..(36): Xaa can be any naturally occurring amino acid
  Transcript Sequence Number=SeqID_36078
RVAAPVRRRRRWAALVVCAAPDEEKITRRSPLDFRXEWERPKPGRRPDIFPKFSPMKTPLPHPLPADDPLDDDEEEEEEEQPPPEEPQEDDPDKEEPEEDDPDKPTE

SEQ ID NO: 102053 - protein, 64 aa, Setaria italica
  Transcript Sequence Number=SeqID_36079
  Gene Ontology: Mol. function=drug transporter activity; Cellular component=membrane; Biological process=multidrug transport
  Homolog annotation: Hit_ID=B9RZD1; Match level="QueryCoverage=96%, HitCoverage=12%, E-value=6e-16, Identity=62%"; Hit description =Multidrug resistance pump, putative
MGKAVLSKSWQESKLLWHIAFPAILTAVFQFSIGFVTVGFVGHIGSVELAAVTVVENVIEGFAY

SEQ ID NO: 102054 - protein, 134 aa, Setaria italica
  Transcript Sequence Number=SeqID_36080
  Gene Ontology: Mol. function=hydrolase activity
  Homolog annotation: Hit_ID=B9RAS9; Match level="QueryCoverage=91%, HitCoverage=38%, E-value=5e-47, Identity=68%"; Hit description =Hydrolase, putative
MMSVANGVAAASAKEPMFSFGVIADVQYADIPDGRSFLGVPRYYRHSISVLQRAVNRWNKHGNIKFSINFGDIIDGYCPKDKSLSAVQKVLDEFDVFDGPTYHMFGNHCLYNLPRSKLVSLLKNRPNPITRIRR

SEQ ID NO: 102055 - protein, 51 aa, Setaria italica
  Transcript Sequence Number=SeqID_36081
  Gene Ontology: Mol. function=oxidoreductase activity
  Homolog annotation: Hit_ID=B6ST46; Match level="QueryCoverage=68%, HitCoverage=7%, E-value=3e-11, Identity=91%"; Hit description =Oxidoreductase
HDVVVVGAGIVGLAIARHLLLHTPFSVAVADAAVPCSGATGAGQGYIWMSH

SEQ ID NO: 102056 - protein, 85 aa, Setaria italica
  Transcript Sequence Number=SeqID_36082
  Gene Ontology: Mol. function=peroxidase activity; Cellular component =glyoxysomal membrane; Biological process=response to oxidative stress
  Homolog annotation: Hit_ID=Q0JEQ2; Match level="QueryCoverage=100%, HitCoverage=29%, E-value=8e-22, Identity=64%"; Hit description =Probable L-ascorbate peroxidase 3
KALVEDPEFRCYVEKYAKDEEAFFRDYAESHKKLSEMCFTPPRSAFSCKSGNKQKSLLVQAAAGVAVAAAVVAWAYLCESNKKIG

SEQ ID NO: 102057 - protein, 97 aa, Setaria italica
  Transcript Sequence Number=SeqID_36083
  Gene Ontology: Mol. function=ATP binding; Cellular component =cytoplasm; Biological process=protein folding
  Homolog annotation: Hit_ID=P34893; Match level="QueryCoverage=100%, HitCoverage=98%, E-value=1e-32, Identity=68%"; Hit description=10 kDa chaperonin
  Pfam annotation: Domain name=Cpn10; Domain location=4-95; Score =126.2; E_value=1e-34; Accession=PF00166.13; Description=Chaperonin 10 Kd subunit
MAKRLIPSLNRVLVEKLLQPKKSAGGILLPETTKQLNAAKVIAVGPGDRDRDGKLIPVSLNEGDTVLLPEYGGTEVKLAEKEYLLFREHDILGKLLE

SEQ ID NO: 102058 - protein, 104 aa, Setaria italica
  Transcript Sequence Number=SeqID_36084
VASNEPLYHFKRYFRMRQCHRILMVGFCFSHSHKKERSLLLHSCISTCKQLQPWDHCSPKLLQKLSQYVVLSEKKVLLLSELHFCSLRLQAARLDIQHGIGCST

SEQ ID NO: 102059 - protein, 54 aa, Setaria italica
  Transcript Sequence Number=SeqID_36085
  Homolog annotation: Hit_ID=Q84VJ1; Match level="QueryCoverage=100%, HitCoverage=16%, E-value=2e-14, Identity=64%"; Hit description =Biostress-resistance-related protein (Fragment)
GLSGWLPCSRTLRTKIESSQTALRKAAALPILLNHGRADEVVTYRNGERSAEIL

SEQ ID NO: 102060 - protein, 320 aa, Setaria italica
  Transcript Sequence Number=SeqID_36086
  Gene Ontology: Cellular component=plasma membrane
  Homolog annotation: Hit_ID=Q8L4H1; Match level="QueryCoverage=100%, HitCoverage=57%, E-value=5e-85, Identity=59%"; Hit description =P0696G06.23 protein
RGASVRRQTAQAMRCMQTLVRVQAQVRASRVDAMERRNRQHHGAMLRDGGRWRAGSQDGGIWDDSRLTREEADARTKRKVEAVIKRERALAYAYSHQLLKATPMAAHAILADLQSGRSPWWWTPIERRHEPEGAYYRPVDPVSKPRPALSIAHREMTTPTMPMTAATTPARSVVSAYSKPRSARPSKGAGAAPPPLSHAGSMSIRDDESLTSCPAFGVGGVPNYMTPTLSASAKARARAQLLLQQQQQKAAQEKPRFSFGLGQSIGSWAKSPFWKAPSSSRVGTPAASVAGGGRHRRSISGLSVDSTVSMPAGLGRRPIK

SEQ ID NO: 102061 - protein, 105 aa, Setaria italica
  misc_feature (104)..(104): Xaa can be any naturally occurring amino acid
  Transcript Sequence Number=SeqID_36087
KEKPAAAKKKRDKPEPQEGSKRKKQQASGDAATPAKKRKKGDGPEPKPRKEPKPAKKQQPSGKPEKPATPSRKQQPSGKPEKPATPSKKQQQSSGKPEKPATPXK

SEQ ID NO: 102062 - protein, 52 aa, Setaria italica
  Transcript Sequence Number=SeqID_36088
  Gene Ontology: Mol. function=tetrahydrofolylpolyglutamate synthase activity; Cellular component=mitochondrion; Biological process=folic acid and derivative biosynthetic process
  Homolog annotation: Hit_ID=B6SW32; Match level="QueryCoverage=78%, HitCoverage=7%, E-value=5e-15, Identity=90%"; Hit description =Folylpolyglutamate synthase
MRVEQVDVAVLEVGLGGKFDATNVVEAPVVCGVSSLGYDHMQFLQAYSQEFP

SEQ ID NO: 102063 - protein, 128 aa, Setaria italica
  Transcript Sequence Number=SeqID_36089
  Gene Ontology: Mol. function=tetrahydrofolylpolyglutamate synthase activity; Biological process=folic acid and derivative biosynthetic process
  Homolog annotation: Hit_ID=B6SW32; Match level="QueryCoverage=89%, HitCoverage=21%, E-value=8e-52, Identity=85%"; Hit description =Folylpolyglutamate synthase
KKNNLIEELTDRNLLDASTQNGVHFDVALFAPNQSQYNKLGSNTSAPAEPEEIDLSWQLSLQTVWEKLLQDKGIISANSSDASQVFASLPLAIEWLRKNARENRSTSFQVLVTGSLHLAGDVLRLIKK

SEQ ID NO: 102064 - protein, 122 aa, Setaria italica
  misc_feature (91)..(91): Xaa can be any naturally occurring amino acid
  Transcript Sequence Number=SeqID_36090
  Gene Ontology: Mol. function=tetrahydrofolylpolyglutamate synthase activity; Cellular component=mitochondrion; Biological process=folic acid and derivative biosynthetic process
  Homolog annotation: Hit_ID=B6SW32; Match level="QueryCoverage=86%, HitCoverage=19%, E-value=6e-52, Identity=94%"; Hit description =Folylpolyglutamate synthase
VCKVVSTCIVLIIPMPAYFRFLALLAFKIFSAEQVDVAVLEVGLGGKFDATNVVEAPVVCGVSSLGYDHMEILAGNTLGEIAGEKAGIFKXGVPAYTAPQPDEAMIALKQRASELGIISPSR

SEQ ID NO: 102065 - protein, 420 aa, Setaria italica
  Transcript Sequence Number=SeqID_36091
  Gene Ontology: Mol. function=tetrahydrofolylpolyglutamate synthase activity; Cellular component=mitochondrion; Biological process=folic acid and derivative biosynthetic process
  Homolog annotation: Hit_ID=B6SW32; Match level="QueryCoverage=100%, HitCoverage=77%, E-value=0.0, Identity=85%"; Hit description =Folylpolyglutamate synthase
  Pfam annotation: Domain name=Mur_ligase_M; Domain location=23-187; Score=-48.8; E_value=0.018; Accession=PF08245.4; Description=Mur ligase middle domain
YTGLFTSPHLMDVRERFRLDGVDISEEKFLKYFWWCWNKLKEKTDDDIPMPAYFRFLALLAFKIFSAEQVDVAVLEVGLGGKFDATNVVEAPVVCGVSSLGYDHMEILGNTLGEIAGEKAGIFKKGVPAYTAPQPDEAMIALKQRASELGISLQVADPLEPYHLKGHHLGLHGEHQYINAGLAVALASMWLEKQGHKDRIPLNRTDPLPDHFIRGLSNASLQGRAQIVPDSQVNSGADKDSSLVFYLDGAHSPESMEICAKWFSHVTNDDRRLPSSSDHSPNSKSQKILLFNCMSVRDPMRLLPHLLDASTQNGVHFDVALFVPNQSQYNKLGSNTSAPAEPEEIDLSWQLSLQTVWEKLLQDKGIISANSSDASQVFASLPLAIEWLRKNARENRSTSFQVLVTGSLHLAGDVLRLIKK

SEQ ID NO: 102066 - protein, 81 aa, Setaria italica
  misc_feature (69)..(69): Xaa can be any naturally occurring amino acid
  Transcript Sequence Number=SeqID_36092
MAALLNPTSRRLAAAAYRRISAPAAAEPLVSHRISQERYSSSPVDVSGGFSEMLDGTQRYYVLGGKGGXVGRTSMAASLAV

SEQ ID NO: 102067 - protein, 462 aa, Setaria italica
  Transcript Sequence Number=SeqID_36093
  Gene Ontology: Mol. function=metal ion binding; Cellular component =nucleus
  Homolog annotation: Hit_ID=B9RC94; Match level="QueryCoverage=100%, HitCoverage=83%, E-value=1e-132, Identity=49%"; Hit description=RNA -binding protein nob1, putative
  Pfam annotation: Domain name=NOB1_Zn_bind; Domain location=313-384; Score=152.4; E_value=1.3e-42; Accession=PF08772.3; Description=Nin one binding (NOB1) Zn-ribbon like
PPPEFVKKVTKFARETGDIQTLSDVDIKIIALAYMLEAEIHGTSHLREHPPPLREVNVRKLSEAPLPGWGSNVPNLKEWEELDQMSEAGGDINSRILPLKDLENQDIPMSETNVVCEAQEGAGHQPNKDACTAWEDDENNEGWTPAVSRSTHRRYLRRKARRDALKESGQSLETSSVAPSIDADKVLSENGGVEHDSTPTDGPSSVPEKINSSTDGLEHQVENELEIAGEHLHSDQANDDETDACTKELDNLDIKSEAEGGDDAYSVDDESSEQSWALRSLSESSVACVTSDYAMQNVILQIGLRLLAPGGMQIRQMHRWVLRCHACYKVTQEVGKIFCPKCGNGGTLRKVSVTVGENGITMASRRPRVTLRGTKFSLPMPQGGRDAITKNPILREDQLPQKVLHPKSKKSSKLEDDFLGVDDIFSHSGDKKAPLKPPVRKALSMFSGKRNPNDNHFSRKKH

SEQ ID NO: 102068 - protein, 180 aa, Setaria italica
  Transcript Sequence Number=SeqID_36094
  Gene Ontology: Mol. function=transcription regulator activity; Cellular component=nucleus
  Homolog annotation: Hit_ID=B6U708; Match level="QueryCoverage=62%, HitCoverage=19%, E-value=5e-27, Identity=63%"; Hit description =Ethylene-insensitive3-like protein
GIPIYLVLLLNNYNSNQAASAALNKHNSNQAASAAQSSTYLSDPPLACEGSDIANSWSGHSFRQDVGHGPIGFNPSAIVQASSMQQQQPLPMDHHVPIMGTGALSGNGSYSYPTAGSGHSGTVASKAEQLMDDPFFGEATDKFAGNSFGGLPLSLIPISSPIPYLDELLDDDDLMQYLGT

SEQ ID NO: 102069 - protein, 97 aa, Setaria italica
  Transcript Sequence Number=SeqID_36095
VSLLGSLHHIFQRKLSQIIHQFSQARNKGGLYDRLHMLPANSTQYILQALKPRIIFNAHTGSFSDFLHADGTREVTVPAMTWKARGVPGFVIATFDN

SEQ ID NO: 102070 - protein, 131 aa, Setaria italica
  Transcript Sequence Number=SeqID_36096
MGGGLLDERNDRGLTTLPEAEVNFLSKLVALKPGKALERMIRDVMNGKGEGADNVEQSSADSHSEQEHLTGVSGRGSVSGRKPRPVRPGMFLETVSKVLGGVYASNTSGITAQHLEWVHQTTLKILQEMAF

SEQ ID NO: 102071 - protein, 159 aa, Setaria italica
  Transcript Sequence Number=SeqID_36097
  Homolog annotation: Hit_ID=Q2RB11; Match level="QueryCoverage=98%, HitCoverage=46%, E-value=1e-64, Identity=77%"; Hit description=Nse1 non-SMC component of SMC5-6 complex family protein, expressed
  Pfam annotation: Domain name=zf-RING-like; Domain location=52-95; Score=43.6; E_value=7.9e-10; Accession=PF08746.3; Description=RING -like domain
KETYSLSQKEKTLDELIRDCWLSYTSTGKIGLGTRSFLDLRSWFRGNDIPSCMVCNEACIKASSCPNEECNVRIHEYCLRKKFSQRKASRACPGCGTEWPRQDGEADGDDVNEPEEDQAPSANHSSRKRRKRVKTELVEENDNAGPSMAVPRRTSRSMK

SEQ ID NO: 102072 - protein, 95 aa, Setaria italica
  Transcript Sequence Number=SeqID_36098
  Gene Ontology: Cellular component=microtubule organizing center; Biological process=microtubule cytoskeleton organization and biogenesis
  Homolog annotation: Hit_ID=B9HA09; Match level="QueryCoverage=98%, HitCoverage=10%, E-value=2e-29, Identity=69%"; Hit description =Tubulin gamma complex-associated protein
CELGWLFRKVRGFISDSISRSPSDAATEVGTVAQAFCSALQEELSDYYKLLAVLESYSVNPIPTPGSDSGVSGNYLSLRRLAVWLAEPAVRMRLN

SEQ ID NO: 102073 - protein, 127 aa, Setaria italica
  Transcript Sequence Number=SeqID_36099
MVSEERTAGTKMTILQTPVGARSIVTCLVAFFILASSIVFLLDKGQEVQMAVEHRHQQVQVKVEARLQEPAMGGATEVDTSEEDCNWSRGRWVYDNVSRPLYSGFKCAFIFREVACDKYGRKDVMYQ

SEQ ID NO: 102074 - protein, 287 aa, Setaria italica
  misc_feature (263)..(263): Xaa can be any naturally occurring amino acid
  Transcript Sequence Number=SeqID_36100
  Gene Ontology: Mol. function=electron carrier activity
  Homolog annotation: Hit_ID=Q336Y0; Match level="QueryCoverage=91%, HitCoverage=14%, E-value=1e-113, Identity=75%"; Hit description =Amine oxidase, flavin-containing family protein, expressed
FKLLKFFPAAIAAAQAYASVEAEISVPRELPKIPSFHTFAMRDHHLDESDTRKKGVKDNFGRLECILENGSKNGKAKNSSPDDANCADVDSLKMSGDNGTQRSHSNEKACLANTRDHSTDIGVLLDGRAWVDTDTICIDGVKDPLAIERWQAQAMEADKEFYSRIRIPDDEDATSQKQACRSSASQGADSKPASERQSRGVEHIKQGLVNFIASLLMPLYRGKKIDRDGYKTIMRKAVNKIIETCSEGEKLMTTHEFLDVKRXNKIESFVDKMVDRHLHVVSKPAKP

SEQ ID NO: 102075 - protein, 143 aa, Setaria italica
  misc_feature (38)..(38): Xaa can be any naturally occurring amino acid
  Transcript Sequence Number=SeqID_36101
  Gene Ontology: Mol. function=binding
  Homolog annotation: Hit_ID=A5Y6I6; Match level="QueryCoverage=80%, HitCoverage=12%, E-value=3e-22, Identity=43%"; Hit description =ZIP4/SPO22
SHSPNYRDNQHCLRRLVGVAGLQDFSGSMSDAVYDVFXQAYQIVVGLRDGEYPFEEGKWLAMTAWNKSNLALRLGQRSVARKWMKMGIDLARHFESMKQYVSGMDEYFEHFQKVSGKEPDECSQQDGAPSISLSGSVSQPGLV

SEQ ID NO: 102076 - protein, 53 aa, Setaria italica
  Transcript Sequence Number=SeqID_36102
EITNCILLLCSKTELNVEDEKHLAIQLCVNYLIHFCANSATSNLFMTIYYCTY

SEQ ID NO: 102077 - protein, 50 aa, Setaria italica
  Transcript Sequence Number=SeqID_36103
FRINCNPRITFLISYILSPWGSSNTIHALYAILHEGEKINTHNADYDSLM

SEQ ID NO: 102078 - protein, 129 aa, Setaria italica
  Transcript Sequence Number=SeqID_36104
  Gene Ontology: Mol. function=actin binding; Cellular component=plasma membrane; Biological process=actin cytoskeleton organization and biogenesis
  Homolog annotation: Hit_ID=A3AB67; Match level="QueryCoverage=98%, HitCoverage=14%, E-value=1e-61, Identity=92%"; Hit description =Formin-like protein 16
  Pfam annotation: Domain name=FH2; Domain location=1-129; Score= -131.4; E_value=0.0021; Accession=PF02181.15; Description=Formin Homology 2 Domain
VTTGNPDRLAPAEAFLLRLLLDVPNPFARVNALLFKVNYGAEVAQLKHSLRTLELASQELRTKGLFFKLLEAVLKAGNRMNAGTARGNAQAFNLTALRKLSDVKSTDGSTSLLHFVVEEVVRSEGKRLA

SEQ ID NO: 102079 - protein, 126 aa, Setaria italica
  Transcript Sequence Number=SeqID_36105
  Pfam annotation: Domain name=Terpene_synth; Domain location=1-122; Score=-79.9; E_value=0.032; Accession=PF01397.13; Description =Terpene synthase, N-terminal domain
ASNQLLLQPATTTPKERVRRLLVLEEAASASSRLRMIHQLQSLGIAYHFEEEIEAILLSIHHTAADDKEEQEDNDLDLHSAALLFRMPRLLHGGGPGAPARTKPAPPTPGRSSTRRCHLPRIPEHR

SEQ ID NO: 102080 - protein, 124 aa, Setaria italica
  misc_feature (77)..(77): Xaa can be any naturally occurring amino acid
  misc_feature (84)..(84): Xaa can be any naturally occurring amino acid
  Transcript Sequence Number=SeqID_36106
  Gene Ontology: Mol. function=kinase activity; Cellular component =plasma membrane
  Homolog annotation: Hit_ID=B9T6U1; Match level="QueryCoverage=86%, HitCoverage=9%, E-value=7e-22, Identity=49%"; Hit description=Myosin- 1, putative
QAAKFQGEVLNMKQENNKVAKELEAGLDHVRGFQVEVGRVLLKLRENLELSIARSHRAQQNFRNLSTKAGVPLRTFXFGSKPKXPSLFSCMGPGVHKQHGGSKAGLDEYRQLFLTFTLKRSQCT

SEQ ID NO: 102081 - protein, 181 aa, Setaria italica
  Transcript Sequence Number=SeqID_36107
  Gene Ontology: Mol. function=hydrolase activity, acting on ester bonds; Biological process=lipid metabolic process
  Homolog annotation: Hit_ID=B9SF69; Match level="QueryCoverage=83%, HitCoverage=52%, E-value=1e-44, Identity=56%"; Hit description=Zinc finger protein, putative (Fragment)
  Pfam annotation: Domain name=Lipase_GDSL; Domain location=30-181; Score=-2.4; E_value=0.01; Accession=PF00657.14; Description=GDSL -like LipaseAcylhydrolase
  Subcellular localization annotation: CTP_CleavageSite=51; ConfidenceScore=5.00e-01
MAHPALLLVLLLSSPAISSAKRIQPKFSAIFYFGDSVLDTGNNNRLPTVAVANHVPYGRDFPGKKPTGRFSNGRLVPDLLNQRLQLKEFSPPYLDSKLSNNDIMTGVNFASAGSGFDDQTSQLANTLPMSKQVNLFKDYLLRLRGIVGDKEASRIIANSLIFISSGTNDFSHYYSSYKEEE

SEQ ID NO: 102082 - protein, 133 aa, Setaria italica
  Transcript Sequence Number=SeqID_36108
  Gene Ontology: Mol. function=phosphopantetheine binding; Cellular component=mitochondrial respiratory chain; Biological process=fatty acid biosynthetic process
  Homolog annotation: Hit_ID=Q8GVH7; Match level="QueryCoverage=71%, HitCoverage=72%, E-value=7e-45, Identity=93%"; Hit description=Acyl carrier protein
  Pfam annotation: Domain name=PP-binding; Domain location=59-126; Score=69.4; E_value=1.4e-17; Accession=PF00550.17; Description =Phosphopantetheine attachment site
MAAAALRPAILRRIRLSPSPSLPFAASAAAASHPHALVRWLARPMSSHDAHLTREEVVDRVLDVLKSHPKVDPSKVTPEAHFEKDLGLDSLDTVEVVMAIEEEFKLEIPDKEADKIDSLPLAIEYVANHPMAG

SEQ ID NO: 102083 - protein, 111 aa, Setaria italica
  Transcript Sequence Number=SeqID_36109
  Gene Ontology: Mol. function=protein transporter activity; Cellular component=mitochondrial inner membrane; Biological process=protein transport
  Homolog annotation: Hit_ID=B6SJS3; Match level="QueryCoverage=80%, HitCoverage=45%, E-value=2e-25, Identity=65%"; Hit description =Mitochondrial import inner membrane translocase subunit tim23
MADPRRHALRSDDRRDDSGRRLYNPYQDLNIPYKQLYDLPTSPEFLFQEEAIAQRRSWGENLTYYTGIGYLGGAMAGAALGLRNAARGAEPGEPAKIRANRVLNSCGSSGR

SEQ ID NO: 102084 - protein, 358 aa, Setaria italica
  Transcript Sequence Number=SeqID_36110
  Gene Ontology: Mol. function=protein serine/threonine kinase activity; Cellular component=membrane; Biological process=protein amino acid phosphorylation
  Homolog annotation: Hit_ID=Q5NDD1; Match level="QueryCoverage=99%, HitCoverage=99%, E-value=1e-124, Identity=64%"; Hit description =Putative serine-threonine protein kinase
  Pfam annotation: Domain name=Pkinase; Domain location=29-349; Score =54.7; E_value=3.5e-13; Accession=PF00069.17; Description=Protein kinase domain
  Pfam annotation: Domain name=Pkinase_Tyr; Domain location=82-349; Score=-126.7; E_value=2.6e-05; Accession=PF07714.9; Description =Protein tyrosine kinase
  Pfam module annotation: Pfam domain module=Pkinase::Pkinase_Tyr; Domain location=29-349::82-349
MGCSFSGLNALYDNVGGGGGDVWVNDYRFRVLRRLGDAGPAGSSVFLVKEVVAAAASSDGTAGAGPGTSGIARKKGVDPSHISADGIYALKKVLIRSEQHLELVRQEIRVSSQFSHPNLLPLLEHAIIAVKGVQDGSQNHEAYLLFPVHLDGTLQDVTKTMQERNESFPTITVLQIFRQLCAGLKHMHSFDPPYAHNAVKPDNVLITHRKELPHLAILMDFESAGPARRAIRSQAEALQLQEWASEHCSDQYRAPELWECPSHADIDERTDIWSLGCTLYAMMYGKSPFDYQLDESAGESLHTVIRSAQIKWPTEAGSSYPDSLRQFITWMLQPHPAVRPHIDDIIIHVDKLITKYSA

SEQ ID NO: 102085 - protein, 678 aa, Setaria italica
  Transcript Sequence Number=SeqID_36111
  Gene Ontology: Mol. function=potassium ion transmembrane transporter activity; Cellular component=integral to membrane; Biological process=potassium ion transport
  Homolog annotation: Hit_ID=B6U7Z6; Match level="QueryCoverage=100%, HitCoverage=86%, E-value=0.0, Identity=88%"; Hit description =Potassium transporter 2
  Pfam annotation: Domain name=K_trans; Domain location=1-678; Score =1106.6; E_value=0; Accession=PF02705.8; Description=K+ potassium transporter
HAKLSLLPNQQAADEELSSYYRNGFAPRNGSAPWLRRFLEKHKKVRTVLLLVVLCGASMVIGDGVLTPAISVLSSMSGLQVRATGLEHRSVVLLSCIVLVGLFALQHRGTQKVAFMFAPIVIIWLFSIGGIGLYNILHWNPNIYQALSPYYMVKFFRKTGKDGWISLGGILLSMTGSEAMFADLGHFTSASVRVAFVTVIYPCLILQYMGHAAFLSKNTFHMPTGFYDTIPEPVFWPVFVVATLAAVVGSQAVISATFSIVKQCHALGCFPRVKVVHTSRWIYGQIYIPEINWILMVLCVAVTVSFRDTTLIGNAYGIACMTVMLVTTFLMALIVIFVWQRNIIFALIFLVFFGSIEAVYLSSSLMKVPQGGWVPLVLAFIFMSVMYIWHYGLRRKYQFDLQNKVSMRSILSLGPSLGIVRVPGIGLIYTELVTGVPSIFSHFVTNLPAFHEVLVFLCVKSVPVPYVSPDERYLVGRIGPKEYRMYRCIVRYGYKDVQRDDDNFENMLVMGIAKFIMMEAEDASSSASYDIANEGRMAVITTTDDAGTPLTMRDFNGLADSMTTRSSKSESLRSLQSSYEQESPNVSRRRRVRFEVPEDDDMGQQVKDELMALVEAKHAGVAYIMGHSYIKARRSSSFLKKFAIDVGYSFLRKNCRGPSVTLHIPHISLIEVGMIYHV

SEQ ID NO: 102086 - protein, 451 aa, Setaria italica
  misc_feature (11)..(11): Xaa can be any naturally occurring amino acid
  misc_feature (158)..(158): Xaa can be any naturally occurring amino acid
  Transcript Sequence Number=SeqID_36112
  Gene Ontology: Mol. function=serine-type endopeptidase activity; Cellular component=nucleus; Biological process=signal transduction
  Homolog annotation: Hit_ID=A2Q5D0; Match level="QueryCoverage=99%, HitCoverage=50%, E-value=0.0, Identity=76%"; Hit description =Periodic tryptophan protein-associated region; WD40-like
  Pfam annotation: Domain name=PWP2; Domain location=336-451; Score =178.2; E_value=2.3e-50; Accession=PF04047.6; Description=Periodic tryptophan protein 2 WD repeat associated presumed domain
  Pfam annotation: Domain name=WD40; Domain location=100-138; Score =24.0; E_value=0.00062; Accession=PF00400.24; Description=WD domain, G-beta repeat
  Pfam annotation: Domain name=WD40; Domain location=163-200; Score =1.0; E_value=30; Accession=PF00400.24; Description=WD domain, G-beta repeat
  Pfam annotation: Domain name=WD40; Domain location=58-96; Score=42.5; E_value=1.6e-09; Accession=PF00400.24; Description=WD domain, G-beta repeat
  Pfam module annotation: Pfam domain module=PWP2::WD40::WD40::WD40; Domain location=336-451::100-138::163-200::58-96
LDGTIRAWDLXFRYRNFRTFTTPSPRQFVSLTADQSGEVICAGTLDSFEIFVWSMKTGRLLDVLSGHEGPVHGLMFSPINAILASSSWDKTVLLWDVFESKGAVETFQHSHDVLTLAYRPDGRQIACSTLDGLIHFWDPSDGLLMYTIEGRRDIAGGXLMTDRRSAANTSIGKYFTTLCYSADGSYILAGGNTKYICMYDVGEQVLLRRFQITRNLSLDGVLDFLNSKKMTDAGALDLIDDEDSDVEEGIDQQTRGNLGLGLPGSMANRGRPIARTKSVKFAPTGRSFAAATTDGVLLYSVDESFIFDPTDLDIDVTPEKVEEALAENQHQRALILSLRLNEDSLIKKCIFAVDPSNVRAICAAIPYKYLKRLIDVFAELLESCPHLEFILMWPQELCKVHGHYIQQNSRTLLPALKSLQKSITRLHQDMADTCSSNEYLLRYLCSAGTKN

SEQ ID NO: 102087 - protein, 91 aa, Setaria italica
  Transcript Sequence Number=SeqID_36113
  Gene Ontology: Mol. function=1,3-beta-glucan synthase activity; Cellular component=1,3-beta-glucan synthase complex; Biological process=1,3-beta-glucan biosynthetic process
  Homolog annotation: Hit_ID=Q5JLH4; Match level="QueryCoverage=100%, HitCoverage=16%, E-value=6e-39, Identity=83%"; Hit description =Callose synthase 1 catalytic subunit-like protein
GGAGRGPCCAKFRQRTGAGLRKMGPWDSIQEMARMYEYTMGLLIFLPIAVLSWFPFVSEFQTRLLFNQAFSRGLQISRILAGQNGSGTKRD

SEQ ID NO: 102088 - protein, 154 aa, Setaria italica
  Transcript Sequence Number=SeqID_36114
  Gene Ontology: Mol. function=FMN binding; Biological process =pyridoxine biosynthetic process
  Homolog annotation: Hit_ID=B8HVY3; Match level="QueryCoverage=82%, HitCoverage=65%, E-value=6e-24, Identity=46%"; Hit description =Pyridoxamine 5'-phosphate oxidase-related FMN-binding
  Pfam annotation: Domain name=Pyridox_oxidase; Domain location=23-109; Score=15.0; E_value=0.0082; Accession=PF01243.12; Description =Pyridoxamine 5'-phosphate oxidase
  Subcellular localization annotation: CTP_CleavageSite=36; ConfidenceScore=5.11e-01
MAGGVAAASALSSPWKALLQRALDANAHLRHSTYFQLATVGAGGRPANRTVVFRGFQEHCDKIQINTDTRSNKIGEISICPFGEICWYFTDSWEQFRISGSIDAIDGSSADPAKLQHREKAWFASSVKSRLQYLGPQPGIPVVDEEQAKDVHLE

SEQ ID NO: 102089 - protein, 63 aa, Setaria italica
  Transcript Sequence Number=SeqID_36115
LRGLDIARREFCGLGWDFSQDSLRKFESAPIHLPSGHLFGPSIGIRALVKNHTTLISFVIRRG

SEQ ID NO: 102090 - protein, 118 aa, Setaria italica
  Transcript Sequence Number=SeqID_36116
  Subcellular localization annotation: CTP_CleavageSite=42; ConfidenceScore=5.13e-01
KRNKKYVHHVQQTANNILWGSMNTPKKIRATTESFSPKQPFRLMKPHVIPTWPPNFGFSLNPPLLNILIRSSPACSRKKMAAKRVKKSFSMIKQSCRPLFGQKMGNRLFSIFSLGIQK

SEQ ID NO: 102091 - protein, 53 aa, Setaria italica
  Transcript Sequence Number=SeqID_36117
MAGADGQRLCWDLSRRAGSFLRMARLALTGAAPAQLVVEEEVVDGHSCRPVYK

SEQ ID NO: 102092 - protein, 223 aa, Setaria italica
  Transcript Sequence Number=SeqID_36118
  Gene Ontology: Mol. function=protein tyrosine kinase activity; Cellular component=integral to membrane; Biological process=protein amino acid phosphorylation
  Homolog annotation: Hit_ID=Q10E34; Match level="QueryCoverage=97%, HitCoverage=67%, E-value=3e-92, Identity=38%"; Hit description =Receptor protein kinase CLAVATA1, putative, expressed
  Pfam annotation: Domain name=LRR_1; Domain location=117-139; Score =9.8; E_value=4; Accession=PF00560.25; Description=Leucine Rich Repeat
  Pfam annotation: Domain name=LRR_1; Domain location=141-163; Score =15.7; E_value=0.2; Accession=PF00560.25; Description=Leucine Rich Repeat
  Pfam annotation: Domain name=LRR_1; Domain location=165-188; Score =4.0; E_value=52; Accession=PF00560.25; Description=Leucine Rich Repeat
  Pfam annotation: Domain name=LRR_1; Domain location=190-212; Score =12.7; E_value=1.1; Accession=PF00560.25; Description=Leucine Rich Repeat
  Pfam annotation: Domain name=LRR_1; Domain location=44-66; Score=5.9; E_value=23; Accession=PF00560.25; Description=Leucine Rich Repeat
  Pfam annotation: Domain name=LRR_1; Domain location=68-90; Score =14.3; E_value=0.51; Accession=PF00560.25; Description=Leucine Rich Repeat
  Pfam annotation: Domain name=LRR_1; Domain location=92-115; Score =12.7; E_value=1.1; Accession=PF00560.25; Description=Leucine Rich Repeat
  Pfam module annotation: Pfam domain module=LRR_1::LRR_1::LRR_1::LRR _1::LRR_1::LRR_1::LRR_1; Domain location=117-139::141-163::165 -188::190-212::44-66::68-90::92-115
HCAWAGVTCAPPGGGRGGGIVVGLDVSGLNLSGALPQALSRLHGLQRLSVAANALYGPIPPSLARLQQLVHLNLSNNAFNGSFPPALARLRGLRVLDLYNNNLTSATLPLEVTQMPMLRHLHLGGNFFSGEIPPEYGRWPRLQYLAVSGNELSGRIPPELGNLTTLRELYIGYYNSYTGGLPPELGNLTELVRLDAANCGLSGEIPPELGRLQNLDTLFLQVN

SEQ ID NO: 102093 - protein, 73 aa, Setaria italica
  Transcript Sequence Number=SeqID_36119
KIYILYTYKNFLSLKGNQEWNEWLSRSFKFEGQLFILDLNYKKSLSSREINHLLFWCRCCLSLPKVVQPPYLA

SEQ ID NO: 102094 - protein, 70 aa, Setaria italica
  misc_feature (1)..(15): Xaa can be any naturally occurring amino acid
  Transcript Sequence Number=SeqID_36120
XXXXXXXXXXXXXXXFFFLLQLFDSILLKNVAHFLHTRLATAVRTSYQQQQYKRNPVLTHMLPSTSHLLL

SEQ ID NO: 102095 - protein, 266 aa, Setaria italica
  Transcript Sequence Number=SeqID_36121
  Gene Ontology: Mol. function=methyltransferase activity; Cellular component=cytoplasm; Biological process=protein amino acid methylation
MKAPSLLVQCFPGLLPSKATSCVPIVSEKDLQLPSPAVEIIPSKSAHPYKYAGEKVDVQGLDIFKGKVSVADMIAFSPSEVASAKYDGTLKYWESSITLVNILKNEIRDGQLSFRGKRVLELGCGSGLSGIFACLKGASTVHFQDINAETIRCRTIPNVLANLEQARDRQNRPSESPVTPSRQLLAPNVHFYAGEWDELPTILSVVQPPAAPTNLSFSEDDFMDGCSSHDGSSIVGHDYCPRRSRKLSGSRAWERASETDQAEWVD

SEQ ID NO: 102096 - protein, 158 aa, Setaria italica
  Transcript Sequence Number=SeqID_36122
  Homolog annotation: Hit_ID=B9SJA5; Match level="QueryCoverage=65%, HitCoverage=34%, E-value=1e-16, Identity=50%"; Hit description =Pentatricopeptide repeat-containing protein, putative
  Pfam annotation: Domain name=PPR; Domain location=125-158; Score=9.5; E_value=0.68; Accession=PF01535.12; Description=PPR repeat
  Pfam annotation: Domain name=PPR; Domain location=90-124; Score=16.3; E_value=0.11; Accession=PF01535.12; Description=PPR repeat
  Pfam module annotation: Pfam domain module=PPR::PPR; Domain location =125-158::90-124
AAPCLLESEVGGKEDAGVAILGVDGEPHGADGHDGGKRRGLRRRPMRQPAVGEKAGVGAGSAPPATTAELDMKSEHGGSRLHFLEERNEETLSRRLIKLCQSNKVRSATELFDSMRASGLQPSAHACNSLLACFVRRSSLADAMRMFEFMKGKRMATG

SEQ ID NO: 102097 - protein, 47 aa, Setaria italica
  Transcript Sequence Number=SeqID_36123
  Gene Ontology: Mol. function=serine O-acetyltransferase activity; Cellular component=cytoplasm; Biological process=cysteine biosynthetic process from serine
  Homolog annotation: Hit_ID=Q10S58; Match level="QueryCoverage=87%, HitCoverage=11%, E-value=2e-17, Identity=97%"; Hit description =Probable serine acetyltransferase 2
  Pfam annotation: Domain name=SATase_N; Domain location=2-44; Score= -18.1; E_value=0.00072; Accession=PF06426.6; Description=Serine acetyltransferase, N-terminal
IFFNDVMMNNKDICRSIRLDAQAFKDRDPACAQYSWALLYLKGSIIH

SEQ ID NO: 102098 - protein, 328 aa, Setaria italica
  Transcript Sequence Number=SeqID_36124
  Gene Ontology: Mol. function=serine O-acetyltransferase activity; Cellular component=cytoplasm; Biological process=cysteine biosynthetic process from serine
  Homolog annotation: Hit_ID=Q10S58; Match level="QueryCoverage=92%, HitCoverage=85%, E-value=1e-140, Identity=83%"; Hit description =Probable serine acetyltransferase 2
  Pfam annotation: Domain name=Hexapep; Domain location=220-237; Score =11.8; E_value=2.8; Accession=PF00132.16; Description=Bacterial transferase hexapeptide (th
  Pfam annotation: Domain name=Hexapep; Domain location=252-269; Score =12.9; E_value=1.3; Accession=PF00132.16; Description=Bacterial transferase hexapeptide (th
  Pfam annotation: Domain name=SATase_N; Domain location=62-166; Score =214.9; E_value=2.2e-61; Accession=PF06426.6; Description=Serine acetyltransferase, N-terminal
  Pfam module annotation: Pfam domain module=Hexapep::Hexapep::SATase _N; Domain location=220-237::252-269::62-166
EAAARGRVVKVAPGAGSGCGGSCAGAWRSRSEAIFPIYVMGSSRASTVAAARGLVDSPGDPIWEAVKSEAKSESEKEPILSSFLYASVLSHDCLERALSFVLANRLEDPTLLATQLIDIFNDVMMNNKDICRSIRLDAQAFKDRDPACAQYSWALLYLKGYQSLQSYRIANVLWNQGRKVLALALQSRISEVFAVDIHPAAKIGEGILLDHGTGLVIGETAVVGNWVSLMQGVTLGGTGKEHGDRHPKIGQGALIGAGATILGNINVGEGAMIAAGSLVLKNVPPHSMAVGNPAKVVGYMEKEDPSLTMKHDARKDYFEHVAIRYSDD

SEQ ID NO: 102099 - protein, 82 aa, Setaria italica
  Transcript Sequence Number=SeqID_36125
YLQTQSVVLPLVVCSVVPFVLHVALAHLLVNVFGLGLAGASAAVSATFWVCCLMLFAYVLISKEFCETWRGFSADAFMYVLP

SEQ ID NO: 102100 - protein, 124 aa, Setaria italica
  misc_feature (105)..(105): Xaa can be any naturally occurring amino acid
  misc_feature (110)..(110): Xaa can be any naturally occurring amino acid
  Transcript Sequence Number=SeqID_36126
  Gene Ontology: Mol. function=protein binding; Cellular component =chloroplast envelope
  Homolog annotation: Hit_ID=B6U0T3; Match level="QueryCoverage=93%, HitCoverage=25%, E-value=2e-61, Identity=94%"; Hit description =Translocon Tic40
PLVISFLSWMLQNPMYRQQLQDMLNNMGSSPDQWDNRMVDHLKNFDLSSPEVRQQFAQVGMTPEEVVSKIMANPEVAVAFQNPKIQTAIMDCSQNPLNIVKYQNXKEVMXVFMKISQIFPQING

SEQ ID NO: 102101 - protein, 301 aa, Setaria italica
  Transcript Sequence Number=SeqID_36127
  Gene Ontology: Mol. function=protein binding; Cellular component =chloroplast envelope
  Homolog annotation: Hit_ID=B6TJM7; Match level="QueryCoverage=90%, HitCoverage=62%, E-value=8e-78, Identity=59%"; Hit description =Translocon Tic40
  Subcellular localization annotation: CTP_CleavageSite=38; ConfidenceScore=5.56e-01
PPTAASTGGAARGGARRPRLLVAAAAPRGSRNAFEGLRAKGFASVSSSTSNENTSTGTGTLPPMPPPSSYIGSPVFWIGVGVALSVAFTTVSSMVKKYAMQQAFKSMMSQSPSNSFGSNSPFPFAMPPQAAPTAPSSYPYPYSVPKKDTYPQAATVDVSATEVEAAGTSKEADVAETPKPSKKFAFVDVSPEELQQKNLQSSLETVDVKSDSTDSESKEDTEREVPTNGEAFKPNEGAARGPTESSNSGPMLSVETIEKMMEDPAVQKMVYPYLPEEMRNPDSFKWMLQNPMYRQQLQDML

SEQ ID NO: 102102 - protein, 211 aa, Setaria italica
  Transcript Sequence Number=SeqID_36128
  Gene Ontology: Mol. function=protein binding; Cellular component =chloroplast envelope
  Homolog annotation: Hit_ID=B6TJM7; Match level="QueryCoverage=90%, HitCoverage=43%, E-value=5e-84, Identity=81%"; Hit description =Translocon Tic40
PKVKYYLTLLRYLVLNLFVLFSATEVEAAGTSKEADVAETPKPSKKFAFVDVSPEELQQKNLQSSLETVDVKSDSTDSESKEDTEREVPTNGEAFKPNEGAARGPTESSNSGPMLSVETIEKMMEDPAVQKMVYPYLPEEMRNPDSFKWMLQNPMYRQQLQDMLNNMGSSPDQWDNRMVDHLKNFDLSSPEVRQQFAQVGMTPEEVVSKIM

SEQ ID NO: 102103 - protein, 274 aa, Setaria italica
  Transcript Sequence Number=SeqID_36129
  Gene Ontology: Mol. function=nucleic acid binding; Cellular component= chloroplast; Biological process=cell redox homeostasis
  Homolog annotation: Hit_ID=B6THP7; Match level="QueryCoverage=100%, HitCoverage=100%, E-value=1e-110, Identity=74%"; Hit description =Thioredoxin-like 1
  Pfam annotation: Domain name=Thioredoxin; Domain location=93-196; Score=12.3; E_value=2.2e-05; Accession=PF00085.12; Description =Thioredoxin
MAEALCNGVVPSPCGGDVGVAGRVSGAAAALAESVPIGGYRTKSSFSAGRMAMTDRKMRPLPRSIEAAPGQMNLSFPKAMRWWEKGLQPNMREIESAQDLADSLLNAGDKLVVVDFFSPGCGGCRALHAKIAQFAEKNPDVMFLQVNYETHKSMCYSLHVHVLPFFRFYRGAEGRVSSFSCTNATIKKFKDALAKHGPDRCSLGPARGLEESELMALAANKDLQFTYEKPGLVPLAEAIAKEAAAPGGPWFPLPASATQFLTQGSENSLLSSGR

SEQ ID NO: 102104 - protein, 265 aa, Setaria italica
  Transcript Sequence Number=SeqID_36130
  Gene Ontology: Mol. function=caffeoyl-CoA O-methyltransferase activity; Biological process=lignin biosynthetic process
  Homolog annotation: Hit_ID=Q9XGD6; Match level="QueryCoverage=91%, HitCoverage=93%, E-value=1e-132, Identity=93%"; Hit description =Caffeoyl-CoA O-methyltransferase 1
  Pfam annotation: Domain name=Methyltransf_3; Domain location=52-264; Score=499.7; E_value=3.9e-147; Accession=PF01596.9; Description=O -methyltransferase
MASTAAEAAKAAEQPAAAEQQQANGNGEQKTRHSEVGHKSLLKSDDLYQYILDTSVYPREPESMKELREITAKHPWNLMTTSADEGQFLNMLIKLIGAKKTMEIGVYTGYSLLATALALPEDGTILAMDINRENYELGLPCIEKAGVAHKIDFREGPALPVLDDLIADEKNHGSFDFVFVDADKDNYLNYHERLLKLVKLGGLIGYDNTLWNGSVVLPNDAPMRKYIRYYRDFVLVLNKALAADERVEICQLPVGDGVTLCRRVK

SEQ ID NO: 102105 - protein, 285 aa, Setaria italica
  misc_feature (54)..(54): Xaa can be any naturally occurring amino acid
  misc_feature (248)..(248): Xaa can be any naturally occurring amino acid
  misc_feature (266)..(266): Xaa can be any naturally occurring amino acid
  misc_feature (276)..(276): Xaa can be any naturally occurring amino acid
  Transcript Sequence Number=SeqID_36131
  Homolog annotation: Hit_ID=B9SVM2; Match level="QueryCoverage=86%, HitCoverage=36%, E-value=2e-38, Identity=36%"; Hit description =Protein phosphatase 2c, putative
  Pfam annotation: Domain name=DUF868; Domain location=20-284; Score =292.3; E_value=1e-84; Accession=PF05910.4; Description=Plant protein of unknown function (DUF868)
  Subcellular localization annotation: CTP_CleavageSite=28; ConfidenceScore=5.22e-01
MRDFASCLSHGAVQVAHTSSSGGQNLVRCAYLARLRGKPCRVTVTWTKVAIGLXLASAIHDCSKRCLCKAEVKPWLFSKMKGSKVMELDGGGDVEIIWDLSSAKFAAGPEPLEGFHVALVHDLEVVLVLGDLHKQEEHRVLSDASHSDAVMIARKEHIYAKKVYSAKARFLDIGQLHHISIECDMAGVRDPSLEIRIDKKKVLQVKRLAWKFRGNQTIYVDGLPVEVLWDVHDWLFTSSSGCAVFLFXSGQSMEKFLRTCSQNEKXAQAHRFGFTXLILNAWKTE

SEQ ID NO: 102106 - protein, 165 aa, Setaria italica
  Transcript Sequence Number=SeqID_36132
  Gene Ontology: Mol. function=DNA binding
  Homolog annotation: Hit_ID=Q8W2W5; Match level="QueryCoverage=77%, HitCoverage=37%, E-value=1e-38, Identity=60%"; Hit description =Putative transcription factor
  Pfam annotation: Domain name=NAM; Domain location=3-77; Score=-42.1; E_value=0.0017; Accession=PF02365.7; Description=No apical meristem (NAM) protein
DFTVDMWYLNWSDDQQPYDSAENGIRKAKNGYWKPVESSRIPTSTGILGMKIILEFYEGQASCGKRTGWMMHEYHVEQNDEANLPQDYKSLCKVFFQGDNWDSAESQPNSLNVDAPNDNLESYLQYLAKLEEPKVMYIFICSLVSSNFSVYCCETLEPIWSIILN

SEQ ID NO: 102107 - protein, 100 aa, Setaria italica
  Transcript Sequence Number=SeqID_36133
  Gene Ontology: Mol. function=nucleic acid binding
  Homolog annotation: Hit_ID=Q6AT25; Match level="QueryCoverage=95%, HitCoverage=17%, E-value=2e-18, Identity=54%"; Hit description=Zinc finger CCCH domain-containing protein 34
RSLVCATFRGQKKKSRTKQHYAHSARSSNYTNANAKHIDDPENFTGPKSLAHIKEEKCRSRPSFSHPTVHMAHGRSSSNDFEGPKSLSELLKAKGRTPVG

SEQ ID NO: 102108 - protein, 202 aa, Setaria italica
  Transcript Sequence Number=SeqID_36134
  Gene Ontology: Mol. function=transferase activity, transferring glycosyl groups; Cellular component=cell wall; Biological process =purine base biosynthetic process
  Homolog annotation: Hit_ID=B6SRU6; Match level="QueryCoverage=94%, HitCoverage=34%, E-value=4e-99, Identity=93%"; Hit description =Amidophosphoribosyltransferase
  Pfam annotation: Domain name=GATase_2; Domain location=1-180; Score =92.8; E_value=1.2e-24; Accession=PF00310.13; Description=Glutamine amidotransferases class-II
LGLQKLQHRGEEGAGIAASDADGKLKSVTGLGLVGDVFGDPTRLAKLPGNAAIGHVRYSTAGASSMRNVQPFLAAYRFGQLAVAHNGNLVNYQALRNKLEAQGSIFNTSSDTEVILHLIATSLSRPLLSRICDACERLAGAYSLLFLTADKLFAVRDPFGFRPLVMGRRPNGAIVFASETCALDLIDAAYEREVAPGGGGGR

SEQ ID NO: 102109 - protein, 112 aa, Setaria italica
  Transcript Sequence Number=SeqID_36135
  Gene Ontology: Mol. function=DNA binding
  Homolog annotation: Hit_ID=Q6ZIA2; Match level="QueryCoverage=94%, HitCoverage=31%, E-value=2e-37, Identity=74%"; Hit description =Regulatory protein-like
TTSPTGGSVYVRSKNRTVEFYRRWREARAEFPAGTNEQYILARTQATLTRRLGVRMQFLDTANCGGFCQLSGDLRRVSTMHANCCTGLANKVHDLRNVLRDWRNYTAAPREV

SEQ ID NO: 102110 - protein, 334 aa, Setaria italica
  Transcript Sequence Number=SeqID_36136
  Gene Ontology: Mol. function=structural constituent of ribosome; Cellular component=intracellular; Biological process=translation
  Homolog annotation: Hit_ID=B6TK08; Match level="QueryCoverage=61%, HitCoverage=61%, E-value=1e-79, Identity=73%"; Hit description =Ribosomal protein S15 containing protein
  Pfam annotation: Domain name=Ribosomal_S15; Domain location=220-300; Score=68.0; E_value=3.5e-17; Accession=PF00312.14; Description =Ribosomal protein S15
  Subcellular localization annotation: CTP_CleavageSite=50; ConfidenceScore=5.55e-01
ESFRRSGGLTSPSTPGASPSTPGATPSFMDLLKNQRPNTCSCFGSYYPIRGSLKGALPAQQRQPLQPTPFLSHKSDIFKKELERGGKAGEEEEKDSGTTLMRVYSYEDLGKRLGDLRPAGAVKDGKEWFSLEELQGRIAKLVELEKQEHRLGAKFAVIRKSILNLKQPEKTVQGQGVHLQTMLSLGGQMTPDYTRLPPQEELVERYFHPDHMSSEEKMKLELQRVRDEFKMSENDCGSARVQIAQLTLKIKHLSAVLHKKDKHSRKGLQEMVQRRKKYLKYLRRTDWDSYCLVLSKLGLRDVPEYKAPDYKSKPTTKAKSKKNKSKRKKRKMKA

SEQ ID NO: 102111 - protein, 118 aa, Setaria italica
  Transcript Sequence Number=SeqID_36137
  Subcellular localization annotation: CTP_CleavageSite=23; ConfidenceScore=5.34e-01
LPAPLLISPPPLLFRRKTTIKPRALSTSALPQKYQEPTNLSSPRAGLSPIRSSIRIPGGSPPIPPATPLSPSPVLRSGFGDRRGPHASILRAGLEEQPPPHATRALLIYVACSAAPWF

SEQ ID NO: 102112 - protein, 55 aa, Setaria italica
  Transcript Sequence Number=SeqID_36138
  Gene Ontology: Mol. function=transporter activity; Cellular component= integral to membrane; Biological process=transport
  Homolog annotation: Hit_ID=Q6H4F0; Match level="QueryCoverage=90%, HitCoverage=9%, E-value=6e-20, Identity=98%"; Hit description =Membrane transport protein-like
MGPAARERRRTLLLVNLASIMERADEALLPAVYREVGAALHATPAGLGALTLCRS

SEQ ID NO: 102113 - protein, 222 aa, Setaria italica
  Transcript Sequence Number=SeqID_36139
  Subcellular localization annotation: CTP_CleavageSite=52; ConfidenceScore=5.51e-01
SVAPCSPEPTTSRLSSHLCALVSSAIFPVTSIRSTARRRPPPPNLNHRQTCACAALTSVPNGRRCHPRSPAPPPLTLNCHPRQSTPSFLPWPSRRSPFPLPRSYKMGCWSSAGVPLCHRCPLSCSLFELTAPPPKSEELSSPRNTTFPNPPATAFSAAQELAVIHKKHRRHRNTAGHPRRCPKPLSPSAPAFSVRRPLLSARPRFRLARPCLFRRPFSASFV

SEQ ID NO: 102114 - protein, 58 aa, Setaria italica
  Transcript Sequence Number=SeqID_36140
  Gene Ontology: Mol. function=ATPase activity, coupled to transmembrane movement of substances; Cellular component=integral to membrane; Biological process=transport
  Homolog annotation: Hit_ID=Q7F9Y8; Match level="QueryCoverage=93%, HitCoverage=7%, E-value=1e-22, Identity=88%"; Hit description =OSJNBa0086O06.1 protein
RLQLLRAVHGGALVPLTIAAQSFFQIFQVASNYWMAWASPPTSATTPMVGLGLLFSVY

SEQ ID NO: 102115 - protein, 142 aa, Setaria italica
  Transcript Sequence Number=SeqID_36141
LRIRWRCGGAPFGTRRCSAFLKIHREAGKPVEVFEAARVERMLRSGQSADAEHYLERFLPPIPIRDRSPLSILLRFHVRVFRIISKVAAGGPSGAKMAALFANPSEYISTYAPEPLQRWMCGVKERHWGMHDAVEHVLEELF

SEQ ID NO: 102116 - protein, 1039 aa, Setaria italica
  Transcript Sequence Number=SeqID_36142
  Gene Ontology: Mol. function=ATPase activity, coupled to transmembrane movement of substances; Cellular component=integral to membrane; Biological process=transport
  Homolog annotation: Hit_ID=Q8GU62; Match level="QueryCoverage=99%, HitCoverage=65%, E-value=0.0, Identity=90%"; Hit description=MRP -like ABC transporter
  Pfam annotation: Domain name=ABC_membrane; Domain location=461-745; Score=110.8; E_value=4.5e-30; Accession=PF00664.15; Description=ABC transporter transmembrane region
  Pfam annotation: Domain name=ABC_tran; Domain location=184-355; Score= 151.0; E_value=3.7e-42; Accession=PF00005.19; Description=ABC transporter
  Pfam annotation: Domain name=ABC_tran; Domain location=817-1000; Score=155.3; E_value=1.8e-43; Accession=PF00005.19; Description=ABC transporter
  Pfam annotation: Domain name=MMR_HSR1; Domain location=818-951; Score= -12.3; E_value=0.014; Accession=PF01926.15; Description=GTPase of unknown function
  Pfam module annotation: Pfam domain module=ABC_membrane::ABC _tran::ABC_tran::MMR_HSR1; Domain location=461-745::184-355::817 -1000::818-951
RMQKRLQGKIMVAKDNRMKATTEVLRSMKILKLQAWDIKYLQKLEALRGEEYNWLWKSVRLSALTTFIFWGSPAFISSITFGSCILMGIPLTAGTVLSALATFRMLQDPIFTLPDLLSVFAQGKVSADRVAKYLEEEELKCDAVIEVPRNETDYDVEIDHGIFSWELETTSPTLTDVDLTVKRGMKVAICGMVGSGKSSLLSCILGEMPKLDGTVRVSGSKAYVPQTAWILSGNIRENILFGKPYDKDKYEKIIKACALTKDLELFANGDLTEIGERGINMSGGQKQRIQIARSVYEDADIYLFDDPFSAVDAHTGSQLFKDCVMGILKDKTVLYVTHQVEFLPAADLILVMQDGKIVQKGKFDELLQQNIGFEAIVGAHSQALESVMNAESSSRMLSDNRKSADSEDELDTENEMDDQLQGITKQESAHDVSQDISEKGRLTQEEEREKGGIGKKVYWAYLRAVHGGALVPLTIAAQSFFQIFQVASNYWMAWASPPTSATTPMVGLGLLFSVYIALSMGSALCVLARSLLVSLIGLLTSEKFFKNMLHCIMHAPMSFFDSTPTGRILNRASNDQSVLDLEIANKLGWCVFSIIQILGTIGVMSQVAWPVFAIFVPVTVVCFLCQRYYIPTARELARLSQIQRAPILHHFAESLAGASSIRAFGQKDRFRKANLGLVDNHSRPWFHNISSMEWLSFRLNMLSNFVFAFSLTLLVSLPEGFINPSIAGLAVTYALNLNSQLASIIWNICNTENKMISVERIMQYSRIPSEAPLTVDHYRPPNSWPEAGTINIRSLEVRYAEHLPSVLRNISCTIPGRKKVGIVGRTGSGKSTFIQALFRIVEPREGTIEIDNVDICKIGLHDLRGRLSIIPQDPTMFEGTVRGNLDPLNEYSDHRVWEILDKCQLGDIVRQSPKKLDSTVVENGENWSVGQRQLFCLGRVLLKRSNVLVLDEATASVDSSTDAVIQETIREEFGNCTVLTIAHRIHTVIDSDLILVFSEGRIIEYDTPSKLLENESSEFSRLIKEYSRRSHGFSGTANS

SEQ ID NO: 102117 - protein, 237 aa, Setaria italica
  Transcript Sequence Number=SeqID_36143
  Gene Ontology: Mol. function=ATPase activity, coupled to transmembrane movement of substances; Cellular component=integral to membrane; Biological process=transport
  Homolog annotation: Hit_ID=Q8GU62; Match level="QueryCoverage=97%, HitCoverage=14%, E-value=4e-76, Identity=61%"; Hit description=MRP -like ABC transporter
RGGLLDDSSDYTTLPYMQEWQELYSPCFWMTTFALIQLIFIMSISAQFLFKKIRWWRQRLKTATPDSNKQHQEHEITDIKLGISYKACKACCLLLLAAHVVRTVFPQLHEKISDCKYPPFILCEGLQVLSWLILALAVFGFQKTKSAKLPLIIRSWWIFNFLQSVTIVTLDLRSILTVNEDIGFEEGIDLFMLVVCTYLFAISARGKTGITFTYSNITEPLLSPSVGQQAEAKRACP

SEQ ID NO: 102118 - protein, 147 aa, Setaria italica
  Transcript Sequence Number=SeqID_36144
  Gene Ontology: Mol. function=DNA binding; Cellular component=nucleus; Biological process=regulation of transcription
  Subcellular localization annotation: CTP_CleavageSite=44; ConfidenceScore=5.27e-01
MERIQLCMQLQELQNPLGAHHSPMAWPGTLSNNSFNSNSSSVTVAEQGQSSSMNEHLMNAQLEGAAMDGLGSPSSAENSNVISMEAELEELLYGEGNRGKAGAVDGGVQQGDVDWWSYDQGKLPMGSWDFTPEANAVFQDYTSVYDI

SEQ ID NO: 102119 - protein, 54 aa, Setaria italica
  Transcript Sequence Number=SeqID_36145
LATVLGLRMFSCEVKPKHHHPIGVLSDRDSVSRWHKEALCRPIVASHKTHRHHG

SEQ ID NO: 102120 - protein, 369 aa, Setaria italica
  Transcript Sequence Number=SeqID_36146
  Gene Ontology: Mol. function=catechol O-methyltransferase activity; Biological process=lignin biosynthetic process
  Homolog annotation: Hit_ID=Q96565; Match level="QueryCoverage=94%, HitCoverage=92%, E-value=1e-101, Identity=50%"; Hit description=N -methyltransferase
  Pfam annotation: Domain name=Dimerisation; Domain location=35-87; Score=45.9; E_value=1.6e-10; Accession=PF08100.3; Description =Dimerisation domain
  Pfam annotation: Domain name=Methyltransf_11; Domain location=210 -300; Score=13.0; E_value=0.0056; Accession=PF08241.4; Description =Methyltransferase domain
  Pfam annotation: Domain name=Methyltransf_2; Domain location=96-345; Score=360.8; E_value=2.5e-105; Accession=PF00891.10; Description=O -methyltransferase
  Pfam module annotation: Pfam domain module=Dimerisation::Methyltransf_ 11::Methyltransf_2; Domain location=35-87::210-300::96-345
MGSTGYANGAGVVVDDDDATCLHAQTLVYAYNVTMAVHAAVKLGLIDALGAADGRALTADELAAKVVKAEDKAESAALIGRILRFLASFDVVRCSAEKGPDGAVLWRYSPAPACRWLTMNNGEGSLGPMAVFDVDEDNFSSWHHIADAVAGGGKQTPFQIAHGGTPAYDYFGKNPRLSTLFDQAMAHQSLLVIRKLLEHPKVFDGVGVIVDVGGGTGATLALIRGRYKHIKGINMDLAHVISEAPSLEGVEHVAGDMFESVPSGDAVLMKWMLHMQSDEECMMILKNCHKALPDNGKVIVIQSVLPETPESTPASRDSFTMDMIILVNFKGGKERTEQEYAKLGRDAGFTGGFQSTYIFCNIYALEFTK

SEQ ID NO: 102121 - protein, 163 aa, Setaria italica
  Transcript Sequence Number=SeqID_36147
  Gene Ontology: Mol. function=transcription regulator activity; Cellular component=nucleus; Biological process=regulation of transcription
  Homolog annotation: Hit_ID=B9T627; Match level="QueryCoverage=98%, HitCoverage=24%, E-value=4e-41, Identity=47%"; Hit description=Basic helix-loop-helix-containing protein, putative
KRCRKVELQRPRPRDRQLIQDRMKGLRELIPNASKCSIDALLDKTIAYMLFLQSVSEKAEKIQNTLEDKESRDETKKQLESCPLRVEELDMPDHLLIEMMCEDYEVFLEMAHVLKGLEVSILKGVLEHRSDKLWARVVVEASGGFSQTQILCPLMHLLHRRWS

SEQ ID NO: 102122 - protein, 61 aa, Setaria italica
  Transcript Sequence Number=SeqID_36148
  Gene Ontology: Mol. function=hydrolase activity; Biological process =alkaloid metabolic process
  Homolog annotation: Hit_ID=O80475; Match level="QueryCoverage=96%, HitCoverage=21%, E-value=8e-13, Identity=54%"; Hit description =Putative acetone-cyanohydrin lyase
MDESGKKRRHHFVLVHGLCHGAWCWYKVATALESAGHRVTALDLPACGASSLRADEVRSFE

SEQ ID NO: 102123 - protein, 118 aa, Setaria italica
  Transcript Sequence Number=SeqID_36149
  Gene Ontology: Mol. function=substrate-specific transmembrane transporter activity; Cellular component=integral to membrane; Biological process=transmembrane transport
  Homolog annotation: Hit_ID=Q9AUM9; Match level="QueryCoverage=94%, HitCoverage=19%, E-value=8e-35, Identity=70%"; Hit description =Putative sugar transporter
DATVRRHPGCALGVHFFNHLTGIEAVLLYSPRIFKAAGIATRDEVLAATVGVGVTKTVFILVAILLVDRIGRRRLYLSSLAGIIASLACLGLGLTVVERSAPHHAARWAVGLAIHHGC

SEQ ID NO: 102124 - protein, 316 aa, Setaria italica
  misc_feature (80)..(80): Xaa can be any naturally occurring amino acid
  misc_feature (141)..(141): Xaa can be any naturally occurring amino acid
  Transcript Sequence Number=SeqID_36150
  Gene Ontology: Mol. function=binding
  Homolog annotation: Hit_ID=Q5VS02; Match level="QueryCoverage=100%, HitCoverage=83%, E-value=1e-147, Identity=38%"; Hit description =Pentatricopeptide (PPR) repeat-containing protein-like
  Pfam annotation: Domain name=PPR; Domain location=135-169; Score =13.6; E_value=0.22; Accession=PF01535.12; Description=PPR repeat
  Pfam annotation: Domain name=PPR; Domain location=170-204; Score =36.6; E_value=1e-07; Accession=PF01535.12; Description=PPR repeat
  Pfam annotation: Domain name=PPR; Domain location=205-239; Score =20.4; E_value=0.0074; Accession=PF01535.12; Description=PPR repeat
  Pfam annotation: Domain name=PPR; Domain location=240-274; Score =24.6; E_value=0.0004; Accession=PF01535.12; Description=PPR repeat
  Pfam annotation: Domain name=PPR; Domain location=275-308; Score =14.8; E_value=0.16; Accession=PF01535.12; Description=PPR repeat
  Pfam annotation: Domain name=PPR; Domain location=28-62; Score=41.2; E_value=4.2e-09; Accession=PF01535.12; Description=PPR repeat
  Pfam annotation: Domain name=PPR; Domain location=99-133; Score=41.6; E_value=3.1e-09; Accession=PF01535.12; Description=PPR repeat
  Pfam module annotation: Pfam domain module=PPR::PPR::PPR::PPR::PPR::PP R::PPR; Domain location=135-169::170-204::205-239::240-274::275 -308::28-62::99-133
LREQRGWRQARDFFAWMKLQLCYEPSVVAYTILLRLYGRVGKIKLAEETFLEMLEVGCEPDAVACGTLLCALARSRSCTXKVIQVWKQMLEAGVAPNQFTYTVIISSFVKEDLLEEAMDVFGEMKRRKFIPEEATYSLLIXSLSSKHGRGEQALRLFEEMRVQGIVPSNYTCASLLSLYYKNEDYSKALSLFSEMEDNKIVPDEVIYGILIRIYGKLGLYEDAHRTFAEIGKADLLSDEQTYVAMAQVHMNVGHYDRALEVLESMKVRNVKPSHFSYSALLRCYVAKEDMAAAEDSFRALSKYGLPDVFCCNDLLR

SEQ ID NO: 102125 - protein, 52 aa, Setaria italica
  Transcript Sequence Number=SeqID_36151
  Gene Ontology: Mol. function=electron carrier activity; Biological process=response to oxidative stress
YNDGSTRWIVDLLANNDGLFTSAFPQALIKLSEVGVLTGMQGEIRKVCNRFN

SEQ ID NO: 102126 - protein, 142 aa, Setaria italica
  Transcript Sequence Number=SeqID_36152
  Gene Ontology: Mol. function=protein serine/threonine kinase activity; Biological process=protein amino acid phosphorylation
  Homolog annotation: Hit_ID=B9S8Q9; Match level="QueryCoverage=72%, HitCoverage=13%, E-value=8e-09, Identity=36%"; Hit description =Kinase, putative
SADGPPCLGAALHAAAAGNGSCARSCGGLTVQYPFGFSPGCEIPLGCDDQKNGTGTAWLGAERGLGLLVSNVTARALFLALLPDCSRRLNASVKELFSENYAPGPQNTLLVSSCNLAARTNNCSVPPATYLNHSSSHCFHGA

SEQ ID NO: 102127 - protein, 137 aa, Setaria italica
  Transcript Sequence Number=SeqID_36153
  Homolog annotation: Hit_ID=Q7XLJ0; Match level="QueryCoverage=41%, HitCoverage=10%, E-value=1e-14, Identity=73%"; Hit description =OSJNBa0009K15.20 protein
EGSPVVTTEGGGKEEPPLREGPGRGGGTVRGVREDEEEGGGGLDLRLSLRGRDGRCVVMELDSAVLRESSAFFADMVPGASGGGGKRIEVDGVDNLEAFKEAVELMFEPDAMRWLARAGVPRAIGVLEVSSSIMFDR

SEQ ID NO: 102128 - protein, 383 aa, Setaria italica
  Transcript Sequence Number=SeqID_36154
  Homolog annotation: Hit_ID=O64487; Match level="QueryCoverage=100%, HitCoverage=55%, E-value=7e-81, Identity=39%"; Hit description =F20D22.3 protein
  Pfam annotation: Domain name=Dymeclin; Domain location=18-383; Score =61.4; E_value=3.3e-15; Accession=PF09742.1; Description=Dyggve -Melchior-Clausen syndrome prot
MGAAPSTPRLGAPPSPGAAEQMFAALVGGKAYPISSEFWNQLLELPLTLQWPRDRVLQACHAFAQNNYQTKHLAKILIHLVWCLQECTSTTSVSSVVYRRAINAAYISSIFLKFIIENAKADNWQELCLDIDKNEKGMENFPAESTVEYFLMRGVLNYIGNVDVSSESCYLHHELLNLMLVLMSTQLCSGPSPEPKDVHPFIDAAMLQDSSIVVSVVRKLLLNFVARPKFPPNGSHPVFSDDGRPGVLQRVGSAAANFVLLPYYTFTYLVSSTPEGATSQLADNSLLVLLVMIHYRKCISTNESIPSNNLYTGSDTNDKEAQVFHENPYCKALNNAKDIQYDRADVEGNAQDGPVARLSFASLFDALGRCLNDESSVLLLYSL

SEQ ID NO: 102129 - protein, 66 aa, Setaria italica
  Transcript Sequence Number=SeqID_36155
  Subcellular localization annotation: CTP_CleavageSite=45; ConfidenceScore=5.39e-01
LLQLDHSHRLPPWPRRPLPDPKQRVQPSRIAGGYLVRPPMPWRCRASSSSLSSRSPVRSGVPPPQR

SEQ ID NO: 102130 - protein, 137 aa, Setaria italica
  Transcript Sequence Number=SeqID_36156
  Gene Ontology: Mol. function=protein binding; Cellular component =chromosome; Biological process=nucleosome assembly
  Homolog annotation: Hit_ID=B9IKT5; Match level="QueryCoverage=84%, HitCoverage=86%, E-value=1e-54, Identity=93%"; Hit description =Histone H2A
  Pfam annotation: Domain name=CBFD_NFYB_HMF; Domain location=38-103; Score=2.8; E_value=0.098; Accession=PF00808.15; Description=Histone -like transcription factor (CBFNF-Y) and archaeal histone
  Pfam annotation: Domain name=Histone; Domain location=32-106; Score =99.6; E_value=1.1e-26; Accession=PF00125.16; Description=Core histone H2AH2BH3H4
  Pfam module annotation: Pfam domain module=CBFD_NFYB_HMF::Histone; Domain location=38-103::32-106
  Subcellular localization annotation: CTP_CleavageSite=19; ConfidenceScore=5.37e-01
MAGKGGKGLLAAKTTAAKSAEKDKGKKAPVSRSSRAGLQFPVGRIHRQLKQRTQANGRVGATAAVYSAAILEYLTAEVLELAGNASKDLKVKRITPRHLQLAIRGDEELDTLIKGTIAGGGVIPHIHKSLINKSSKE

SEQ ID NO: 102131 - protein, 56 aa, Setaria italica
  Transcript Sequence Number=SeqID_36157
EFLGWLLFLFMNCDQHMFTLQWRFLLQHLLCISVDKVMCMPINQTWYNQFLLYAYS

SEQ ID NO: 102132 - protein, 122 aa, Setaria italica
  Transcript Sequence Number=SeqID_36158
  Subcellular localization annotation: CTP_CleavageSite=37; ConfidenceScore=5.25e-01
FGVPLPSSPESSTNGNIRTKQCPMRWIDFSMPRNPTTSMSNWGYLGDSQIFVQFTPKIKVASTRFSDYHFRNALAERLARWMENGDSEGELQLQRRNKSRPSPRSCILHIVEIAKLIVAVYN

SEQ ID NO: 102133 - protein, 101 aa, Setaria italica
  Transcript Sequence Number=SeqID_36159
GIRIRSFEVNDQSIYHSLGCLPIFPDFLCQPYLICYFKHNLTLLRVYFLVNHLIIPGVIIITHIGQAESSTNGNIRTKQCPMRWIDFSMPRNPTTSMSNWS

SEQ ID NO: 102134 - protein, 103 aa, Setaria italica
  Transcript Sequence Number=SeqID_36160
IHGENKNTSNANVKVKRRLNHFSLTNSRKWYCHLTNRNRLCKIFGTKLLILSEGKLGRYSTGIELSIHRSLVSSIIEFKSQSVAVGTNVMEPKPITHPRIHGT

SEQ ID NO: 102135 - protein, 106 aa, Setaria italica
  misc_feature (81)..(81): Xaa can be any naturally occurring amino acid
  Transcript Sequence Number=SeqID_36161
  Subcellular localization annotation: CTP_CleavageSite=34; ConfidenceScore=5.38e-01
PHRATVPPPPFLSLPSIAAHTQRPPPPAPPYRHRAAACRAPPGHRTPPCHRVLPRPRSTQPPPSPVTTSATPQPRRKVARXTPTTPPRCHQRASVPGIPVVLPWRR

SEQ ID NO: 102136 - protein, 180 aa, Setaria italica
  misc_feature (169)..(169): Xaa can be any naturally occurring amino acid
  Transcript Sequence Number=SeqID_36162
  Gene Ontology: Mol. function=tRNA dihydrouridine synthase activity; Cellular component=endoplasmic reticulum; Biological process =metabolic process
  Homolog annotation: Hit_ID=B9SSD6; Match level="QueryCoverage=100%, HitCoverage=54%, E-value=6e-84, Identity=83%"; Hit description=tRNA -dihydrouridine synthase, putative
  Pfam annotation: Domain name=Dus; Domain location=8-180; Score= -123.3; E_value=0.054; Accession=PF01207.9; Description =Dihydrouridine synthase (Dus)
MEYRDKLVLAPMVRVGTLPFRLLAAEYGADITYGEEIIDHKFLKCERIINESLGTTDFVEKGTDNVVFRTCPQERGRVVFQMGTSHAVRALKAAEIVCHDVAAIDINMGCPKSFSLSGGMGAALLSKPELIHDILTTLRRNLDTTVTCKIRLLNTPKDTVELARRIEKXLGVPALAVHGR

SEQ ID NO: 102137 - protein, 161 aa, Setaria italica
  Transcript Sequence Number=SeqID_36163
  Gene Ontology: Mol. function=tRNA dihydrouridine synthase activity; Cellular component=endoplasmic reticulum; Biological process =metabolic process
  Homolog annotation: Hit_ID=B9SSD6; Match level="QueryCoverage=80%, HitCoverage=39%, E-value=4e-60, Identity=84%"; Hit description=tRNA -dihydrouridine synthase, putative
MPLKFWTYLVCVLEFSFQTYSLPPYFCYLSLQGTLPFRLLAAEYGADITYGEEIIDHKFLKCERIINESLGTTDFVEKGTDNVVFRTCPQERGRVVFQMGTSHAVRALKAAEIVCHDVAAIDINMGCPKSFSLSGGMGAALLSKPELIHDILTTLRRNLDT

SEQ ID NO: 102138 - protein, 64 aa, Setaria italica
  Transcript Sequence Number=SeqID_36164
  Subcellular localization annotation: CTP_CleavageSite=35; ConfidenceScore=5.03e-01
CPMAKNSTFVMGYQANFAVCGVNWLIPTAKFAFLYAMPPSSTWHFFSWSSIFACAQSKQQIKFV

SEQ ID NO: 102139 - protein, 92 aa, Setaria italica
  Transcript Sequence Number=SeqID_36165
  Gene Ontology: Mol. function=molecular_function; Cellular component =extracellular region; Biological process=biological_process
  Homolog annotation: Hit_ID=Q9C9U9; Match level="QueryCoverage=98%, HitCoverage=34%, E-value=2e-32, Identity=73%"; Hit description =Thaumatin-like protein; 9376-10898
  Pfam annotation: Domain name=Thaumatin; Domain location=3-89; Score= -46.8; E_value=0.00014; Accession=PF00314.9; Description=Thaumatin family
DLNRVCPQGLAVRGGDGNRVVGCRSACAAYGAPQYCCTGNFGTPQQCKPTAYSRLFKSACPKAYSYAYDDPTSILTCSAGASYVVTFCPHRR

SEQ ID NO: 102140 - protein, 98 aa, Setaria italica
  Transcript Sequence Number=SeqID_36166
ASPRLLRRRAASLRAGLVAAFPHAVLWQLPQAAAAPLSLQARSIDGGALALAMERDGESQLPASLQPSGTTRLTTLGGNFWCDFHQIDGQFGNSKVGG

SEQ ID NO: 102141 - protein, 95 aa, Setaria italica
  Transcript Sequence Number=SeqID_36167
  Subcellular localization annotation: CTP_CleavageSite=37; ConfidenceScore=5.33e-01
KNNLNLATPINTGSSKSPFPDLTKPLTDSHTQLPSIYSFNLKQIFTSTFQCINISILQFTISIKCLERLHMPELIGTGMIHPSSPSCNAATRHHQ

SEQ ID NO: 102142 - protein, 111 aa, Setaria italica
  misc_feature (94)..(94): Xaa can be any naturally occurring amino acid
  misc_feature (104)..(104): Xaa can be any naturally occurring amino acid
  Transcript Sequence Number=SeqID_36168
  Pfam annotation: Domain name=X8; Domain location=1-36; Score=-20.7; E_ value=0.0027; Accession=PF07983.5; Description=X8 domain
  Subcellular localization annotation: CTP_CleavageSite=61; ConfidenceScore=5.54e-01
YAFNSYFQKNPSPASCDFGGAGMLVNVNPGSGTCMYQTSSSGFGAGYSPGATGTVPTGYTPGMSGAVPTGYSPGWQGGVGGGSGSTVLNANTRXNSMYGGSDNXAGLTAGA

SEQ ID NO: 102143 - protein, 238 aa, Setaria italica
  Transcript Sequence Number=SeqID_36169
  Gene Ontology: Mol. function=nucleoside transmembrane transporter activity; Cellular component=membrane; Biological process=transport
  Homolog annotation: Hit_ID=B9RW85; Match level="QueryCoverage=96%, HitCoverage=56%, E-value=5e-95, Identity=73%"; Hit description =Nucleoside transporter, putative
  Pfam annotation: Domain name=Nucleoside_tran; Domain location=1-234; Score=-54.7; E_value=1.2e-07; Accession=PF01733.10; Description =Nucleoside transporter
VLSSFFLLIIHCFFELLCVLLYAFIFPKLPIVKYYRSKAASEGSLTVSADLAAGGIQNRPNPKSEEDPACVERLSTKQLLLQNIDYALDMFLIYILTLSIFPGFLAEDTGSHSLGSWYALVLIASYNVWDLIGRYVPLIEQIKLRSRKGLLVAVVSRLLLIPAFYYTAKYGDQGWMIMLTSLLGLSNGYLTVCILTEAPKGYKGPEQNALGNLLVLCLLGGIFCGAVLDWVWLIGKGW

SEQ ID NO: 102144 - protein, 75 aa, Setaria italica
  misc_feature (67)..(67): Xaa can be any naturally occurring amino acid
  Transcript Sequence Number=SeqID_36170
  Gene Ontology: Mol. function=calcium ion binding; Cellular component =integral to membrane; Biological process=protein transport
  Homolog annotation: Hit_ID=B6UEQ5; Match level="QueryCoverage=98%, HitCoverage=11%, E-value=3e-22, Identity=71%"; Hit description =Vacuolar sorting receptor 7
MARRAPWLASVVAAQLLLLIVAVRGRFVVEKSSVRVLAPEHIRGHHDAAIGNFGVPDYGGTLTGVVXYPDKKATG

SEQ ID NO: 102145 - protein, 149 aa, Setaria italica
  Transcript Sequence Number=SeqID_36171
  Gene Ontology: Cellular component=chloroplast
  Homolog annotation: Hit_ID=A8J981; Match level="QueryCoverage=91%, HitCoverage=56%, E-value=3e-11, Identity=33%"; Hit description =Selenoprotein U
GAETCWGLASVLKDSMARFDSAGAKLIAIGVGTPDKARILADGLPFPVDSLYADPERKAYNVLGLYHGLGRTLFSPASAKIYSRLDYIKKATKNYTLEGTPGDLTGVLQQGGMFVFRGKELLYSWRDEGTGDHAPMDDVLSACRKVPVA

SEQ ID NO: 102146 - protein, 155 aa, Setaria italica
  Transcript Sequence Number=SeqID_36172
  Gene Ontology: Mol. function=binding; Cellular component=integral to membrane
  Homolog annotation: Hit_ID=Q5Z570; Match level="QueryCoverage=83%, HitCoverage=67%, E-value=1e-16, Identity=43%"; Hit description =Embryogenesis transmembrane protein-like
KAFLVCNATSFAGSIVIIIMLLSNTAVDHVVKSNALRLCVLVSLFGLMGAYAAGSCREVLTSIYVFSLVGGVLLYLILQWIEPIVTKPESVEKSIGWMRNKKTELLKKLSSFIMKGSGNPDDDKHNTLSGPNRQLPKLKTFQAILVILRMIYRNC

SEQ ID NO: 102147 - protein, 108 aa, Setaria italica
  Transcript Sequence Number=SeqID_36173
RFIPSSPDNPFEEFFMPCGSIRCQMDQWPNLHAKQARMMHSLPLRSLQHCLHDVFGQSSNHLIHNHLFVLFKLPLTESLPPFQNVGCFSFSRYIGLAMHLNIRLCLGT

SEQ ID NO: 102148 - protein, 72 aa, Setaria italica
  misc_feature (26)..(26): Xaa can be any naturally occurring amino acid
  Transcript Sequence Number=SeqID_36174
MDSDDAETNGSEGSNVSSGRSNGRSXKNTDADYDSLASDASTGPAQVKMRDGKEKKSQDKNDSIRYEHGNDS

SEQ ID NO: 102149 - protein, 129 aa, Setaria italica
  Transcript Sequence Number=SeqID_36175
  Gene Ontology: Mol. function=ubiquitin-protein ligase activity; Cellular component=ubiquitin ligase complex; Biological process =ubiquitin-dependent protein catabolic process
  Homolog annotation: Hit_ID=B6TRN1; Match level="QueryCoverage=43%, HitCoverage=12%, E-value=6e-20, Identity=82%"; Hit description =Photoperiod responsive protein
  Pfam annotation: Domain name=U-box; Domain location=29-101; Score =61.5; E_value=3.2e-15; Accession=PF04564.7; Description=U-box domain
MDAAVAGQQSRRRIRPPEPLVMAAAPPTPAAFRCPISLEVMRSPVSLPTGATYDRASIQRWLDSGHRTCPATRLPLASTDLVPNLLLRRLIHLHAATLPPSPSPEQVLSQLAAADGEPAAAEKAVRSLA

SEQ ID NO: 102150 - protein, 124 aa, Setaria italica
  Transcript Sequence Number=SeqID_36176
  Gene Ontology: Mol. function=cinnamyl-alcohol dehydrogenase activity; Cellular component=cytoplasm; Biological process=oxidation reduction
  Homolog annotation: Hit_ID=Q2HZE4; Match level="QueryCoverage=91%, HitCoverage=37%, E-value=1e-36, Identity=66%"; Hit description =Cinnamyl alcohol dehydrogenase (Fragment)
PEQMKAAASTMDGIIDTVSAEHPVEALLELLKPMGQMVIVGLPAKPLEVPAFSLVAGGKRVAGSGGGGIAECQAMLDFAGEHGITADVEVVGMDYVNTAIQRLERNDVRYRFVVDVAGSNLGVF

SEQ ID NO: 102151 - protein, 411 aa, Setaria italica
  misc_feature (365)..(365): Xaa can be any naturally occurring amino acid
  Transcript Sequence Number=SeqID_36177
  Gene Ontology: Mol. function=oxidoreductase activity; Biological process=oxidation reduction
  Homolog annotation: Hit_ID=Q8S412; Match level="QueryCoverage=75%, HitCoverage=75%, E-value=1e-112, Identity=65%"; Hit description =Cinnamyl alcohol dehydrogenase
  Pfam annotation: Domain name=ADH_N; Domain location=81-198; Score =117.1; E_value=5.6e-32; Accession=PF08240.4; Description=Alcohol dehydrogenase GroES-like doma
  Pfam annotation: Domain name=ADH_zinc_N; Domain location=229-364; Score=88.9; E_value=1.8e-23; Accession=PF00107.18; Description=Zinc -binding dehydrogenase
  Pfam module annotation: Pfam domain module=ADH_N::ADH_zinc_N; Domain location=81-198::229-364
  Subcellular localization annotation: CTP_CleavageSite=39; ConfidenceScore=5.61e-01
MSHHFRALIHSPSLPVPFSHGVGVSAASPSRAPRLPRARASVEKREQAMEEPGGAAALGWAARDATGVLSPYNFSRRVPRDDDVTIKILYCGICHTDLHIIKNHWGNSMYPVVPGHEIVGVVTGVGGGVTRFKPGDTVGVGYFVGSCRSCDSCGKGNENYCAGVVLTSNGVDRAHGGAATKGGFSDVIVVNEHYVLRVPDSLPLDRTAPLLCAGVTVYSPMMRHGLNEPGKHLGVVGLGGLGHVAVKVGKAFGMKVTVISTSPSKRQEAVEHLGADEFLVSRDPEQMKAATGTMDGIIDTVSAWHPITPLLALLKPLGQMVVVGVPNKPLELPVYAIVPGGKGVAGNSVGSVGDCQAMLEFAGKXHGIGAEVEVIKMDYVNTAIERLEKNDVRYRFVIDVAGSSLGSATYV

SEQ ID NO: 102152 - protein, 103 aa, Setaria italica
  Transcript Sequence Number=SeqID_36178
GGEEGLEQNGREEHQGDAAGSHGRDQNSGCRREGSEHYCGSGAVRSLYNAEWGDRGVAARPAARRIRGRFRVRRWMRIEASGPQQKSLELPGKAPETRAWRLQ

SEQ ID NO: 102153 - protein, 421 aa, Setaria italica
  misc_feature (189)..(189): Xaa can be any naturally occurring amino acid
  Transcript Sequence Number=SeqID_36179
  Homolog annotation: Hit_ID=Q6EPR2; Match level="QueryCoverage=98%, HitCoverage=91%, E-value=1e-155, Identity=66%"; Hit description =Enhancer of polycomb-like protein
  Pfam annotation: Domain name=EPL1; Domain location=1-131; Score=88.4; E_value=2.5e-23; Accession=PF10513.1; Description=Enhancer of polycomb-like
YQQEAPIVRFARELEDDDPTFALRAAPPLLRYSAPEPAADGEAHPAPNKKNAQEIPTPQYDVVDTYERDYTRTFAQPTTYIRGRGARAEVGDFIEYDLDNEDEDWLEGYNNERKNLNAEMLEALLFKLEILDHKARERAGIITPTMIGPIPVILQLDSAFEALQYLSVWYAVFQAAYSYWKAKRERWQXPILRHLQPPPPPSDTNPYNVFRPREKAHRLHTRRMQRRENSAQSFERLRLVRRNLKQAKVLVEALIKREEKKREAMDCEVHLRRIQMKYKHEAQLLDDGIALSGLQQVSTQYGSSEDYSDSDDTSTEQPNLQPFAFHLRLPDKKLSVISSVRLKHEHELKRRLQQTAWLFKRDPEEPVMLFTRPLDPGKLEIAGIRPPPAPSIDGGATAQPFRCQGRIGRGGRIIFDRWNPL

SEQ ID NO: 102154 - protein, 160 aa, Setaria italica
  Transcript Sequence Number=SeqID_36180
  Gene Ontology: Mol. function=cytochrome-c oxidase activity; Cellular component=mitochondrial envelope; Biological process=respiratory gaseous exchange
  Homolog annotation: Hit_ID=Q0KKQ3; Match level="QueryCoverage=76%, HitCoverage=81%, E-value=1e-42, Identity=65%"; Hit description =Cytochrome c oxidase subunit Vb
  Pfam annotation: Domain name=COX5B; Domain location=39-146; Score =75.9; E_value=1.4e-19; Accession=PF01215.11; Description=Cytochrome c oxidase subunit Vb
  Pfam annotation: Domain name=zf-CHCC; Domain location=101-143; Score =9.5; E_value=0.0031; Accession=PF10276.1; Description=Zinc-finger domain
  Pfam module annotation: Pfam domain module=COX5B::zf-CHCC; Domain location=39-146::101-143
  Subcellular localization annotation: CTP_CleavageSite=52; ConfidenceScore=5.48e-01
MWKRATSLLLRHHRSALLPRSPAVSAATVPGLRRTPAPLFFSTLDAARTRTRVEDVMPIATGLEREEIEAELQGKKRFDMDAPVGPFGTKEAPAVIQSYYNKRIVGCPGGEGEDEHDVVWFWLERGKPHECPVCTQYFTLNVIGEGGSPDGHDDDDDHHQ

SEQ ID NO: 102155 - protein, 93 aa, Setaria italica
  Transcript Sequence Number=SeqID_36181
VLFRAQCLLDLFRDDASKAVLFGWSVQSSQASTAREPINHRSASLRNRLTEDIRGIAAPEAKTAKHICCLQGRMTDHLTSCLTKVDKLLDVMA

SEQ ID NO: 102156 - protein, 61 aa, Setaria italica
  Transcript Sequence Number=SeqID_36182
  Homolog annotation: Hit_ID=B6T3Q9; Match level="QueryCoverage=63%, HitCoverage=11%, E-value=1e-10, Identity=71%"; Hit description =Protein kinase isozyme 4
MDFDSEYKQNFNSEYNSGNVVHLWVRDWYLDSFRDIRYFPEVRNRNDELAFTEMIKMVKVR

SEQ ID NO: 102157 - protein, 137 aa, Setaria italica
  Transcript Sequence Number=SeqID_36183
  Gene Ontology: Mol. function=transferase activity, transferring phosphorus-containing groups; Cellular component=intracellular; Biological process=peptidyl-histidine phosphorylation
  Homolog annotation: Hit_ID=Q700B0; Match level="QueryCoverage=66%, HitCoverage=24%, E-value=2e-37, Identity=80%"; Hit description =Pyruvate dehydrogenase kinase
LAPHPAQPAPLRAVPAEGAPHPHRTPRARARVPALRALQQARHPQGQHVALHDPEPEPGVIGLINTKLSPVQVAQAASEDARAICLREYGSAPDINIYGDPNFTFPYVALHLHLMLFELVKNSLRAVQERYMNSDKD

SEQ ID NO: 102158 - protein, 79 aa, Setaria italica
  Transcript Sequence Number=SeqID_36184
  Gene Ontology: Mol. function=transferase activity, transferring phosphorus-containing groups; Cellular component=intracellular; Biological process=peptidyl-histidine phosphorylation
  Homolog annotation: Hit_ID=B6T3Q9; Match level="QueryCoverage=100%, HitCoverage=22%, E-value=4e-28, Identity=77%"; Hit description =Protein kinase isozyme 4
  Pfam annotation: Domain name=BCDHK_Adom3; Domain location=1-78; Score= -27.4; E_value=0.00096; Accession=PF10436.1; Description =Mitochondrial branched-chain alpha-ketoac
EFGSRPTPRNLLLSAQFLQRELPIRIARRALELESLPFGLSNKPAILKLVRDWYLDSFRDIRYFPEVRNRNDELAFTEM

SEQ ID NO: 102159 - protein, 42 aa, Setaria italica
  misc_feature (31)..(31): Xaa can be any naturally occurring amino acid
  Transcript Sequence Number=SeqID_36185
VIRACLISGQHVALHDPEPEPGVIGLINTKXSPVQVAQAASE

SEQ ID NO: 102160 - protein, 58 aa, Setaria italica
  misc_feature (34)..(34): Xaa can be any naturally occurring amino acid
  Transcript Sequence Number=SeqID_36186
  Gene Ontology: Mol. function=transferase activity, transferring phosphorus-containing groups; Cellular component=intracellular; Biological process=peptidyl-histidine phosphorylation
  Homolog annotation: Hit_ID=B9S001; Match level="QueryCoverage=81%, HitCoverage=13%, E-value=3e-11, Identity=72%"; Hit description =Pyruvate dehydrogenase, putative
LVRRKGNIPFGFDEIHEFLDRFYMSRIGIRMLIXHVALHDPEPEPGVIGLINTKLSPV

SEQ ID NO: 102161 - protein, 91 aa, Setaria italica
  Transcript Sequence Number=SeqID_36187
  Gene Ontology: Mol. function=transferase activity, transferring phosphorus-containing groups; Cellular component=intracellular; Biological process=peptidyl-histidine phosphorylation
  Homolog annotation: Hit_ID=Q700B0; Match level="QueryCoverage=71%, HitCoverage=17%, E-value=3e-27, Identity=87%"; Hit description =Pyruvate dehydrogenase kinase
MDLIKSKGNIPCAAQVAQAASEDARAICLREYGSAPDINIYGDPNFTFPYVALHLHLMLFELVKNSLRAVQERYMNSDKDVPPVRIIVADG

SEQ ID NO: 102162 - protein, 82 aa, Setaria italica
  Transcript Sequence Number=SeqID_36188
QPAIAIGGWPVRTIFADQHRIVLQEEEHPNYRKIRTSNRVVKARAPLNLPAVTNGGKHQYLQQRNNTAVAHELRINMVNRAD

SEQ ID NO: 102163 - protein, 90 aa, Setaria italica
  Transcript Sequence Number=SeqID_36189
  Gene Ontology: Mol. function=transferase activity, transferring phosphorus-containing groups; Cellular component=intracellular; Biological process=peptidyl-histidine phosphorylation
  Homolog annotation: Hit_ID=Q700B0; Match level="QueryCoverage=64%, HitCoverage=15%, E-value=7e-20, Identity=77%"; Hit description =Pyruvate dehydrogenase kinase
  Pfam annotation: Domain name=BCDHK_Adom3; Domain location=10-87; Score=-33.4; E_value=0.0026; Accession=PF10436.1; Description =Mitochondrial branched-chain alpha-ketoac
QDFDSEYKQNFNSEYNSGNVVHLWVRDWYLDSFRDIRYFPEVRNRNDELAFTEMIKMVKVRHNNVVPTMALGVQQLKHHLCRARNIPFGF

SEQ ID NO: 102164 - protein, 89 aa, Setaria italica
  Transcript Sequence Number=SeqID_36190
  Gene Ontology: Mol. function=transferase activity, transferring phosphorus-containing groups; Cellular component=intracellular; Biological process=peptidyl-histidine phosphorylation
  Homolog annotation: Hit_ID=B6T3Q9; Match level="QueryCoverage=100%, HitCoverage=25%, E-value=5e-39, Identity=85%"; Hit description =Protein kinase isozyme 4
MQVSDEGGGIARSGLPKIFTYLYTTAKNPPDLDGPNEGATMAGYGFGLPISRLYAQYFGGDLQIISMEGYGTDAYLHLSRLGDSEEPLP

SEQ ID NO: 102165 - protein, 363 aa, Setaria italica
  Transcript Sequence Number=SeqID_36191
  Gene Ontology: Mol. function=transferase activity, transferring phosphorus-containing groups; Cellular component=intracellular; Biological process=peptidyl-histidine phosphorylation
  Homolog annotation: Hit_ID=B6T3Q9; Match level="QueryCoverage=100%, HitCoverage=100%, E-value=0.0, Identity=87%"; Hit description =Protein kinase isozyme 4
  Pfam annotation: Domain name=BCDHK_Adom3; Domain location=23-187; Score=280.0; E_value=5.5e-81; Accession=PF10436.1; Description =Mitochondrial branched-chain alpha-ketoac
  Pfam annotation: Domain name=HATPase_c; Domain location=228-355; Score=74.8; E_value=3.1e-19; Accession=PF02518.18; Description =Histidine kinase-, DNA gyrase B-, and HSP90-like ATPase
  Pfam module annotation: Pfam domain module=BCDHK_Adom3::HATPase_c; Domain location=23-187::228-355
MASEPVARAVAEEVARWGAMRQTGVSLRYMMEFGARPTERTLLLAAQFLHKELPIRIARRALDLESLPFGLSSKPAILKVRDWYVDSFRDIRSFREVRSQEDELAFTQMIKMIRVRHTNVVPTIALGVQQLKKDLGGSKAFPPGIDEIHQFLDRFYLSRIGIRMLIGQHVALHDPDPEPGVIGLINTKMSPMTVARIASEDARAICMREYGSAPDVDIYGDPDFTFPYVTPHLHLMIFELVKNSLRAVQERYMNSDKHAPPVRIIVADGAEDVTIKISDEGGGIPRSGLSRIFTYLYSTAENPPDLDEHNEGVTMAGYGYGIPISRLYARYFGGDLQIISMEGYGTDAYLHLSRLGDSEEPLP

SEQ ID NO: 102166 - protein, 303 aa, Setaria italica
  misc_feature (70)..(70): Xaa can be any naturally occurring amino acid
  misc_feature (290)..(290): Xaa can be any naturally occurring amino acid
  Transcript Sequence Number=SeqID_36192
  Gene Ontology: Mol. function=transferase activity, transferring phosphorus-containing groups; Cellular component=intracellular; Biological process=peptidyl-histidine phosphorylation
  Homolog annotation: Hit_ID=Q700B0; Match level="QueryCoverage=89%, HitCoverage=72%, E-value=1e-113, Identity=73%"; Hit description =Pyruvate dehydrogenase kinase
  Pfam annotation: Domain name=BCDHK_Adom3; Domain location=55-220; Score=272.7; E_value=8.1e-79; Accession=PF10436.1; Description =Mitochondrial branched-chain alpha-ketoac
MAGLARSLIPPVRLGGYWLVKMAASGGVVRGAMASEPLARAVAEEVVRWGSMKQTGVSLRYMMEFGSRPXTPRNLLLSAQFLQRELPIRIARRALELESLPFGLSNKPAILKVRDWYLDSFRDIRYFPEVRNRNDELAFTEMIKMVKVRHNNVVPTMALGVQQLKHHLCRARNIPFGFDEIHEFLDRFYMSRIGIRMLIGQHVALHDPEPEPGVIGLINTKLSPVQVAQAASEDARAICLREYGSAPDINIYGDPNFTFPYVALHLHLMLFELVKNSLRAVQERYMNSEXKIVPPVRIIVADG

SEQ ID NO: 102167 - protein, 189 aa, Setaria italica
  Transcript Sequence Number=SeqID_36193
  Homolog annotation: Hit_ID=Q9SF22; Match level="QueryCoverage=96%, HitCoverage=28%, E-value=1e-50, Identity=50%"; Hit description =F26K24.5 protein
EAHMARFPNRHFDLETVLAARTRPIAVQHDRTFVGFFQPESFASLSGAMSFDDVWREIAGGEREPGRADVYIVSWNDHFFVLKVESDCYYIIDTLGERLHEGCDRAYMLRFDGSSEMHALSTPAVDDGKEEEVIVTGKECCREFIKRFLAAIPLREELEIEKKGAGSVGAPHQRLQIEFHFTVLQDDER

SEQ ID NO: 102168 - protein, 279 aa, Setaria italica
  Transcript Sequence Number=SeqID_36194
  Gene Ontology: Mol. function=catalytic activity; Biological process =metabolic process
  Homolog annotation: Hit_ID=B6TML6; Match level="QueryCoverage=100%, HitCoverage=100%, E-value=1e-132, Identity=82%"; Hit description =Catalytic/ hydrolase
  Pfam annotation: Domain name=Hydrolase; Domain location=15-232; Score= 36.3; E_value=1.3e-07; Accession=PF00702.18; Description=haloacid dehalogenase-like hydrolase
MDYDGRYNKDQSLKCDCLLFDLDDTLYPFASGIAADIAKNIKDYMVHKLGVDESVSLELCILLYKQYGTTMAGLRAVGYQFDYDDFHSFVHGRLAYDKIKPDPVLRNILLSLPLRKIVFTNGDRIHASRALKRLGIEDCFERVVCFETLNPTSPALSDKLEIFDIMKHLAHPQPGVELPKSPILCKPSREAMLQALEVASINPHTTILFDDSFRNIEAAKQIGMRTVLVGTSERKKGADYALASLHNMKEALPELWEEAEKDEDVRNSSKVGIETSVIA

SEQ ID NO: 102169 - protein, 61 aa, Setaria italica
  Transcript Sequence Number=SeqID_36195
SIVLALLLLVPNLMENSSLRPSLRPHQIVIFFDRKVVSPLASILKNLTCRLLCISVSTNLM

SEQ ID NO: 102170 - protein, 194 aa, Setaria italica
  Transcript Sequence Number=SeqID_36196
QTVTGMSQITFSAEGSVSPKKLSSLPEVAKQRELSGTLESEADSKTAKQISESKSKELSGSDIFGPPPEVPARPLAARNLELRGNLDFALPQPRSIHTSVKVSNPAGGRSNIVFGEEPVVKTAKKIHDQKFHELTGNNIFKEDAPPGAGEKALSTAKLREMSGNNIFADGKVASRDYFGGVRKPPGGESSIALV

SEQ ID NO: 102171 - protein, 124 aa, Setaria italica
  Transcript Sequence Number=SeqID_36197
  Gene Ontology: Mol. function=translation initiation factor activity; Biological process=cellular metabolic process
  Homolog annotation: Hit_ID=B6SS88; Match level="QueryCoverage=93%, HitCoverage=57%, E-value=1e-42, Identity=75%"; Hit description=GTP binding protein
  Pfam annotation: Domain name=DUF567; Domain location=20-122; Score =36.5; E_value=1e-07; Accession=PF04525.4; Description=Protein of unknown function (DUF567)
MAKVHPNVLPSPAERAAAAGEEEPTSLTVWRKSLLFNCRGFTVFDAKGDLAYRVDSYDDAEAEVVLMDPAGRPAFTVRRKRLSLSGEQWLIFAGEEARRPVYAVKRGGGGKSMARVAPQCAAGA

SEQ ID NO: 102172 - protein, 69 aa, Setaria italica
  misc_feature (57)..(57): Xaa can be any naturally occurring amino acid
  Transcript Sequence Number=SeqID_36198
MEYSGGGGGGATLSEMYQSARRLLLSARDGVARVERLASAPTSSSYSSAPLVGGGAXGDPAVAEGVRRE

SEQ ID NO: 102173 - protein, 241 aa, Setaria italica
  Transcript Sequence Number=SeqID_36199
  Homolog annotation: Hit_ID=Q9SJF2; Match level="QueryCoverage=97%, HitCoverage=29%, E-value=1e-30, Identity=34%"; Hit description =T27G7.8
LEDQSISKASCAINAARYCESVLREWDEDTAFLDMDPQGSLFAGETSFLVKLGTNYLEQILSAILLEFEDMSWEYVQNIGSWSGQTALDDQILDEENTGVSPGFLGSLDVLTDRTTKLKLYLNSKDFLDLWRSIAEGLDYFIYSSIRWGEVSFSDTGVIQLRVDTKALLHIFRPFCARPEAFLPFLSESLRLLTMKKSDAQYLLEMLMNDTSSDNCLKHQGLHHVNARQAAKILRSRKFGG

SEQ ID NO: 102174 - protein, 155 aa, Setaria italica
  misc_feature (101)..(101): Xaa can be any naturally occurring amino acid
  Transcript Sequence Number=SeqID_36200
VPRRKKCGFTGCKVRAMATTRFCHSHILSDPKQVLYKPCAYITKSGVQGGLVTCGRPIIKSAAPSFCNIHLQRSQKSITQAYRKVGFNPPLTGKVTPKFSXLVAECVRQIQAKGDNHDRNALKMEKLTDPYIDIHPCEQNSWKVRHSFEVYPKYW

SEQ ID NO: 102175 - protein, 109 aa, Setaria italica
  misc_feature (48)..(48): Xaa can be any naturally occurring amino acid
  Transcript Sequence Number=SeqID_36201
  Gene Ontology: Mol. function=ubiquitin-protein ligase activity; Cellular component=ubiquitin ligase complex; Biological process =ubiquitin-dependent protein catabolic process
  Homolog annotation: Hit_ID=Q6ZKH8; Match level="QueryCoverage=60%, HitCoverage=18%, E-value=8e-24, Identity=80%"; Hit description =Putative armadillo repeat containing protein
  Pfam annotation: Domain name=U-box; Domain location=5-79; Score=62.7; E_value=1.3e-15; Accession=PF04564.7; Description=U-box domain
MEAWPDDFRCPITLEVMTDPVILPSGHTFERRSIQRWLDGGHLTCPVXTNLPLPPSPPLIPNHALRRLIATVAPSAVAAPVPSEGGAQGRQEAAASAAAVQPSSPVPTL

SEQ ID NO: 102176 - protein, 161 aa, Setaria italica
  misc_feature (148)..(148): Xaa can be any naturally occurring amino acid
  Transcript Sequence Number=SeqID_36202
  Homolog annotation: Hit_ID=Q9LNM5; Match level="QueryCoverage=99%, HitCoverage=34%, E-value=2e-53, Identity=63%"; Hit description =F12K21.3
SAYILKQDSLPSSYKSFLNKHGGKDLTSLQGVKDIVNHTAISNLAGIEKYYKSVGVDIKLDPNMKVPCPIVHGNQSCTGHVFSFLLQAYGRAVPVYVPVYLVPALVVHRQHLMKSPSTILGKSLLGIARSSLFLSVYCASAWAWTCLXFRTFQSANTLLLY

SEQ ID NO: 102177 - protein, 72 aa, Setaria italica
  Transcript Sequence Number=SeqID_36203
CCESCQISDMFRDMLHMQCSPYGSFQLCALSPFDSNASHDPGHVRRIQIVVLFSDKLTHHVFIGIIHSLNLL

SEQ ID NO: 102178 - protein, 209 aa, Setaria italica
  Transcript Sequence Number=SeqID_36204
  Gene Ontology: Mol. function=substrate-specific transmembrane transporter activity; Cellular component=integral to membrane; Biological process=transmembrane transport
  Homolog annotation: Hit_ID=B6TZX8; Match level="QueryCoverage=100%, HitCoverage=41%, E-value=6e-90, Identity=81%"; Hit description =Carbohydrate transporter/ sugar porter
KAAGIVTRSEILAATIGVGVTKTVFILTAILLVDRVGRRPLYLSSLAGIIASLACLGVGLTVVERSAPHHSPAWAVVVSILTVFTFVASFSVGVGPITWAYSSEVFPLRLRAQGTSVGVAINRLINATVSMTFVSLYKAMTIGGAFFLFAGLSVVAAAFFYFMCPETHCRPLEEIEEVFSRGCRARLRSPAAVVELPVSNVVPDGEARP

SEQ ID NO: 102179 - protein, 57 aa, Setaria italica
  Transcript Sequence Number=SeqID_36205
SFSTADFPGFKGDCIYFFKMERVKRSCIYRFSMEDGRTEELPGPWMHACTWFVPSLS

SEQ ID NO: 102180 - protein, 709 aa, Setaria italica
  Transcript Sequence Number=SeqID_36206
  Gene Ontology: Mol. function=protein serine/threonine kinase activity; Biological process=protein amino acid phosphorylation
  Homolog annotation: Hit_ID=O82658; Match level="QueryCoverage=99%, HitCoverage=64%, E-value=1e-125, Identity=50%"; Hit description =Putative kinase (Fragment)
  Pfam annotation: Domain name=APH; Domain location=30-211; Score= -19.2; E_value=0.058; Accession=PF01636.15; Description =Phosphotransferase enzyme family
  Pfam annotation: Domain name=Pkinase; Domain location=26-334; Score =135.3; E_value=1.9e-37; Accession=PF00069.17; Description=Protein kinase domain
  Pfam annotation: Domain name=Pkinase; Domain location=441-695; Score =6.7; E_value=6.9e-09; Accession=PF00069.17; Description=Protein kinase domain
  Pfam annotation: Domain name=Pkinase_Tyr; Domain location=26-334; Score=43.7; E_value=1.2e-16; Accession=PF07714.9; Description =Protein tyrosine kinase
  Pfam module annotation: Pfam domain module=APH::Pkinase::Pkinase::Pkin ase_Tyr; Domain location=30-211::26-334::441-695::26-334
GRKLAGSEGSPRIFSYSELYIGTNGFSDKEILGSGGFGRVYRAVLPSDGTTVAVKCIASHGDRFEKSFLAELAAVARLRHRNLVRLRGWCVHGGEELLLVYDYMPNRSLDRLIFAPASAKVPVLSWDRRRRIVAGLAAALFYLHEQLDTQIIHRDVKTSNVMLDAEYNARLGDFGLARWLEHAVCADDAAQPHLEVSPSPPSLGLSSSASANFQFRLMDTSRIGGTIGYLPPESFQRRATSTAKSDVFSFGIVLLEVATGRRAVDLAYPDDEIFMLDWVRRLSDEGKLLNAADGKLPEGAYSLFDINRLIHLGLLCSLHDPRARPTMKWVVENLSDGCSGDLPRLPSFVALPKYISLTSSSDSGTTTITTDSTATTLSKPVYDTAAADTIYHTAEDGRCSSRSADDSGGNSRRSSRPVAIPNVDMPREISYKEIVAITNDFSESQMVAELDFGTGYEGFLDSGHGRVHVLVKRLGMKTCPALRVRFTRELCNLAKLRHRNLVQLRGWCTDHGEMLVVYDYSPGSLLSHYLIRRDDAVLPWRQRYNIVKALASAILYLHEEWDEQVIHRNITSSAVFLDPDMNPRLGSFALAEFLSRNEHHGGHHVVVSTSSARGIFGYMSPEYMETGEATTMADVYSFGVVVLEVVTGTMAVDGRLPEVLLVRKVELFEQLNRTVEAMADRRLDGKFDRKELLRLAKLGIACTRSDPAA

SEQ ID NO: 102181 - protein, 143 aa, Setaria italica
  Transcript Sequence Number=SeqID_36207
  Gene Ontology: Mol. function=drug transporter activity; Cellular component=membrane; Biological process=multidrug transport
  Homolog annotation: Hit_ID=B9SYQ3; Match level="QueryCoverage=74%, HitCoverage=21%, E-value=1e-32, Identity=65%"; Hit description =Multidrug resistance pump, putative
LPSAFLLMLLVIILRYPLSTLYTSSTTVIEAVISLMPLLAFSIFLNGIQPILSGVAIGSGWQAIVAYVNVGAYYLIGLPIGCVLGYKTSLGAAGIWWGLIVGVSVQTIALIVLTARTNWDKEVVKAMQRLQQTGVIPVNDIIA

SEQ ID NO: 102182 - protein, 229 aa, Setaria italica
  Transcript Sequence Number=SeqID_36208
AQHGVSELSFRLARRARVPKNVLSLKSLSVLSLDTCAVPPWSDVACPCLRTLRLHRVAIHQELINKILASASCLDTLEMVYCTGLGTGKAGSCTVESSSVRNLVFRPTLKLEQITIRAPALRTVTLYTRGKVKRLELVPAPDVRKAYLHIAKPRTVMESFRVRPFLDAGVRLECLTLRGHAIKVLSSEYEDIPKLTVMFQDLRILSVSLDLSSVQETGFMLKLLESCPN

SEQ ID NO: 102183 - protein, 343 aa, Setaria italica
  Transcript Sequence Number=SeqID_36209
  Gene Ontology: Mol. function=transferase activity, transferring glycosyl groups; Cellular component=integral to membrane; Biological process=protein amino acid glycosylation
  Homolog annotation: Hit_ID=B9S2F1; Match level="QueryCoverage=96%, HitCoverage=51%, E-value=1e-137, Identity=69%"; Hit description =Transferase, transferring glycosyl groups, putative
  Pfam annotation: Domain name=Gal-bind_lectin; Domain location=67-277; Score=152.9; E_value=9.6e-43; Accession=PF00337.14; Description =Galactoside-binding lectin
LRHLNSTRSGSLRKVAAEAAELGARVFSDLQTLATTLPSLEDSSDEEEKSKCPHSIVLSGDEFRERGRAVELPCGLTLGSHITVAATPHEAHPERDPKITLLKDGEEPIMVSQFMMELQGLKTVDGEDPPRILHFNPRLRGDWSGKPVIEQNTCYRMQWGTPLRCEGWRSRADEETVDGLVKCEKWIRDDERRLEESKTSWWLNRLIGRTKTVSVDWPYPFVEDRLFVLTLTAGLEGYHVNVDGRHVTSFPYRTGFVLEDATGLSLNGDLDVQSVFAGTLPTTHPSFSPQKHLEMLPSWQAPPLPDEPVEIFIGILSAGNHFAERMAARKTWMSAAHKSLNVV

SEQ ID NO: 102184 - protein, 95 aa, Setaria italica
  Transcript Sequence Number=SeqID_36210
  Subcellular localization annotation: CTP_CleavageSite=49; ConfidenceScore=5.35e-01
LVASDIWVPRRSYVATRASKQTRALDVWTPPSLLASSGSAERPRLPCTSAAPKNSSLPAGDLFVVTATFLRESVQSCWSTQMIPASIHRNDLKLI

SEQ ID NO: 102185 - protein, 133 aa, Setaria italica
  Transcript Sequence Number=SeqID_36211
  Gene Ontology: Mol. function=small conjugating protein ligase activity; Biological process=ubiquitin-dependent protein catabolic process
  Homolog annotation: Hit_ID=B6UES9; Match level="QueryCoverage=100%, HitCoverage=23%, E-value=8e-33, Identity=57%"; Hit description =Ubiquitin carrier protein
LAQNTQVEDTESQGSLPKSSTKDCEGNKRKRLLLGQKLSLKSGRSDEDMKTIKQDPVASHLPSMAGSTYPTAWFSDVSGGQNDTSEKMSVGTASGVVSKIEYRGNNKNSQLPSQGLSVTSEAPSKTSDGNDVF

SEQ ID NO: 102186 - protein, 378 aa, Setaria italica
  Transcript Sequence Number=SeqID_36212
  Gene Ontology: Mol. function=protein binding
  Homolog annotation: Hit_ID=B2LUR0; Match level="QueryCoverage=98%, HitCoverage=85%, E-value=3e-92, Identity=48%"; Hit description=F-box- containing protein 2
  Pfam annotation: Domain name=DUF525; Domain location=253-353; Score =70.3; E_value=7.1e-18; Accession=PF04379.6; Description=Protein of unknown function (DUF525)
YQTSIVFQVAYKVWLESFGMYPLSLVKRVKEFWGSMKKWLSENFPEAAETLCKGVSEAQLKSAEDALGFKLPMPTKLLYRFCNAQLPFSDNDEANVRSSTHGIIGGYAFYDYWVNVHLSPLEQIVEETKQFYREFPDVFNGRKLIIVATSWFHPKTFILNCSNGELYVGTNNLPVGEMLPCVPKALVKPTDSDLPQDGLLLWLEEHLRRLQNGMIKTRMLLKSRYISLYPEAPPLCTSAMTNGVKVRASAVFVPEHPQTQGHERSLLYTYSIRMSVPEACMLGGVYYSSCQLHSRHWTIRSRDRVVSVVSGEGVIGQYPVLSPGRDEFVYESCTPLPKGPGSVEGSFSFVPGKLSRPEGKPFEVTVAPFPLEVPEYIF

SEQ ID NO: 102187 - protein, 96 aa, Setaria italica
  Transcript Sequence Number=SeqID_36213
LSCNLVTKGSRRGQVSNKKLRWDKDSDENAFEVFEKLEEKHKDGSKVEKEGDEEDEQEEEEAQEEEENSDDDYNQNIEFDDDDDELGNQRRKERQQ

SEQ ID NO: 102188 - protein, 197 aa, Setaria italica
  Transcript Sequence Number=SeqID_36214
  Gene Ontology: Mol. function=anthranilate synthase activity; Biological process=folic acid and derivative biosynthetic process
  Homolog annotation: Hit_ID=A4UIY9; Match level="QueryCoverage=99%, HitCoverage=22%, E-value=1e-89, Identity=79%"; Hit description=4 -amino-4-deoxychorismate synthase
  Pfam annotation: Domain name=Anth_synt_I_N; Domain location=1-80; Score=7.7; E_value=0.00025; Accession=PF04715.5; Description =Anthranilate synthase component I, N terminal region
IKEGFLEFLNKEMQSIEYNEKDYEGLPFDFHGGFVGYLGYGLKVECGASSNKAKSSTPDACFFFADNTVVVDHSNGDVYILSLHDEFSSSNGDGTCRNSTHNSWLVETEKKLLRLGAMPPGLLINGKAYAISSNVNKQSFVVEKSKDQYIRDVQSCLDYIRDGESYELCFTTQMKRRVDYINALQLYLKLRKQNPAS

SEQ ID NO: 102189 - protein, 99 aa, Setaria italica
  misc_feature (90)..(90): Xaa can be any naturally occurring amino acid
  Transcript Sequence Number=SeqID_36215
  Gene Ontology: Mol. function=oxidoreductase activity; Biological process=oxidation reduction
  Homolog annotation: Hit_ID=B6TQ13; Match level="QueryCoverage=100%, HitCoverage=28%, E-value=8e-47, Identity=91%"; Hit description =Flavonol synthase/flavanone 3-hydroxylase
VPALRDGILVILADQTEIITNGRYKSSVHQAVVDAERARLSVATFYDPSKSRKICTAAKLVSKDEPQKYRDVIYGDYVSSWYSKGPEGKXNIDALLIQQ

SEQ ID NO: 102190 - protein, 137 aa, Setaria italica
  misc_feature (1)..(13): Xaa can be any naturally occurring amino acid
  Transcript Sequence Number=SeqID_36216
XXXXXXXXXXXXXFFFFFFWLINLAMPRYIDQVANLVYILSFVTKILSNLSPARKQKRKKQLDAAAPLSVPAGRRTETEDRAFIHDPAAGSRRGEEAPPRRIGSGRLVSSSHLADQAVGAARPEVATRTGARRPVPD

SEQ ID NO: 102191 - protein, 498 aa, Setaria italica
  Transcript Sequence Number=SeqID_36217
  Gene Ontology: Mol. function=binding; Cellular component=cellular _component; Biological process=response to unfolded protein
  Homolog annotation: Hit_ID=B6U6S4; Match level="QueryCoverage=100%, HitCoverage=100%, E-value=0.0, Identity=66%"; Hit description=Heat shock protein STI
  Pfam annotation: Domain name=TPR_1; Domain location=170-203; Score =26.6; E_value=0.0001; Accession=PF00515.20; Description =Tetratricopeptide repeat
  Pfam annotation: Domain name=TPR_1; Domain location=204-237; Score =28.8; E_value=2.1e-05; Accession=PF00515.20; Description =Tetratricopeptide repeat
  Pfam annotation: Domain name=TPR_1; Domain location=245-282; Score =7.9; E_value=0.66; Accession=PF00515.20; Description=Tetratricopeptid e repeat
  Pfam annotation: Domain name=TPR_1; Domain location=309-342; Score =32.7; E_value=1.5e-06; Accession=PF00515.20; Description =Tetratricopeptide repeat
  Pfam annotation: Domain name=TPR_1; Domain location=343-376; Score =36.4; E_value=1.2e-07; Accession=PF00515.20; Description =Tetratricopeptide repeat
  Pfam annotation: Domain name=TPR_1; Domain location=377-410; Score =36.7; E_value=9.4e-08; Accession=PF00515.20; Description =Tetratricopeptide repeat
  Pfam annotation: Domain name=TPR_2; Domain location=170-203; Score =25.6; E_value=0.00021; Accession=PF07719.9; Description =Tetratricopeptide repeat
  Pfam annotation: Domain name=TPR_2; Domain location=204-237; Score =20.8; E_value=0.0058; Accession=PF07719.9; Description =Tetratricopeptide repeat
  Pfam annotation: Domain name=TPR_2; Domain location=245-282; Score =4.4; E_value=9.6; Accession=PF07719.9; Description=Tetratricopeptide repeat
  Pfam annotation: Domain name=TPR_2; Domain location=309-342; Score =26.6; E_value=9.9e-05; Accession=PF07719.9; Description =Tetratricopeptide repeat
  Pfam annotation: Domain name=TPR_2; Domain location=343-376; Score =24.5; E_value=0.00045; Accession=PF07719.9; Description =Tetratricopeptide repeat
  Pfam annotation: Domain name=TPR_2; Domain location=377-410; Score =26.1; E_value=0.00014; Accession=PF07719.9; Description =Tetratricopeptide repeat
  Pfam module annotation: Pfam domain module=TPR_1::TPR_1::TPR_1::TPR _1::TPR_1::TPR_1::TPR_2::TPR_2::TPR_2::TPR_2::TPR_2::TPR_2; Domain location=170-203::204-237::245-282::309-342::343-376::377-410::170 -203::204-237::...
  Pfam module annotation: Domain location=245-282::309-342::343 -376::377-410
LGDAASAVAAYEKGLALDPSNGGLKAGLEDAKKAAAAPPRRGPSGPDAIGQMFQGPELWSKIAADPTTRAYLEQPDFMQMLREVQRNPSSLNMYLSDPRMMQVLSLMLNIKIQRPEASEPSQSTPPPEQHQQQQAPPPETKAREVEPEPEPEPMDLTDEEKERKERKAAAQKEKEAGNAAYKKKDFETAIQHYTKALELDDEDISYLTNRAAVYIEMGKYDECIKDCDKAVERGRELRADFKMISRALTRKGTALVKLAKSSKDFDVAIETFQKALTEHRNPDTLKKLNEAERAKKELEQQEYYDPKLADEEREKGNEFFKEQKYPEAIKHYTEALRRNPKDPKAYSNRAACYTKLGAMPEGLKDAEKCLELDPTFTKGYTRKGAIQFFMKEYDKAMETYQAGLKLDPNNQELLDGVRRCVEQINKANRGEISQDELQERQNKAMQDPEIQNILTDPIMRQVLIDFQENPRAAQEHLKNPGVMQKIQKLVSAGIVQMR

SEQ ID NO: 102192 - protein, 84 aa, Setaria italica
  Transcript Sequence Number=SeqID_36218
  Gene Ontology: Mol. function=transporter activity; Cellular component= intracellular; Biological process=transport
  Homolog annotation: Hit_ID=Q9LFZ9; Match level="QueryCoverage=94%, HitCoverage=12%, E-value=1e-15, Identity=57%"; Hit description =F20N2.11
MSEGNVDGIEIAISNDERRDRADVEISEDEPRHTKIRLLRKKALHASTRLTHSLKKRGKRKVDCRVQRIAIEDVRDAEEEQAVS

SEQ ID NO: 102193 - protein, 106 aa, Setaria italica
  Transcript Sequence Number=SeqID_36219
  Gene Ontology: Mol. function=binding; Cellular component=integral to membrane; Biological process=transport
  Homolog annotation: Hit_ID=B9MZ10; Match level="QueryCoverage=85%, HitCoverage=32%, E-value=4e-37, Identity=75%"; Hit description =Mitochondrial phosphate carrier protein (Fragment)
  Pfam annotation: Domain name=Mito_carr; Domain location=10-92; Score =0.4; E_value=0.003; Accession=PF00153.19; Description=Mitochondrial carrier protein
KKEDCSTMQQLGATCLAGYISGAVGTVVSNPADNIVSSLYNKKAENIIHAVKSIGFRNLFTRSLPIRITLVGPVITMQWFFYDTIKILTGLPTSGGLPRELEEVNI

SEQ ID NO: 102194 - protein, 138 aa, Setaria italica
  Transcript Sequence Number=SeqID_36220
  Gene Ontology: Mol. function=iron-sulfur cluster binding; Biological process=abscisic acid biosynthetic process
  Homolog annotation: Hit_ID=Q6Z351; Match level="QueryCoverage=100%, HitCoverage=10%, E-value=5e-47, Identity=69%"; Hit description =Putative aldehyde oxidase-like protein
  Pfam annotation: Domain name=CO_deh_flav_C; Domain location=1-110; Score=104.8; E_value=2.9e-28; Accession=PF03450.9; Description=CO dehydrogenase flavoprotein C-terminal domain
AAPRPLGNAVSYVNCAFLGLSSVDERSDTLVFSNLRLAFGAYGTEHAIRAKKVEKFLTGKSLTASVVLRAVQLLRETIVPMEGTSHPEYRFSAAVGFLFSFLSPLAKGIPEPGKALTSGSSDSADTDDVRNLPLSSRR

SEQ ID NO: 102195 - protein, 78 aa, Setaria italica
  Transcript Sequence Number=SeqID_36221
NLFLSCGEWHIRSSRMLMSLYSGNAWSFRLPKSLQTQQIVGQRNTASGLVSIVSHHKFELAHKTCIYIVCPVVCGCNN

SEQ ID NO: 102196 - protein, 57 aa, Setaria italica
  Transcript Sequence Number=SeqID_36222
  Gene Ontology: Mol. function=carbon-sulfur lyase activity; Cellular component=vacuole
  Homolog annotation: Hit_ID=B6THV4; Match level="QueryCoverage=77%, HitCoverage=9%, E-value=1e-16, Identity=88%"; Hit description=Alliin lyase
  Pfam annotation: Domain name=EGF_alliinase; Domain location=1-46; Score=81.1; E_value=4e-21; Accession=PF04863.5; Description =Alliinase EGF-like domain
EAVAAVDCSGHGQVFLDGVAGEDGRPGCECNACFAGRDCSLHTPNCTADADRYAIPA

SEQ ID NO: 102197 - protein, 88 aa, Setaria italica
  Transcript Sequence Number=SeqID_36223
  Gene Ontology: Mol. function=carbon-sulfur lyase activity; Cellular component=vacuole
  Homolog annotation: Hit_ID=B6THV4; Match level="QueryCoverage=95%, HitCoverage=17%, E-value=3e-29, Identity=70%"; Hit description =Alliin lyase
YFKRIREPRAFVAWVKCEMEEDDDCYEALLKSKIITRSGALFEASSRYTRLSLLKTDDDFEVLMERVTDLVNAENYDEPASSSTTLVM

SEQ ID NO: 102198 - protein, 494 aa, Setaria italica
  Transcript Sequence Number=SeqID_36224
  Gene Ontology: Mol. function=carbon-sulfur lyase activity; Cellular component=vacuole
  Homolog annotation: Hit_ID=B6THV4; Match level="QueryCoverage=97%, HitCoverage=98%, E-value=0.0, Identity=74%"; Hit description=Alliin lyase
  Pfam annotation: Domain name=Alliinase_C; Domain location=115-475; Score=752.7; E_value=2.7e-223; Accession=PF04864.5; Description =Allinase, C-terminal domain
  Pfam annotation: Domain name=Aminotran_1_2; Domain location=118-471; Score=-83.2; E_value=0.0046; Accession=PF00155.13; Description =Aminotransferase class I and II
  Pfam annotation: Domain name=EGF_alliinase; Domain location=57-113; Score=130.6; E_value=5e-36; Accession=PF04863.5; Description =Alliinase EGF-like domain
  Pfam module annotation: Pfam domain module=Alliinase_C::Aminotran_1 _2::EGF_alliinase; Domain location=115-475::118-471::57-113
RTRLGRKGQQQARRRPALLALLSTSLLLNAVFLAHHLFRPSRVLSAVGDGGGSSCGLSWTLQAAREAEAVAAVDCSGHGQVFLDGVAGEDGRPGCECNACFAGRDCSLHTPNCTADADSGNPLFLEPYWRRHAAASAVVISGWHRMSYIATDIEKVFQSVELERQIRRLHRAVGNAVVDDKHVVFAAGSIQLINALVHALSPDANAASPPARVVATAPYYPIYRTQTKMFDGREYRWGGTTALWGNASRNPTDGFIEFVTSPNNPDAQLYKPVLGGSAAVTVDHAYYWPHFTHIPAPADEDVMVFTMSKPSGHAGSRFGWALIRDENVAKRANDYVQNSIMGASRDTQLRMLGIVKIMLANLHGKEDIFAFGHDVMRTRWRRLNAVVSRSRRISLQRMAPEYCTYFKRIREPSPAYAWVKCEMEEDDDCYEALLKAKIITRSGALFEASSRYTRLSLLKTDDDFEVLMERVTDLVNAENYDEPASSSTTDGNSH

SEQ ID NO: 102199 - protein, 52 aa, Setaria italica
  misc_feature (25)..(25): Xaa can be any naturally occurring amino acid
  misc_feature (52)..(52): Xaa can be any naturally occurring amino acid
  Transcript Sequence Number=SeqID_36225
  Gene Ontology: Mol. function=protein tyrosine phosphatase activity; Biological process=protein amino acid dephosphorylation
  Homolog annotation: Hit_ID=B6T2X9; Match level="QueryCoverage=98%, HitCoverage=18%, E-value=1e-20, Identity=92%"; Hit description=Low molecular weight protein-tyrosine-phosphatase slr0328
VKLMCSYCKRHTESEVPDPYYGGPXGFEKVLDLLEDACESLLDSIVADNANX

SEQ ID NO: 102200 - protein, 280 aa, Setaria italica
  Transcript Sequence Number=SeqID_36226
  Gene Ontology: Mol. function=protein tyrosine phosphatase activity; Biological process=protein amino acid dephosphorylation
  Homolog annotation: Hit_ID=B6T2X9; Match level="QueryCoverage=88%, HitCoverage=89%, E-value=1e-100, Identity=76%"; Hit description=Low molecular weight protein-tyrosine-phosphatase slr0328
  Pfam annotation: Domain name=LMWPc; Domain location=113-270; Score =172.3; E_value=1.4e-48; Accession=PF01451.13; Description=Low molecular weight phosphotyrosine protein phosphatase
  Subcellular localization annotation: CTP_CleavageSite=67; ConfidenceScore=5.83e-01
MPGAVAPTLAAAAASSSTTSAAAASSVAPNPTTRGDPLSSRCCRIAAPSPLVPPLAATRRLLGHGCRAAPLVASPHQARNPRLRFAAAATAAEGMAAEASTADAASAAEAKPFAVLFVCLGNICRSPAAEAVFRNLVSKRGLDSKFHIDSAGTIGYHEGNKADSRMRSASKKRGIEVTSISRPIKPSDFRDFDLILAMDRQNYEDILNSFERWRHKEPLPDSAPNKVKLMCSYCKRHTESEVPDPYYGGPQGFEKVLDLLEDACESLLDSIVADNANISG

SEQ ID NO: 102201 - protein, 383 aa, Setaria italica
  Transcript Sequence Number=SeqID_36227
  Gene Ontology: Mol. function=electron carrier activity; Cellular component=integral to membrane; Biological process=oxidation reduction
  Homolog annotation: Hit_ID=B6SWS3; Match level="QueryCoverage=100%, HitCoverage=73%, E-value=1e-174, Identity=80%"; Hit description =Cytochrome P450 CYP84A33v1
  Pfam annotation: Domain name=p450; Domain location=1-381; Score =118.7; E_value=2e-32; Accession=PF00067.14; Description=Cytochrome P450
RQMRKLCVMKLFSRRRAETWVAVRDEAAALVRAVASSGGEAVNLGELIFNLTKNVIFRAAFGTRDGGGQDEFIAILQEFSKLFGAFNIGDFIPWLSWMDPQGINRRLRAARAALDRFIDKIIDEHMKRGKSPDDADADMVDDMLAFLAEAKPANKSAAGGDVDDLQSTLRLTRDNIKAIIMDVMFGGTETVASAIEWAMAEMMHSPDDLRRLQQELADVVGYDRNVSESDLDKLPFLRCVIKETLRLHPPIPLLLHETAEDCVVGGYSVPKGSRVMINVWAIGRDRGSWKDADVFRPSRFAPEGEAAGLDFKGGCFEFLPFGSGRRSCPGMALGLYALELAVAQLAHGFSWSLPDGMKPSELDMGDIFGLTAPRATRLYAVPT

SEQ ID NO: 102202 - protein, 137 aa, Setaria italica
  Transcript Sequence Number=SeqID_36228
  Gene Ontology: Mol. function=zinc ion binding
TSTGIAIEEKLQTDAASDPPRIQDMEMGTNNGPPADQSINLVAEEKSQSEQTSSIGDTDVTANAGIPTDQTQHSNGSTENVVKKPPNGEPYKDMLGCNIVSDYVSTQKVASNGILHPKDETSCVHENEAVGCNTEAN

SEQ ID NO: 102203 - protein, 143 aa, Setaria italica
  Transcript Sequence Number=SeqID_36229
  Gene Ontology: Mol. function=protein transporter activity; Cellular component=membrane coat; Biological process=intracellular protein transport
  Homolog annotation: Hit_ID=B6K9B8; Match level="QueryCoverage=98%, HitCoverage=97%, E-value=2e-53, Identity=69%"; Hit description=AP-4 complex subunit sigma-1, putative
  Pfam annotation: Domain name=Clat_adaptor_s; Domain location=2-143; Score=207.7; E_value=3.2e-59; Accession=PF01217.12; Description =Clathrin adaptor complex small chain
MTIRFVLFVNKQGQTRLAQYYEHLSLDERRALEGEIVRKCLARTDQQCSFVEHRNYKVVYRRYASLFFLVGVDNDENELAILEFIHLLVETMDRHFGNVCELDIMFHLEKVHFMLEEMVMNGCIVETSKQNILAPIQLMEKAS

SEQ ID NO: 102204 - protein, 86 aa, Setaria italica
  Transcript Sequence Number=SeqID_36230
  Subcellular localization annotation: CTP_CleavageSite=47; ConfidenceScore=5.76e-01
FLCRRPRQRCSSCAPAHPPPCRSPSPPLRRLPTVAPGPPPPPPTRPRAAPPTSPPSSSRPSAPTPVLGLQTKAWPPLAMATIWAMA

SEQ ID NO: 102205 - protein, 81 aa, Setaria italica
  Transcript Sequence Number=SeqID_36231
GRKNTNNSDETWIYMLNNKCKVNEDTIFLAAHPTVLVNIFIHACCSLLQSAYTLALNAFCFSISLQYFTICCSPPGTEAHH

SEQ ID NO: 102206 - protein, 101 aa, Setaria italica
  misc_feature (33)..(33): Xaa can be any naturally occurring amino acid
  misc_feature (43)..(43): Xaa can be any naturally occurring amino acid
  Transcript Sequence Number=SeqID_36232
  Subcellular localization annotation: CTP_CleavageSite=67; ConfidenceScore=5.34e-01
MVSLCSSVLVSWAAAGPGRLLHRSSELITTQSXTVGLLGVPGXSAPSAAAILPFRRSFFQPSPLGVVAAPKGESGAPLGPVVSTVAESWYFVLSSVDVGRT

SEQ ID NO: 102207 - protein, 109 aa, Setaria italica
  Transcript Sequence Number=SeqID_36233
  Gene Ontology: Mol. function=transferase activity, transferring glycosyl groups; Biological process=metabolic process
  Homolog annotation: Hit_ID=A1IWC6; Match level="QueryCoverage=99%, HitCoverage=22%, E-value=4e-35, Identity=68%"; Hit description =Putative glucosyl transferase
PDKSVVFLSFGSMGTFPKKQLEEIAIGLENSGQRFLWVVRSPRNPEAMLAQPLPEPDLDALLPEGFLGRTKDTGLVIKSWAPQVDVLRHRATGAFVTHCGWNSTLEGIT

SEQ ID NO: 102208 - protein, 246 aa, Setaria italica
  misc_feature (29)..(29): Xaa can be any naturally occurring amino acid
  misc_feature (86)..(86): Xaa can be any naturally occurring amino acid
  misc_feature (107)..(107): Xaa can be any naturally occurring amino acid
  Transcript Sequence Number=SeqID_36234
  Gene Ontology: Mol. function=transferase activity, transferring glycosyl groups; Biological process=metabolic process
  Homolog annotation: Hit_ID=A1IWC6; Match level="QueryCoverage=100%, HitCoverage=52%, E-value=2e-97, Identity=70%"; Hit description =Putative glucosyl transferase
AVRALRDGLCVPDHSTPPVYCIGPLVSGXGEKEHECLRWLDTQPDKSVVFLSFGSMGTFPKKQLEEIAIGLENSGQRFLFVVVIGXSRRGMLDQPLPEPDLDALLRXGFLGRTKDTGLVIKSWAPQVDVLRHRATGAFVTHCGWNSTLEGITAGLPLLCWPMYAEQRMNKVFIVEEMKLGVEMKGYNEEVVKAEEVETKVKWVMESEGGQALRKRVVEVKERAAEALKEGGSSHAAFVEFLKDLDT

SEQ ID NO: 102209 - protein, 57 aa, Setaria italica
  Transcript Sequence Number=SeqID_36235
  Subcellular localization annotation: CTP_CleavageSite=33; ConfidenceScore=5.58e-01
KQSLNSPHMLLRSSVSGMTAHLSSTARIFLSPRLSFNPSHSPFFLCSFSCLSLIPSL

SEQ ID NO: 102210 - protein, 45 aa, Setaria italica
  Transcript Sequence Number=SeqID_36236
VSHEVIKMLLSGLLSPFERMFLVPMYYCSLCIRCHSCVKEKRITM

SEQ ID NO: 102211 - protein, 71 aa, Setaria italica
  Transcript Sequence Number=SeqID_36237
LLLPPYICLLQNLVGTNLIYSFYIPISCISVPPVPLSNYDFLLSSWKCYNTAEFSTLCNPDIVYHPKPLLL

SEQ ID NO: 102212 - protein, 106 aa, Setaria italica
  Transcript Sequence Number=SeqID_36238
HWHIYFMAQLHCIIVLAWHLGLGNRIAPWGTEFGWQQTSRASWGAESGIPDGRRRVDVVDSGKLTSGRSRRAGVGCGRTADVLLREEAGCRWWWADVLLLGRRRPA

SEQ ID NO: 102213 - protein, 318 aa, Setaria italica
  Transcript Sequence Number=SeqID_36239
  Gene Ontology: Mol. function=transferase activity; Cellular component= membrane
  Homolog annotation: Hit_ID=Q5VQN0; Match level="QueryCoverage=96%, HitCoverage=59%, E-value=1e-160, Identity=86%"; Hit description =Exostosin family protein-like
  Pfam annotation: Domain name=Exostosin; Domain location=1-242; Score =249.9; E_value=6.3e-72; Accession=PF03016.7; Description=Exostosin family
QRQEEADIFYVPFFTTISYFLLEKQECKALYREALKWVTNQPAWQRSEGRDHVIPVHHPWSFKSVRSFVKKAIWLLPDMDSTGNWYKPGQVYLEKDVILPYVPNVDLCDSKCVSETQSKRSILLFFRGRLKRNAGGKIRSKLVEELKGAEGIVIEEGSAGAQGKTAAQDGMRKSLFCLSPAGDTPSSARLFDAIVSGCIPVIISDELELPFEGILDYREIALFVSSTDALQPGWLMNYLRRIDAKRIREMQSNLVKFSRHFLYSSPAQPLGPEDLTWRMIAGKLLNIKLHIRRSQRVVRESRSICTCECRVGNTTRML

SEQ ID NO: 102214 - protein, 91 aa, Setaria italica
  Transcript Sequence Number=SeqID_36240
KPSSRAIYASCQLTIQASQEEHVDIKGRTLELQNNPFQSGKKTLPILYRQFDHKLHSTAIHQFLVVLQFAAPHCCSCHKLRSGAATTKIMF

SEQ ID NO: 102215 - protein, 145 aa, Setaria italica
  Transcript Sequence Number=SeqID_36241
  Gene Ontology: Mol. function=hydrolase activity, acting on acid anhydrides, in phosphorus-containing anhydrides; Cellular component =cellular_component; Biological process=nucleobase, nucleoside, nucleotide and nucleic acid metabolic process
  Homolog annotation: Hit_ID=B9SQD1; Match level="QueryCoverage=100%, HitCoverage=13%, E-value=3e-58, Identity=72%"; Hit description =Regulator of telomere elongation helicase 1 rtel1, putative
KNRNHSSSAAENTIWQRICKHKQPVIEPRQSSNFPNAIEDYAAKLNDSSTSGAIFFAVCRGKVSEGLDFADRAGRAVIVTGMPFATPTDPKVRLKREYLDKQGAASNNNTKMLTGQEWYTQQAARAVNQAVGRVIRHRHDYGAII

SEQ ID NO: 102216 - protein, 169 aa, Setaria italica
  Transcript Sequence Number=SeqID_36242
  Subcellular localization annotation: CTP_CleavageSite=82; ConfidenceScore=5.27e-01
SSSTSSSSSAASSARGSRRWVFIKDMLLHRSRSEPGNSAHAHDGPTTASAGATKPERAWPFSPSWAARDRLAARLRPSRAPPATEAAGGHGGEDARPRGQGRGRRRRSTTVAAAHERLYAAPNRAQAEEMRRRTFLPYRQGLLGCLGFSSRGYGALHGLTKTLNPVFSR

SEQ ID NO: 102217 - protein, 379 aa, Setaria italica
  Transcript Sequence Number=SeqID_36243
  Gene Ontology: Mol. function=receptor activity
  Homolog annotation: Hit_ID=A9NIN1; Match level="QueryCoverage=93%, HitCoverage=75%, E-value=1e-178, Identity=87%"; Hit description=HS1 -like protein
  Pfam annotation: Domain name=Hs1pro-1_C; Domain location=98-368; Score=470.5; E_value=2.5e-138; Accession=PF07014.4; Description =Hs1pro-1 protein C-terminus
GYASRRELARRLESLAAREVELVAALCEGDRSAPLAELTASGGVLPRERSGSEVWQLPGSAAAVVCQASEASLLPRLAAWDKSEALAARIMYAVEGQMQGCAFTLGLGEPNLAGKPVLEYDRVVRPHDLHALKPKPAPEPRSGYRNRENETLVTMYQILESWLCAASQLLARLNERIEAKDWEAAASDCWILERVWKLLADVEDLHLLMDPDDFLRLKSQLAVRAAPGSEASFCFRSRALLHVANTTRDLKKRVPWVLGVEVDPNGGPRVQEAAMRLYHSRRRGEGEEAGKVELLQAFQAVEAAVRRFFFAYRQLVAAVMGTAEASGNRALFVPAEGMDPLAQMFLEPPYYPSLDAAKTFLADYWAQQMAGVSAQSQQS

SEQ ID NO: 102218 - protein, 160 aa, Setaria italica
  misc_feature (15)..(15): Xaa can be any naturally occurring amino acid
  misc_feature (48)..(48): Xaa can be any naturally occurring amino acid
  misc_feature (63)..(63): Xaa can be any naturally occurring amino acid
  misc_feature (111)..(111): Xaa can be any naturally occurring amino acid
  misc_feature (118)..(118): Xaa can be any naturally occurring amino acid
  misc_feature (138)..(138): Xaa can be any naturally occurring amino acid
  Transcript Sequence Number=SeqID_36244
  Homolog annotation: Hit_ID=Q8H5J9; Match level="QueryCoverage=97%, HitCoverage=34%, E-value=6e-10, Identity=31%"; Hit description =Fusarium resistance protein I2C-5-like
MKSFLSAVLGELMTXINFIINKCSNLPVLAVGDNQPRALLRAQVIVSXVQLLGMLIDAMHRGXYTLDTQPQYAEGGKDETVSLFMLLSKVNSPYFSTASAEILGPLREALXDVDELVXAALPRLYRQHYSVHILLGNXELKLVINFLLHEQPHGSEELDV

SEQ ID NO: 102219 - protein, 43 aa, Setaria italica
  Transcript Sequence Number=SeqID_36245
MFPVLWQLEHLGLLKQAAIQAILYTFITYPTIGYYWTAYKLLL

SEQ ID NO: 102220 - protein, 183 aa, Setaria italica
  Transcript Sequence Number=SeqID_36246
  Gene Ontology: Mol. function=nucleoside-triphosphatase activity; Cellular component=integral to membrane; Biological process=transport
  Homolog annotation: Hit_ID=B8XSN5; Match level="QueryCoverage=100%, HitCoverage=13%, E-value=2e-81, Identity=77%"; Hit description=PDR -like ABC transporter
  Pfam annotation: Domain name=ABC2_membrane; Domain location=1-122; Score=-15.0; E_value=0.017; Accession=PF01061.16; Description=ABC-2 type transporter
YSSWAYSLAQAAIEIPYVFIQAILYTFITYPTIGYYWTAYKLLLFFYAIFCSVLSYIYVGLLLVSVTPNVQVATILGTFFNTMQTLFSGFILPAHQMPKWWIWLYYLGPTSWILNAQLTSQYGNIGKEVNVFGETKTVAVFLNDYFGFHQDRLSIVATVITAFPIVVIILYTLSVEKLNFQKR

SEQ ID NO: 102221 - protein, 1424 aa, Setaria italica
  misc_feature (1320)..(1320): Xaa can be any naturally occurring amino acid
  Transcript Sequence Number=SeqID_36247
  Gene Ontology: Mol. function=acid-amino acid ligase activity; Cellular component=intracellular; Biological process=ubiquitin -dependent protein catabolic process
  Homolog annotation: Hit_ID=B9SMZ3; Match level="QueryCoverage=98%, HitCoverage=38%, E-value=0.0, Identity=51%"; Hit description=E3 ubiquitin protein ligase upl2, putative
  Pfam annotation: Domain name=UBA; Domain location=2-35; Score=25.7; E_ value=0.00019; Accession=PF00627.23; Description=UBATS-N domain
  Pfam annotation: Domain name=UIM; Domain location=43-60; Score=22.7; E_value=0.0016; Accession=PF02809.12; Description=Ubiquitin interaction motif
  Pfam module annotation: Pfam domain module=UBA::UIM; Domain location =2-35::43-60
NAISLIVEMGFSRARAEEALRQVGTNSVEIATDWLFSHPEEPQEEDDELARALAMSLGNSDTSAQEEDSRSNDLELEEETVQLPPIDEILYSCLRLLQTKEALAFPVRDMLVTISTQNDGQNREKVLTYLIENLKQCVMASESLKDTTLSALFHVLALILHGDTAAREVASKAGLVKVALDLLFSWELEPRESEMTEVPNWVTSCFLSVDRMLQLEPKLPDVTELDVLKKDNSNAKTSLVIDDSKKKDSESLSSVGLLDLEDQKQLLKICCKCIEKQLPSASMHAILQLCATLTKVHAAAICFLESGGLNALLSLPTSSFFSGFNSVASTIIRHILEDPHTLQQAMELEIRHSLVTAANRHANPRVTPRNFVQNLAFVVYRDPVIFMKAAQAVCQIEMVGDRPYVVLLKDREKERSKEKDKDKSADKDKATGAVTKVTSGDIAAGSPASAQGKQPDLSARNVKPHRKPPQSFVTVIEHLLDLVISFVPPPRSEDQADVSGTASSSDMDIDCSSAKGKGKAVAVAPEESKHAAQEATASLAKSAFVLKLLTDVLLTYASSIQVVLRHDADLSSMHGPNRPSAGLVSGGIFNHILQHFLPHAVKQKKDRKTDGDWRYKLATRANQFLVASSIRSAEGRKRIFSEICNIFLDFTDSSTAYKAPVSRLNAYVDLLNDILSARSPTGSSLSAESAVTFVEVGLVQSLSRTLQVLDLDHPDSAKIVSAIVKALEVVTKEHVHSADLNAKGDNSSKIASDSNNVDLSSNRFQALDTTSQPTEMITDDRETFNAVQTSQSSDSVEDEMDHDRDMDGGFARDGEDDFMHEMAEDGTGNESTMEIRFEIPRNREDDMADDDEDTDEDMSADDGEEVDEDDEDEDDDEENNNLEEDDAHQMSHPDTDQDDREMDEEEFDEDLLEDDDEDEDEEGVILRLEEGINGINVFDHIEVFGGSNNLSGDTLRVMPLDIFGTRRQGRSTSIYNLLGRASDHGVLDHPLLEEPSSMLNLPHQGQPENLVEMAFSDRNHESSSSRLDAIFRSLRSGRNGHRFNMWLDDSPQRSGSAAPAVPEGIEELLISHLRRPTPEQPDDQRTPAGGTQENDQPTNVSEAEAREEAPAEQNENNENTVNPVDVLENAGPAPPDSDALQRDVSNASEHATEMQYERSDAVVRDVEAVSQASSGSGATLGESLRSLEVEIGSVEGHDDGDRHGASGASDRLPLGDMQATARSRRPSGSAVQVGGRDISLESVSEVPQNSNQEPDQNANEGNQEPARAADADSIDPTFLEALPEDLRAEVLSSRQNQVAQTSNDQPQNDGDIDPEFLAAXPPDIREEVLAQQRAQRLQQQSQELEGQPVEMDAVSIIATFPSEIREEVLLTSPDTLLATLTPALVAEANMLRERFAHRYHSSSLFGMNSRNRRGESSRREIMAA

SEQ ID NO: 102222 - protein, 74 aa, Setaria italica
  Transcript Sequence Number=SeqID_36248
LKIGLSKNYWNIMSSGCPFLTLNRQVCSYDLRHREFVCCKLFSFFLGCCRFMALFFYWPPGTSESITHALSSNS

SEQ ID NO: 102223 - protein, 177 aa, Setaria italica
  Transcript Sequence Number=SeqID_36249
  Gene Ontology: Mol. function=protein dimerization activity; Biological process=regulation of RNA metabolic process
  Homolog annotation: Hit_ID=B6UD06; Match level="QueryCoverage=91%, HitCoverage=35%, E-value=2e-71, Identity=75%"; Hit description =Transposon protein
VRDIVKVITSTPSRMQIFNTIVQNLGLKAKSGLILDVPHRWNATYDMLHDALKYKVALNRYAVEQHHQVPSQDEWAKVKALHGFLQQFSEATKAFFADRHPTAHLFLKMLLAIRDVLLEEVWNSNELLNEIANAMHAKFEKHWTKPDLALLIAVVLDPSMKTDFIKFYFYTVGENVK

SEQ ID NO: 102224 - protein, 130 aa, Setaria italica
  Transcript Sequence Number=SeqID_36250
  Gene Ontology: Mol. function=ligase activity
MGSCQHELSSRQLEGSQAQSLSTVHRNILVLADQHEKFEAAIESNALSSSEDSSLSLVRSGETTTCEKEPLCIFGSSKCLNPSLKRLYRSRNIPVPRPLPSLVRLLESSKRVKMQPSTNYSLLNSRHSLP

SEQ ID NO: 102225 - protein, 379 aa, Setaria italica
  Transcript Sequence Number=SeqID_36251
  Gene Ontology: Mol. function=ligase activity
  Homolog annotation: Hit_ID=Q9LMC5; Match level="QueryCoverage=70%, HitCoverage=45%, E-value=7e-59, Identity=42%"; Hit description =F14D16.17
  Pfam annotation: Domain name=DRMBL; Domain location=59-157; Score =48.0; E_value=3.7e-11; Accession=PF07522.6; Description=DNA repair metallo-beta-lactamase
LQVIACIWKHPHAPFVYLACDLLGHEDVLIEVSRTFGSKIYVDRRLDCFKALSLTAPEIITDDPSSRFQMVGFHQLYEKASRKLEEARARLQPEPLFIRPSTQWYAICARSQKPSLTEAEQDEYGVWHICFSIHSSRDELEQALQLLQPQWVISTTPPCFALELSYVKKHCFKTRLTADDPLWKIFGDPLQKSISSPSSVLASSETHTDKDHSDFVDEDDHSSSSSEECTYLDISAIELKFVPSPPPEEPDITLFGRARFGSQAIDIMKEELCSQYIAFEGGYLEEARACALADSVHSNSEDSETNSAADCVVKEAPASHQDHIDAGDEMGSCQHELSSRQLEGSQAQSLSTVHRNILVLADQHEKFESCNRVKTLFKF

SEQ ID NO: 102226 - protein, 37 aa, Setaria italica
  Transcript Sequence Number=SeqID_36252
FSSNALLNTCKPCIKCSSRCLSHCLIGFLYKIQIAIF

SEQ ID NO: 102227 - protein, 122 aa, Setaria italica
  Transcript Sequence Number=SeqID_36253
  Gene Ontology: Mol. function=protein binding; Cellular component =nucleus; Biological process=cell division
  Homolog annotation: Hit_ID=B6TAD6; Match level="QueryCoverage=86%, HitCoverage=34%, E-value=2e-48, Identity=88%"; Hit description=CYCD6
PRLLAISCLSLAAKMQRVAAFSIADIQRDEEFMFDAVTVRRMERVLLDALEWRARSVTPLAFLGFFISACYPPPRHPLQVAAVKARAVDILLRTQPEVKMAEFSPSVAAAAALLAAAGEVTA

SEQ ID NO: 102228 - protein, 87 aa, Setaria italica
  misc_feature (20)..(20): Xaa can be any naturally occurring amino acid
  Transcript Sequence Number=SeqID_36254
IKTNFSVMSFLRLLPQRLRXSLRQVEQDVETVIHVLQPGPIGIVEHKFTDVEILEARATVKRAVDNWQRNWALERNLGSGSFDKWKK

SEQ ID NO: 102229 - protein, 88 aa, Setaria italica
  Transcript Sequence Number=SeqID_36255
  Subcellular localization annotation: CTP_CleavageSite=34; ConfidenceScore=5.24e-01
SSTLFPVMKIKELKNNLSSTVKGFFLSSTVQIFSAEYRFVRVTSFFLNKDRYEKMAVYYFAKGQSFSVSHILHSQALFYIFTHTKIKR

SEQ ID NO: 102230 - protein, 81 aa, Setaria italica
  Transcript Sequence Number=SeqID_36256
KNQVRISTFSILNSSWQNYLNIAMLLSNDHFIFRMTSGQHINQYKHASQSIMFCSATGHSTPGASLQERLTLYRHHKHGGS

SEQ ID NO: 102231 - protein, 209 aa, Setaria italica
  Transcript Sequence Number=SeqID_36257
  Subcellular localization annotation: CTP_CleavageSite=54; ConfidenceScore=5.07e-01
LLLEKNSLQVTSHGVVSSVPMNGHLCASPGHSTPQNESMPNSTGETVDNQEVLSEMMDSDGHLNTRVFGASAGDAHDMLSIAELRKNMASARRSSSVQQIQKKVLSVKTLKVKKGISKSKGTKTHPILELEGKNDASDNIQLKGNIDFSSTVIVCGLNASVEDQTNKTPDRRVTRQTIRGPSSKVLTCKKLAKRKGPRELCSPLSSLDV

SEQ ID NO: 102232 - protein, 204 aa, Setaria italica
  misc_feature (186)..(186): Xaa can be any naturally occurring amino acid
  Transcript Sequence Number=SeqID_36258
  Gene Ontology: Mol. function=protein tyrosine kinase activity; Cellular component=plasma membrane; Biological process=protein amino acid phosphorylation
  Homolog annotation: Hit_ID=C0LGQ9; Match level="QueryCoverage=88%, HitCoverage=53%, E-value=2e-63, Identity=56%"; Hit description =Leucine-rich repeat receptor-like protein kinase (Fragment)
  Pfam annotation: Domain name=LRRNT_2; Domain location=22-68; Score =40.9; E_value=5e-09; Accession=PF08263.4; Description=Leucine rich repeat N-terminal domain
  Pfam annotation: Domain name=LRR_1; Domain location=120-142; Score =16.8; E_value=0.089; Accession=PF00560.25; Description=Leucine Rich Repeat
  Pfam annotation: Domain name=LRR_1; Domain location=144-166; Score =16.6; E_value=0.11; Accession=PF00560.25; Description=Leucine Rich Repeat
  Pfam annotation: Domain name=LRR_1; Domain location=168-190; Score =18.7; E_value=0.025; Accession=PF00560.25; Description=Leucine Rich Repeat
  Pfam annotation: Domain name=LRR_1; Domain location=96-118; Score =11.0; E_value=2.4; Accession=PF00560.25; Description=Leucine Rich Repeat
  Pfam module annotation: Pfam domain module=LRRNT_2::LRR_1::LRR_1::LRR_ 1::LRR_1; Domain location=22-68::120-142::144-166::168-190::96-118
MGLLGGFLLFLLLASPALGQLPSQDILALLAFKKGITHDPSGYITDSWNDESIDFNGCPASWNGIVCNGASVAGVVLDGHGISGNADISVFANLTMLVKLSMANNNLSGSLPSNVGSLKSLKFMDISNNQFSGPIPEDIGNLRSLQNLSLAGNNFSGPLPDSIDGLMSLQSLDVSGNSLSGPLPAXLEGLKSLVALNLSHNAFT

SEQ ID NO: 102233 - protein, 72 aa, Setaria italica
  misc_feature (61)..(61): Xaa can be any naturally occurring amino acid
  Transcript Sequence Number=SeqID_36259
YSNLVIGLFAVVAIESSSQRLGRTYAVLLFFAVVLDVAWFILFSHAIWTITPDEKYGELFXFSLRLALWMTN

SEQ ID NO: 102234 - protein, 91 aa, Setaria italica
  Transcript Sequence Number=SeqID_36260
  Gene Ontology: Mol. function=protein binding
APPMPLLGRLPTRARPPPLFLCSFAAADDAQVPSPAAAVAGAAPGEDNRRRITEILSRGRNPMLVGVGAASAAADFATASPYRILPVGPTP

SEQ ID NO: 102235 - protein, 130 aa, Setaria italica
  misc_feature (117)..(117): Xaa can be any naturally occurring amino acid
  Transcript Sequence Number=SeqID_36261
  Gene Ontology: Mol. function=transferase activity, transferring glycosyl groups; Cellular component=integral to membrane; Biological process=cellulose biosynthetic process
  Homolog annotation: Hit_ID=Q651X7; Match level="QueryCoverage=99%, HitCoverage=17%, E-value=2e-50, Identity=69%"; Hit description =Cellulose synthase-like protein E1
NGNSFTVLSHVELRGFDGVDGPLYIGTGCFHRRESLCGRRFTNDYKEDWDRGINKEKRELSINKIEEKAKLLTTCTYEHNTQWGNEIGVKYGFPAEDVITGLTIHCRGWKSVCNNPXRAAFVGVGPTTHA

SEQ ID NO: 102236 - protein, 72 aa, Setaria italica
  Transcript Sequence Number=SeqID_36262
  Gene Ontology: Mol. function=translation initiation factor activity; Cellular component=nucleolus; Biological process=mature ribosome assembly
  Homolog annotation: Hit_ID=B6SS23; Match level="QueryCoverage=100%, HitCoverage=29%, E-value=7e-33, Identity=93%"; Hit description =Eukaryotic translation initiation factor 6
  Pfam annotation: Domain name=eIF-6; Domain location=1-72; Score= -45.6; E_value=0.00055; Accession=PF01912.10; Description=eIF-6 family
NCIACNDYVALTHPDLDKETEEVISDVLGVEVFRQTIAGNILVGSYCTFTNKGGLVHPQTSVEDLDELSTLL

SEQ ID NO: 102237 - protein, 57 aa, Setaria italica
  Transcript Sequence Number=SeqID_36263
  Gene Ontology: Mol. function=ribulose-bisphosphate carboxylase activity; Cellular component=chloroplast ribulose bisphosphate carboxylase complex; Biological process=carbon utilization by fixation of carbon dioxide
  Homolog annotation: Hit_ID=Q0INU1; Match level="QueryCoverage=100%, HitCoverage=48%, E-value=8e-19, Identity=78%"; Hit description =Ribulose bisphosphate carboxylase small chain
  Subcellular localization annotation: CTP_CleavageSite=44; ConfidenceScore=5.65e-01
MAPTAMAATSVAPFQGLKSTAGLPVSRRSTSSGFGNVSNGGRIRCMQVWPIGGKKFE

SEQ ID NO: 102238 - protein, 129 aa, Setaria italica
  misc_feature (19)..(19): Xaa can be any naturally occurring amino acid
  misc_feature (116)..(116): Xaa can be any naturally occurring amino acid
  Transcript Sequence Number=SeqID_36264
  Gene Ontology: Mol. function=metal ion binding
  Homolog annotation: Hit_ID=B9SSQ5; Match level="QueryCoverage=81%, HitCoverage=8%, E-value=5e-17, Identity=42%"; Hit description =Protein binding protein, putative
LRGKQPEIAVLVADGGGWXIRLVKPKNSYEEMVRTVLITAQMLHFLRRKPDEPEKNLWSHLRKVFDKFDVRPSEDDFRDHSSLMKHFVEKDPVLAKSEILRVFVEGRSRKNISEIXIETKQPFIADDED

SEQ ID NO: 102239 - protein, 34 aa, Setaria italica
  Transcript Sequence Number=SeqID_36265
TGAVASVSRAWLFPALDAGEIRAYLLSSVGILES

SEQ ID NO: 102240 - protein, 72 aa, Setaria italica
  Transcript Sequence Number=SeqID_36266
NYTLQICASAGEEAPVLLMLSILCLRLVNEFRRQILLAMVRSHWVLWYSVLAMMYCHLMPVWVDVLRSILLL

SEQ ID NO: 102241 - protein, 31 aa, Setaria italica
  Transcript Sequence Number=SeqID_36267
FMHDGLQQARAPIYDVPFATEVLRTGSYEER

SEQ ID NO: 102242 - protein, 101 aa, Setaria italica
  Transcript Sequence Number=SeqID_36268
  Subcellular localization annotation: CTP_CleavageSite=87; ConfidenceScore=5.17e-01
SPYPKSEQLDIISSSSSTRTHEQSKQPHVPKQIDQSERKFKRTQIRTGTRKTARRMTNFLSHTRPNRAGGTTRRPPTERSLILQRLRAVDLGNPETRRRGM

SEQ ID NO: 102243 - protein, 96 aa, Setaria italica
  Transcript Sequence Number=SeqID_36269
  Subcellular localization annotation: CTP_CleavageSite=37; ConfidenceScore=5.34e-01
RLRLVLTKRARADGRQAHGRSSGRRRASGCRRGRAIRRSSVQAGGRSGGRRDERRQQAAGVAPGTTRREAKAGEREDGGDGRVLATARHTVRQGRR

SEQ ID NO: 102244 - protein, 105 aa, Setaria italica
  Transcript Sequence Number=SeqID_36270
  Gene Ontology: Mol. function=receptor activity; Cellular component =integral to membrane
  Homolog annotation: Hit_ID=B6TSK1; Match level="QueryCoverage=75%, HitCoverage=20%, E-value=4e-34, Identity=88%"; Hit description =Hemolysin-III related family protein
HALAINWAHRECHLALALELVMGLVYAAGAGFYVSRVPERWRPGRFDCVGHSHQIFHVLVLVGALTHYAATAILINWREAMAAAAGAAAALCDLWLMCKLRAMYM

SEQ ID NO: 102245 - protein, 132 aa, Setaria italica
  Transcript Sequence Number=SeqID_36271
  Gene Ontology: Mol. function=hydrolase activity, hydrolyzing O -glycosyl compounds; Cellular component=plasma membrane; Biological process=carbohydrate metabolic process
  Homolog annotation: Hit_ID=B9RZM5; Match level="QueryCoverage=100%, HitCoverage=17%, E-value=1e-49, Identity=68%"; Hit description =Periplasmic beta-glucosidase, putative
RRSLPLRARARDFVSRLTRAEKVRLLVNNAAGVPRLGVAGYEWLSGALHGVSVTGPGVRLGCAFPQVIGTAAALNASLWELIGRAVSDEARAMNDGGQAGLTFWSPNVNIFRDPRWGRGQETPGEDPTVSAR

SEQ ID NO: 102246 - protein, 131 aa, Setaria italica
  Transcript Sequence Number=SeqID_36272
  Gene Ontology: Mol. function=hydrolase activity, hydrolyzing O -glycosyl compounds; Cellular component=plasma membrane; Biological process=carbohydrate metabolic process
  Homolog annotation: Hit_ID=Q6RXY3; Match level="QueryCoverage=40%, HitCoverage=6%, E-value=1e-16, Identity=79%"; Hit description=Beta xylosidase
MSAESPVRSRAPLPILHVRRCRRSPACIVTCARHVIGQTRVRDADTQWDPRPRASRSRDERRPRKKKEHFLCFIIPFLQAVSDEARAMNDGGQAGLTFWSPNVNIFRDPRWGRGQETPRRGPDRCSARYAA

SEQ ID NO: 102247 - protein, 133 aa, Setaria italica
  Transcript Sequence Number=SeqID_36273
  Gene Ontology: Mol. function=isomerase activity; Cellular component =plasma membrane; Biological process=cell redox homeostasis
  Homolog annotation: Hit_ID=A9CPA7; Match level="QueryCoverage=78%, HitCoverage=53%, E-value=2e-37, Identity=57%"; Hit description =Protein disulfide isomerase family
  Pfam annotation: Domain name=Thioredoxin; Domain location=29-132; Score=153.9; E_value=5e-43; Accession=PF00085.12; Description =Thioredoxin
  Subcellular localization annotation: CTP_CleavageSite=20; ConfidenceScore=5.09e-01
MRPAVLAALFLLAAAAASPAAALYSAGSPVLQLNPNNFKSKVLEANGVVLVEFFAPWCGHCKQLAPAWEKAAGVLKGVARVAALDADAHQALAQEYGIRGFPTIKVFAPGKPPVDYQGARDVKPIVEFALSQV

SEQ ID NO: 102248 - protein, 325 aa, Setaria italica
  Transcript Sequence Number=SeqID_36274
  Gene Ontology: Mol. function=isomerase activity; Cellular component =plasma membrane; Biological process=cell redox homeostasis
  Homolog annotation: Hit_ID=Q9MAU6; Match level="QueryCoverage=93%, HitCoverage=79%, E-value=1e-128, Identity=65%"; Hit description =Disulfide isomerase-related protein, putative
  Pfam annotation: Domain name=Thioredoxin; Domain location=106-210; Score=143.8; E_value=5.4e-40; Accession=PF00085.12; Description =Thioredoxin
RKKTQLPNNQGGLRRAQGLARVAALDADAHQALAQEYGIRGFPTIKVFAPGKPPVDYQGARDVKPIVEFALSQVKALLRDRLNGKASGGSSGKASGGSSEKNEPSASVELNSRNFDELVIKSKDLWIVEFFAPWCGHCKKLAPEWKRAAKNLKGQVKLGHVDCDAEKSLMSKYKVEGFPTILVFGADKESPFPYQGARVASAIESFALEQLEVNSGPAEVSELTGPDVMEEKCASAAICFVSFLPDILDSKAEGRNKYLELLLSVAEKFKKSPYSFVWTAAGKQADLENQVGVGGYGYPAMVALNVKKGAYAPLRSAFQHDEIIE

SEQ ID NO: 102249 - protein, 160 aa, Setaria italica
  Transcript Sequence Number=SeqID_36275
  Gene Ontology: Mol. function=isomerase activity; Cellular component =plasma membrane; Biological process=cell redox homeostasis
  Homolog annotation: Hit_ID=A9CPA7; Match level="QueryCoverage=96%, HitCoverage=35%, E-value=1e-65, Identity=77%"; Hit description =Protein disulfide isomerase family
QKEETSTLEEKCASAAICFVSFLPDILDSKAEGRNKYLELLLSVAEKFKKSPYSFVWTAAGKQADLENQVGVGGYGYPAMVALNVKKGAYAPLRSAFQHDEIIEFVKEAGRGGKGNLPLNGSPTVVPSEPWDGKDGEEIVEDEFSLDELMGESSPVNDEL

SEQ ID NO: 102250 - protein, 48 aa, Setaria italica
  Transcript Sequence Number=SeqID_36276
YSFHWFWKVQHVPHGTKIYDFKTARMLVSKCLLHIFRQDLTRVALHCV

SEQ ID NO: 102251 - protein, 265 aa, Setaria italica
  misc_feature (256)..(256): Xaa can be any naturally occurring amino acid
  Transcript Sequence Number=SeqID_36277
SHRAVKHGQVSAPPPPRGLPSRRYRRCRADPCCHTVQLRPCHHGCCRHHGKPECGSCRGHCCRPRAPEPSAPRKPPPAAKEAKRRLPPRNHCRPVLKGAPFIVCSSCFTLVQVPTDFAVSTKTVRKLRCGACSTVLSYSYRDPARKKAYQDSLDQFSTDGSELHGGGGCAGQPDPFAPFVDGFGLSSYSTEDDHPLHVSRNTSFDTMDGTKVVGRLHRLMGYGSASELLRHSPDLYESFSERTTPDVGRYDRKGKXVCVYDYDVD

SEQ ID NO: 102252 - protein, 113 aa, Setaria italica
  Transcript Sequence Number=SeqID_36278
  Subcellular localization annotation: CTP_CleavageSite=42; ConfidenceScore=5.57e-01
PEAKPTSSQPALTHSIQAGSTGSFSDPLALGQRSLVSTVEATAEMRRCSRISSPLAAVALLLLICLFHCAAAARPLPVSVAPLVIQGTVRASIVACACVYALLIDPITSSALF

SEQ ID NO: 102253 - protein, 98 aa, Setaria italica
  Transcript Sequence Number=SeqID_36279
  Gene Ontology: Mol. function=growth factor activity; Cellular component=extracellular region; Biological process=cell proliferation
  Homolog annotation: Hit_ID=Q7PCA2; Match level="QueryCoverage=76%, HitCoverage=58%, E-value=3e-09, Identity=48%"; Hit description =Putative phytosulfokine peptide
  Pfam annotation: Domain name=PSK; Domain location=1-97; Score=47.2; E_ value=6.4e-11; Accession=PF06404.4; Description=Phytosulfokine precursor protein (PSK)
HGAAAAAPPGPGFPGFPPVWVNQENGAKVAADDEPVIQKGAAGSGDELSSVAEAEVMGAEEEAEEPACEEGNDDDCMQRRLLRDAHLDYIYTQHKGKP

SEQ ID NO: 102254 - protein, 117 aa, Setaria italica
  Transcript Sequence Number=SeqID_36280
  Gene Ontology: Mol. function=growth factor activity; Cellular component=extracellular region; Biological process=cell proliferation
  Homolog annotation: Hit_ID=Q7PCA2; Match level="QueryCoverage=70%, HitCoverage=67%, E-value=1e-10, Identity=50%"; Hit description =Putative phytosulfokine peptide
  Pfam annotation: Domain name=PSK; Domain location=16-116; Score=86.5; E_value=9.4e-23; Accession=PF06404.4; Description=Phytosulfokine precursor protein (PSK)
MRRCSCRISWPLAALALLLLIFFFHGAAAARPLPVSVPPLVNQENGAKVAADDEPVIQKGAAGSGDELSSVAEAEVMGAEEEAEEPACEEGNDECLQRRLLRDAHLDYIYTQHKGKP

SEQ ID NO: 102255 - protein, 111 aa, Setaria italica
  Transcript Sequence Number=SeqID_36281
  Homolog annotation: Hit_ID=Q5N730; Match level="QueryCoverage=95%, HitCoverage=7%, E-value=8e-45, Identity=79%"; Hit description =Erythroid differentiation-related factor 1-like protein
LKKPKLVLDEAGYCKSTKCFSYEVSSQRLPPNYLFWAKAWMLVGDVYAEYHRLNGHQAKVVHKQKSHDEVRMSNEVALEVKRLKRKLGKDKQNCGTCSLINCSCQSDRASS

SEQ ID NO: 102256 - protein, 166 aa, Setaria italica
  misc_feature (29)..(29): Xaa can be any naturally occurring amino acid
  Transcript Sequence Number=SeqID_36282
  Gene Ontology: Cellular component=plasma membrane
CKTIERACQEVMGYADTDVAEFVYKNNPXVDQLMKFLCKDLSKACAKDPPPVPKDRVPGEPFAKKPSKDAEMEKILKSMEGMPGAPSMKMYSRDDLMKNNFRVQFLLLPDFCRLLRPLPPFLYHIGNLIYMPFQLLAGILELLHDLLFQIFLLRTFVFQNLSLAQA

SEQ ID NO: 102257 - protein, 87 aa, Setaria italica
  misc_feature (35)..(35): Xaa can be any naturally occurring amino acid
  Transcript Sequence Number=SeqID_36283
  Gene Ontology: Cellular component=plasma membrane
IHFWDIINSSLNSQDRVPGEPFAKKPSKDAEMEKXILKSMEGMPGAPSMKMYSRDDLMKNNFGTEDDDDEDDEDEEDNFPKNLGKVL

SEQ ID NO: 102258 - protein, 58 aa, Setaria italica
  Transcript Sequence Number=SeqID_36284
LLSCVQKQTPPVDQLMKFLCKDLSKACAKDPPPVPKVSPLCLVSVFLDDFFHDTLILS

SEQ ID NO: 102259 - protein, 277 aa, Setaria italica
  Transcript Sequence Number=SeqID_36285
  Gene Ontology: Cellular component=plasma membrane
MARRAAALLLAVALAAVLLHPAAVAAAGQKKPATAARREDIPYIRCQVCERIAREISAQVAKKQQALPPSKKVPEIEIIDIAENVCNLKKQEADWMLRIDIVEKGDKLELVEQDEEGHCNAECKTIERACQEVMGYADTDVAEFVYKNNPSVDQLMKFLCKDLSKACAKDPPPVPKDRVPGEPFAKKPSKDAEMEKILKSMEGMPGAPSMKMYSRDDLMKNNFGTEDDDDEDDEDEEDNFPKNLGKVLKDKGSQKKDLKQQVVQQFKDTSKKLKGQC

SEQ ID NO: 102260 - protein, 103 aa, Setaria italica
  misc_feature (6)..(6): Xaa can be any naturally occurring amino acid
  Transcript Sequence Number=SeqID_36286
  Gene Ontology: Cellular component=plasma membrane
EGMPGXPSMKMYSRDDLMKNNFGTEDDDDEDDEDEEDNFPKNLGKVLKDKGSQKKDLKQQVVQQFKDTSKKLKGHVNKVSNMVKKWWQGTKKPAKSGKSKTEL

SEQ ID NO: 102261 - protein, 61 aa, Setaria italica
  Transcript Sequence Number=SeqID_36287
VEANKNAVSLWRLQFLTSCGSASRLCCSIINSSCVPEEKLQVYMKIPAVLKYTQSQGNPVL

SEQ ID NO: 102262 - protein, 85 aa, Setaria italica
  Transcript Sequence Number=SeqID_36288
GIFVCEAVKTIVHSVAHKFLHAAKYAVEISMIPVLHHYKFPFMLLFQCGNNCSLLIPFHYLALFGFNWPVCPQLWRNYVVHCQCS

SEQ ID NO: 102263 - protein, 37 aa, Setaria italica
  Transcript Sequence Number=SeqID_36289
GLVDMNKPPEMISGNMTAAMCVYSGLFMRFAWMEQVT

SEQ ID NO: 102264 - protein, 107 aa, Setaria italica
  Transcript Sequence Number=SeqID_36290
  Gene Ontology: Mol. function=molecular_function; Cellular component =cellular_component; Biological process=biological_process
  Homolog annotation: Hit_ID=B6SZP9; Match level="QueryCoverage=97%, HitCoverage=94%, E-value=7e-43, Identity=74%"; Hit description=Brain protein 44-like protein
  Pfam annotation: Domain name=UPF0041; Domain location=1-102; Score =147.3; E_value=4.6e-41; Accession=PF03650.5; Description =Uncharacterised protein family (UPF0041)
  Subcellular localization annotation: CTP_CleavageSite=45; ConfidenceScore=5.31e-01
MSTALKAFLNSPVGPKTTHFWGPVANWGFVLAGLVDMNKPPEMVSGNMTAAMCVYSGLFMRFAWMVQPRNYLLLACHASNESVQLYQLSRWARAQGYLEKKEPEPQQ

SEQ ID NO: 102265 - protein, 107 aa, Setaria italica
  Transcript Sequence Number=SeqID_36291
  Gene Ontology: Mol. function=molecular_function; Cellular component =cellular_component; Biological process=biological_process
  Homolog annotation: Hit_ID=B6SZP9; Match level="QueryCoverage=97%, HitCoverage=94%, E-value=9e-42, Identity=71%"; Hit description=Brain protein 44-like protein
  Pfam annotation: Domain name=UPF0041; Domain location=1-106; Score =147.7; E_value=3.6e-41; Accession=PF03650.5; Description =Uncharacterised protein family (UPF0041)
  Subcellular localization annotation: CTP_CleavageSite=45; ConfidenceScore=5.03e-01
MATVLKSFLNSPVGPKTTHFWGPVANWGFVIAGLVDMNKPPEMISGNMTAAMCVYSGLFMRFAWMVQPRNYLLLACHASNESVQLYQLSRWARAQGYLEKKEPEAQQ

SEQ ID NO: 102266 - protein, 51 aa, Setaria italica
  Transcript Sequence Number=SeqID_36292
IIYAHLRCQATSSIGRWIHSNIRDLVHFSNVSVIPPKFIYLLCILSKLSFG

SEQ ID NO: 102267 - protein, 112 aa, Setaria italica
  misc_feature (94)..(94): Xaa can be any naturally occurring amino acid
  misc_feature (102)..(102): Xaa can be any naturally occurring amino acid
  misc_feature (105)..(105): Xaa can be any naturally occurring amino acid
  Transcript Sequence Number=SeqID_36293
  Gene Ontology: Mol. function=signal transducer activity; Cellular component=plasma membrane; Biological process=response to light stimulus
  Homolog annotation: Hit_ID=B9RNV5; Match level="QueryCoverage=86%, HitCoverage=14%, E-value=1e-22, Identity=53%"; Hit description =Protein binding protein, putative
  Pfam annotation: Domain name=NPH3; Domain location=25-112; Score= -113.6; E_value=0.0047; Accession=PF03000.6; Description=NPH3 family
QQISKKGVACAEIVESTGKASLAPKDWWVEDLCELDVDLYKRVMVAIKSKGRMSPELIGEALKAYAVRWLPDSYDALIAEDYMRRNQCLVETIXWLLPSDKXSGXSCSISLR

SEQ ID NO: 102268 - protein, 62 aa, Setaria italica
  Transcript Sequence Number=SeqID_36294
MALACTARLIHPCMVSKNPRTPPPPLHLHTHRPAAATTLSLIPSSSHHFALHSVDVSKDDKP

SEQ ID NO: 102269 - protein, 84 aa, Setaria italica
  Transcript Sequence Number=SeqID_36295
  Subcellular localization annotation: CTP_CleavageSite=52; ConfidenceScore=5.37e-01
LCSGLASLPTGGISGNKPAPAHKAGRSGHTGPRPGDATTGLALVVFLGCSIALSLFTSHCYYSMDIRVVVVAIFVVAGQSDGGN

SEQ ID NO: 102270 - protein, 140 aa, Setaria italica
  Transcript Sequence Number=SeqID_36296
  Gene Ontology: Mol. function=structural constituent of ribosome; Cellular component=intracellular; Biological process=translation
  Homolog annotation: Hit_ID=B6SXD6; Match level="QueryCoverage=65%, HitCoverage=65%, E-value=1e-43, Identity=94%"; Hit description=50S ribosomal protein L28
  Pfam annotation: Domain name=Ribosomal_L28; Domain location=65-125; Score=108.7; E_value=1.9e-29; Accession=PF00830.11; Description =Ribosomal L28 family
  Subcellular localization annotation: CTP_CleavageSite=76; ConfidenceScore=5.83e-01
MATATLLSSSFATPAAARRASSSSSTSLGFATSQLAGLSLSAGAATSTAIAPLPKRQFQPIVVRRVCPFTDKKTNRANKVSFSNHKTKKQQFVNLQYKKLWWEAGKRFVKLRLSTKALKTIEKHGLDAVARKAGIDLNKK

SEQ ID NO: 102271 - protein, 122 aa, Setaria italica
  Transcript Sequence Number=SeqID_36297
  Gene Ontology: Mol. function=ubiquitin-protein ligase activity; Cellular component=ubiquitin ligase complex; Biological process =ubiquitin-dependent protein catabolic process
  Homolog annotation: Hit_ID=Q9CAG5; Match level="QueryCoverage=65%, HitCoverage=9%, E-value=1e-12, Identity=47%"; Hit description=U-box domain-containing protein 7
SKIRVDEVTPEKCSATSEICEVEDSVIKWSNQNSKETVSEICEEWLRVLNKNNDESIDERHKLVEQIRLLLKNDDELRDYAGANGITEPLIHFLKMAIFREDVQSQEVGTMALFNLAVSNDR

SEQ ID NO: 102272 - protein, 71 aa, Setaria italica
  Transcript Sequence Number=SeqID_36298
CHLQYHASQPSRCCDFENVDLWIFGMDAVADPLKDIVLFINEAQTSFYHTKVHKIKMHRTGHFVDDLDDTS

SEQ ID NO: 102273 - protein, 243 aa, Setaria italica
  misc_feature (229)..(229): Xaa can be any naturally occurring amino acid
  misc_feature (234)..(234): Xaa can be any naturally occurring amino acid
  Transcript Sequence Number=SeqID_36299
  Gene Ontology: Mol. function=protein serine/threonine kinase activity; Cellular component=integral to membrane; Biological process=protein amino acid phosphorylation
  Homolog annotation: Hit_ID=Q9ZWC8; Match level="QueryCoverage=99%, HitCoverage=48%, E-value=7e-81, Identity=42%"; Hit description =Serine/threonine-protein kinase BRI1-like 1
  Pfam annotation: Domain name=LRR_1; Domain location=114-136; Score =9.1; E_value=5.5; Accession=PF00560.25; Description=Leucine Rich Repeat
  Pfam annotation: Domain name=LRR_1; Domain location=138-157; Score =14.2; E_value=0.55; Accession=PF00560.25; Description=Leucine Rich Repeat
  Pfam annotation: Domain name=LRR_1; Domain location=17-39; Score =12.6; E_value=1.2; Accession=PF00560.25; Description=Leucine Rich Repeat
  Pfam annotation: Domain name=LRR_1; Domain location=41-64; Score=5.0; E_value=33; Accession=PF00560.25; Description=Leucine Rich Repeat
  Pfam annotation: Domain name=LRR_1; Domain location=66-88; Score =13.9; E_value=0.66; Accession=PF00560.25; Description=Leucine Rich Repeat
  Pfam annotation: Domain name=LRR_1; Domain location=90-112; Score =16.7; E_value=0.099; Accession=PF00560.25; Description=Leucine Rich Repeat
  Pfam module annotation: Pfam domain module=LRR_1::LRR_1::LRR_1::LRR _1::LRR_1::LRR_1; Domain location=114-136::138-157::17-39::41-64::66 -88::90-112
QINLNGTVPPSLSNCSNLESIDLSFNLLHGQIPPEVLFLPKLIDLVMWANNLSGEIPDKLCSNSTTLETLVISYNSFTGGIPPSITRCVNLIWVSLAGNNLTGSVPSGFGNLQKLAILQLHKNSLSGPVPAELGSCSNLIWLDLNSNNFSGTIPPQLAAQAGLITGGVVSGKQFAFLRNEAGNICPGAGVLFEFLDIRPERLAQFPAVHSCASTRIYTGMTVYTFNQNXSMIFXDLSYNSLTG

SEQ ID NO: 102274 - protein, 375 aa, Setaria italica
  Transcript Sequence Number=SeqID_36300
  Gene Ontology: Mol. function=translation initiation factor activity; Cellular component=chloroplast
  Homolog annotation: Hit_ID=B6T348; Match level="QueryCoverage=100%, HitCoverage=84%, E-value=1e-174, Identity=82%"; Hit description=APO2
  Pfam annotation: Domain name=DUF794; Domain location=2-375; Score =912.0; E_value=3.1e-271; Accession=PF05634.3; Description =Arabidopsis thaliana protein of unknown function (DUF794)
QPHQRATVIRNEHAQNADLPRKYSKREKKPFPIPVLELRRRAKERMKAAQGKPKRPLPPPKNGMLIRRLIPVAYKVYNARILLINNLRKLMKVVPVKGCKYCSEIHVGSVGHPFRTCRGMLSNQRRGEHEWGSTLAEAVFLPVEAYHLEDRLGNRIPHDQRFAVPRIPALVELCIQAGVDLPEYPTKRRRKPIIKIGRNEFVDADEDDLPEPEPDRFKQTLLEELQSDEIVSPSSPEETVALAEETLEAWETVRDGALKLMKGYAVRVCGYCPEVHIGPTGHKARNCGAFKHQQRNGQHGWQAAVLDDLIPPRYVWHMPESGEELQRELKTFYGQAPAVVEICIQGGAKVPEKYKATMRLDIGIPSSLREAEMVI

SEQ ID NO: 102275 - protein, 45 aa, Setaria italica
  Transcript Sequence Number=SeqID_36301
RTSQGVPSGGANPAPAPAPAAGALDALRQLPQFQALLQLVQANPQ

SEQ ID NO: 102276 - protein, 124 aa, Setaria italica
  Transcript Sequence Number=SeqID_36302
  Gene Ontology: Mol. function=damaged DNA binding; Cellular component =nucleus; Biological process=proteasomal ubiquitin-dependent protein catabolic process
  Homolog annotation: Hit_ID=B6TKL2; Match level="QueryCoverage=41%, HitCoverage=12%, E-value=1e-16, Identity=84%"; Hit description=DNA repair protein RAD23
  Pfam annotation: Domain name=ubiquitin; Domain location=18-86; Score =52.8; E_value=1.4e-12; Accession=PF00240.15; Description=Ubiquitin family
MGDSPCPVLDLCCLASSLVLQPTHCSELLLQVAEVKKIIETTQGEVYPADQQMLIYQGKILKDDTTLESNKVAENSFLVIMLSKAKASSSGASTAAAAKAPATPGIPENVEAPPVARAPASGQQ

SEQ ID NO: 102277 - protein, 82 aa, Setaria italica
  Transcript Sequence Number=SeqID_36303
  Gene Ontology: Mol. function=transporter activity; Cellular component= integral to membrane; Biological process=transport
  Homolog annotation: Hit_ID=Q84RL6; Match level="QueryCoverage=100%, HitCoverage=33%, E-value=1e-27, Identity=84%"; Hit description =Aquaporin TIP2-3
  Pfam annotation: Domain name=MIP; Domain location=11-82; Score= -122.5; E_value=0.1; Accession=PF00230.12; Description=Major intrinsic protein
MVKLAFGSFGDSFSAASLKAYVAEFIATLLFVFAGVGSAIAYSQLTKGGALDPAGLVAIAIAHAFALFVGVSMAANISGGHL

SEQ ID NO: 102278 - protein, 268 aa, Setaria italica
  misc_feature (88)..(88): Xaa can be any naturally occurring amino acid
  Transcript Sequence Number=SeqID_36304
  Gene Ontology: Mol. function=damaged DNA binding; Cellular component =nucleus; Biological process=proteasomal ubiquitin-dependent protein catabolic process
  Homolog annotation: Hit_ID=B6TKL2; Match level="QueryCoverage=85%, HitCoverage=54%, E-value=2e-32, Identity=89%"; Hit description=DNA repair protein RAD23
  Pfam annotation: Domain name=UBA; Domain location=165-204; Score =45.3; E_value=2.3e-10; Accession=PF00627.23; Description=UBATS-N domain
  Pfam annotation: Domain name=ubiquitin; Domain location=6-77; Score =83.6; E_value=7.2e-22; Accession=PF00240.15; Description=Ubiquitin family
  Pfam module annotation: Pfam domain module=UBA::ubiquitin; Domain location=165-204::6-77
MKLNVKTLKGTSFEIEASPEESVAEVKKIIETTQGEVYPADQQMLIYQGKILKDDTTLESNKVAENSFLVIMLSKAKASSSGASTAGXAKAPATPAQPAAPAVPVASVARSTPPQAPVAQAETAPPTAQPSPAAAAATTPAATVAASSDADVYSQAASNLVSGNNLEQTIQQILDMGGGTWERDTVIRALRAAYNNPERAIDYLYSGIPENVEAPPVARAPASGQQTNPQAPPAQPAVAPPVQPSAASAGPNANPLNLFPQVCAVNVP

SEQ ID NO: 102279 - protein, 102 aa, Setaria italica
  misc_feature (16)..(16): Xaa can be any naturally occurring amino acid
  Transcript Sequence Number=SeqID_36305
  Gene Ontology: Mol. function=transporter activity; Cellular component= integral to membrane; Biological process=transport
  Homolog annotation: Hit_ID=Q9ATL8; Match level="QueryCoverage=100%, HitCoverage=40%, E-value=1e-37, Identity=82%"; Hit description =Aquaporin TIP2-2
  Pfam annotation: Domain name=MIP; Domain location=1-84; Score=-51.0; E_value=2e-06; Accession=PF00230.12; Description=Major intrinsic protein
TFALVYTVYATAADPXKKGSLGTIAPIAIGFIVGANILAAGPFSGGSMNPARSFGPAVAAGNFAGNWVYWVGPLIGGGLAGLIYGDVFIGGNYQQVADQDYA

SEQ ID NO: 102280 - protein, 251 aa, Setaria italica
  misc_feature (47)..(47): Xaa can be any naturally occurring amino acid
  misc_feature (62)..(62): Xaa can be any naturally occurring amino acid
  misc_feature (117)..(117): Xaa can be any naturally occurring amino acid
  Transcript Sequence Number=SeqID_36306
  Gene Ontology: Mol. function=transporter activity; Cellular component= integral to membrane; Biological process=transport
  Homolog annotation: Hit_ID=Q84RL6; Match level="QueryCoverage=100%, HitCoverage=100%, E-value=9e-93, Identity=75%"; Hit description =Aquaporin TIP2-3
  Pfam annotation: Domain name=MIP; Domain location=11-234; Score =339.6; E_value=6.2e-99; Accession=PF00230.12; Description=Major intrinsic protein
MVKLAFGSFGDSFSAASLKAYVAEFIATLLFVFAGVGSAIAYSQLTXGGALDPAGLVAIAIXAHAFALFVGVSMAANISGGHLNPAVTFGLAVGGHITILTGIFYWVAQLLGASVAXCLLLKFVTHGQAIPTHGVSGISEVEGVVMEIVITFALVYTVYATAADPEEGVPRHHPPPMAIGFIVGANILAAGPFSGGSMNPARSFGPAVAAGNFAGNWVYWVGPLIGGGLAGLVYGDVFIASYQPVGQQEYP

SEQ ID NO: 102281 - protein, 99 aa, Setaria italica
  Transcript Sequence Number=SeqID_36307
IMAVPLNKIEQSPFHLMNPKATLKESYTSHLSKQVNLTPCTILKVALNVILVDISGIQMSESLTPPFHLGPTCPFLFTPPCHLGPTCPFLSLSIHRGCR

SEQ ID NO: 102282 - protein, 136 aa, Setaria italica
  misc_feature (88)..(88): Xaa can be any naturally occurring amino acid
  misc_feature (128)..(128): Xaa can be any naturally occurring amino acid
  Transcript Sequence Number=SeqID_36308
  Gene Ontology: Mol. function=metal ion binding
  Homolog annotation: Hit_ID=Q653B5; Match level="QueryCoverage=100%, HitCoverage=20%, E-value=5e-17, Identity=41%"; Hit description=DHHC -type zinc finger domain-containing protein-like
VPSTVDPDAAGHTERAIKTKKQVKISAWKLAKLDSNEAMRAAAKARASSSVLRPLDARRGPGSSLSSSGNASMRSSMSADYSASATKXKNWADNKLSSLHSSSYPQSLASQDDYESGTQSASSVSSPXHIHKPVPH

SEQ ID NO: 102283 - protein, 125 aa, Setaria italica
  misc_feature (114)..(114): Xaa can be any naturally occurring amino acid
  Transcript Sequence Number=SeqID_36309
  Gene Ontology: Mol. function=protein serine/threonine kinase activity; Biological process=protein amino acid phosphorylation
  Homolog annotation: Hit_ID=Q60DG4; Match level="QueryCoverage=99%, HitCoverage=13%, E-value=1e-69, Identity=95%"; Hit description =Serine/threonine-protein kinase Nek4
  Pfam annotation: Domain name=Pkinase; Domain location=2-125; Score= -29.8; E_value=1e-06; Accession=PF00069.17; Description=Protein kinase domain
  Pfam annotation: Domain name=Pkinase_Tyr; Domain location=1-125; Score=-157.2; E_value=0.0028; Accession=PF07714.9; Description =Protein tyrosine kinase
  Pfam module annotation: Pfam domain module=Pkinase::Pkinase_Tyr; Domain location=2-125::1-125
TIVTGYCEGGDMDELMKKSNGTYFPEEVLLKWFAQLVLAVDYLHSNYVLHRDLKCSNIFLTKDQDIRLGDFGLAKTLKEDDLASSVVGTPNYMCPELLADIPYGFKSDIWSLGXCMYEMAAHRPA

SEQ ID NO: 102284 - protein, 332 aa, Setaria italica
  misc_feature (184)..(184): Xaa can be any naturally occurring amino acid
  Transcript Sequence Number=SeqID_36310
  Gene Ontology: Mol. function=protein serine/threonine kinase activity; Cellular component=nucleus; Biological process=protein amino acid phosphorylation
  Homolog annotation: Hit_ID=Q60DG4; Match level="QueryCoverage=100%, HitCoverage=35%, E-value=1e-108, Identity=63%"; Hit description =Serine/threonine-protein kinase Nek4
LASSVVGTPNYMCPELLADIPYGFKSDIWSLGCCMYEMAAHRPAFKAFDMAGLISKINRSSMGPLPACYSVSMKTLIKSMLRKSPEHRPTASEILKNPYLQPYVNQYRPLYDASNPMRVPEKPLPTSWSSQRSMSDSQSSSVSSSDIDSTQSSDRSTSGGTSSDRKTIDTGSIRVVDQAMSDEXCSTPEDLRGNKDNSSVQFKRQDSSKSIHVDHHPRTEIKQPKIIEKIMTTLREESRLREINSPVRGGVKPSSGLGNNNQVDQPLPVSRTNGDMPYSLKSGNILSHDEHVNQVEASPPLKQLSPIAEHNPKIKTAGPSTPEPAKLITENG

SEQ ID NO: 102285 - protein, 257 aa, Setaria italica
  Transcript Sequence Number=SeqID_36311
  Gene Ontology: Mol. function=protein tyrosine kinase activity; Cellular component=integral to membrane; Biological process=protein amino acid phosphorylation
  Homolog annotation: Hit_ID=Q9LDG0; Match level="QueryCoverage=96%, HitCoverage=38%, E-value=1e-113, Identity=81%"; Hit description =Putative receptor-like kinase
  Pfam annotation: Domain name=Pkinase; Domain location=102-256; Score=- 72.8; E_value=0.00037; Accession=PF00069.17; Description=Protein kinase domain
  Pfam annotation: Domain name=Pkinase_Tyr; Domain location=101-257; Score=-80.2; E_value=2.2e-08; Accession=PF07714.9; Description =Protein tyrosine kinase
  Pfam module annotation: Pfam domain module=Pkinase::Pkinase_Tyr; Domain location=102-256::101-257
VALNAGPPSTKRRVRLSEAAILAIAVGGCVLVFAVVAVSLIAFCNRDGGEEMGGGAVSGKGGDKMGRESPESKAVIGKAGDGNRMVFFEGPSLAFDLEDLLRASAEVLGKGAFGTAYRAVLEDATTVVVKRLKEVNAGRREFEQQMELVGRIRHDNVVELRAYYYSKDEKLLVYDYYSRGSVSNMLHGKRGEDRTPLDWETRLKIALGAARGIAHIHTENNGKFVHGNIKASNVFINRHDFGCISDLGLAQLMNPIT

SEQ ID NO: 102286 - protein, 75 aa, Setaria italica
  Transcript Sequence Number=SeqID_36312
  Subcellular localization annotation: CTP_CleavageSite=52; ConfidenceScore=5.19e-01
FFFGQNKTTIDSIYVADVTCNAVQTSFYTTVALTTSRQMCGICICILRKQVLCTSRRGNTAVDPAVTKQAAGQQV

SEQ ID NO: 102287 - protein, 71 aa, Setaria italica
  Transcript Sequence Number=SeqID_36313
DGGVGSSINPKRRRKRGGVEGAVGLVGGDCDASLRAFLQVLAVGHTEERDIMGISAKWIKSLVGIRKHEKG

SEQ ID NO: 102288 - protein, 436 aa, Setaria italica
  Transcript Sequence Number=SeqID_36314
  Homolog annotation: Hit_ID=B4FU94; Match level="QueryCoverage=93%, HitCoverage=95%, E-value=1e-125, Identity=62%"; Hit description =Calmodulin binding protein
  Pfam annotation: Domain name=IQ; Domain location=111-131; Score=27.3; E_value=6.4e-05; Accession=PF00612.19; Description=IQ calmodulin -binding motif
  Pfam annotation: Domain name=IQ; Domain location=133-153; Score=12.4; E_value=1.2; Accession=PF00612.19; Description=IQ calmodulin-binding motif
  Pfam annotation: Domain name=IQ; Domain location=159-179; Score=2.5; E_value=18; Accession=PF00612.19; Description=IQ calmodulin-binding motif
  Pfam module annotation: Pfam domain module=IQ::IQ::IQ; Domain location=111-131::133-153::159-179
MRAFLQVLAVGHTEERDIMGISAKWIKSLVGIRKHEKGRNAGCSTARTSATQLLDKQDHSVDTEGVIAAEELRVQAEPLAGEANTEAISYSASSPSTYLQVSQTEHDTKEHQAAVAIQSAFRAFLARRALRALKGLVRLQALVRGHAVRKQAAETLQCMQALVRAQARVRARRVRVSLESQGTQKKPPEKNVHEDHVRDIEEDWCGSVGSVEEMKIKALKRQEAAAKRERAMAYALTHQWQAGSRKQKAASLQDQGLAGDENQWGRNWLERWMAARPWENRLLDSNAKESVTVGDDKVAEEDKTKAPNKPKGKVLVSTTQANGQQHKKGTSHKKSHSDVSGSSSGQSASVQPTASLDSSKVKEKPSDEITDEVSSQPSKLASRSTSNPKERPAQVNAPAKKRLSLPNNAIASVSCVIGITFPEHSSRKLYIAELAK

SEQ ID NO: 102289 - protein, 132 aa, Setaria italica
  Transcript Sequence Number=SeqID_36315
DPPGRIYSRRRRSPRYLRFLGNYRPAPLMHLSGQVRLGVDVEPARLAAARLYDELARLVIETSKKRSSARLAGSSSQLVSARELATSAIGPQAEKHVLKLQRKLVGLPAPRGCAAGLRILLAARPVRLAGIP

SEQ ID NO: 102290 - protein, 102 aa, Setaria italica
  Transcript Sequence Number=SeqID_36316
ASRCSDEIYKEPLLCRKKEFRSSVIKIVDSSLNSNLLPADSICSIPASEDDFYLNKRRKMDEEYDPLPTNGNMRESITRNFTATGCISSPVHRVDGKSRMVS

SEQ ID NO: 102291 - protein, 331 aa, Setaria italica
  Transcript Sequence Number=SeqID_36317
  Gene Ontology: Cellular component=plasma membrane
  Homolog annotation: Hit_ID=Q10RF6; Match level="QueryCoverage=94%, HitCoverage=10%, E-value=6e-71, Identity=50%"; Hit description=Viral A-type inclusion protein repeat containing protein, expressed
KSSEESCQAQLANNSALSAEMDALRENIKTLEVSESSLKDAISCHVSEKANLASELESLGKHLSDVLEKNSVLDISLSDMKIELEDLRTKLKDSEEACQAHLTNNSALFAEKNNLLSQLESITVIMKALEDKHANLEDKHSSVSREKDFAYDQVSELQDQLRIKNEEYEVLVKSHKLQVNSYEKQISSLEAKNHYMEEVLQQEQQKNISASIHTVILENSLADEQNKKVALFTECKKYAEANHSATMLVSELMEEARYNKEERETLLMHNEKLRVGISQQMKVLNICKDLGPADLAEDEILLQTVSDETINILKLKDETEDVNRLMYIELS

SEQ ID NO: 102292 - protein, 320 aa, Setaria italica
  Transcript Sequence Number=SeqID_36318
  Gene Ontology: Cellular component=integral to membrane
  Homolog annotation: Hit_ID=Q9LP26; Match level="QueryCoverage=89%, HitCoverage=75%, E-value=1e-58, Identity=43%"; Hit description =T9L6.9 protein
  Pfam annotation: Domain name=TMPIT; Domain location=1-308; Score =21.2; E_value=6.3e-11; Accession=PF07851.5; Description=TMPIT-like protein
RAAEEEALRRRAVALVADARRLQGSLPALDPSAIDKVEEELERARVAIADSDVASFLPSKRNGKFLKMFLGPVNVRVARKEDKLKIKDEYNNYRDRTAYKFLLFPSILLLLRWWIWDGCLPAWAVQVYQAWLLFLYASFALRENVLIANGSDIRPWWIYHHYLAMVMALISLTWEIKGQPDCSSKQRGVQLFLRWAIMQGIAMHLQNRYQRQRLRTRIALGKAKRMDVVAGETAGVEGQLLLLYPVLFILQGFEAYVGVLLLQTALHGLASEWQVVVCGILLVVMAVGNFVNTVETLVLKLRFKAKMKRAKSRQDRPHQN

SEQ ID NO: 102293 - protein, 920 aa, Setaria italica
  misc_feature (631)..(631): Xaa can be any naturally occurring amino acid
  Transcript Sequence Number=SeqID_36319
  Gene Ontology: Cellular component=plasma membrane
  Homolog annotation: Hit_ID=Q10RF6; Match level="QueryCoverage=99%, HitCoverage=34%, E-value=0.0, Identity=52%"; Hit description=Viral A- type inclusion protein repeat containing protein, expressed
SASIHTVICNNVSFRMICLSILLAFSEKKYAEANHSATMLVSELMEEARYNKEERETLLMHNEKLRVGISQQMKVLNICKDLGPADLAEDEILLQTVSDETINILKLKDETEDVNRLMYIELSVLSTVLLQLGMELRDLHLRKCALEKEVESGVAESLALQTSNHQMLKENEQLRQGLQESSERENVLKTEVSVIEEKLSCLRESYRVSQDETSNLTKKIESLSKEYQSLSEKYNYLEDENGTVLEECMMLENLCLFFRGHNNEIASALVSLTDEMALLSLAKGDLDLEINELSRRSTVLESENNNLKEYFVYLLEILRTRLVLSEFDLNTNKSVCQELFIELENCMAQLTQKDDELLEAEEKVQFLQEKNRELCGVVGSLQVAIEGAKVVKGELEKKITRLAEQLTTKDDEILLLHQANEALKSDLGHYEREFVALMGDAITSSVNSAVYEEKALELLMKGKATEISAVTLKELLMNEIYSRDAQIEELQNKMSGIQEEHAELKAELGTHLNLIASLADQVSVLEENTLSLSKPCSTEGKEETAQMPHVQEGNYGLESHCLPEGTPELQGLIARVEALQVVLLNAKDRQDQESAESAAKLAAANTVIQELKARGSSRMEAKEIYSDNEKXKDVEVSKGKQVQIMKDIELDQISTCPPYGTGATLYPLGNGANSELDDDMLQLWEAAERNCKNQTAKSSSSEHDIQAVEEVKSEYPSSELVRGRDLEINKLEVSKGAVEPHEVWSKSVLERLASDAQRLLSIQASIEELKRKMEEPPKGKSPMNSEYSSVSTQLHETDGYVLEQINFNNKLTRKAENYPALSDNMNTEREGYSSRRKISEQVQKGSENVARLELELQKIQYVLLKLEEEHEYRRLKVSDKRTRVLLRDYLYGRKDRGGGQKKKKRAPFCGCVRPKPRTEP

SEQ ID NO: 102294 - protein, 89 aa, Setaria italica
  misc_feature (9)..(9): Xaa can be any naturally occurring amino acid
  misc_feature (81)..(81): Xaa can be any naturally occurring amino acid
  Transcript Sequence Number=SeqID_36320
  Gene Ontology: Mol. function=inositol-1,3,4-trisphosphate 5/6-kinase activity; Cellular component=intracellular; Biological process =inositol trisphosphate metabolic process
  Homolog annotation: Hit_ID=B6TDJ5; Match level="QueryCoverage=100%, HitCoverage=25%, E-value=2e-39, Identity=94%"; Hit description =Inositol-tetrakisphosphate 1-kinase 3
  Pfam annotation: Domain name=Ins134_P3_kin; Domain location=1-89; Score=-130.7; E_value=0.00048; Accession=PF05770.3; Description =Inositol 1, 3, 4-trisphosphate 56-kinase
KHPEVTVLXDPPNAIQHLHNRQSMLQEVADLNLSNGYGEVCTPRQLVIMKDPSSIPDAVAKAGLTLPLVAKPLVVDGTSKXSHELSLAY

SEQ ID NO: 102295 - protein, 54 aa, Setaria italica
  Transcript Sequence Number=SeqID_36321
MLLMSVLYCFAILHLFRKKGIHFASIDETRPLSEQGPFDIYFCTRSVVWSLSLR

SEQ ID NO: 102296 - protein, 59 aa, Setaria italica
  Transcript Sequence Number=SeqID_36322
LVLIRCKACIIFDNLMLCCGCGHLEASKIFLNLEVKGKQNSWIQLPIAAEGYLETFIQK

SEQ ID NO: 102297 - protein, 80 aa, Setaria italica
  Transcript Sequence Number=SeqID_36323
  Gene Ontology: Mol. function=inositol-1,3,4-trisphosphate 5/6-kinase activity; Cellular component=intracellular; Biological process =inositol trisphosphate metabolic process
  Homolog annotation: Hit_ID=B6TDJ5; Match level="QueryCoverage=57%, HitCoverage=13%, E-value=3e-16, Identity=93%"; Hit description =Inositol-tetrakisphosphate 1-kinase 3
AIPWQLQLVIMKDPSSIPDAVAKAGLTLPLVAKPLVVDGTSKSHELSLAYADNTYSFTNNIYLKQDPTMVDKFLENKRRI

SEQ ID NO: 102298 - protein, 64 aa, Setaria italica
  Transcript Sequence Number=SeqID_36324
MTINRNTHNLLQSKVSYCYPLLCFFDCCSQNSAGYGKMPGYEHIFTDFLLSLVQSKYKMLLSGS

SEQ ID NO: 102299 - protein, 144 aa, Setaria italica
  Transcript Sequence Number=SeqID_36325
  Gene Ontology: Mol. function=inositol-1,3,4-trisphosphate 5/6-kinase activity; Cellular component=intracellular; Biological process =inositol trisphosphate metabolic process
  Homolog annotation: Hit_ID=B6TDJ5; Match level="QueryCoverage=79%, HitCoverage=33%, E-value=1e-56, Identity=93%"; Hit description =Inositol-tetrakisphosphate 1-kinase 3
  Pfam annotation: Domain name=Ins134_P3_kin; Domain location=21-144; Score=-2.0; E_value=6.3e-11; Accession=PF05770.3; Description =Inositol 1, 3, 4-trisphosphate 56-kinase
AGCGGGRPVPLTPPARPPRGEQRLVVGYALTKKKVKSFLQPKLLALARKKGIHFASIDETRPLSEQGPFDIILHKLTSKEWQQVLEDYREEHPEVTVLDPPNAIQHLHNRQSMLQEVADLNLSNGYGIVCTRQLVVTAMLTFMY

SEQ ID NO: 102300 - protein, 192 aa, Setaria italica
  misc_feature (18)..(18): Xaa can be any naturally occurring amino acid
  Transcript Sequence Number=SeqID_36326
  Gene Ontology: Mol. function=inositol-1,3,4-trisphosphate 5/6-kinase activity; Cellular component=intracellular; Biological process =inositol trisphosphate metabolic process
  Homolog annotation: Hit_ID=B6TDJ5; Match level="QueryCoverage=100%, HitCoverage=55%, E-value=2e-74, Identity=75%"; Hit description =Inositol-tetrakisphosphate 1-kinase 3
  Pfam annotation: Domain name=Ins134_P3_kin; Domain location=1-179; Score=253.8; E_value=4e-73; Accession=PF05770.3; Description =Inositol 1, 3, 4-trisphosphate 56-kinase
SIPDAVAKAGLTLPLVAXPLVVDGTSKSHELSLAYVESSLPLLDPPLVLQEFVNHGGILFKVYIVGETIRVVRRFSLPDVNTYDLGNNDGIFRFPRVSCATNNAEDADVDPSIAELPPKPLLEKLGKELRRRLGLRLFNIDMIREHGRKDRYYVIDINYFPGYGKMPGYEHIFTDFLLSLVQSKYKMLLSGS

SEQ ID NO: 102301 - protein, 52 aa, Setaria italica
  Transcript Sequence Number=SeqID_36327
VINQSAKYLTITTGNQMMLHQQFERYKLHSQINEHLNYQDKYSHEEELIRTI

SEQ ID NO: 102302 - protein, 319 aa, Setaria italica
  Transcript Sequence Number=SeqID_36328
  Gene Ontology: Mol. function=zinc ion binding; Cellular component =nucleus; Biological process=regulation of transcription
  Homolog annotation: Hit_ID=Q10NB0; Match level="QueryCoverage=82%, HitCoverage=70%, E-value=3e-75, Identity=59%"; Hit description=Dof domain, zinc finger family protein, expressed
  Pfam annotation: Domain name=zf-Dof; Domain location=25-87; Score =142.4; E_value=1.4e-39; Accession=PF02701.7; Description=Dof domain, zinc finger
ASAAVAAQARPNSMAERARLARMPQPEQALKCPRCDSTNTKFCYYNNYSLSQPRHFCKACRRYWTRGGSLRNVPVGGGCRRNKRSSKSSGGSSSSKPYSSARQLAGPSSSTPSSTPGATGAIIPPSLGSFSHHLPFLGTMHQPGPNLGLAFSAGLPPLGMQHMDTVDQFPVASGGGATIGASLEQWRVQQQPQQQFPFLTGGGILELPPPAMYQLGLDGNNRGGSGSAAAAAFTLGQTSATTARQEGSMKVEGSKGQDMSLQRQYMAALRHGSQGVWDGIHGNAGSSGGDGGGNGGSSWPMNIPGFHSSSTGGGNGSGL

SEQ ID NO: 102303 - protein, 56 aa, Setaria italica
  Transcript Sequence Number=SeqID_36329
  Gene Ontology: Mol. function=3-deoxy-7-phosphoheptulonate synthase activity; Cellular component=chloroplast; Biological process =aromatic amino acid family biosynthetic process
  Homolog annotation: Hit_ID=Q75W16; Match level="QueryCoverage=94%, HitCoverage=9%, E-value=2e-22, Identity=98%"; Hit description =Phospho-2-dehydro-3-deoxyheptonate aldolase 2, chloroplastic
TRQLDGAHVEFLRGVANPLGIKVSDKMNPSDLVKLIEILNPSNKPGRITIITRSRG

SEQ ID NO: 102304 - protein, 145 aa, Setaria italica
  Transcript Sequence Number=SeqID_36330
  Gene Ontology: Mol. function=3-deoxy-7-phosphoheptulonate synthase activity; Cellular component=chloroplast; Biological process =aromatic amino acid family biosynthetic process
  Homolog annotation: Hit_ID=Q75W16; Match level="QueryCoverage=99%, HitCoverage=26%, E-value=8e-74, Identity=88%"; Hit description =Phospho-2-dehydro-3-deoxyheptonate aldolase 2, chloroplastic
  Pfam annotation: Domain name=DAHP_synth_2; Domain location=2-145; Score=-35.4; E_value=9.6e-16; Accession=PF01474.8; Description=Class- II DAHP synthetase family
DSVALVADHTLMKTTEFWTSHECLLLPYEQALTRQDSTSGLFYDCSAHMLWVGERTRQLDGAHVEFLRGIANPLGIKVSDKMNPSDLVKLIEILNPSNKPGRITIITRMGAENMRVKLPHLIRAVRQAGLIVTWITDPMHGNTIK

SEQ ID NO: 102305 - protein, 107 aa, Setaria italica
  Transcript Sequence Number=SeqID_36331
  Gene Ontology: Mol. function=3-deoxy-7-phosphoheptulonate synthase activity; Cellular component=chloroplast; Biological process =aromatic amino acid family biosynthetic process
  Homolog annotation: Hit_ID=Q75W16; Match level="QueryCoverage=83%, HitCoverage=16%, E-value=3e-45, Identity=96%"; Hit description =Phospho-2-dehydro-3-deoxyheptonate aldolase 2, chloroplastic
  Pfam annotation: Domain name=DAHP_synth_2; Domain location=1-105; Score=-236.8; E_value=5.8e-05; Accession=PF01474.8; Description =Class-II DAHP synthetase family
ANPLGIKVSDKMNPSDLVKLIEILNPSNKPGRITIITRMGAENMRVKLPHLIRAVRNAGLIVTWITDPMHGNTIKAPCGLKTRPFDSILVSCLPSVTSMSFCDIMHL

SEQ ID NO: 102306 - protein, 499 aa, Setaria italica
  misc_feature (418)..(418): Xaa can be any naturally occurring amino acid
  misc_feature (425)..(425): Xaa can be any naturally occurring amino acid
  Transcript Sequence Number=SeqID_36332
  Gene Ontology: Mol. function=3-deoxy-7-phosphoheptulonate synthase activity; Cellular component=chloroplast; Biological process =aromatic amino acid family biosynthetic process
  Homolog annotation: Hit_ID=Q75LR2; Match level="QueryCoverage=92%, HitCoverage=82%, E-value=0.0, Identity=91%"; Hit description=Phospho- 2-dehydro-3-deoxyheptonate aldolase 1, chloroplastic
  Pfam annotation: Domain name=DAHP_synth_2; Domain location=35-474; Score=1063.9; E_value=0; Accession=PF01474.8; Description=Class-II DAHP synthetase family
HGVPAAAKTSAPTVAPEKEAAPVAAPAPAPKAPAKWAVDSWRSKKALQLPEYPNAAELEAVLKTIEAFPPIVFAGEARHLEERLADAAMGRAFLLQGGDCAESFKEFNSNNIRDTFRVLLQMSAVLMFGAQMPVVKVGRMAGQFAKPRSDPFEVRDGVKLPSYRGDNINGEAFDEKSRVPDPQRMIRAYAQSAATLNLIRAFATGGYAAMQRVTQWNLDFTEHSEQGDRYRELAHRVDEALGFMSAAGLTADHTLMKTTEFWTSHECLLLPYEQALTRQDSTSGLFYDCSAHMLWVGERTRQLDGAHVEFLRGIANPLGIKVSDKMNPSDLVKLIEILNPSNKPGRITIITRMGAENMRVKLPHLIRAVRQAGLIVTWITDPMHGNTIKAPCGLKTRPFDSILAEVRAFFDVHEQEGXSHPGGVXHLEMTGQNVTECIGGSRTVTFDDLSDRYHTHCDPRLNASQSLELSFIIAERLRKRRIRSSSGLNNILPLPPFGF

SEQ ID NO: 102307 - protein, 283 aa, Setaria italica
  Transcript Sequence Number=SeqID_36333
  Homolog annotation: Hit_ID=Q8YY98; Match level="QueryCoverage=40%, HitCoverage=83%, E-value=1e-25, Identity=45%"; Hit description =Alr0953 protein
  Pfam annotation: Domain name=DUF2358; Domain location=94-206; Score =231.5; E_value=2.1e-66; Accession=PF10184.1; Description =Uncharacterized conserved protein (DUF2358)
  Subcellular localization annotation: CTP_CleavageSite=12; ConfidenceScore=5.16e-01
MAFLLPKLTTPSCKLPPSPLLKPQLALPGHGGGGKIHGSGSGAAQAATPGHLSLLLLLSASQQAAVPSAKSTATKNRGKGGGDPQRSDFYLNLGTAVRTLREDLPDVFFREPNYDIYREDITFTDPLNTFQGIDNYKTIFWALRFHGRLLFREIGLDVSRIWQLTENSIVVRWELWGTPRVPWESYGCFSGTSRYKVDRNGKIYEHKVDNLALDFPRSVANVGSIADMVVATCPPSPNLTFWDVVGTGDGCSWTKLYESVVEAVEWEGQSSSGIGIGGLITCS

SEQ ID NO: 102308 - protein, 141 aa, Setaria italica
  misc_feature (21)..(21): Xaa can be any naturally occurring amino acid
  Transcript Sequence Number=SeqID_36334
WRPLLVWLVGRLVYISGLKKXLVSVAEKGSHTMLVSSTNTAMAWCRSYRGNLPLDGSPEKCGGVYAGVVTGIYLQGLAVELDDTVWLLIDDLLLLPPHCLRVGAFISVKNFSCNASEFAWTELFCLQHAVKLDLTVKSFSL

SEQ ID NO: 102309 - protein, 156 aa, Setaria italica
  Transcript Sequence Number=SeqID_36335
  Gene Ontology: Mol. function=serine-type endopeptidase activity; Cellular component=cytoplasm; Biological process=proteolysis
  Homolog annotation: Hit_ID=B9R9Y2; Match level="QueryCoverage=100%, HitCoverage=34%, E-value=6e-71, Identity=80%"; Hit description=WD -repeat protein, putative
MEFTEPYKQTGPCCFSPDARFLAVAVDYRLVVRDVVSLKVVQLFSCVDKISSLEWASDSEYILCGLYKRPMVQAWSLSQPDWTCKIDEGPAGIAYARWSPDSRHILTTSEFQLRLTVWSLVNTACVHVQWPKHASRGVSFTKDGKFAAISTRRDCR

SEQ ID NO: 102310 - protein, 70 aa, Setaria italica
  misc_feature (38)..(38): Xaa can be any naturally occurring amino acid
  Transcript Sequence Number=SeqID_36336
  Subcellular localization annotation: CTP_CleavageSite=41; ConfidenceScore=5.29e-01
ILVVVHQNLTNVSLFILQSIKPTVLIGTSGVGRTSTNXVVETMASFNEELGGLGVKQSDGFIHSNSGSNS

SEQ ID NO: 102311 - protein, 74 aa, Setaria italica
  Transcript Sequence Number=SeqID_36337
  Gene Ontology: Mol. function=oxidoreductase activity, acting on the CH-OH group of donors, NAD or NADP as acceptor; Cellular component =chloroplast; Biological process=malate metabolic process
  Homolog annotation: Hit_ID=Q9ZRH5; Match level="QueryCoverage=66%, HitCoverage=7%, E-value=3e-15, Identity=85%"; Hit description=Malic enzyme
SFKKKSCANEHEPLTTLYDAVLSIKPTVLIGTSGVGRTSTKYVVETMASFNEELGGLGVKQSDGFIHSNSGSNS

SEQ ID NO: 102312 - protein, 71 aa, Setaria italica
  Transcript Sequence Number=SeqID_36338
  Subcellular localization annotation: CTP_CleavageSite=60; ConfidenceScore=5.18e-01
SRTSHKLSTKTIESGLRDSRARFSKALFRIIHKTLTHPRIFSASSSYRVFPRAISLAFASAAALASASAAA

SEQ ID NO: 102313 - protein, 219 aa, Setaria italica
  misc_feature (186)..(186): Xaa can be any naturally occurring amino acid
  misc_feature (204)..(204): Xaa can be any naturally occurring amino acid
  Transcript Sequence Number=SeqID_36339
  Gene Ontology: Mol. function=hydrolase activity
  Homolog annotation: Hit_ID=B9S5Y4; Match level="QueryCoverage=93%, HitCoverage=63%, E-value=3e-67, Identity=63%"; Hit description =Monoglyceride lipase, putative
AVADLLAFFRAVRAREEHAGLPCFLFGESMGGAICLLIHLRTPPEEWAGAVLVAPMCRISDRIRPPWPLPEILTFVARFAPTAAIVPTADLIEKSVKVPAKRVIAARNPVRYNGRPRLGTVVELLRATDELAKRLGEVTIPFLVVHGSADEVTDPEVSRALYEAAASKDKTIKIYDGMLHSLLFGXLDENIERVRGDILAWLNXKCTLSTSLQRDITVE

SEQ ID NO: 102314 - protein, 258 aa, Setaria italica
  misc_feature (9)..(9): Xaa can be any naturally occurring amino acid
  misc_feature (24)..(24): Xaa can be any naturally occurring amino acid
  misc_feature (108)..(108): Xaa can be any naturally occurring amino acid
  misc_feature (114)..(114): Xaa can be any naturally occurring amino acid
  misc_feature (148)..(148): Xaa can be any naturally occurring amino acid
  misc_feature (164)..(164): Xaa can be any naturally occurring amino acid
  misc_feature (197)..(197): Xaa can be any naturally occurring amino acid
  Transcript Sequence Number=SeqID_36340
  Gene Ontology: Mol. function=nucleic acid binding; Cellular component= nucleus
  Homolog annotation: Hit_ID=Q2QV16; Match level="QueryCoverage=90%, HitCoverage=25%, E-value=1e-81, Identity=56%"; Hit description =Transposon protein, putative, Mutator sub-class
  Pfam annotation: Domain name=MULE; Domain location=12-98; Score=76.4; E_value=1e-19; Accession=PF10551.1; Description=MULE transposase domain
  Pfam annotation: Domain name=SWIM; Domain location=217-249; Score =22.5; E_value=0.0013; Accession=PF04434.9; Description=SWIM zinc finger
  Pfam module annotation: Pfam domain module=MULE::SWIM; Domain location=12-98::217-249
CKRGFWLGXKPIICLDGFHIKTRXLLTTIGMDPNNCIFPIAMAVVEVESLVSWKWFLETLKEDLKIDNTFPWTIMTDKQKGLIPEHRFCVRHLYSNFQEKFKGEILKXLWSCAXSSPETTWNIQMEKMKHLNPDARGWLLKMPPNTWXARELPIMSMFERIKCXLMTRHYNKQQEMATKITGSFCPKIKKKMNLPNXCYALPLGNGVFQVLIKDYQHIVDINAKSCDCRRHQLVGIPCSHAISCLRHERISPESVLPS

SEQ ID NO: 102315 - protein, 153 aa, Setaria italica
  misc_feature (23)..(23): Xaa can be any naturally occurring amino acid
  misc_feature (96)..(96): Xaa can be any naturally occurring amino acid
  misc_feature (137)..(137): Xaa can be any naturally occurring amino acid
  Transcript Sequence Number=SeqID_36341
  Gene Ontology: Mol. function=zinc ion binding
  Homolog annotation: Hit_ID=Q7XGU8; Match level="QueryCoverage=86%, HitCoverage=14%, E-value=9e-11, Identity=36%"; Hit description =Transposon protein, putative, Mutator sub-class
MHCRHCSEARHNTATCTLRNGLXSEDAKKLVANTKAQLQTEAAQVGTPQEQPQDLPINQEVRVQDDVGSQQVTQASTATLSQLFEESQSSMLSQPXGPLPESTFILSNQPIPRPGPLTTITKAGRAAATNKRKKFTXQKKTARHLKQRRGRPP

SEQ ID NO: 102316 - protein, 391 aa, Setaria italica
  misc_feature (49)..(49): Xaa can be any naturally occurring amino acid
  misc_feature (107)..(107): Xaa can be any naturally occurring amino acid
  misc_feature (129)..(129): Xaa can be any naturally occurring amino acid
  misc_feature (148)..(148): Xaa can be any naturally occurring amino acid
  misc_feature (162)..(162): Xaa can be any naturally occurring amino acid
  misc_feature (274)..(274): Xaa can be any naturally occurring amino acid
  Transcript Sequence Number=SeqID_36342
  Gene Ontology: Mol. function=nucleic acid binding
  Homolog annotation: Hit_ID=Q7XGU8; Match level="QueryCoverage=77%, HitCoverage=38%, E-value=1e-112, Identity=59%"; Hit description =Transposon protein, putative, Mutator sub-class
  Pfam annotation: Domain name=SWIM; Domain location=182-214; Score =22.5; E_value=0.0013; Accession=PF04434.9; Description=SWIM zinc finger
KGEAAPIYAMAVVEVESLVSWKWFLETLKEDLKIDNTFPWTIMTDKQKXVSSQSTETTWNIQMEKMKHLNPDARGWLLKMPPNTWVRTFFSKFPKCDILQNNNCEVXNSYILDARELPIMSMFERIKCXLMTRHYNKQQEMATKITGXLCPKIKKKMNLPNXCYALPLGNGVFQVLIKDYQHIVDINAKSCDCRRHQLVGIPCSHAISCLRHERISPESVLPSCYSIEAFSNAYSCSIWPCKDRTEWQNVHGPEVLPPVYEKKVCRPLRLETSXPHEVRGPNGLKLSKHGVNMHCRHCSEARHNTATCTLKKMDFNSEDAKKLVANTKAQLQTEAAQVGTPQEQPQDLPINQEVRVQDDVGSQQVTQASTATLSQLFEPIPRPGPLTTITK

SEQ ID NO: 102317 - protein, 71 aa, Setaria italica
  Transcript Sequence Number=SeqID_36343
GSINIAWLHDTFKTLPEGANQSDVEYAARAYILYQIGCSLFPDPSGTRVHLRYLALLRDFDASGEMASGAA

SEQ ID NO: 102318 - protein, 79 aa, Setaria italica
  Transcript Sequence Number=SeqID_36344
  Gene Ontology: Mol. function=transferase activity, transferring glycosyl groups; Biological process=metabolic process
  Homolog annotation: Hit_ID=B6TL37; Match level="QueryCoverage=96%, HitCoverage=15%, E-value=5e-28, Identity=76%"; Hit description =Cytokinin-O-glucosyltransferase 2
RDDFALGVARDLGIPSMVFWCASAASLMAYMWTPELRKRGYVPLKDESYLTNGYLDKTIIDWIPGVPPISLGDVSSFVR

SEQ ID NO: 102319 - protein, 74 aa, Setaria italica
  Transcript Sequence Number=SeqID_36345
  Homolog annotation: Hit_ID=A2VB85; Match level="QueryCoverage=45%, HitCoverage=3%, E-value=3e-09, Identity=91%"; Hit description =Respiratory burst oxidase homologue A
  Subcellular localization annotation: CTP_CleavageSite=51; ConfidenceScore=5.80e-01
SPSSVAPPPPRRHPEPPQASSSGAPSRSRSPAMRRTSSHRLLQFSQELKATASRAKQFSQDLTKRFTRTQSRAN

SEQ ID NO: 102320 - protein, 58 aa, Setaria italica
  Transcript Sequence Number=SeqID_36346
MSRPHLPKDPAFPRANGSLDGGTRGLGGEIEEVGAAATIAVEQSPSQSSSPTASSPPA

SEQ ID NO: 102321 - protein, 110 aa, Setaria italica
  Transcript Sequence Number=SeqID_36347
  Homolog annotation: Hit_ID=Q9FZ72; Match level="QueryCoverage=90%, HitCoverage=61%, E-value=2e-10, Identity=42%"; Hit description =F13B4.3 protein
  Pfam annotation: Domain name=DUF1262; Domain location=1-110; Score= -131.6; E_value=0.0034; Accession=PF06880.3; Description=Protein of unknown function (DUF1262)
QRRRARPFDPADIYQQIEIVPRRRGRFTARAVAPDGFPYFLYRKKGWRVYASKPKDFELGEARGLDAALRSRQLPDAAILDAFPAATNTAAVGKWYSPFFVVIEGGVAPR

SEQ ID NO: 102322 - protein, 85 aa, Setaria italica
  Transcript Sequence Number=SeqID_36348
AEALVRAAAEWLRGARAQWGIRDVMLSGKAALEDMERGRRWMCVGEEEREVGAAVEGFVMDELVDELVEELAPCWHGDGRRRSSR

SEQ ID NO: 102323 - protein, 130 aa, Setaria italica
  Transcript Sequence Number=SeqID_36349
  Gene Ontology: Mol. function=unfolded protein binding; Cellular component=prefoldin complex; Biological process=protein folding
  Homolog annotation: Hit_ID=B6T5S0; Match level="QueryCoverage=99%, HitCoverage=98%, E-value=1e-56, Identity=87%"; Hit description =Prefoldin subunit 6
  Pfam annotation: Domain name=Prefoldin_2; Domain location=18-123; Score=104.0; E_value=5.2e-28; Accession=PF01920.12; Description =Prefoldin subunit
MASSSTPAAVREMQKDLEVQANALSKIQKDISKNHQVRKQYTIQVGENELVLKELELLNDGANVYKLIGPVLVKQDLAEAKANVKKRIEYISAELKRMDRALKDLEDKQNSKKESIFKLQQRMQAVQAKA

SEQ ID NO: 102324 - protein, 131 aa, Setaria italica
  Transcript Sequence Number=SeqID_36350
  Gene Ontology: Mol. function=oxidoreductase activity; Cellular component=cytoplasm; Biological process=oxidation reduction
  Homolog annotation: Hit_ID=B6TKU7; Match level="QueryCoverage=89%, HitCoverage=41%, E-value=2e-40, Identity=71%"; Hit description=Sex determination protein tasselseed-2
  Pfam annotation: Domain name=adh_short; Domain location=20-131; Score= -14.8; E_value=0.00013; Accession=PF00106.17; Description=short chain dehydrogenase
MSAAASSPSSSSMTKRLEGKVALVTGGASGIGETIVRLFKNHGAKVCIADIQDEAGQKLRDALGGGDDVMFVHCDVTVEEDVSAAVDAVAQRFGALDVMVNNAGITGSKVTDIRNVDFAEVRKVFDINVHG

SEQ ID NO: 102325 - protein, 281 aa, Setaria italica
  Transcript Sequence Number=SeqID_36351
  Gene Ontology: Mol. function=oxidoreductase activity; Cellular component=cytoplasm; Biological process=oxidation reduction
  Homolog annotation: Hit_ID=B6TKU7; Match level="QueryCoverage=95%, HitCoverage=95%, E-value=1e-114, Identity=76%"; Hit description=Sex determination protein tasselseed-2
  Pfam annotation: Domain name=Epimerase; Domain location=22-264; Score= -34.2; E_value=0.00014; Accession=PF01370.13; Description=NAD dependent epimerasedehydratase family
  Pfam annotation: Domain name=KR; Domain location=21-182; Score=-61.7; E_value=0.0019; Accession=PF08659.2; Description=KR domain
  Pfam annotation: Domain name=adh_short; Domain location=20-187; Score= 102.1; E_value=1.9e-27; Accession=PF00106.17; Description=short chain dehydrogenase
  Pfam module annotation: Pfam domain module=Epimerase::KR::adh_short; Domain location=22-264::21-182::20-187
MSAASSSPSSSSSAKRLEGKVALVTGGATGIGEAIVRLFREHGAKICIADIQDEAGQQLRDALGDQDVMFVHCDVTVEDEVSAAVDAVAQRFGSLDVMVNNAGITGSKVTDIRNVDFAEVRKVFDINVHGVFMGMKHAARVMIPRKRGSIVSLASVASVIGGMGPHAYTASKHAVAGLTKSVAGELGRHGVRVNCVSPYAVPTALSMPHLPKGARADDAVKDFLAFVGGEANLKGVDLMPRDVAEAVLYLASDEARYVSALNLTVDGGFTAVNHNLKPFED

SEQ ID NO: 102326 - protein, 120 aa, Setaria italica
  Transcript Sequence Number=SeqID_36352
  Gene Ontology: Mol. function=nucleoside-triphosphatase activity; Cellular component=protein complex; Biological process=proteolysis
  Homolog annotation: Hit_ID=B6TM93; Match level="QueryCoverage=100%, HitCoverage=32%, E-value=6e-50, Identity=80%"; Hit description =ATPase family AAA domain-containing protein 1
MKSSESSSRFVQELVLYAASAAFSCLVLFAGLRHLDPNRAASQKAAQQKKEIARRLGRPLVSTTPYEDVIACDVINPDSIDVEFDSIGGLDHVKQALYELVILPLRRPELFTFGKLLSPQ

SEQ ID NO: 102327 - protein, 69 aa, Setaria italica
  Transcript Sequence Number=SeqID_36353
LIRGFDELNSLLLFRIQTWKIYSKSEQQRTCGYKTNCSNKSWHYRVSYRVFTVMRRTCHEKILPCVLCL

SEQ ID NO: 102328 - protein, 76 aa, Setaria italica
  Transcript Sequence Number=SeqID_36354
QIFVARISRKASVGMALLQSILSLNYVDLSISAYTSDSLDGFIYSPKNIFIYAVFTSIKTWSSDLLDVYLQVMGVS

SEQ ID NO: 102329 - protein, 142 aa, Setaria italica
  Transcript Sequence Number=SeqID_36355
  Gene Ontology: Cellular component=integral to membrane
  Homolog annotation: Hit_ID=Q5ZA66; Match level="QueryCoverage=93%, HitCoverage=94%, E-value=4e-34, Identity=49%"; Hit description =Embryogenesis transmembrane protein-like
IDSCLTKTFKQFGDPKDDLQKLRTYLLLLGILAATVTYQAGLNPPGGFWTDNDGHVAGDPILETVNPRRYKAFFYCNATAFVASLVIIALLQSQLITVGAIKRHILQTAMTLDLFGLMGAYAAGSSRKFSTSIYVFVLVLLV

SEQ ID NO: 102330 - protein, 77 aa, Setaria italica
  Transcript Sequence Number=SeqID_36356
  Gene Ontology: Mol. function=nucleoside-triphosphatase activity; Cellular component=cytoplasm; Biological process=protein metabolic process
  Homolog annotation: Hit_ID=Q6F2Y7; Match level="QueryCoverage=100%, HitCoverage=8%, E-value=6e-36, Identity=100%"; Hit description=Heat shock protein 101
KTYGRDLVEQAGKLDPVIGRDEEIRRVVRILSRRTKNNPVLIGEPGVGKTAVVEGLAQRIVRGDVPSNLLDVRLIAL

SEQ ID NO: 102331 - protein, 70 aa, Setaria italica
  Transcript Sequence Number=SeqID_36357
RICGRLCQNPILLSWLLQRRHLVFSTSFIYIILDTVQPRVVLTISLLDPGAAVHNKGYRILKPPLTFDFE

SEQ ID NO: 102332 - protein, 79 aa, Setaria italica
  Transcript Sequence Number=SeqID_36358
  Gene Ontology: Mol. function=protein binding; Cellular component =viral envelope
  Homolog annotation: Hit_ID=Q9FWV2; Match level="QueryCoverage=82%, HitCoverage=6%, E-value=3e-24, Identity=84%"; Hit description =Putative chloroplast inner envelope protein
GEEEVYVKIPADLIISAEKAKSIVQDIAKVRLENSLVQAIALLRQKKRDDVLSSLNDLLACDAALPVWAMTEVVVQGQP

SEQ ID NO: 102333 - protein, 91 aa, Setaria italica
  Transcript Sequence Number=SeqID_36359
  Gene Ontology: Mol. function=protein tyrosine kinase activity; Biological process=protein amino acid phosphorylation
  Homolog annotation: Hit_ID=Q69MM4; Match level="QueryCoverage=89%, HitCoverage=10%, E-value=1e-27, Identity=70%"; Hit description =Putative receptor kinase 5
  Pfam annotation: Domain name=PAN_2; Domain location=1-60; Score=61.1; E_value=4.2e-15; Accession=PF08276.3; Description=PAN-like domain
RGVKSPDKFVLVENRTFQECAAECTRNCSCVAYAYADLSTSRIKGDVTRCLVWTGELIDTEKIGVNAGSETLYLRIAGLDAGMMEGEETKH

SEQ ID NO: 102334 - protein, 36 aa, Setaria italica
  Transcript Sequence Number=SeqID_36360
GGLRVPCAEEDFEDLLRRLQRKNGAAGGKGKKAAIR

SEQ ID NO: 102335 - protein, 165 aa, Setaria italica
  Transcript Sequence Number=SeqID_36361
  Homolog annotation: Hit_ID=B6SWC5; Match level="QueryCoverage=100%, HitCoverage=35%, E-value=2e-74, Identity=81%"; Hit description=Kelch motif family protein
  Pfam annotation: Domain name=F-box; Domain location=42-89; Score =40.7; E_value=5.8e-09; Accession=PF00646.25; Description=F-box domain
MGSILSATGSATAKSMDRHETSGTDPNKRVKVSAYEYGMNRRIIPTLPDELSFQILARLPLIHYLNLKMVCRAWKAAITSHELSQLRRELGVTEEWLYILSKVEANKLDWYALDPLFQKWQRLPPMPSFVNEEESNRTGSSGFRMWNVVGSSIRIADFVRSWFWR

SEQ ID NO: 102336 - protein, 161 aa, Setaria italica
  Transcript Sequence Number=SeqID_36362
  Homolog annotation: Hit_ID=B6UEV1; Match level="QueryCoverage=99%, HitCoverage=100%, E-value=3e-41, Identity=61%"; Hit description =Senescence-associated protein
MVAVAVPSTLPMELRKVEPHGKAAAAGAVTGSRARVLVTVTVLGSAGPLRFLVDEGETVTGLIRAALRCYAREGRMPLLGAAPADFLLYTANGRSDALMADERISFNGCRSFLLWQKAARQAVANDAGSEPLSATSSPGRKVSGGWKGGLNKFLLTFSFKV

SEQ ID NO: 102337 - protein, 58 aa, Setaria italica
  Transcript Sequence Number=SeqID_36363
SFGHSPHSHVASCVRMLIDFATIQSIPLSRLLPRHPSPLDPIVGHAFPPPPPCLSDQG

SEQ ID NO: 102338 - protein, 39 aa, Setaria italica
  Transcript Sequence Number=SeqID_36364
MMERAEDLGLSLSLSSSLAAPRTHHVSAMLLRSPEKRFL

SEQ ID NO: 102339 - protein, 380 aa, Setaria italica
  misc_feature (371)..(372): Xaa can be any naturally occurring amino acid
  misc_feature (376)..(376): Xaa can be any naturally occurring amino acid
  Transcript Sequence Number=SeqID_36365
  Gene Ontology: Mol. function=transferase activity
  Homolog annotation: Hit_ID=Q5QPZ3; Match level="QueryCoverage=76%, HitCoverage=61%, E-value=1e-135, Identity=78%"; Hit description =Glycosyltransferase (Fragment)
  Pfam annotation: Domain name=DUF563; Domain location=150-380; Score =294.7; E_value=2.1e-85; Accession=PF04577.6; Description=Protein of unknown function (DUF563)
IRQRVDADDAGSRRSADTLAAAAEDPKVVDDDNAAKEAHANTRGASEEEKRVLTSEPEQGKKMEDTASGGEDEEGSKVLLEGHQEHQEHKVTLPTVSNYTIRDAAEDSDNGKQEDGKTDSEIKLAMAVAQSNGRDRSHQPALDNLEWDKPLCDFSNFRANVCEMRGNIRIHPNGSSVMYMEPAGSNRDEQWKIKPYPRKGDELCLSHITEVTVQSSKVAPECTKYHDVPAVIFALTGYTGNLFHDFTDVLVPLFTTASEFNGEVQFLITDMAIWWTRKYAVVFEKLTKYPLIDFNKDTEVRCFKHAIIGLHAYMEFTIDPLKAPHNYSMVDFNTFMRRTYSLPRDSVTALGEIPKTRPRLLIISRQRTRMXXNLKXIVAM

SEQ ID NO: 102340 - protein, 35 aa, Setaria italica
  Transcript Sequence Number=SeqID_36366
CISSAYVHLVPVSTCIRGWFVPPYPNYYFRCSLDA

SEQ ID NO: 102341 - protein, 144 aa, Setaria italica
  Transcript Sequence Number=SeqID_36367
  Gene Ontology: Mol. function=phosphoinositide binding; Biological process=cell communication
  Homolog annotation: Hit_ID=Q9XI44; Match level="QueryCoverage=79%, HitCoverage=11%, E-value=2e-23, Identity=50%"; Hit description =F9L1.19 protein
RTYDFTYNSTLERSSSVWFNLPFATALIILFRYISLDYDLRRKSTTNTDQDISRPLIKTRSTELKKVLLTENDGKSNWRSKVNSPPVEAAFEQFSRHLVTEWVTDLWYSRVTPDKEGPEELITIVNTVTEGLYCSFFLGTFPLF

SEQ ID NO: 102342 - protein, 151 aa, Setaria italica
  misc_feature (22)..(22): Xaa can be any naturally occurring amino acid
  Transcript Sequence Number=SeqID_36368
  Subcellular localization annotation: CTP_CleavageSite=19; ConfidenceScore=5.48e-01
ASFPSKPAASSSFLSGFVRAGXAAPAPAQAQPPNLAKPPPPPPERPSSTRHRSRSPPPSRPRTRSRSRSPSRSSRRRSRSRSRSRERRRRSRSRERDRRASRRRSRSRSRSPSRRSGRSSHSQGRRDRRHDDGRENSKGRGGRDGGKVDYP

SEQ ID NO: 102343 - protein, 445 aa, Setaria italica
  Transcript Sequence Number=SeqID_36369
  Homolog annotation: Hit_ID=B6TYM4; Match level="QueryCoverage=91%, HitCoverage=93%, E-value=5e-55, Identity=49%"; Hit description=C2 domain containing protein
  Pfam annotation: Domain name=C2; Domain location=41-128; Score=37.5; E_value=5.2e-08; Accession=PF00168.22; Description=C2 domain
MAAYQTAFVPEPQLLNTEIIAQKATNFVADTARKDKSIGYLDVFVHQARDIHNVCIYHKQDVYAKLRLTSSPDLSCSTKVINSAGHNPVFEESLRLDVQTVDASLKCEIWMLSRVRNYLEDQLLGFALVPLADIVMGDGKLVQEFSLTSTDLFHTPAGFVQLSLSYTGCSPDVILISSPNKSVSRVPDSGNDCVVPAQLEKIEFPDLNVVKEDEIMVSKYLEMGSLDSQNPIKTENGKLLHSGNGNDIPSELGKIEFPDSENPVKADNGKLLQFGAAVPGTAICADKLEEHQDESPLSCVSTTGSSTTLSATQQSVSEPSSEPSETTVEAPPRQSQREKSQDVTDGEADSSEALAAPKDEVVKPVISINLQPEQSVVQQDIVDMYMKSMQQFTDSLAKMKLPLDVENSSPSNDDSDSSTIEKPSPSPSSSATKGSRVFYGSRAFF

SEQ ID NO: 102344 - protein, 90 aa, Setaria italica
  Transcript Sequence Number=SeqID_36370
  Gene Ontology: Mol. function=nucleoside-triphosphatase activity
  Homolog annotation: Hit_ID=B6U6B8; Match level="QueryCoverage=92%, HitCoverage=17%, E-value=4e-38, Identity=89%"; Hit description =Thyroid receptor-interacting protein 13
YIFSGGSVPCILNYSTLKEKKHCPEAVEPHGALHLSSLLYEAAELCEGLSGRSLRKLPFLAHASVANPSCCDASTFMHTLIQTAKVEYSW

SEQ ID NO: 102345 - protein, 126 aa, Setaria italica
  Transcript Sequence Number=SeqID_36371
SGASVRRVPAARDPVSAKRSPEPGMELDLLGLGLPPATAGHGDSAVQRPDLEKAGSDEPLRLAAATAETPPLVRSRMRGRPVDADADDVHAPPANRRPNPPSMAPSPQVRVPGAAGDRSDRFTGTV

SEQ ID NO: 102346 - protein, 298 aa, Setaria italica
  Transcript Sequence Number=SeqID_36372
  Gene Ontology: Cellular component=integral to membrane
  Homolog annotation: Hit_ID=B6TDW9; Match level="QueryCoverage=90%, HitCoverage=90%, E-value=1e-112, Identity=71%"; Hit description =Tobamovirus multiplication-like protein
  Pfam annotation: Domain name=DUF1084; Domain location=13-298; Score =740.0; E_value=1.8e-219; Accession=PF06454.3; Description=Protein of unknown function (DUF1084)
MRKLLSSPLAALSLPEMAAGGVALALRGWWEEVNGSSAWQDGAFFSLSAAYALVSAVALIQLVRIQLRVPEIGWTTQKVFHLMNFIVNGVRAIVFGFHAHVFLLQPKVYTLVLLYLPGLLFFSTYTLLVLFWAEIYHQAKHLPTDKLRTIYIAVNSIIYVIQVCIWVYLGINDNPLMELVSKIFISAVSFIALLGFLIYGGRLFAMLRHFPIESKGRRKKLYEVGTVTGICFTCFLIRCIVVSFSSFNPELSLEVLDHPVLDFFYYMLTEILPSALVLFILRKLPPKRVSAQQYHTIR

SEQ ID NO: 102347 - protein, 120 aa, Setaria italica
  Transcript Sequence Number=SeqID_36373
TRKSTRDKQLVISEHKPPYVKLSLCNVKWSFFPERAVKWSPVSPSYAVSLKHRYEEQICQRSRQRDRRRVLPLCKKILFFDEELSNGVQHSLRMLCRSSGVWHEELSNGVAIVGDQGRET

SEQ ID NO: 102348 - protein, 63 aa, Setaria italica
  Transcript Sequence Number=SeqID_36374
  Subcellular localization annotation: CTP_CleavageSite=8; ConfidenceScore=5.42e-01
LTSLELTRAGSRQACSRSSTPCSAAPRARAPPVTRDLASPTPGFDPIQRPAPSLSRSHPRPMT

SEQ ID NO: 102349 - protein, 53 aa, Setaria italica
  Transcript Sequence Number=SeqID_36375
NLFFLREIPHCFMHTLWRDKAIKCIPEQFFISQIEDNYEYFTRRNRNQEYCRA

SEQ ID NO: 102350 - protein, 90 aa, Setaria italica
  Transcript Sequence Number=SeqID_36376
  Subcellular localization annotation: CTP_CleavageSite=39; ConfidenceScore=5.57e-01
VAAHRIFSVVIVPSSVSPFPNLKSPDQRRKHDVQRTLSRAVSVFSSSAALFDKLRWEKNSFRENAHEGSMNRILHGIDNKTAAPNDFQGS

SEQ ID NO: 102351 - protein, 222 aa, Setaria italica
  Transcript Sequence Number=SeqID_36377
  Homolog annotation: Hit_ID=Q5ZC07; Match level="QueryCoverage=78%, HitCoverage=33%, E-value=8e-74, Identity=76%"; Hit description =Transcription factor jumonji (JmjC) domain-containing protein-like
MRRIGSRLVDMRQNIMVQKSPFCRLEDCTNIQPMDKALTGFQLFNLQKDSPLQTLEPSTLQALYELISLVHDSAEVVKQNNQTESTSQDTSSNQRDKTKIAAEDDSSLLDKDPVAKIILPVEPLELRSMMLAMVHTFPRTLEALVLNMLGPVGAEILTRKFDEIDQQTTKEEQAEFYKTFYSVFEDQHAAMDVLLNGKELFSFQVFQNVLDKYLRVHIDRPG

SEQ ID NO: 102352 - protein, 118 aa, Setaria italica
  Transcript Sequence Number=SeqID_36378
  Gene Ontology: Mol. function=dopamine beta-monooxygenase activity; Biological process=histidine catabolic process
  Homolog annotation: Hit_ID=B9RNX5; Match level="QueryCoverage=85%, HitCoverage=12%, E-value=2e-29, Identity=57%"; Hit description =Dopamine beta-monooxygenase, putative
ASSDPSSSSAAPTMLDSCAHLSPRFRVRWTLHEANNSVDIGLEAAVGSEYYMAFGWAEPGAAEPPSVIGADLVVAGFTEDGLPFADDYYVTKYSECLLRDDGSVEGVCPDTIYGRNHS

SEQ ID NO: 102353 - protein, 91 aa, Setaria italica
  misc_feature (19)..(19): Xaa can be any naturally occurring amino acid
  misc_feature (35)..(35): Xaa can be any naturally occurring amino acid
  misc_feature (75)..(75): Xaa can be any naturally occurring amino acid
  Transcript Sequence Number=SeqID_36379
  Gene Ontology: Mol. function=pyruvate kinase activity; Biological process=glycolysis
  Homolog annotation: Hit_ID=B6TK43; Match level="QueryCoverage=86%, HitCoverage=15%, E-value=8e-34, Identity=90%"; Hit description =Pyruvate kinase
LIGPVLVGSISSDPSKWRXYGTTQARQAVRGVYPXGSTDEAETGGLTKEEYGIKLALNYGRSVGIVKPFDRVIIXEKIGDSSVVKIIECEV

SEQ ID NO: 102354 - protein, 99 aa, Setaria italica
  Transcript Sequence Number=SeqID_36380
  Gene Ontology: Mol. function=hydrogen-translocating pyrophosphatase activity; Cellular component=membrane; Biological process=proton transport
  Homolog annotation: Hit_ID=Q7XAC0; Match level="QueryCoverage=100%, HitCoverage=12%, E-value=8e-35, Identity=75%"; Hit description=H+ -pyrophosphatase
  Subcellular localization annotation: CTP_CleavageSite=74; ConfidenceScore=5.23e-01
HRFSTDSRPCQYTIGRTCKPALANAVFSAIAFLLGAATSVVSGYLGMRIATYANARTTLEARRGIGAAFATAFRSGAVMGFLLASLGLLVLYATIKVFG

SEQ ID NO: 102355 - protein, 58 aa, Setaria italica
  misc_feature (18)..(18): Xaa can be any naturally occurring amino acid
  misc_feature (30)..(30): Xaa can be any naturally occurring amino acid
  Transcript Sequence Number=SeqID_36381
CWTGKDWASDQIEVLNPXNRASPDAEIEFXRLCKPISDLYLCHCCTQRCQKENRVALI

SEQ ID NO: 102356 - protein, 55 aa, Setaria italica
  Transcript Sequence Number=SeqID_36382
RSCRTHGPAPQARRNGNRACLPATREQPNEYLAKGPTKTRAPGVRGGGARPVVAA

SEQ ID NO: 102357 - protein, 467 aa, Setaria italica
  Transcript Sequence Number=SeqID_36383
  Homolog annotation: Hit_ID=B6SZL5; Match level="QueryCoverage=97%, HitCoverage=100%, E-value=0.0, Identity=85%"; Hit description=WD -repeat protein-like
  Pfam annotation: Domain name=WD40; Domain location=288-325; Score =0.7; E_value=32; Accession=PF00400.24; Description=WD domain, G-beta repeat
  Pfam annotation: Domain name=WD40; Domain location=329-367; Score =35.0; E_value=3e-07; Accession=PF00400.24; Description=WD domain, G -beta repeat
  Pfam annotation: Domain name=WD40; Domain location=372-410; Score =11.0; E_value=2; Accession=PF00400.24; Description=WD domain, G-beta repeat
  Pfam module annotation: Pfam domain module=WD40::WD40::WD40; Domain location=288-325::329-367::372-410
MSYTGFAPGCDIGMSDYHYGDVEEMEDEYDMNEPVDDMEEEEEEEEEDEYQEPVARDSDAEEEEDEDQSHKVPDISAVDARNGKDIQGIPWERMGITRETYRQARVEQYKNYENIPNSGEAAMKACKSTEKGGTYYEFRQNTRSVKSTISHFQLRNLVWATSKHDVYLLLHYSVLHWSALSGLDTEIMDVHGHIAPSEKHPGSLLEGFFHTQISTMAVKDNLLVAGGLQGELICKHLDREGISFCCRTTFDDNAITNALEIFNTSSGALHFIASNNDCGVREYDMERYQQYKHFRFDWPVNHTSLSPDGKLVIIVGDDTDALLIDANSGKTIHSMKGHLDYSFASAWNPDGRTFATGNQDKTCRIWDARNLSQSVHVLRGNVGAIRSIRFTSDGQFLSMAEAADFVHIFDIKSDYNKRQELDFFGDVSGMSFSPDTDTLYVGVSDRIYGSLLQFGRRYNYSYLDSLL

SEQ ID NO: 102358 - protein, 48 aa, Setaria italica
  Transcript Sequence Number=SeqID_36384
MCKLKFTKERVGCYMLVILVIVLLIGVLFGLGVFRHGYDHIKDIGRNH

SEQ ID NO: 102359 - protein, 110 aa, Setaria italica
  Transcript Sequence Number=SeqID_36385
  Gene Ontology: Mol. function=hydrolase activity, acting on acid anhydrides, catalyzing transmembrane movement of substances; Cellular component=integral to membrane; Biological process=copper ion transport
  Homolog annotation: Hit_ID=Q6JAG3; Match level="QueryCoverage=100%, HitCoverage=12%, E-value=9e-56, Identity=96%"; Hit description =Putative copper-exporting ATPase
IPPSMDSFQLFLQFGISVMVIACPCALGLATPTAVMVATGVGASQGVLIKGGQALESAQKVDCIVFDKTGTLTIGKPVVVDTRLLKNMVLREFYDYAAAAEVNSEHPLAK

SEQ ID NO: 102360 - protein, 182 aa, Setaria italica
  Transcript Sequence Number=SeqID_36386
  Gene Ontology: Cellular component=membrane
  Homolog annotation: Hit_ID=B0BLA8; Match level="QueryCoverage=100%, HitCoverage=24%, E-value=1e-59, Identity=60%"; Hit description =CM0545.360.nc protein
PRLQLYFLLGLVYAVVTPMLLPFIIVFFSLAYLVFRHQIINVYNQQYESGAQFWPDVHMRLIIALIVSQILLLGLLSTQEAEKSTVALLPLPVLSIWFHYVCKGRFEPAFVKFPLQDAMVKDTLERAHDPTLNLRDYLKGAYVHPVFQKNDIYQLVAIDEEEKNPLVVTKRQPRMTTPGGSK

SEQ ID NO: 102361 - protein, 161 aa, Setaria italica
  misc_feature (13)..(13): Xaa can be any naturally occurring amino acid
  misc_feature (20)..(20): Xaa can be any naturally occurring amino acid
  misc_feature (45)..(45): Xaa can be any naturally occurring amino acid
  Transcript Sequence Number=SeqID_36387
  Gene Ontology: Mol. function=metal ion binding
  Homolog annotation: Hit_ID=Q6ZHD3; Match level="QueryCoverage=96%, HitCoverage=16%, E-value=1e-20, Identity=39%"; Hit description =Putative ZR1 protein
NQRNEIPADSVQXKSQRWGXVECPAQFVAAQDSFRYQLMCSSSFXQRMQAPAALKCGSSLQQSTDGQRKRTNTETLLTEEVKQLRSQVTLLAEQYQQKSLQVQLYKQKLDETWLIVRDEAAKCKAAKDIIKVLTDQCKAMSEKLLVGQQSENPKITSNIDR

SEQ ID NO: 102362 - protein, 62 aa, Setaria italica
  Transcript Sequence Number=SeqID_36388
WRRYAHAGGATVIIVGGIPSANSSRSYINLRGRMELAHRYLGAGVKGLPPRPPAPLHLCPSL

SEQ ID NO: 102363 - protein, 240 aa, Setaria italica
  Transcript Sequence Number=SeqID_36389
  Gene Ontology: Mol. function=sequence-specific DNA binding; Cellular component=nucleus; Biological process=regulation of transcription, DNA-dependent
  Homolog annotation: Hit_ID=Q94KS5; Match level="QueryCoverage=94%, HitCoverage=28%, E-value=6e-32, Identity=46%"; Hit description =Homeodomain protein JUBEL1
  Subcellular localization annotation: CTP_CleavageSite=34; ConfidenceScore=5.71e-01
MGIAAPSSQPGQTTTYYVSQPTKSSAAISGRPATASSSMSHSQGFHQGSSGVFGYSSDGFDRPDSSQDHHQQQQQHVAQQSRRDKLRVQGFDPPGAGAAGHGLLPIDGDEHAEPGAMFEHAAAAGASNMLSEMFNFPAPPSGPSATELLASQMNATNYRFGLRQGVAGLSGDGGWFGAGAAGRAGLVLGGANMGSLGETSSPKQQGSMAGLATDPAAAMQLFLMNPQQQQQQQSRSSPTS

SEQ ID NO: 102364 - protein, 206 aa, Setaria italica
  misc_feature (96)..(96): Xaa can be any naturally occurring amino acid
  Transcript Sequence Number=SeqID_36390
  Gene Ontology: Mol. function=hydrolase activity, hydrolyzing O -glycosyl compounds; Biological process=carbohydrate metabolic process
  Homolog annotation: Hit_ID=Q10P80; Match level="QueryCoverage=94%, HitCoverage=34%, E-value=2e-99, Identity=87%"; Hit description =Glycosyl hydrolase family 10 protein, expressed
TPRQALHAAGFLALWMLLHCGIELVAAVPPPGWYDYTSYTDCRGQPEPALYNGGILKFGNSDDPDGYRTTETGVFSPAFVVYNLNKTTMYTFSCWXKLEGASAALITARLAPDNSGARCIATVLARSDCWAFVKGGFVLDWPTQTSVIFFQNADKTPMKITVASGSLQPFTTDQWAMHQQDTIRKRRKRVATIHVAVFRLGSSYVR

SEQ ID NO: 102365 - protein, 402 aa, Setaria italica
  Transcript Sequence Number=SeqID_36391
  Gene Ontology: Mol. function=hydrolase activity, hydrolyzing O -glycosyl compounds; Biological process=carbohydrate metabolic process
  Homolog annotation: Hit_ID=Q10P79; Match level="QueryCoverage=98%, HitCoverage=84%, E-value=0.0, Identity=83%"; Hit description =Glycosyl hydrolase family 10 protein, expressed
  Pfam annotation: Domain name=Glyco_hydro_10; Domain location=53-345; Score=99.6; E_value=1.1e-26; Accession=PF00331.12; Description =Glycosyl hydrolase family 10
KEYNRTTSGSLQPFTTDQWAMHQQEAIRKRRKRVATIHVADPQGARVVGASVSVQQTTKDFPIGSAIASTILGNQAYQQWFVDRFNAAVFEDELKWYSTEPMSGLLRFDVPDQMLAFVRSHRVMVRGHNIFWENQDATPRWVKNLTADDLRSAVNTRIQSLMTRYRGEFAHWDVNNEMLHYNFYEQRLGPNASMEFFSVAQDADPLATLFMNEYNVIETCDDPFSTVDTYVAKLKELRAGGAILEGIGLEGHFSKPNIPLMRAILDKLATLGLPIWFTEIDISNKFDAQTQAAYLEQVMREAYSHPAVSGVMLWTALHQSGCYQMCLTDWNLNNLPTGDVVDRLLNEWRTLQAGGQTDAHGAYSFSGYLGEYTLTVSYNNRTTQSTFSLSPGDETRHINVQM

SEQ ID NO: 102366 - protein, 134 aa, Setaria italica
  misc_feature (45)..(45): Xaa can be any naturally occurring amino acid
  Transcript Sequence Number=SeqID_36392
  Gene Ontology: Mol. function=DNA-directed DNA polymerase activity; Cellular component=DNA polymerase III complex; Biological process =DNA replication
MIEGRRHSVDIPISRALVAIMRSRSLRDPDTNSLAKFSAKKTIWXGCSLEEDEPEGNNYGRHSFSYNAYDHLQRRREEFGDSLRSGRLANSPINIIKANAMAKAALHNQSCCSAISGMSRAAKDRAFSLVMEGE

SEQ ID NO: 102367 - protein, 54 aa, Setaria italica
  Transcript Sequence Number=SeqID_36393
  Gene Ontology: Mol. function=ATPase activity, coupled to transmembrane movement of ions, phosphorylative mechanism; Cellular component=integral to membrane; Biological process=phospholipid transport
  Homolog annotation: Hit_ID=Q7XK56; Match level="QueryCoverage=92%, HitCoverage=5%, E-value=6e-17, Identity=78%"; Hit description =OSJNBa0091C07.8 protein
VMTIIFDKDISEATALQYPQILLHSQAGRLLNPTTFCGWFGRSLYHVSNLLSVS

SEQ ID NO: 102368 - protein, 57 aa, Setaria italica
  misc_feature (34)..(34): Xaa can be any naturally occurring amino acid
  Transcript Sequence Number=SeqID_36394
  Gene Ontology: Mol. function=ATPase activity, coupled to transmembrane movement of ions, phosphorylative mechanism; Cellular component=integral to membrane; Biological process=phospholipid transport
  Homolog annotation: Hit_ID=B9MYF4; Match level="QueryCoverage=71%, HitCoverage=3%, E-value=1e-09, Identity=75%"; Hit description =Aminophospholipid ATPase
MHLIYIFFHETKIFQFQALVVFFITICAYADEKXEMQELSMVALSGCIWLQAFVVTT

SEQ ID NO: 102369 - protein, 519 aa, Setaria italica
  misc_feature (361)..(361): Xaa can be any naturally occurring amino acid
  Transcript Sequence Number=SeqID_36395
  Gene Ontology: Mol. function=ATPase activity, coupled to transmembrane movement of ions, phosphorylative mechanism; Cellular component=integral to membrane; Biological process=phospholipid transport
  Homolog annotation: Hit_ID=P98205; Match level="QueryCoverage=100%, HitCoverage=46%, E-value=0.0, Identity=70%"; Hit description =Putative phospholipid-transporting ATPase 2
TLCLGWRDLEEDEYKEWSKNFQEASCSLDNRESKIAEVCHSLERDLHILGVTAIEDRLQDGVPETIKLLRNAGINVWMLTGDKQNTAIQIGLLCNLISSEPNSQLLSISGKTEEDILRSLERALLITKNTCETKDLAFVLDGWALEIILKHSKESFTRLAMLSRTAICCRMTPLQKAQLVAILKSVGYLTLAIGDGGNDVRMIQEANIGVGISGREGLQAARAADYSIGKFKFLKRLILVHGRYSYNRTAFISQYSFYKSLLICFIQILFAFFSGLSGTSLFNSVSLMAYNVFYTSLPVMTIIFDKDISEATALQYPQILLHSQAGRLLNPTTFCGWFGRSLYHALVVFFITICAYADEKXEMQELSMVALSGCIWLQAFVVTTDTNSFTYPQIALIWGNFVAFYMINLILSAIPSLEMYTIMFRLCGQPSYWITMALTVSVAMGPVMAFRYFRNLYWPSAINILQQIEQSNGSTQPSRNVESAVKSARTNLTNVLAGLHRNRGCNYQPLLSDSTETTR

SEQ ID NO: 102370 - protein, 65 aa, Setaria italica
  Transcript Sequence Number=SeqID_36396
  Gene Ontology: Mol. function=nucleic acid binding
  Homolog annotation: Hit_ID=Q5Z6Y3; Match level="QueryCoverage=89%, HitCoverage=28%, E-value=3e-22, Identity=86%"; Hit description =Putative RNA-binding protein
  Pfam annotation: Domain name=RRM_1; Domain location=1-60; Score=8.9; E_value=0.029; Accession=PF00076.14; Description=RNA recognition motif. (a.k.a. RRM, RBD, o
VAEDVVKQFFEGTCGEVSRLRLLGDYVHSTCIAFVEFVQADSAILALNCSGMILGTLPVRVSPSN

SEQ ID NO: 102371 - protein, 65 aa, Setaria italica
  misc_feature (18)..(18): Xaa can be any naturally occurring amino acid
  Transcript Sequence Number=SeqID_36397
  Subcellular localization annotation: CTP_CleavageSite=16; ConfidenceScore=5.45e-01
VGAWPSACPPPSPPARCXSPPPAWTCPPPSPPARCCSPPPAWPCPPPSPPARCCSPKPPCSPPAW

SEQ ID NO: 102372 - protein, 65 aa, Setaria italica
  Transcript Sequence Number=SeqID_36398
  Gene Ontology: Mol. function=phosphogluconate dehydrogenase (decarboxylating) activity; Cellular component=chloroplast; Biological process=valine metabolic process
  Homolog annotation: Hit_ID=Q2HVD9; Match level="QueryCoverage=98%, HitCoverage=19%, E-value=9e-16, Identity=67%"; Hit description =Hydroxyacid dehydrogenase/reductase; 6-phosphogluconate dehydrogenase, C-terminal-like
NQSRFYLGDVGNGAAMKLVVNMVMGSMMVSFSEGLLLSEKVGLDPNTLVEVISQGAISAPMFSLK

SEQ ID NO: 102373 - protein, 57 aa, Setaria italica
  Transcript Sequence Number=SeqID_36399
  Gene Ontology: Mol. function=nucleoside-triphosphatase activity; Cellular component=myosin complex; Biological process=signal transduction
  Homolog annotation: Hit_ID=Q0WPU1; Match level="QueryCoverage=92%, HitCoverage=3%, E-value=2e-20, Identity=83%"; Hit description=Myosin- like protein
  Pfam annotation: Domain name=DIL; Domain location=1-57; Score=-12.2; E_value=0.037; Accession=PF01843.11; Description=DIL domain
GEEDEEEFAGTSWHELNYIRQAVGFLVIHQKRKKTLEEIRQDLCPSLSVRQIYRICS

SEQ ID NO: 102374 - protein, 65 aa, Setaria italica
  Transcript Sequence Number=SeqID_36400
MAAAIDLSGEELMRALEPFIRDASAPLRVPSSVFLPNTTTLSVPPLLLLPPPPPPTVAGTRSPPE

SEQ ID NO: 102375 - protein, 134 aa, Setaria italica
  Transcript Sequence Number=SeqID_36401
IRRQSRQQDKHPQRNPEGLGSFCLGETKPPLQTIVEALDPDQGVPLRLVLPQDVLLQVDGLVDDGSSFWETRCIPGEEFADQIVGGGEPPHAMRPHVLDFIFPQPLGPDGDHRWLRLGVQLPRPPELGALVLSA

SEQ ID NO: 102376 - protein, 70 aa, Setaria italica
  Transcript Sequence Number=SeqID_36402
  Gene Ontology: Mol. function=alpha-amylase activity; Biological process=carbohydrate metabolic process
  Homolog annotation: Hit_ID=C3W8N1; Match level="QueryCoverage=100%, HitCoverage=17%, E-value=2e-26, Identity=81%"; Hit description=Alpha- amylase
  Pfam annotation: Domain name=Alpha-amyl_C2; Domain location=12-70; Score=123.0; E_value=9.5e-34; Accession=PF07821.4; Description=Alpha- amylase C-terminal beta-sheet dom
SLHDEIAKLIRKCQDIHSRSSVKILEARSDLYSAIINEKLCMKIGDGSWCPSDPEWRLAASGDRYAVWHK

SEQ ID NO: 102377 - protein, 84 aa, Setaria italica
  Transcript Sequence Number=SeqID_36403
  Subcellular localization annotation: CTP_CleavageSite=34; ConfidenceScore=5.51e-01
VGAWPSACPPPSPPARCCSPPPAWPCPPPSPPARCCSPKPPCSPPACGNPAKGPSDPPAPAPSSPEPPAPPWPSLRPFSLALET

SEQ ID NO: 102378 - protein, 108 aa, Setaria italica
  Transcript Sequence Number=SeqID_36404
  Subcellular localization annotation: CTP_CleavageSite=20; ConfidenceScore=5.36e-01
LPGNLLLPWTTASHKPDSVRRHTGFSTTSHGGERGRTGVFDGLTLTGSVPRIMPLQFRARIALSACRNGIYKLAKLQKNEQIIFCILVLYQKKHFLLNENSAMYSPHN

SEQ ID NO: 102379 - protein, 63 aa, Setaria italica
  Transcript Sequence Number=SeqID_36405
MAAAIDLSGEELMRALEPFIRDASAPHGSSPLLQHHHPLSPTSPFSFHHAAAYGGGYPFAAGA

SEQ ID NO: 102380 - protein, 157 aa, Setaria italica
  Transcript Sequence Number=SeqID_36406
PVAKAEGKAKQAAASSIEPVAKAEGKPKAKLLLRRAWELDAKPEPAVISVGTERLGEDEIEYVRTHRMRRLTPPDRSDPRILPQVCSAFPKSCCHRQQDRRPAGGHLEAVRDEGVRLGAGRAPRQWFEEVVSSPRGRNCLGLQGFAEDVYPAVCFVV

SEQ ID NO: 102381 - protein, 172 aa, Setaria italica
  Transcript Sequence Number=SeqID_36407
RNPQGLCSFFLGETIQPLLAIVEALDPHQGVPLLVVLPQDVLVQVFGLVDHGISGLGTLCKPGAAVAEDFGERTGPTHGTRPQVLDEIFIHPLGPGGDHRWLRLVLHLRRRLALSLVLRLRRRLHAARDSPLFSPSLLSLSNPRSGLRCRSRSLLPSPHLLVKSWDVGPDEP

SEQ ID NO: 102382 - protein, 418 aa, Setaria italica
  misc_feature (199)..(199): Xaa can be any naturally occurring amino acid
  misc_feature (406)..(406): Xaa can be any naturally occurring amino acid
  Transcript Sequence Number=SeqID_36408
  Gene Ontology: Mol. function=alpha-amylase activity; Cellular component=chloroplast; Biological process=carbohydrate metabolic process
  Homolog annotation: Hit_ID=C3W8N1; Match level="QueryCoverage=100%, HitCoverage=100%, E-value=0.0, Identity=85%"; Hit description=Alpha -amylase
  Pfam annotation: Domain name=Alpha-amyl_C2; Domain location=359-418; Score=113.4; E_value=7.5e-31; Accession=PF07821.4; Description=Alpha- amylase C-terminal beta-sheet dom
  Pfam annotation: Domain name=Alpha-amylase; Domain location=26-358; Score=155.6; E_value=1.5e-43; Accession=PF00128.16; Description =Alpha amylase, catalytic domain
  Pfam module annotation: Pfam domain module=Alpha-amyl_C2::Alpha -amylase; Domain location=359-418::26-358
MGQMVSDDKFEEQAARHGGIIKNGREILFQAFNWESNKHNWWSKLEDKVTDMAESGFTSAWLPPPTQSLSQEGYLPQNLYCLDSSYGSLPELKSLLHKMNEHHIRAMADVVINHRIGTTQGSNGMYNRYDGIPISWDEHAVTSCSGGKGNKSTGDNFNGVPNIDHTQTFVRKDIIEWLIWLRKSVGFQDFRFDFTKGAXYAAKFVKEYIEESKPLFAVGEYWDSCEYSPPDYRLNYNQDNHRQRIINWIDSTGGLCAAFDFTTKGILQEAVKGELWRLRDPEGKPPGVMGWWPSRSVTFIENHDTGSTQGHWPFPSDHIMEGYAYILTHPGIPTVFYDHFYDQGQSLHDEIAKLMQIRKCQDIHSRSSVKILEARSDLYSAIINEKLCMKIGDGSWCPSDPEWRLXAASGDRYAVWHK

SEQ ID NO: 102383 - protein, 440 aa, Setaria italica
  Transcript Sequence Number=SeqID_36409
  Gene Ontology: Mol. function=nucleotide binding; Cellular component =myosin complex; Biological process=protein amino acid phosphorylation
  Homolog annotation: Hit_ID=Q339Q2; Match level="QueryCoverage=97%, HitCoverage=43%, E-value=0.0, Identity=87%"; Hit description=Myosin, putative, expressed
  Pfam annotation: Domain name=DIL; Domain location=257-364; Score =184.3; E_value=3.5e-52; Accession=PF01843.11; Description=DIL domain
ESKHMFESPPPSKYLAPLPQTLTGSRRSRLPVERHEENHEILLKCIKENLGFKDGKPVAACVIYKCLLHWRAFESERTAIFDHVIEAINDVLKGKEADGRLPYWLSNTSALLCLLQRNLRSNGLFATPSRRSGGALALGGKIVQTLRSPSKLVGRSDSLPQVDARYPAILFKQQLTACVEKIFGQLRDNLKKEISPLLNVCIQAPKSTRGQPGKASKSPGLGAQPASNSNWDNIVNFLDLLMDTLRENYVPSFFIRKLITQLFSFINIQLFNSLLLRRECCTFSNGEYVKAGLSLLEKWITDVTEEFAGTSWHELNYIRQAVGFLVIHQKRKKTLEEIRQDLCPSLSVRQIYRICSMYWDDKYNTQGISNEVVAAMREMVNKDTQNLVSNSFLLDDDLSIPFSTEDLSMAIPAMDYADVDLPESLQHYTSVTSLLNLLSN

SEQ ID NO: 102384 - protein, 304 aa, Setaria italica
  misc_feature (273)..(273): Xaa can be any naturally occurring amino acid
  Transcript Sequence Number=SeqID_36410
  Gene Ontology: Mol. function=nucleic acid binding
  Homolog annotation: Hit_ID=B6TD52; Match level="QueryCoverage=63%, HitCoverage=50%, E-value=3e-87, Identity=81%"; Hit description=CID11
  Pfam annotation: Domain name=RRM_1; Domain location=119-186; Score =48.6; E_value=2.5e-11; Accession=PF00076.14; Description=RNA recognition motif. (a.k.a. RRM, RBD, o
  Pfam annotation: Domain name=RRM_1; Domain location=216-286; Score =20.4; E_value=0.0025; Accession=PF00076.14; Description=RNA recognition motif. (a.k.a. RRM, RBD, o
  Pfam module annotation: Pfam domain module=RRM_1::RRM_1; Domain location=119-186::216-286
DASNGVLHARRRSIPSSGHAAGARRLSADAPVFVSPAIDYYARHHQLPPPPPQQQPMHVLQLVGGGGMGGAGGRDSSSDGSANGQPNRRRRNGFIQGRRRMMGGRPRRADREASVQRTVYVSDIDQHVTEQKLAEVFSTCGQVVDCRICGDPNSVLRFAFIEFADDVGARTALTLGGTVLGFYPVKVLPSKTAILPVNPKFLPRTEDEKEMVSRTVYCTNIDKKVAEDVVKQFFEGTCGEVSRLRLLGDYVHSTCIAFVEFVQADSAILSLLXNCSGMILGTLPVRVSPSKTPVRPRSPRVTSY

SEQ ID NO: 102385 - protein, 289 aa, Setaria italica
  misc_feature (96)..(96): Xaa can be any naturally occurring amino acid
  misc_feature (214)..(214): Xaa can be any naturally occurring amino acid
  misc_feature (246)..(246): Xaa can be any naturally occurring amino acid
  Transcript Sequence Number=SeqID_36411
  Gene Ontology: Mol. function=transcription factor activity; Cellular component=nucleus; Biological process=regulation of transcription, DNA-dependent
  Homolog annotation: Hit_ID=B6TDZ0; Match level="QueryCoverage=100%, HitCoverage=100%, E-value=2e-68, Identity=54%"; Hit description=DRE binding factor 1
  Pfam annotation: Domain name=AP2; Domain location=110-161; Score =82.1; E_value=2e-21; Accession=PF00847.12; Description=AP2 domain
MAAAINLPGPAGEDLMRAMESFMQEDAPSPPLAMQPAPATFPPPPPFPAGAHGLSYPPATHLTPAQMQFIQAQLHLQRNPGLGPRAQPMKPAVPVXPPAPAPAQQQRPQKLYRGVRQRHWGKWVAEIRLPRNRTRLWLGTFDTAEEAALAYDQAAYRLRGDAARLNFPDNAASRAPLDSAVDAKLQAICATIAAASSKGGRAKSKATPINAPVXDAEAAASNSSSDEGSGSGSDDEMMSSSSPPAXPPAAPLAEIGQLNFGEVPWDEAESFVLRKYPSYEIDWDALLAN

SEQ ID NO: 102386 - protein, 327 aa, Setaria italica
  Transcript Sequence Number=SeqID_36412
ELGLRLALRLRHRLDAARRRLLGLALHLRRRLDAARRSRLVPRRLGDEVAPGRRLHHATPRRRLVRRGLDRRIILDLGFESEREKDGEKAMAEPVALEMRELGLEGLMAPSPDFRFARIITIPKIKDDSAVEAAANKAAAGSGMVKAASWSDFVTKPAGNKAASASSIEPAAKVEGKAKQAAASSIEPVAKAEGKAKQAAASRHRAGGEGGGQAEGQGSYSGGAWELDAKPEPAVISVGTERLGEDEIEYVRTHRMRRLTPPDDLIREFFPRYAARFPKAAAIVNKTVDLQEDILRQYETKGYALVRVERLDNGLKRWFRLPEAETA

SEQ ID NO: 102387 - protein, 334 aa, Setaria italica
  misc_feature (117)..(117): Xaa can be any naturally occurring amino acid
  misc_feature (162)..(162): Xaa can be any naturally occurring amino acid
  misc_feature (174)..(174): Xaa can be any naturally occurring amino acid
  misc_feature (295)..(295): Xaa can be any naturally occurring amino acid
  Transcript Sequence Number=SeqID_36413
  Gene Ontology: Mol. function=transcription factor activity; Cellular component=nucleus; Biological process=regulation of transcription, DNA-dependent
  Homolog annotation: Hit_ID=A7XA61; Match level="QueryCoverage=100%, HitCoverage=100%, E-value=7e-73, Identity=50%"; Hit description=DRF -like transcription factor DRFL2a
  Pfam annotation: Domain name=AP2; Domain location=162-214; Score =72.2; E_value=1.9e-18; Accession=PF00847.12; Description=AP2 domain
MAAAIDMYKYYNTSAHQIAASSSSDQELAKALEPFITSASSSSSSPYHYYSSSSMTQDSYMPTPSYATFATSPLPTAAATSSSSFSQLPPLYSSPYAASAASGVTGPMGLNQLGPAXQIQQIQAQFMMQQQQRGLHAAFLGPRAQPMKQSGSPPLAPAQSKXLYRGVRQRHWGXKWVAEIRLPKNRTRLWLGTFDTAEDAALAYDKAAFRLRGDMARLNFPALRRGGAHLAGPLHASVDAKLTAICQSLAGSKSGSPDAESSAASPPDSPKCSASTEGEEESVSAGSPPSPPLAXPPVPEMAKLDFTEAPWDETEAFHLRKYPSWEIDWDSILS

SEQ ID NO: 102388 - protein, 145 aa, Setaria italica
  Transcript Sequence Number=SeqID_36414
  Gene Ontology: Mol. function=metal ion binding; Cellular component =plasma membrane
  Homolog annotation: Hit_ID=B4FAG9; Match level="QueryCoverage=100%, HitCoverage=35%, E-value=3e-74, Identity=92%"; Hit description =Palmitoyltransferase ZDHHC9
TTYENFRYRYDQRANPYNRGVVENIKEIFFTPIPPSKNNFRGRVLQEHGLRPRATNGFMSPNMGRAVGDIEMGRKPVAWDEPRMAAEIGDLGAGLSNLLEDKDGRFRSASPDLSRDALAVGGGLEEQGSSAMNPGRTSWGVEAGR

SEQ ID NO: 102389 - protein, 354 aa, Setaria italica
  Transcript Sequence Number=SeqID_36415
  Gene Ontology: Mol. function=metal ion binding; Cellular component =plasma membrane; Biological process=multicellular organismal development
  Homolog annotation: Hit_ID=B4FAG9; Match level="QueryCoverage=99%, HitCoverage=86%, E-value=0.0, Identity=94%"; Hit description =Palmitoyltransferase ZDHHC9
  Pfam annotation: Domain name=zf-DHHC; Domain location=83-147; Score =123.9; E_value=5.1e-34; Accession=PF01529.12; Description=DHHC zinc finger domain
YFCAFVARELMDNFSYGMGLSVMIAAVLFTAYDLSLLLLTSGRDPGIIPRNAHPPEPEGFDGNAEVGANQTPPLRLPRVKDVVVNGITVKTKYCDTCMLYRPPRCSHCSICNNCVERFDHHCPWVGQCIGLRNYRFFYMFVFSTTLLCLYVFGFCWVFIVKIRNAEQITIWKAMAKTPASIALIIYTFIAVWFVGGLSVFHLYLMSTNQTTYENFRYRYDQRANPYNRGVVENIKEIFFTPIPPSKNNFRGRVLQEHGLRPRATNGFMSPNMGRAVGDIEMGRKPVAWDEPRMAAEIGDLGAGLSNLLEDKDGRFRSASPDLSRDALAVGGGLEEQGSSAMNPGRTSWGVEPGR

SEQ ID NO: 102390 - protein, 663 aa, Setaria italica
  misc_feature (17)..(17): Xaa can be any naturally occurring amino acid
  misc_feature (118)..(118): Xaa can be any naturally occurring amino acid
  Transcript Sequence Number=SeqID_36416
  Gene Ontology: Mol. function=molecular_function; Cellular component =nucleus; Biological process=postreplication repair
  Homolog annotation: Hit_ID=B6SPQ9; Match level="QueryCoverage=98%, HitCoverage=96%, E-value=0.0, Identity=77%"; Hit description=WD -repeat protein 33
  Pfam annotation: Domain name=WD40; Domain location=141-179; Score =26.3; E_value=0.00012; Accession=PF00400.24; Description=WD domain, G-beta repeat
  Pfam annotation: Domain name=WD40; Domain location=183-221; Score =35.6; E_value=2e-07; Accession=PF00400.24; Description=WD domain, G -beta repeat
  Pfam annotation: Domain name=WD40; Domain location=225-263; Score =37.5; E_value=5.4e-08; Accession=PF00400.24; Description=WD domain, G-beta repeat
  Pfam annotation: Domain name=WD40; Domain location=267-305; Score =43.1; E_value=1.1e-09; Accession=PF00400.24; Description=WD domain, G-beta repeat
  Pfam annotation: Domain name=WD40; Domain location=309-348; Score =39.6; E_value=1.3e-08; Accession=PF00400.24; Description=WD domain, G-beta repeat
  Pfam annotation: Domain name=WD40; Domain location=353-391; Score =30.8; E_value=5.4e-06; Accession=PF00400.24; Description=WD domain, G-beta repeat
  Pfam annotation: Domain name=WD40; Domain location=99-137; Score =12.3; E_value=1.4; Accession=PF00400.24; Description=WD domain, G -beta repeat
  Pfam module annotation: Pfam domain module=WD40::WD40::WD40::WD40::WD4 0::WD40::WD40; Domain location=141-179::183-221::225-263::267 -305::309-348::353-391::99-137
  Subcellular localization annotation: CTP_CleavageSite=58; ConfidenceScore=5.04e-01
ASSTNLTPRVPGAPGPXQQQQHQPPYDAYGDNFGAKRMRKPVQRRTVDYTSSVVRYVQARMWQRDARDRFTLQPTPAAVLDMLPSVAYPDNPSTSYAAKFVHSSINKNRCSINRVLWXPTGRRLITGSQSGEFTLWNGQSFNFEMILQAHDQPVRSMVWSHNENWMVTGDDGGAIKYWQSNMNNVKVNKTAHRESVRGLSFSRTDLKFCSCSDDRTVKVWDFARCQEEKSLTGHGWDVKTVDWHPTKSLLVSGGKDYLVKLWDAKSGRELNSFHGHKNIVHCVKWNQNGNWVLTASKDQIIKLYDIRSMKELESFRGHTKDVTALAWHPFHEEYFVSGSFDGAIFHWLVGHEAPQIEINNAHDNSVWDLAWHPVGYLLCSGGNDHATKFWCRNRPGDITRDRYNSGQTQGYVDQHPAFGARAMGGFQMPEPPTPGPFAPGLSRNEGTIPGIGVAMTLDGSDQGEQRPSIPGLPPGQPPLPPGPHPSQLLGQQQQYQQMPQQQHSQFRPPPPNMPQLQPPAHMLSHSQGSRPTLPQLPPMGGPSMPSPVNPPLPPMPHPTAMQGSQNQMMPQMPQHMMGLNQMHPGSVPPGNVPPMGGFPSAMGNIQGASGSSGIQNFPMGGIYNRPQGQMAPQGQMTSIPGLSSYQGMGNVGLTQPPPPTQHP

SEQ ID NO: 102391 - protein, 106 aa, Setaria italica
  Transcript Sequence Number=SeqID_36417
  Gene Ontology: Mol. function=transcription regulator activity; Cellular component=nucleus; Biological process=regulation of transcription
  Subcellular localization annotation: CTP_CleavageSite=11; ConfidenceScore=5.11e-01
SDFFSPAAACTAAMDCSFQDRHQPPPTVSVLPTFTASYDQPQPQPQPQPHPAAPGFDCLSEVYGAAAAFGGNNVADYGAEMGFLDVIEPKAALAEGGLGVCKVEPG

SEQ ID NO: 102392 - protein, 246 aa, Setaria italica
  Transcript Sequence Number=SeqID_36418
  Subcellular localization annotation: CTP_CleavageSite=82; ConfidenceScore=5.30e-01
PPKSKINSVSSGSDTVKDVVPAVTAFREDASGSVERKNFLPNPQIIPSSSFGGPASNFTKPSALRMPSPSVGFFTQENAHVSYGNAAKRNVGNTSSVVKPPRYKQPEDLNGRVHITKPLSTNCTAASNVPPVIRESNPNTLVAPEKEFSSKFITSKYSAKSEYANNQERSDVNCLLAGIGATIQPPNPAKNDAARYSTPIVYSDTSHVERRDISKEVESFENSYPLKGVCPSTIEPVEDSSFKSTC

SEQ ID NO: 102393 - protein, 113 aa, Setaria italica
  Transcript Sequence Number=SeqID_36419
REELHIRVMDNHAEDGPLRWISFAALEEFYLPLIPEPVELHKLRRKKKREEHSVSAYVTHSMVTLEKKLMTWIRCRELDRFYKPRQQDVFLLDNKLRHGPEHRQSRTATSNKR

SEQ ID NO: 102394 - protein, 143 aa, Setaria italica
  Transcript Sequence Number=SeqID_36420
LDNTISPPLLHLHASYQLVLITTKIINNEQTNKITNSRFNPQRLSDHDGHDTSTATPSCSARAPAGGGRTLLLPLLGEPRMLERGRGGEPVPGLDGEQAGKDLLRARRTAPAGPGTPASRRTPSALLAERAPQLRHPRRAWRR

SEQ ID NO: 102395 - protein, 67 aa, Setaria italica
  Transcript Sequence Number=SeqID_36421
LLYTFASEGCISTLNYCIPSPSYYRAGEEEEANADLIRTSTVVVGIHASSFSPIVGTNSSKKKQTPG

SEQ ID NO: 102396 - protein, 62 aa, Setaria italica
  Transcript Sequence Number=SeqID_36422
MRSRGSSDRLEALSLEIERKLQKALVSNSQRPQILQQLFADIALKVDDRARDAIMSENDDGI

SEQ ID NO: 102397 - protein, 62 aa, Setaria italica
  Transcript Sequence Number=SeqID_36423
ALPGYLVYIVIILQCKNTILWRLHLLEVNPAGVLFLHSAEFLGRVSYRPMDVMLAPTFIYKK

SEQ ID NO: 102398 - protein, 75 aa, Setaria italica
  Transcript Sequence Number=SeqID_36424
KSLKGPTTHIDDDGLTEYTQNYHNPATQLVTKANVQYRGSPRTALSVVYPSQSQKIRAVQTNAEVSWTVGENQHS

SEQ ID NO: 102399 - protein, 270 aa, Setaria italica
  misc_feature (201)..(201): Xaa can be any naturally occurring amino acid
  Transcript Sequence Number=SeqID_36425
  Gene Ontology: Mol. function=ATPase activity, coupled to transmembrane movement of substances; Cellular component=proton -transporting two-sector ATPase complex; Biological process=proton transport
  Homolog annotation: Hit_ID=Q9XGM1; Match level="QueryCoverage=100%, HitCoverage=100%, E-value=3e-99, Identity=69%"; Hit description=V -type proton ATPase subunit D
  Pfam annotation: Domain name=ATP-synt_D; Domain location=15-219; Score=290.1; E_value=4.9e-84; Accession=PF01813.9; Description=ATP synthase subunit D
  Pfam annotation: Domain name=DUF1657; Domain location=140-190; Score =4.2; E_value=0.045; Accession=PF07870.3; Description=Protein of unknown function (DUF1657)
  Pfam module annotation: Pfam domain module=ATP-synt_D::DUF1657; Domain location=15-219::140-190
MAGQNQRLNVVPTVTMLGVMKARLVGATRGHALLKKKSDALTVQFRAILKKIVAAKESMGETMRASSFSLAEAKYVAGDGVRHVVLQSVRAASVRVRSHQENVAGVKLPKFTHFVDPAAASGGPSNASPSLTGLARGGQQVAACRAAHVKAIEVLVELASLQTSFLTLDEAIKTTNRRVNALENVVKPRIENTISYIKGEXLDELEREDFFRLKKIQGYKKREIERQRANAKLFAEEQLAEDLALKRGISVGAAANLLVAGGEKDDDIIF

SEQ ID NO: 102400 - protein, 56 aa, Setaria italica
  Transcript Sequence Number=SeqID_36426
FPSPFVTLDFLTLPKPNCLSHNLAPSQDESGWMSSCLVQLRGPSSQFLSAFGALNE

SEQ ID NO: 102401 - protein, 57 aa, Setaria italica
  Transcript Sequence Number=SeqID_36427
VHWILFNSWRPAAIVMNPIWRHGQWSLRWCTSSVSSLTSEQCVLFIPPNWCSNCGTT

SEQ ID NO: 102402 - protein, 61 aa, Setaria italica
  Transcript Sequence Number=SeqID_36428
  Subcellular localization annotation: CTP_CleavageSite=30; ConfidenceScore=5.22e-01
TLFLSLHADPASRHLLQSPGTLISLIVQARAHASRSSSAKPPPPPCRFATSMRRPLPSTPH

SEQ ID NO: 102403 - protein, 144 aa, Setaria italica
  misc_feature (45)..(45): Xaa can be any naturally occurring amino acid
  Transcript Sequence Number=SeqID_36429
  Subcellular localization annotation: CTP_CleavageSite=52; ConfidenceScore=5.24e-01
RRQRDNWNHLLLHSTNSLTLAASVMAALAPAAPGTVGALKASAGXLLATAAVTMAAVNRIQPSQLAEEQRNATRLWRQLERDVRADLDGHHRTAPITEADVQDAMDRVLALDAAYPLPLLPGMLDKFPKAVEPARWWPRRRPQQ

SEQ ID NO: 102404 - protein, 71 aa, Setaria italica
  Transcript Sequence Number=SeqID_36430
FDSTVFRNLLSSLLVLCLNFSFLFGFRSETCRGIWHWRDENFFDPSISILKEVLISPVPDSSASAAYDHSH

SEQ ID NO: 102405 - protein, 63 aa, Setaria italica
  Transcript Sequence Number=SeqID_36431
IALANTEVGTCCVISSAGIYCLMYHAFSFCEFPLPAKKRIAIRRELMITSKTSSLQCKICMQT

SEQ ID NO: 102406 - protein, 156 aa, Setaria italica
  misc_feature (76)..(76): Xaa can be any naturally occurring amino acid
  Transcript Sequence Number=SeqID_36432
  Gene Ontology: Biological process=intracellular signaling cascade
  Homolog annotation: Hit_ID=Q69T67; Match level="QueryCoverage=98%, HitCoverage=19%, E-value=5e-41, Identity=47%"; Hit description =Lustrin A-like
MDQSYMKMRWQPKHCNVYWFNARKMLEMLRGKRLVFVGDSINRNQWESMMCLLRTAIPDPSRIRETHGRKITKQKXDYNCSVEYHTTHFLVHETKARIGQKRAMTLRIDTIDQSSSRWKGADVLVFNSAHWWSHHKQIAGVNFYQEGDHVHPHLRS

SEQ ID NO: 102407 - protein, 103 aa, Setaria italica
  Transcript Sequence Number=SeqID_36433
AAGRRGAGNPMAQQQYMLMQQQQQQQQQQQQQQQQQQQMMMMNGHGHGPHGHGHHHHGHGGAGYYGYGRPPMHYPMAYPMPPHSHTDNYNIFSDENPNSCSVM

SEQ ID NO: 102408 - protein, 143 aa, Setaria italica
  Transcript Sequence Number=SeqID_36434
  Gene Ontology: Mol. function=nucleotidyltransferase activity; Cellular component=cytoplasm; Biological process=DNA replication checkpoint
  Homolog annotation: Hit_ID=B9RDG6; Match level="QueryCoverage=81%, HitCoverage=16%, E-value=2e-42, Identity=63%"; Hit description =Poly(A) polymerase cid, putative
  Pfam annotation: Domain name=PAP_assoc; Domain location=70-129; Score= 75.0; E_value=2.8e-19; Accession=PF03828.11; Description=PAP25A associated domain
GVVNETSRGTLSSYAYVLMCINFLQLREPKILPCLQAMEQTFTMNVDGTECAYFDEVHHLQDFGADNKESIAELLWAFFHYWAFDHDYRRDVISVRMGNTISKQEKNWTTRVGNDRHLMCIEDPFETGHDLGRVVDRQTLRIL

SEQ ID NO: 102409 - protein, 105 aa, Setaria italica
  Transcript Sequence Number=SeqID_36435
  Gene Ontology: Mol. function=aspartic-type endopeptidase activity; Cellular component=chromatin; Biological process=carbon utilization by fixation of carbon dioxide
  Homolog annotation: Hit_ID=Q8SA91; Match level="QueryCoverage=96%, HitCoverage=4%, E-value=2e-26, Identity=53%"; Hit description =Putative gag-pol polyprotein
  Pfam annotation: Domain name=Retrotrans_gag; Domain location=2-87; Score=5.6; E_value=0.017; Accession=PF03732.9; Description =Retrotransposon gag protein
PSVACWFQSVERKFPAMQWPLFCPLLHERFGKDQYQLLLRQLFRSKQLGSVADYIEHFSGLVDQLSAYESVPDPLFFCTRFVDGLRDDIRAVVLLHRPLDLDTDL

SEQ ID NO: 102410 - protein, 287 aa, Setaria italica
  Transcript Sequence Number=SeqID_36436
  Gene Ontology: Cellular component=integral to membrane
  Homolog annotation: Hit_ID=B6U4G5; Match level="QueryCoverage=93%, HitCoverage=91%, E-value=1e-113, Identity=78%"; Hit description=Beta- propeller domains of methanol dehydrogenase type
  Pfam annotation: Domain name=DUF477; Domain location=107-231; Score =91.9; E_value=2.3e-24; Accession=PF04536.6; Description=Protein of unknown function (DUF477)
  Subcellular localization annotation: CTP_CleavageSite=85; ConfidenceScore=5.50e-01
METLLSPSTLFTPLRGTRSVSARSTVSCAALKKQQQAAALAASASSHGYSGSGGGRSWVSFLHHGLAAAALSLAISLGPAPAPAVASEFDVLNDGPPVDSYVVDDAGVLSRVTKSDVKRLARDLEERKNIRLNFITVRKLTSKADAFEYADQVLEKWYPTIEEGSNKGIIVLVTSQKEGAITGGPAFVQAVGDQILDATVSENLPVLATDEKYNEAIFSTAKRLAAAIDGLPDTGGPSFKENKRESNFKTKEETEEKRGQFTLVVGGLLVIAFVVPMAQYYAYVSKK

SEQ ID NO: 102411 - protein, 192 aa, Setaria italica
  misc_feature (140)..(140): Xaa can be any naturally occurring amino acid
  Transcript Sequence Number=SeqID_36437
  Gene Ontology: Mol. function=2-C-methyl-D-erythritol 2,4 -cyclodiphosphate synthase activity; Cellular component=chloroplast; Biological process=isoprenoid biosynthetic process
  Homolog annotation: Hit_ID=Q0DYN3; Match level="QueryCoverage=81%, HitCoverage=57%, E-value=2e-85, Identity=97%"; Hit description=2-C -methyl-D-erythritol 2,4-cyclodiphosphate synthase
  Pfam annotation: Domain name=YgbB; Domain location=36-192; Score =306.1; E_value=7.4e-89; Accession=PF02542.8; Description=YgbB family
  Subcellular localization annotation: CTP_CleavageSite=25; ConfidenceScore=5.02e-01
FFSFFFLFFRFFFRFLVFFTLVPSVAAAPKPPALPFRVGHGFDLHRLEPDLPLIIGGINIPHDRGCEAHSDGDVLLHCVVDAILGALGLPDIGQIFPDSDPRWKGADSSVFMREAVKLMHEAGYELGNLDATLILQKPKXSPFKETIRSNLCDLLGADPSVVNLKAKTHEKVDSLGENRSIAAHTVVLLMRK

SEQ ID NO: 102412 - protein, 331 aa, Setaria italica
  Transcript Sequence Number=SeqID_36438
  Gene Ontology: Mol. function=protein binding; Cellular component =plasma membrane
  Homolog annotation: Hit_ID=Q75I37; Match level="QueryCoverage=87%, HitCoverage=61%, E-value=6e-73, Identity=47%"; Hit description =Lipase, putative, expressed
  Pfam annotation: Domain name=DUF620; Domain location=15-278; Score =624.2; E_value=1.3e-184; Accession=PF04788.4; Description=Protein of unknown function (DUF620)
AASGGEWALNKVTSMYAMGKVRMTAAELNSSDGDAHGGGGGGGSGGTGHGHRGGKKGGKGCGGEVGGFVLWQKKPELWCLELVVSGCKISAGSDGKVAWRQTPWHQSHASRGPPRPLRRSLQGLDPQLTASLFADSVCIGERSVDGEDCFVLKVEAEASSLRARNSSSVEIIRHTVWGYFSQRTGLLVQLEDSHLLQIRSSGGTGGSVFWETTMESRLGDYRAVDGVNIAHSGRTAVSLVRFGDCQDGNTRTRMEEAWDIEEVDFNIWGLSMDCFLPPSDLREGKETQDVAVVKADARPPPIRIPAVTVRVGPSQVAAVNMDDSDSLIARS

SEQ ID NO: 102413 - protein, 85 aa, Setaria italica
  misc_feature (5)..(5): Xaa can be any naturally occurring amino acid
  misc_feature (27)..(27): Xaa can be any naturally occurring amino acid
  misc_feature (84)..(84): Xaa can be any naturally occurring amino acid
  Transcript Sequence Number=SeqID_36439
  Gene Ontology: Mol. function=inositol or phosphatidylinositol phosphatase activity
  Homolog annotation: Hit_ID=Q9SYK4-2; Match level="QueryCoverage=97%, HitCoverage=7%, E-value=9e-20, Identity=54%"; Hit description =Isoform 2 of Type I inositol-1,4,5-trisphosphate 5-phosphatase 13
KAWPXGAIAKSLSLTSEEKHMASLLVXEKSYIDLRNHATVSNVCSLPAADVKHMLADHCRAKVWSITSMTFALWDARTRELLKXF

SEQ ID NO: 102414 - protein, 103 aa, Setaria italica
  misc_feature (15)..(15): Xaa can be any naturally occurring amino acid
  Transcript Sequence Number=SeqID_36440
  Homolog annotation: Hit_ID=Q53NP6; Match level="QueryCoverage=97%, HitCoverage=57%, E-value=1e-37, Identity=76%"; Hit description =Dirigent-like protein
  Pfam annotation: Domain name=Dirigent; Domain location=1-102; Score =33.5; E_value=8.7e-09; Accession=PF03018.6; Description=Dirigent -like protein
AHGGPNLTSRLLGRXQGMYVCAGKDSLSVMMAMNFVFVDGAYNGSSLAILGPNPADRKVKEMAVVGGTGVFRFAHGYCELRTRWFDARTGDATVEYSIHVRHD

SEQ ID NO: 102415 - protein, 193 aa, Setaria italica
  misc_feature (163)..(163): Xaa can be any naturally occurring amino acid
  Transcript Sequence Number=SeqID_36441
  Gene Ontology: Mol. function=nucleotide binding; Biological process =defense response
  Homolog annotation: Hit_ID=A7YB24; Match level="QueryCoverage=100%, HitCoverage=61%, E-value=8e-27, Identity=40%"; Hit description =Putative NB-ARC domain-containing protein (Fragment)
  Pfam annotation: Domain name=LRR_1; Domain location=31-52; Score =12.3; E_value=1.3; Accession=PF00560.25; Description=Leucine Rich Repeat
  Pfam annotation: Domain name=LRR_1; Domain location=54-75; Score=8.4; E_value=7.4; Accession=PF00560.25; Description=Leucine Rich Repeat
  Pfam annotation: Domain name=LRR_1; Domain location=6-29; Score=2.2; E_value=1.2e+02; Accession=PF00560.25; Description=Leucine Rich Repeat
  Pfam module annotation: Pfam domain module=LRR_1::LRR_1::LRR_1; Domain location=31-52::54-75::6-29
SNKMSLLRILDLENTENLFDHHLEQIGKLHHLQYLSLRRCIIFYLPDSLGNLKQLQVLDIKQTMIRNLPKTIINLRKLQHIHAKNLWGGESYKEMASSFYEDVPQVLQNKACLLTLLSGIFCMLCYAPQLKGIREDAMDKRSCCTAMDKRSCCTLICCFMLPXIIRELQLYGIVLPRGFRKLRLLRTLSVVNI

SEQ ID NO: 102416 - protein, 481 aa, Setaria italica
  misc_feature (91)..(91): Xaa can be any naturally occurring amino acid
  misc_feature (193)..(193): Xaa can be any naturally occurring amino acid
  misc_feature (250)..(250): Xaa can be any naturally occurring amino acid
  Transcript Sequence Number=SeqID_36442
  Gene Ontology: Mol. function=nucleotide binding; Biological process =defense response
  Homolog annotation: Hit_ID=Q6WSR3; Match level="QueryCoverage=97%, HitCoverage=40%, E-value=6e-98, Identity=44%"; Hit description =Resistance protein T10rga2-1A
  Pfam annotation: Domain name=LRR_1; Domain location=123-144; Score =12.3; E_value=1.3; Accession=PF00560.25; Description=Leucine Rich Repeat
  Pfam annotation: Domain name=LRR_1; Domain location=146-167; Score =8.4; E_value=7.4; Accession=PF00560.25; Description=Leucine Rich Repeat
  Pfam annotation: Domain name=LRR_1; Domain location=292-312; Score =4.0; E_value=51; Accession=PF00560.25; Description=Leucine Rich Repeat
  Pfam annotation: Domain name=LRR_1; Domain location=314-335; Score =3.0; E_value=81; Accession=PF00560.25; Description=Leucine Rich Repeat
  Pfam annotation: Domain name=LRR_1; Domain location=98-121; Score =2.2; E_value=1.2e+02; Accession=PF00560.25; Description=Leucine Rich Repeat
  Pfam module annotation: Pfam domain module=LRR_1::LRR_1::LRR_1::LRR _1::LRR_1; Domain location=123-144::146-167::292-312::314-335::98-121
ILPCQESVYSRKGFDSCQVHDLMREISISKSTEENLVFRLEEGCRSNTHGTVRHLTISSNWEGDKRDFESTVDLNRIRSLTVFGKWRPFFXISNKMSLLRILDLENTENLFDHHLEQIGKLHHLQYLSLRRCIIFYLPDSLGNLKQLQVLDIKQTMIRNLPKTIINLRKLQHIHAKNLWGGESYKEMASSFYXMYHRELQLYGIVLPRGFRKLRLLRTLSVVNIAAGKGILKEIKALTQLRRLAVTGIDXKNCGEFCSTLADLRCLESLTVHSMSEPGLQGCLDGVSSPPKNLQSLKVRCNLVKLPEWIGGLNSLVKLKLKETLLSELDATIQVLGKLPNLAILRLLKRSFKGEELNLTFHREAFPSLMVLQLACIPGLRSVEFGEEATPKLELLSFIGYPSTSNARMFSGLACFVGYPSTSNAGMFSGLASLPSLKEFMLDNDKYEEDFLTHVQDQLDGNPNGPVIKSSGALVSKLDEAI

SEQ ID NO: 102417 - protein, 131 aa, Setaria italica
  Transcript Sequence Number=SeqID_36443
  Gene Ontology: Mol. function=DNA binding; Cellular component=nucleus
  Homolog annotation: Hit_ID=B6THC0; Match level="QueryCoverage=84%, HitCoverage=29%, E-value=4e-46, Identity=82%"; Hit description=AT -hook protein 1
  Pfam annotation: Domain name=DUF296; Domain location=17-131; Score =156.7; E_value=7.1e-44; Accession=PF03479.7; Description=Domain of unknown function (DUF296)
  Subcellular localization annotation: CTP_CleavageSite=55; ConfidenceScore=5.19e-01
DSAADVCKQRRFTTEMAQTFAFQDVSAKIMSFSQHGTRAVCILSANGAISNVTLRQSATSGGTVTYEGRFEILSLSGSFLLSENGGHRSRTGGLSVSLAGPDGRVLGGSVAGLLTAASPVQVRCHPHSSDY

SEQ ID NO: 102418 - protein, 341 aa, Setaria italica
  Transcript Sequence Number=SeqID_36444
  Gene Ontology: Mol. function=DNA binding; Cellular component=nucleus
  Homolog annotation: Hit_ID=B6TI42; Match level="QueryCoverage=99%, HitCoverage=89%, E-value=2e-77, Identity=58%"; Hit description=DNA binding protein
  Pfam annotation: Domain name=AT_hook; Domain location=155-167; Score =11.5; E_value=0.28; Accession=PF02178.11; Description=AT hook motif
  Pfam annotation: Domain name=AT_hook; Domain location=97-109; Score =16.7; E_value=0.035; Accession=PF02178.11; Description=AT hook motif
  Pfam annotation: Domain name=DUF296; Domain location=180-300; Score =213.5; E_value=5.4e-61; Accession=PF03479.7; Description=Domain of unknown function (DUF296)
  Pfam module annotation: Pfam domain module=AT_hook::AT_hook::DUF296; Domain location=155-167::97-109::180-300
  Subcellular localization annotation: CTP_CleavageSite=53; ConfidenceScore=5.29e-01
MMEVRPSSEQGVMPGREPFGLPKSPPTPPSSGGPPQSLRMAFTTDGTPVFAPVSSAPPATATYQPFGGAAATSLAGAGGNGGAPVHPPGGAGEPVAKKKRGRPRKYGPDGSMSLALVHTSMAAAPGSAAPGASGPFSPEGAKTPSTAPSASPDGAKKRGRPKGSTNKKHVPALGSAGAGFTPHVIFVKAGEDVSAKIMSFSQHGTRAVCILSANGAISNVTLRQSATSGGTVTYEGRFEILSLSGSFLLSENGGHRSRTGGLSVSLAGPDGRVLGGSVAGLLTAASPVQIVAGSFNTDGKKEPPKQQQQQQLAPSPSDPSPAPLKVTPAAPSSPPSRGTMS

SEQ ID NO: 102419 - protein, 231 aa, Setaria italica
  misc_feature (195)..(195): Xaa can be any naturally occurring amino acid
  misc_feature (208)..(208): Xaa can be any naturally occurring amino acid
  Transcript Sequence Number=SeqID_36445
  Gene Ontology: Mol. function=metal ion binding; Cellular component =nucleus; Biological process=regulation of transcription, DNA -dependent
  Homolog annotation: Hit_ID=A0SQ39; Match level="QueryCoverage=96%, HitCoverage=37%, E-value=1e-79, Identity=67%"; Hit description=VIL3 protein
  Pfam annotation: Domain name=fn3; Domain location=96-182; Score=42.8; E_value=1.3e-09; Accession=PF00041.13; Description=Fibronectin type III domain
IGKDARRVDNLCQRIYLSYRLLEGTSHFKELHAIVEDAKARLESEVGPLDGMSAKNARGIVSRFSAGIDVQKLCSTAIQRADEWLSSPDLHLRDSLPAACRFKFVDITPSSLVVILKETSSSDTIKGYQLWYWNSREQPSAEKPVIVPKDERKILVFNLSPCTEYSFRVISFTEDGVLGHSESRCRTNSKEIFFXKRATQNAGGTHTXKRDRSQSFKSTGFSIQGLWKRMQ

SEQ ID NO: 102420 - protein, 438 aa, Setaria italica
  Transcript Sequence Number=SeqID_36446
  Gene Ontology: Mol. function=3-dehydroquinate synthase activity; Cellular component=cytoplasm; Biological process=aromatic amino acid family biosynthetic process
  Homolog annotation: Hit_ID=B6SJH0; Match level="QueryCoverage=87%, HitCoverage=86%, E-value=0.0, Identity=90%"; Hit description=3 -dehydroquinate synthase
  Pfam annotation: Domain name=DHQ_synthase; Domain location=90-401; Score=592.0; E_value=6.6e-175; Accession=PF01761.12; Description=3 -dehydroquinate synthase
  Subcellular localization annotation: CTP_CleavageSite=46; ConfidenceScore=5.93e-01
MAASASSLLAAAVSSSCAAISSRLPRGAPAAASVPSPSRQSCSSLRASLARRQQSRFVASVAPTMQPPAESRVSTVVDVDLGDRSYPIYIGAGLLDEPDLLQRHVHGKRVLVVTNTTVAPLYLEKVSWALTHNNPNVSVESVILPDGEKYKDMDTMMKVFDKAIESRLDRRCTFVALGGGVIGDMCGFAAAAFLRGVNFIQIPTTLMAQVDSSVGGKTGINHPLGKNLIGAFYQPQCVLIDTDTLNTLPDRELASGIAEVVKYGLIRDAPFFEWQEQNMSALLAREPSALVYAIKRSCENKAEVVAQDEKESGLRATLNLGHTFGHAIETGTGYGAWLHGEAVAAGTVMAADMSHRLGWIDESIKKRTVDILAQAKLPITPPETMTVEKFKSIMAVDKKVADGLLRLILLKGPLGSCVFTGEYDRKALDETLHAFCNN

SEQ ID NO: 102421 - protein, 54 aa, Setaria italica
  Transcript Sequence Number=SeqID_36447
  Gene Ontology: Mol. function=3-dehydroquinate synthase activity; Cellular component=cytoplasm; Biological process=aromatic amino acid family biosynthetic process
  Homolog annotation: Hit_ID=B6SJH0; Match level="QueryCoverage=81%, HitCoverage=10%, E-value=1e-16, Identity=90%"; Hit description=3 -dehydroquinate synthase
MRICREPSALVYAIKRSCENKAEVVAQDEKESGLRATLNLGHTFGHVCIAIDHV

SEQ ID NO: 102422 - protein, 62 aa, Setaria italica
  Transcript Sequence Number=SeqID_36448
  Subcellular localization annotation: CTP_CleavageSite=18; ConfidenceScore=5.00e-01
PPLQLRNLVHAPVWGRTMCAAAPLPWPPLHSQPPPSSAATPHMHPRQSLAAAAATAHQCRSL

SEQ ID NO: 102423 - protein, 73 aa, Setaria italica
  Transcript Sequence Number=SeqID_36449
FGTLIRKHANGGTQMLDCELVALLFSFQSSLYAFQDYLIQPNPSLLEPAVEICIPKCCLKFVFYCKLTKIKSK

SEQ ID NO: 102424 - protein, 62 aa, Setaria italica
  Transcript Sequence Number=SeqID_36450
  Subcellular localization annotation: CTP_CleavageSite=40; ConfidenceScore=5.67e-01
SSGSFMLPPSNARTKIPRAPCLSGAAASACVHPRRSRSVRAMAAGGGSSRRRWWSGEARLVI

SEQ ID NO: 102425 - protein, 109 aa, Setaria italica
  Transcript Sequence Number=SeqID_36451
  Homolog annotation: Hit_ID=B6TYN8; Match level="QueryCoverage=53%, HitCoverage=27%, E-value=8e-09, Identity=55%"; Hit description =Ethylene-responsive factor-like protein 1
  Subcellular localization annotation: CTP_CleavageSite=10; ConfidenceScore=5.09e-01
PNDTSSSPVVASAVGARAAPPATAAQAPAVLPPPKTEAGVSEEVKELSEELMAYENYMNFLGIPYMEGGSAAAAAAPVAVEEPQAAVPTGLWSFEDYTYYPASLSLFTE

SEQ ID NO: 102426 - protein, 91 aa, Setaria italica
  Transcript Sequence Number=SeqID_36452
  Subcellular localization annotation: CTP_CleavageSite=34; ConfidenceScore=5.12e-01
PNRNKLRRPRRRTHLLSNSNPDLPRGTPASWTPTAWSGWRCSAPQAAASYTAAAGVGLPSSPQPPPRPWRAGRCRPHSRRAATPRCPDGRT

SEQ ID NO: 102427 - protein, 49 aa, Setaria italica
  Transcript Sequence Number=SeqID_36453
IEFSLSWVPTYSLSWWQHCIQIIAYLTVLVSKCYVTRMHKNSLTRQNSS

SEQ ID NO: 102428 - protein, 113 aa, Setaria italica
  Transcript Sequence Number=SeqID_36454
  Gene Ontology: Cellular component=mitochondrial intermembrane space
  Homolog annotation: Hit_ID=B6SM12; Match level="QueryCoverage=93%, HitCoverage=97%, E-value=6e-49, Identity=88%"; Hit description =Cytochrome c oxidase assembly protein COX19
  Pfam annotation: Domain name=CHCH; Domain location=24-65; Score=35.3; E_value=2.5e-07; Accession=PF06747.5; Description=CHCH domain
MSAGGAFGGNRGVRPVPPEKGVFPLDHLHECDLEKKDYLACLKSTGFQSEKCRQFSKKYLECRMERNLMAKQDMSELGFRNVYEVDTAPDKNDKLESPPNEPKGEKNSCLILM

SEQ ID NO: 102429 - protein, 70 aa, Setaria italica
  Transcript Sequence Number=SeqID_36455
  Gene Ontology: Mol. function=arginine-tRNA ligase activity; Cellular component=cytoplasm; Biological process=arginyl-tRNA aminoacylation
  Homolog annotation: Hit_ID=Q8L785; Match level="QueryCoverage=97%, HitCoverage=6%, E-value=2e-12, Identity=55%"; Hit description=Glycyl- tRNA synthetase 2, chloroplastic/mitochondrial
LVQILVENKKSFDLRRALTLMAEVQPIDIDIDVIDEAVQFVTRRLEQLLVDEGINCEIVRSVLMERANCS

SEQ ID NO: 102430 - protein, 67 aa, Setaria italica
  misc_feature (60)..(60): Xaa can be any naturally occurring amino acid
  Transcript Sequence Number=SeqID_36456
  Gene Ontology: Mol. function=transferase activity
  Homolog annotation: Hit_ID=B6TVD4; Match level="QueryCoverage=82%, HitCoverage=17%, E-value=1e-19, Identity=89%"; Hit description =Glutamine cyclotransferase
MISSMESAFVFQNIDVLNGIAWDEGNHRLFVTGKLWPKLYEIKLRPVVGPADGSVEKALXPKASFYR

SEQ ID NO: 102431 - protein, 66 aa, Setaria italica
  Transcript Sequence Number=SeqID_36457
  Gene Ontology: Mol. function=transferase activity
  Homolog annotation: Hit_ID=B6TVD4; Match level="QueryCoverage=81%, HitCoverage=17%, E-value=1e-21, Identity=90%"; Hit description =Glutamine cyclotransferase
MISSMESAFVFQNIDVLNGIAWDEGNHRLFVTGKLWPKLYEIKLRPVVGPVDGSVEKLCPKASFYR

SEQ ID NO: 102432 - protein, 151 aa, Setaria italica
  misc_feature (83)..(83): Xaa can be any naturally occurring amino acid
  Transcript Sequence Number=SeqID_36458
  Gene Ontology: Mol. function=transferase activity
  Homolog annotation: Hit_ID=B6TVD4; Match level="QueryCoverage=100%, HitCoverage=47%, E-value=3e-68, Identity=84%"; Hit description =Glutamine cyclotransferase
  Pfam annotation: Domain name=Glu_cyclase_2; Domain location=1-137; Score=-21.4; E_value=1.8e-09; Accession=PF05096.4; Description =Glutamine cyclotransferase
DGWGLATDGKVLFGSDGSSKLYQMDPKSFKVMKMVTVKYQDNEVPNINELEYIDGEVWANVWQTDCIARVSPEDGQVLSWIFXLHELRRNLLNSGYTNIDVLNGIAWDEGNHRLFVTGKLWPKLYEIKLRPVVGPADGSVEKLCPKASFYR

SEQ ID NO: 102433 - protein, 431 aa, Setaria italica
  Transcript Sequence Number=SeqID_36459
  Gene Ontology: Mol. function=arginine-tRNA ligase activity; Cellular component=cytoplasm; Biological process=arginyl-tRNA aminoacylation
  Homolog annotation: Hit_ID=B9RCZ0; Match level="QueryCoverage=100%, HitCoverage=40%, E-value=1e-168, Identity=67%"; Hit description =Glycyl-tRNA synthetase 2, chloroplast/mitochondrial, putative
  Pfam annotation: Domain name=DALR_1; Domain location=322-415; Score= -11.4; E_value=0.057; Accession=PF05746.7; Description=DALR anticodon binding domain
  Pfam annotation: Domain name=tRNA_synt_2f; Domain location=1-299; Score=104.2; E_value=4.3e-28; Accession=PF02092.9; Description =Glycyl-tRNA synthetase beta subunit
  Pfam module annotation: Pfam domain module=DALR_1::tRNA_synt_2f; Domain location=322-415::1-299
PILGQYDDSFLELPKDVLITVMQKHQKYFAVTSKSTGNLLPYFIAVANGAIKEEVVRRGNEAVLRARYEDAKFFYKMDTQKKFSEFRGQLNGILFHEKLGTMLDKMTRVENIVSELTLILGINEGMIPIIKDAAALAMSDLATSIVTEFTSLAGVMARHYALRDGIPEEIAEALFEIALPRFSGDVFPRTDAGIVLAVADRLDSLVGLFGAGCQPSSTNDPFGLRRVSYGLVQILVENKKSFDLRRALTLMAEVQPIDIDIDVIDEAVQFVTRRLEQLLVDEGINCEIVRSVLMERANCPYLAAQTATEMEAFSRTETFPKIVEAYSRPTRIIRGKEIESALEVDPSVFEKDEEKVLWDAYLEVADKIHPGVDIKTFADASLLLIQPLEDFFNNVFVMAEDERIRNNRLALLRKIESLPKGIAELSVLPGF

SEQ ID NO: 102434 - protein, 97 aa, Setaria italica
  Transcript Sequence Number=SeqID_36460
  Homolog annotation: Hit_ID=B9GL79; Match level="QueryCoverage=67%, HitCoverage=14%, E-value=2e-12, Identity=50%"; Hit description =Proline transporter (Fragment)
FAISIFTPSPPSPTTGGHTTMPSSDVEAAAADDGKQTVGAGAATAIEPKGTWWQAGFHMTTATLGPASLSLPYALRGLGWAMGLAALTAVAAVTFYA

SEQ ID NO: 102435 - protein, 270 aa, Setaria italica
  Transcript Sequence Number=SeqID_36461
  Homolog annotation: Hit_ID=O04624; Match level="QueryCoverage=98%, HitCoverage=30%, E-value=2e-96, Identity=64%"; Hit description=A _IG002N01.30 protein (Fragment)
  Pfam annotation: Domain name=DUF1713; Domain location=155-190; Score =10.1; E_value=0.06; Accession=PF08213.3; Description=Mitochondrial domain of unknown funct
  Pfam annotation: Domain name=Peptidase_C12; Domain location=2-270; Score=97.9; E_value=3.4e-26; Accession=PF01088.13; Description =Ubiquitin carboxyl-terminal hydrolase, family 1
  Pfam module annotation: Pfam domain module=DUF1713::Peptidase_C12; Domain location=155-190::2-270
DRVMSLRDLGRFRRDLGLTRKRRLIALLKRFPGVFEIVEEGVYSLKFRLTPAAERLYLDELQLKNESEGLAVTKLRKLLMMSQEKRILIEKIAHLKHDLGLPPEFRDTICLRYPQYFRIVRMDRGPGLELTHWDPELAVSAAELAEEENRAREAEERNLIIDRPLKFNRVKLPKGLKLTRGEARRIGQFKEMPYISPYADFSHLRSGSAEKEKHACGVVHEILSLTVEKRTLVDHLTHFREEFRFSQSLRGMIIRHPDMFYVSFKGIGTQ

SEQ ID NO: 102436 - protein, 103 aa, Setaria italica
  misc_feature (46)..(46): Xaa can be any naturally occurring amino acid
  Transcript Sequence Number=SeqID_36462
TVRRFSYLKTELHFTGIVFQIPNSKTGKRDKAQGINKAKAEWQLTXRCSHVLELLHLGRWPSSLLPELPLADKPLAALPQFLGELHPRPLLHDHLLLRLERHF

SEQ ID NO: 102437 - protein, 144 aa, Setaria italica
  Transcript Sequence Number=SeqID_36463
  Gene Ontology: Cellular component=ribosome
  Homolog annotation: Hit_ID=B6SM60; Match level="QueryCoverage=100%, HitCoverage=100%, E-value=2e-37, Identity=63%"; Hit description=50S ribosomal protein L40
  Subcellular localization annotation: CTP_CleavageSite=67; ConfidenceScore=5.68e-01
MALLLSPTVSFLSSPSAPRCSRGLSAAANASCPAPRLRCKSLPFLQSPLNVTATCASLAEKRLVLVHAAAEGGEAGAEQPEEPKPVTKIEEMPLESKQKMIMEQRARMKLAKKLRQRRKRLVRKRKLRKKGRWPPSKMKKLKNV

SEQ ID NO: 102438 - protein, 124 aa, Setaria italica
  Transcript Sequence Number=SeqID_36464
  Gene Ontology: Mol. function=aspartic-type endopeptidase activity; Cellular component=apoplast; Biological process=proteolysis
  Homolog annotation: Hit_ID=Q2L3E7; Match level="QueryCoverage=98%, HitCoverage=30%, E-value=1e-30, Identity=51%"; Hit description =Chloroplast nucleoid binding protein
RWGIPLDTTNYITTVGLGTPPRNLSVEIDTGSDLSWVQCKPCARCYEQQDPLYDPAQSSTHSAVPCGSRECQKVEAQRCAADDKCRYDITYADKSHTNGTVVRDALTLAVSHALPGFVFGCGHD

SEQ ID NO: 102439 - protein, 176 aa, Setaria italica
  Transcript Sequence Number=SeqID_36465
  Gene Ontology: Mol. function=aspartic-type endopeptidase activity; Cellular component=apoplast; Biological process=proteolysis
  Homolog annotation: Hit_ID=Q2L3E7; Match level="QueryCoverage=91%, HitCoverage=39%, E-value=1e-53, Identity=63%"; Hit description =Chloroplast nucleoid binding protein
  Subcellular localization annotation: CTP_CleavageSite=46; ConfidenceScore=5.10e-01
GAAPAINPARASKGVSLPAHRGLSLGTGNYIVSVGLGTPRKDFSVVFDTGSDLSWVQCKPCKDCYEQQDPLFDPAQSSTYAAVPCGDPHCRGLDSSTCASGNRCRYEVVYGDQSQTDGNLVRDTLVLGPSDALQGFVFGCGDDDSGLFGKADGLVGLGRAKVSLTSQAAAKYGAGS

SEQ ID NO: 102440 - protein, 94 aa, Setaria italica
  misc_feature (21)..(21): Xaa can be any naturally occurring amino acid
  Transcript Sequence Number=SeqID_36466
  Gene Ontology: Mol. function=protein serine/threonine kinase activity; Cellular component=integral to membrane; Biological process=protein amino acid phosphorylation
  Homolog annotation: Hit_ID=Q2R4L1; Match level="QueryCoverage=91%, HitCoverage=13%, E-value=7e-34, Identity=82%"; Hit description =Protein kinase domain containing protein, expressed
  Pfam annotation: Domain name=Pkinase_Tyr; Domain location=4-94; Score= -167.4; E_value=0.013; Accession=PF07714.9; Description=Protein tyrosine kinase
MGRVNLEKGGFGDVYKGLLKXNGKQFAVKKLIVMETSRAKADFESEVKLISNVHHRNLVRLLGCSRKGSEFLLVYEYMANGSLDKFLYGERHGT

SEQ ID NO: 102441 - protein, 465 aa, Setaria italica
  misc_feature (115)..(115): Xaa can be any naturally occurring amino acid
  misc_feature (432)..(432): Xaa can be any naturally occurring amino acid
  Transcript Sequence Number=SeqID_36467
  Gene Ontology: Mol. function=protein serine/threonine kinase activity; Cellular component=integral to membrane; Biological process=protein amino acid phosphorylation
  Homolog annotation: Hit_ID=Q2R4L1; Match level="QueryCoverage=96%, HitCoverage=69%, E-value=0.0, Identity=75%"; Hit description=Protein kinase domain containing protein, expressed
  Pfam annotation: Domain name=DUF26; Domain location=12-63; Score =58.6; E_value=2.4e-14; Accession=PF01657.9; Description=Domain of unknown function DUF26
  Pfam annotation: Domain name=Pkinase; Domain location=147-394; Score =164.3; E_value=3.7e-46; Accession=PF00069.17; Description=Protein kinase domain
  Pfam annotation: Domain name=Pkinase_Tyr; Domain location=147-418; Score=144.7; E_value=2.9e-40; Accession=PF07714.9; Description =Protein tyrosine kinase
  Pfam module annotation: Pfam domain module=DUF26::Pkinase::Pkinase _Tyr; Domain location=12-63::147-394::147-418
TYDRRTAARGGVYAAAQCVETVGEAGCAQCLKVAVGNIDGCPPNSDGRAVDAGCYMRYSDRPFFPANATVDLAVYLRSGKKSSQKGAIIGGILGGVAFLSLVGLLTFLLIHRSRXLKPRRGDILGATELQGPTSFYYRDLKAATYNFNEKSKLGEGGFGDVYKGLLKNGKTVAVKKLIVMETSRAKADFESEVKLISNVHHRNLVRLLGCSRKGSEFLLVYEYMANGSLDKFLYGERHGTLNWRQRFNIIVGMARGLAYLHQEFHVCIIHRDIKSSNVLLDDDFQPKIADFGLARLLPDDHSHLSTKFAGTLGYTAPEYAIHGQLSEKVDTYSFGVVVLEILSGRKSNDTRLEPETQYLLEWAWKLYESDNLMALVDESLDPEEYKPEEVKRIMEIALLCTQSAVAARPMMSEVVVLLLTRNDPELQPTRPXLLDATSRVRGETSSSSSSSASKATVSVSQFSAR

SEQ ID NO: 102442 - protein, 129 aa, Setaria italica
  Transcript Sequence Number=SeqID_36468
  Gene Ontology: Mol. function=oxidoreductase activity; Cellular component=mitochondrial matrix; Biological process=oxidation reduction
  Homolog annotation: Hit_ID=Q8LST5; Match level="QueryCoverage=95%, HitCoverage=22%, E-value=1e-64, Identity=95%"; Hit description =Mitochondrial aldehyde dehydrogenase
  Pfam annotation: Domain name=Aldedh; Domain location=2-127; Score= -265.7; E_value=3.7e-05; Accession=PF00171.14; Description=Aldehyde dehydrogenase family
TRTTSTAGAEVPMLARCMRYYAGWADKIHGLVVPADGAHHVQVLHEPVGVAGQIIPWNFPLLMFAWKVGPALACGNAVVLKTAEQTPLSALYVASLLHEAGLPDGVLNVVSGFGPTAGAALCSHMGVDK

SEQ ID NO: 102443 - protein, 326 aa, Setaria italica
  Transcript Sequence Number=SeqID_36469
  Gene Ontology: Mol. function=oxidoreductase activity; Cellular component=mitochondrial matrix; Biological process=oxidation reduction
  Homolog annotation: Hit_ID=Q8LST5; Match level="QueryCoverage=99%, HitCoverage=58%, E-value=1e-180, Identity=94%"; Hit description =Mitochondrial aldehyde dehydrogenase
  Pfam annotation: Domain name=Aldedh; Domain location=1-316; Score =416.2; E_value=5.5e-122; Accession=PF00171.14; Description=Aldehyde dehydrogenase family
TWKVGPALACGNAVVLKTAEQTPLSALYVASLLHEAGLPDGVLNVVSGFGPTAGAALCSHMGVDKLAFTGSTGTGQIVLELAARSNLKPVTLELGGKSPFIVMDDADVDQAVELAHHAVFFNQGQCCCAGSRTFVHERVYDEFVEKSKARAQKRVVGDPFRNGVEQGPQIDEEQFKKILRYVQSGVDSGATLVAGGDRAGSRGFYIQPTVFADAKDEMKIAREEIFGPVQTILKFSGVEEVIRRANATQYGLAAGVFTRSLDAANTLSRALRAGTVWVNCYDVFDAGIPFGGYKMSGVGREKGVYALRNYLQTKAVVTPIRNAAWL

SEQ ID NO: 102444 - protein, 84 aa, Setaria italica
  Transcript Sequence Number=SeqID_36470
  Gene Ontology: Mol. function=protein serine/threonine kinase activity; Biological process=protein amino acid phosphorylation
  Homolog annotation: Hit_ID=Q53QC7; Match level="QueryCoverage=100%, HitCoverage=11%, E-value=2e-16, Identity=51%"; Hit description =Protein kinase domain containing protein, expressed
TTCTSLDEAASAGNSNGCTGLGCCQILTPSDLNVIDVDWSTHNNSAWTYSPCGYALVAEKGWYKFSLNDLNGTGEMAFNVRVGD

SEQ ID NO: 102445 - protein, 105 aa, Setaria italica
  Transcript Sequence Number=SeqID_36471
  Gene Ontology: Mol. function=protein serine/threonine kinase activity; Biological process=protein amino acid phosphorylation
  Homolog annotation: Hit_ID=Q53QC7; Match level="QueryCoverage=99%, HitCoverage=15%, E-value=4e-25, Identity=51%"; Hit description =Protein kinase domain containing protein, expressed
  Subcellular localization annotation: CTP_CleavageSite=18; ConfidenceScore=5.09e-01
PPFGLSKPCSWDKFFKLSCNRSFSPPRPYLGNVEVMDITVETGEMRVYSSVAHRCFNSSKESGHRPSQRYNFTGTPFLVKPGRNEFTGIGCYNLAVLRGKEDSSY

SEQ ID NO: 102446 - protein, 258 aa, Setaria italica
  Transcript Sequence Number=SeqID_36472
  Gene Ontology: Mol. function=protein serine/threonine kinase activity; Biological process=protein amino acid phosphorylation
  Homolog annotation: Hit_ID=Q53QC7; Match level="QueryCoverage=80%, HitCoverage=29%, E-value=2e-50, Identity=46%"; Hit description =Protein kinase domain containing protein, expressed
  Subcellular localization annotation: CTP_CleavageSite=35; ConfidenceScore=5.02e-01
PGRRIQYQVAMTQLQVLWLLLSPALVLSQVPAPVVSETLRAPPPGCNTTTMCGGVTIPYPFGLSEPCSWDKFFTLSCNRSFSPPRPYLGNVEVMDITVETGEMRIYTPVSYRCFNSSKTVSVVSNSRTRFNFAGTPFLVKPGRNEFTGIGCYNLALLRGKEDSSYFSACLTTCTSLDDASTGNSNGCAGLGCCQIQLPTELNMIRVQLPEQDDNTTWNFSPCSYALVAEKGWYKFSLNDLNGTGEMAYNVRVGHRSVP

SEQ ID NO: 102447 - protein, 85 aa, Setaria italica
  Transcript Sequence Number=SeqID_36473
  Gene Ontology: Mol. function=peroxidase activity
  Subcellular localization annotation: CTP_CleavageSite=43; ConfidenceScore=5.94e-01
MGIQVAAVVTPPPCSSSPSSSSPASPSSSAITTSLRHAAPGVRLARSQSSLAGWSAGLAPRRAGQHAIRRTLSASIDSVGSDGGD

SEQ ID NO: 102448 - protein, 233 aa, Setaria italica
  Transcript Sequence Number=SeqID_36474
  Subcellular localization annotation: CTP_CleavageSite=49; ConfidenceScore=5.48e-01
MGRSRGGKGAGDSKSFPSPASSSASSSEFEFTVTLSPASKQRSAAQLCPADELFYKGQLLPLQLSPRISMVRTLLLSSASTSSASDSTSTSNSSRDSNGSTSSSFSADCAALLLPDSAASSSRPSSATEDDRHLHPLSAAASFAGLPPAKRTGKQYLSSFATRFSSVFHRGGAPAAKKQPSKSLAKEVIKKYAKKVKPLYEKLSQIPKNQNNVNVNVNGASSRPVVLTNLVRS

SEQ ID NO: 102449 - protein, 84 aa, Setaria italica
  Transcript Sequence Number=SeqID_36475
  Gene Ontology: Mol. function=calcium ion binding; Cellular component =flagellin-based flagellum; Biological process=ciliary or flagellar motility
  Homolog annotation: Hit_ID=B6UHY6; Match level="QueryCoverage=53%, HitCoverage=21%, E-value=2e-18, Identity=93%"; Hit description =Polcalcin Jun o 2
  Pfam annotation: Domain name=efhand; Domain location=37-65; Score =30.2; E_value=8.4e-06; Accession=PF00036.24; Description=EF hand
LLIVSSTPRTSIRWSWLSRIAALVRSADADAAAVEEDLRHAFMVFDADGNGLITPAELARVLRGIGEAATVAQCRRMIQGVDKN

SEQ ID NO: 102450 - protein, 193 aa, Setaria italica
  Transcript Sequence Number=SeqID_36476
  Gene Ontology: Mol. function=calcium ion binding; Cellular component =flagellin-based flagellum; Biological process=ciliary or flagellar motility
  Homolog annotation: Hit_ID=B6UHY6; Match level="QueryCoverage=71%, HitCoverage=67%, E-value=5e-57, Identity=80%"; Hit description =Polcalcin Jun o 2
  Pfam annotation: Domain name=efhand; Domain location=120-148; Score =30.2; E_value=8.4e-06; Accession=PF00036.24; Description=EF hand
  Pfam annotation: Domain name=efhand; Domain location=156-184; Score =34.8; E_value=3.4e-07; Accession=PF00036.24; Description=EF hand
  Pfam annotation: Domain name=efhand; Domain location=46-74; Score =36.1; E_value=1.4e-07; Accession=PF00036.24; Description=EF hand
  Pfam annotation: Domain name=efhand; Domain location=82-110; Score =32.4; E_value=1.8e-06; Accession=PF00036.24; Description=EF hand
  Pfam module annotation: Pfam domain module=efhand::efhand::efhand::efh and; Domain location=120-148::156-184::46-74::82-110
  Subcellular localization annotation: CTP_CleavageSite=28; ConfidenceScore=5.66e-01
KVRSFFSRSGKRAGGGGSFRAGTSSSPRSSSPSPRNAAGAPREQDEMERVFRKFDADGDGQISRSELAALFESVGHAATDDEVSRMMEEADADGDGCISLPEFAALVRSADADAAAVEEDLRHAFMVFDADGNGLITPAELARVLRGIGEAATVAQCRRMIQGVDKNGDGLVSFDEFKLMMAAGGSFGRIAYS

SEQ ID NO: 102451 - protein, 213 aa, Setaria italica
  misc_feature (130)..(130): Xaa can be any naturally occurring amino acid
  Transcript Sequence Number=SeqID_36477
  Gene Ontology: Mol. function=calcium ion binding; Cellular component =flagellin-based flagellum; Biological process=ciliary or flagellar motility
  Homolog annotation: Hit_ID=B6UHY6; Match level="QueryCoverage=68%, HitCoverage=67%, E-value=1e-60, Identity=82%"; Hit description =Polcalcin Jun o 2
  Pfam annotation: Domain name=efhand; Domain location=140-168; Score =30.2; E_value=8.4e-06; Accession=PF00036.24; Description=EF hand
  Pfam annotation: Domain name=efhand; Domain location=176-204; Score =34.8; E_value=3.4e-07; Accession=PF00036.24; Description=EF hand
  Pfam annotation: Domain name=efhand; Domain location=59-87; Score =36.1; E_value=1.4e-07; Accession=PF00036.24; Description=EF hand
  Pfam annotation: Domain name=efhand; Domain location=95-123; Score =32.4; E_value=1.8e-06; Accession=PF00036.24; Description=EF hand
  Pfam module annotation: Pfam domain module=efhand::efhand::efhand::efh and; Domain location=140-168::176-204::59-87::95-123
  Subcellular localization annotation: CTP_CleavageSite=48; ConfidenceScore=5.80e-01
MGKVRSFFSRSGKRAGGGGSFRAGTSSSPRSSSAAASAPPSSSSPSPRNAAGAPREQDEMERVFRKFDADGDGQISRSELAALFESVGHAATDDEVSRMMEEADADGDGCISLPEFAALVRSADADAAAXPYVRPPVGEDLRHAFMVFDADGNGLITPAELARVLRGIGEAATVAQCRRMIQGVDKNGDGLVSFDEFKLMMAAGGSFGRIAYS

SEQ ID NO: 102452 - protein, 106 aa, Setaria italica
  Transcript Sequence Number=SeqID_36478
  Gene Ontology: Mol. function=protein serine/threonine kinase activity; Cellular component=myosin complex; Biological process =protein amino acid phosphorylation
  Homolog annotation: Hit_ID=Q7X8K7; Match level="QueryCoverage=69%, HitCoverage=7%, E-value=2e-33, Identity=83%"; Hit description=CTR1 -like kinase kinase kinase
  Pfam annotation: Domain name=Pkinase_Tyr; Domain location=1-106; Score=-163.7; E_value=0.0076; Accession=PF07714.9; Description =Protein tyrosine kinase
VNLCYLFVYHFKSCSWFKCYVKSLLNNCADVQAEWMAPEVLRNEPSDEKCDVFSYGVILWELCTLLQPWEGMNAMQVVGAVGFQNRRLDIPDNIDPAIAEIIVNCW

SEQ ID NO: 102453 - protein, 521 aa, Setaria italica
  Transcript Sequence Number=SeqID_36479
  Gene Ontology: Mol. function=protein serine/threonine kinase activity; Cellular component=plasma membrane; Biological process =protein amino acid phosphorylation
  Homolog annotation: Hit_ID=Q1SMZ9; Match level="QueryCoverage=96%, HitCoverage=46%, E-value=1e-138, Identity=55%"; Hit description =Protein kinase
  Pfam annotation: Domain name=APH; Domain location=313-493; Score= -18.8; E_value=0.053; Accession=PF01636.15; Description =Phosphotransferase enzyme family
  Pfam annotation: Domain name=Pkinase; Domain location=311-520; Score =172.4; E_value=1.3e-48; Accession=PF00069.17; Description=Protein kinase domain
  Pfam annotation: Domain name=Pkinase_Tyr; Domain location=311-521; Score=143.6; E_value=6.1e-40; Accession=PF07714.9; Description =Protein tyrosine kinase
  Pfam module annotation: Pfam domain module=APH::Pkinase::Pkinase_Tyr; Domain location=313-493::311-520::311-521
DSSSSSPSTSDMGSTPAFRRMKVKDISEYMINAAKENPQLVQKIHEVLRENGVVAPPDLFSEDSMEEPKDLIVYDTALFQSKDEMKRTMNEFESRTYTDSGHAPSLPHHPGHELQPKVVPHRVPLESLKPVEGLGVYHPHDIRDIASPFVSQYEPSAPPQEAPAPLTKQLPVTAAAVATAAVVASSMVVAAAKSNSDVNFDVPVAAAATVTAAAVVATTAAVSKQYEHLEPGNQLLNLSSPSKGNESVEKGGDDFWDKDNLEADHPQDNALDQEIPQEAERTSDKSSGTESAKSDLALEDVAEFEIQWEEIVIGERIGLGSFGEVYRGEWHGTEVAVKKFLQQDLSGDALEEFRTEVRIMKRLRHPNVVLFMGAITRVPNLSIVTEFLPRGSLFRLIHRPNNQLDERKRLRMALDVARGMNYLHNCSPVIVHRDLKSPNLLVDKNWVVKVCDFGLSRMKNKTFLSSRSTAGTAEWMAPEVLRNEPSDEKCDVFSYGVILWELCTLLQPWEGMNAMQVVGAR

SEQ ID NO: 102454 - protein, 174 aa, Setaria italica
  Transcript Sequence Number=SeqID_36480
  Gene Ontology: Mol. function=protein serine/threonine kinase activity; Cellular component=plasma membrane; Biological process =protein amino acid phosphorylation
  Homolog annotation: Hit_ID=B9T2M6; Match level="QueryCoverage=93%, HitCoverage=85%, E-value=9e-78, Identity=83%"; Hit description=Map3k delta-1 protein kinase, putative
  Pfam annotation: Domain name=Pkinase; Domain location=1-152; Score= -9.6; E_value=6.4e-08; Accession=PF00069.17; Description=Protein kinase domain
  Pfam annotation: Domain name=Pkinase_Tyr; Domain location=3-152; Score=-24.4; E_value=4.2e-12; Accession=PF07714.9; Description =Protein tyrosine kinase
  Pfam module annotation: Pfam domain module=Pkinase::Pkinase_Tyr; Domain location=1-152::3-152
TGNKLPLGMNYLHNCSPVIVHRDLKSPNLLVDKNWVVKVCDFGLSRMKNKTFLSSRSTAGTAEWMAPEVLRNEPSDEKCDVFSYGVILWELCTLLQPWEGMNAMQVVGAVGFQNRRLDIPDNIDPAIAEIIVNCWHTDPKLRPSFADIMATLKPLLKNLTSNQAPRQTAQQTDQ

SEQ ID NO: 102455 - protein, 57 aa, Setaria italica
  Transcript Sequence Number=SeqID_36481
WIIPMTLVFVPCRRLVVLVARLQELEECIMRPRPPPPPPDSLAWGRVGGLHAMSIMM

SEQ ID NO: 102456 - protein, 38 aa, Setaria italica
  Transcript Sequence Number=SeqID_36482
INGFISFREQQAIYTGYLNKLRQWKDFKCVIIDILMSQ

SEQ ID NO: 102457 - protein, 513 aa, Setaria italica
  misc_feature (14)..(14): Xaa can be any naturally occurring amino acid
  Transcript Sequence Number=SeqID_36483
  Gene Ontology: Mol. function=RNA binding; Cellular component =ribonucleoprotein complex; Biological process=regulation of translation
  Homolog annotation: Hit_ID=Q9FYT6; Match level="QueryCoverage=99%, HitCoverage=67%, E-value=0.0, Identity=84%"; Hit description =Chloroplastic group IIA intron splicing facilitator CRS1, chloroplastic
  Pfam annotation: Domain name=CRS1_YhbY; Domain location=148-232; Score=50.5; E_value=6.5e-12; Accession=PF01985.13; Description=CRS1 YhbY domain
  Pfam annotation: Domain name=CRS1_YhbY; Domain location=360-447; Score=129.3; E_value=1.2e-35; Accession=PF01985.13; Description=CRS1 YhbY domain
  Pfam module annotation: Pfam domain module=CRS1_YhbY::CRS1_YhbY; Domain location=148-232::360-447
EIKTGGLVIWTKGXDIHFVYRGSNYQQNMKHSQYSLASVQNVSPVKYNVHRAQIKYGNEGEVLTDGNSKGDDVIQENDQSVCGQKDEEPIKGTLYEREVNRLLDSLGPRFVDWWWNTPLPVDADLLPEFVPGFKTPFRQCPPGVRPTLADEELTYLRKLARPLPTHFALGRNSRLQGLAAAILKLWEKSLIAKIAVKVGIQNTNNEQMAWNLKHLTGGTVILRNKDFIILYRGKDFLPGGVAQTVIQREAQVHDEQVKEEEARLKAVDSLQMVGGLSSEESSVGTFREYQDFQADHVHENTENSNIIELEAEKHRLEKELKDQEWKLSILNKKIEGSNQALAKLHSSWSPSEQSADRELLTEEEKAMFRRIGRKMDGLVLLGRRGIFDGVIEEIHQHWKHKEVVKVITKQNQARQIMYTANLLEVETGGILIAVEKLTTSHAIILYRGKNYRRPEKSSSSNLLTKREALQRSIEVQRRGSMKYFARERQKSILELKRKLRYVARQIKYRTPRS

SEQ ID NO: 102458 - protein, 100 aa, Setaria italica
  Transcript Sequence Number=SeqID_36484
  Gene Ontology: Mol. function=zinc ion binding; Cellular component =intracellular
  Homolog annotation: Hit_ID=B6TSV8; Match level="QueryCoverage=36%, HitCoverage=13%, E-value=2e-11, Identity=94%"; Hit description=Salt tolerance-like protein
AILCADCDDPIHSANDLTAKHSRFLLVGAKLSAALVDQSLPSPDDCGRGNGTGEPDGVAAAICAQDSCTAKSSALDCSNSYAVGAAAAAASSDYLNKHLR

SEQ ID NO: 102459 - protein, 139 aa, Setaria italica
  Transcript Sequence Number=SeqID_36485
  Homolog annotation: Hit_ID=Q9M7X1; Match level="QueryCoverage=79%, HitCoverage=15%, E-value=6e-39, Identity=65%"; Hit description =MJK13.4 protein
SLCSSPPPTPTPKPPSSERKNHLQWHWGEGPLGAIIGRYPSAADEQDPGGGVIRHDRKCRDWPFLLLFAAFWVAMIVNSSFGFNQGNPLRLTFGLDYKGNICGSKHAVPDLRELDVRYWMNPNQVYQSGLKSSRINLPD

SEQ ID NO: 102460 - protein, 44 aa, Setaria italica
  Transcript Sequence Number=SeqID_36486
ECNLISQKTQSIQYIISIRITCQVLTQLLTSKHSISQQKITFDF

SEQ ID NO: 102461 - protein, 120 aa, Setaria italica
  Transcript Sequence Number=SeqID_36487
  Gene Ontology: Mol. function=protein serine/threonine kinase activity; Cellular component=integral to membrane; Biological process=protein amino acid phosphorylation
  Homolog annotation: Hit_ID=B9R6R4; Match level="QueryCoverage=100%, HitCoverage=26%, E-value=7e-30, Identity=39%"; Hit description =Receptor protein kinase CLAVATA1, putative
  Pfam annotation: Domain name=LRR_1; Domain location=27-49; Score=8.2; E_value=8; Accession=PF00560.25; Description=Leucine Rich Repeat
  Pfam annotation: Domain name=LRR_1; Domain location=51-73; Score=7.1; E_value=14; Accession=PF00560.25; Description=Leucine Rich Repeat
  Pfam annotation: Domain name=LRR_1; Domain location=75-97; Score=6.2; E_value=20; Accession=PF00560.25; Description=Leucine Rich Repeat
  Pfam annotation: Domain name=LRR_1; Domain location=99-118; Score =7.8; E_value=9.8; Accession=PF00560.25; Description=Leucine Rich Repeat
  Pfam module annotation: Pfam domain module=LRR_1::LRR_1::LRR_1::LRR _1; Domain location=27-49::51-73::75-97::99-118
QGTMLKLLILENSFSGGIPATYASCKTLVRFRVSKNRLTGEVPDGLWALPNVNVLDLAENQFNGSIGGGIGNATAMTYLMLAGNRFAGAIPPSIGNAASLESMDVSWNELSGELPESSGR

SEQ ID NO: 102462 - protein, 115 aa, Setaria italica
  Transcript Sequence Number=SeqID_36488
  Subcellular localization annotation: CTP_CleavageSite=22; ConfidenceScore=5.14e-01
MSLGRISRCGGRMGFRGYKFLRKMSSGTQSEGSHQPASKRAVNSCRKNVPGTSFVSDLRDHVHEFIHASADEHRTCFTKTIKKMFGMSKIVAEKSAKVEEAGPESVLPLQTTVSQ

SEQ ID NO: 102463 - protein, 76 aa, Setaria italica
  Transcript Sequence Number=SeqID_36489
LSIIQGSGSRAPVFSKPGDSNKQIQDQEEERKMKSQQELLIHMHAGSRRVCWDDDPFLVRGYIFLQQAARRGQNHG

SEQ ID NO: 102464 - protein, 56 aa, Setaria italica
  Transcript Sequence Number=SeqID_36490
  Gene Ontology: Mol. function=structural constituent of ribosome; Cellular component=intracellular; Biological process=translation
  Homolog annotation: Hit_ID=Q3KN73; Match level="QueryCoverage=89%, HitCoverage=39%, E-value=3e-12, Identity=70%"; Hit description =Ubiquitin-60S ribosomal L40 fusion protein
  Pfam annotation: Domain name=Ribosomal_L40e; Domain location=1-52; Score=70.0; E_value=8.6e-18; Accession=PF01020.9; Description =Ribosomal L40e family
RIDLNLLQLALKYRQHKMICRKCYARNSSRAENCRKKKCGHTSELRPKKKLDAKRE

SEQ ID NO: 102465 - protein, 140 aa, Setaria italica
  Transcript Sequence Number=SeqID_36491
  Gene Ontology: Mol. function=structural constituent of ribosome; Cellular component=intracellular; Biological process=protein modification process
  Homolog annotation: Hit_ID=Q3KN73; Match level="QueryCoverage=96%, HitCoverage=99%, E-value=2e-51, Identity=77%"; Hit description =Ubiquitin-60S ribosomal L40 fusion protein
  Pfam annotation: Domain name=Ribosomal_L40e; Domain location=85-136; Score=70.3; E_value=7e-18; Accession=PF01020.9; Description =Ribosomal L40e family
  Pfam annotation: Domain name=ubiquitin; Domain location=6-74; Score =136.5; E_value=8.4e-38; Accession=PF00240.15; Description=Ubiquitin family
  Pfam module annotation: Pfam domain module=Ribosomal_L40e::ubiquitin; Domain location=85-136::6-74
MQIFVKTLTGKTVTLEVESSDTITNVKAKIQDKEGIPPDQQRLIFAGKQLEDERTLADYNIQKESTLHLVLRLRGGGGKGGSYPKIDLNLLQLALKYRQHKMICRKCYARNSIRAENCRKKKCGHTSELRPKKKLDAKRE

SEQ ID NO: 102466 - protein, 84 aa, Setaria italica
  Transcript Sequence Number=SeqID_36492
VYRELIPLNPGLTEHDPNNPMLGLMLDVIWSVVKGILHRKPDHAYWPRPLVLERTVGGHIELPLVVWGVQGWHELSQLSPASDL

SEQ ID NO: 102467 - protein, 160 aa, Setaria italica
  Transcript Sequence Number=SeqID_36493
PPPSPRRGEMGTAGAQESPSESGRLIGKLEGLRIADPHSTLSPRHKGKENKDESGRFSALSSCDSPRQDDSDDYPFFCDDVDTPHCDNFPAYRSSDGKEKGDQAGPSSHKSQDAQVGSLVNLLRNARPLRDPCYSLQTSRAESSEAASASSVTPRRTLLY

SEQ ID NO: 102468 - protein, 226 aa, Setaria italica
  Transcript Sequence Number=SeqID_36494
SPPHFPGGYLQSRRLFRGESAPVPIPQGGERRSPVHRQNTLPPPSPRRGEMGTAGAQESPSESGRLIGKLEGLRIADPHSTLSPRHKGKENKDESGRFSALSSCDSPRQDDSDDYPFFCDDVDTPVSQPGSSDGKEKGDQAGPSSHKSQDAQVGSLVNLLRNARPLRDPCYSLQTSRAESSEAASASSVTPRRTSDALEELQSFKEIRERLLSRSSAKHQEPPGKP

SEQ ID NO: 102469 - protein, 69 aa, Setaria italica
  Transcript Sequence Number=SeqID_36495
  Homolog annotation: Hit_ID=A9ZPI1; Match level="QueryCoverage=46%, HitCoverage=58%, E-value=7e-11, Identity=93%"; Hit description =Cysteine-rich peptide
MYNAPPPQDMSYYDHCQRRHEEKGCLYACIFTALCCFCCYETCECCLDCLCCCCNEAALAGLVAAEAAQ

SEQ ID NO: 102470 - protein, 134 aa, Setaria italica
  Transcript Sequence Number=SeqID_36496
LCFLSFVSVLTFHENKIRGDETTLALLLLLLLLLLHFFSSSSPAGQARCTTPHPRRRCPTTTMCRGATRRRAASTHASSRRCAASAATRPASAASTASAAAATRPPPACSSTRPDGDEEVSVACLIALLWLRRT

SEQ ID NO: 102471 - protein, 313 aa, Setaria italica
  misc_feature (141)..(141): Xaa can be any naturally occurring amino acid
  Transcript Sequence Number=SeqID_36497
  Gene Ontology: Cellular component=cell wall
  Homolog annotation: Hit_ID=B6TEA9; Match level="QueryCoverage=92%, HitCoverage=91%, E-value=1e-144, Identity=87%"; Hit description=Phi -1-like phosphate-induced protein
  Pfam annotation: Domain name=Phi_1; Domain location=39-313; Score =566.9; E_value=2.3e-167; Accession=PF04674.4; Description=Phosphate -induced protein 1 conserved region
MACSTASLAATLLAFALLFQACLAGRRLTALVQEPAITMKYHRGALLSGRIAVNFIWYGNFSAPQRAVITDFVSSLSAPPAAAGQPEPSVATWFKTARKYYANSKARFPALYVGTHVLDSSYSLGKRLTDGDLLKLAAKGXAPSRAINVVLTADDVAVDGFCMSRCGTHGASPRSRSGRFAYVWVGNPASQCPGQCAWPFHQPVYGPQAAPLTPPNGDVGADGMVISLASMIVGTVTNPFGNGFYQEGSADAPLEAATACAGVYGKGAYPGYAGSLLVDQASGASFNANGAHGRRYLVPALVDPDTSSCATLG

SEQ ID NO: 102472 - protein, 184 aa, Setaria italica
  Transcript Sequence Number=SeqID_36498
  Pfam annotation: Domain name=DUF623; Domain location=87-146; Score =117.9; E_value=3.3e-32; Accession=PF04844.5; Description=Protein of unknown function, DUF623
THRVVCASDDSPSTESEPSAADDMADAIVRGLRSDDRLLFEPQAPSSSILERKPPGPATRRATAAAGHAEDASSSSFGDGVAVAFDSADPYRDFRASMEEMVSAHGVGDWEWLERMLAWYLGANGRDTHPAIVTAFVDLVVSMAASASACTCSSSSRVSSFTLARSEPGESSSAGGGHFSFGLR

SEQ ID NO: 102473 - protein, 88 aa, Setaria italica
  Transcript Sequence Number=SeqID_36499
AALTPKSVVNESRYDSFLLFPLLDLPNGSVIDSSVLMGWWSIFKTAHTHIQSKILASCLLYLPPIYLFKCSPSPAWGFLHTHIFQPKP

SEQ ID NO: 102474 - protein, 74 aa, Setaria italica
  Transcript Sequence Number=SeqID_36500
FCQYHGIPETTHQDTATQSTTGGIVAVLMTQASDILASKGDWLILLVRRRDSDSGYYSYVCVLKFIQVIDHWLL

SEQ ID NO: 102475 - protein, 81 aa, Setaria italica
  Transcript Sequence Number=SeqID_36501
  Gene Ontology: Biological process=protein transport
  Homolog annotation: Hit_ID=B9SV62; Match level="QueryCoverage=98%, HitCoverage=19%, E-value=2e-32, Identity=86%"; Hit description =Charged multivesicular body protein 2b-B, putative
MNIFKKKVDPKEALRTSKREMAVATRGVEREIGSLQMEEKKLVAEIKKTAKTGNEAATKILARQLVRLRQQILNLQGTQGI

SEQ ID NO: 102476 - protein, 38 aa, Setaria italica
  Transcript Sequence Number=SeqID_36502
  Gene Ontology: Cellular component=integral to membrane
  Homolog annotation: Hit_ID=B6UH66; Match level="QueryCoverage=94%, HitCoverage=10%, E-value=7e-11, Identity=94%"; Hit description =Organic anion transporter
WWVSILIFRNPVTFVGMLGYGITVAGVVLYGEAKKRSK

SEQ ID NO: 102477 - protein, 124 aa, Setaria italica
  Transcript Sequence Number=SeqID_36503
  Gene Ontology: Mol. function=protein serine/threonine kinase activity; Biological process=regulation of transcription, DNA -dependent
  Homolog annotation: Hit_ID=Q84PC8; Match level="QueryCoverage=100%, HitCoverage=27%, E-value=9e-23, Identity=47%"; Hit description =Protein kinase-like protein (Fragment)
LYDDDGSLVGLICLSVDTQTLEDIMGPSTSTKSYSHPAKLRFQVNNRPKCSLLNKSSVDSQQPLQSSIASKITTLATKVTSRVRSRIKTGQNCNEQQSGGSESQYSEDDYKEELTSSGTDTPRG

SEQ ID NO: 102478 - protein, 76 aa, Setaria italica
  misc_feature (41)..(41): Xaa can be any naturally occurring amino acid
  Transcript Sequence Number=SeqID_36504
  Gene Ontology: Mol. function=nucleoside-triphosphatase activity
  Homolog annotation: Hit_ID=Q2R029; Match level="QueryCoverage=94%, HitCoverage=10%, E-value=1e-30, Identity=87%"; Hit description=AAA -type ATPase family protein, putative, expressed
MQEKNLAKSEGKPEPALYGSEDIRPLSIDDFKSAHEQVCAXVVFLSDSANMNELLQWNDLYGEGGSRKKKALSYFM

SEQ ID NO: 102479 - protein, 134 aa, Setaria italica
  misc_feature (66)..(66): Xaa can be any naturally occurring amino acid
  Transcript Sequence Number=SeqID_36505
  Gene Ontology: Mol. function=nucleoside-triphosphatase activity
  Homolog annotation: Hit_ID=Q2R029; Match level="QueryCoverage=96%, HitCoverage=17%, E-value=2e-62, Identity=91%"; Hit description=AAA -type ATPase family protein, putative, expressed
  Pfam annotation: Domain name=AAA; Domain location=19-134; Score=59.1; E_value=1.7e-14; Accession=PF00004.21; Description=ATPase family associated with various cellular activities (AAA)
CYQSYPGKGQKVSDCYWQTMLAKAVATEAGANFINISMSSITSKWFGEGEKYVKAVFSLASKIAPXVIFIDEVDSMLGRRENPGEHEAMRKMKNEFMVNWDGLRTKDKERVLVLGATNRPFDLDEAVIRRFPRR

SEQ ID NO: 102480 - protein, 48 aa, Setaria italica
  Transcript Sequence Number=SeqID_36506
RETWEIKTSSSCYGQYGTVTRMKGDMGNKTSSSCYGTVWYSNFFVAYS

SEQ ID NO: 102481 - protein, 57 aa, Setaria italica
  Transcript Sequence Number=SeqID_36507
  Gene Ontology: Mol. function=nucleoside-triphosphatase activity
  Homolog annotation: Hit_ID=Q2R029; Match level="QueryCoverage=70%, HitCoverage=5%, E-value=1e-12, Identity=90%"; Hit description=AAA -type ATPase family protein, putative, expressed
SIQLPQDEALLTDWKQQLDRDVETLKAKSNVGSIRAVSSRIKRNIVLYGLGLFPSCH

SEQ ID NO: 102482 - protein, 343 aa, Setaria italica
  Transcript Sequence Number=SeqID_36508
  Gene Ontology: Mol. function=nucleoside-triphosphatase activity
  Homolog annotation: Hit_ID=B9SAN5; Match level="QueryCoverage=90%, HitCoverage=29%, E-value=5e-49, Identity=38%"; Hit description=ATP binding protein, putative
  Pfam annotation: Domain name=FHA; Domain location=47-115; Score=21.6; E_value=0.0032; Accession=PF00498.18; Description=FHA domain
ADKPAAAAAESSKRRKEPEQQQPAAPWAKLLSQCSQTPHHPISAPQFSVGQSKSCNLWLKDIPVSKMLCKLRRLEQGGQCELEVVGKKGVVQLNGRPISPGTKVPLTGGDEVIFSSCRRHAYIFQHPLNDKVPKTVPSSAVSLLEPPVASAKRIRTDKRAGDTSAVAGTEMLASACNQPKDIAAAPPASAGENSQRVVRPMASSASDKSKGHAISPDKEFENGENANEVNSNIEDSSMDVAAAPVSPDDAANDNCQQNGFVPDAHLGAEIALEDQRDIIRDLSASVPPSRCQAFKDGMKQGIISPSDIDVTFETFPYYLSENTKNVLLSCAFIHLEKKEVTIT

SEQ ID NO: 102483 - protein, 362 aa, Setaria italica
  Transcript Sequence Number=SeqID_36509
  Gene Ontology: Mol. function=nucleoside-triphosphatase activity
  Homolog annotation: Hit_ID=Q2R029; Match level="QueryCoverage=44%, HitCoverage=23%, E-value=2e-82, Identity=91%"; Hit description=AAA -type ATPase family protein, putative, expressed
TLIKVIKSKPVLRMFTGSTVPEFDLTGDVFKALEDQRDIIRDLSASVPPSRCQAFKDGMKQGIISPSDIDVTFETFPYYLSENTKNVLLSCAFIHLEKKEFIKQFAEISSINQRILLSGPAGSEIYQETLIKALAKHFGARLLVVDSLVLPGAPSKDPESQKDVGKSDKSGDKAGGDKFAIFQKLDRDYFHQKHRSSLADAVHFRRPAAPTSSVNADIVGTSTLHSASLPKQESSTATSKSYTFREGDRVRYVGPAQPPSLSQRGPSYGYRGRVMLAFEDNGSSKIGVRFDKQIPDGNDLGGLCEEDHGFFCSAELLRPDFSTGEEVERLAMAELIEVISEENKSGPLIVLLKDVEKSFTGI

SEQ ID NO: 102484 - protein, 618 aa, Setaria italica
  Transcript Sequence Number=SeqID_36510
  Gene Ontology: Mol. function=nucleoside-triphosphatase activity
  Homolog annotation: Hit_ID=Q2R029; Match level="QueryCoverage=97%, HitCoverage=86%, E-value=0.0, Identity=88%"; Hit description=AAA -type ATPase family protein, putative, expressed
  Pfam annotation: Domain name=AAA; Domain location=353-538; Score =288.5; E_value=1.5e-83; Accession=PF00004.21; Description=ATPase family associated with various cellular activities (AAA)
  Pfam annotation: Domain name=AAA_3; Domain location=353-479; Score= -7.6; E_value=0.0025; Accession=PF07726.3; Description=ATPase family associated with various
  Pfam annotation: Domain name=AAA_5; Domain location=353-485; Score =18.6; E_value=2.8e-05; Accession=PF07728.6; Description=ATPase family associated with various
  Pfam module annotation: Pfam domain module=AAA::AAA_3::AAA_5; Domain location=353-538::353-479::353-485
FGYLVLFVFLVLLLCPIPDGNDLGGLCEEDHGFFCSAELLRPDFSTGEEVERLAMAELIEVISEENKSGPLIVLLKDVEKSFTGITESLSSLRSKLESLPSGVLIIGSHTQMDSRKEKAHPGGFLFTKFASSSQTLFDLFPDSFGNRLHERNKESPKAMKHLNKLFPNKISIQLPQDEALLTDWKQQLDRDVETLKAKSNVGSIRAFLSRNGIECNELEELFIKDQSLSNENVDKIVGYAVSYHLKHNKVETSNSKDAKLVLTSESLKHGLNMLQSVQSDNKSSKKSLKDVVTENEFEKRLLTDVIPPNDIGVTFDDIGALENVKDTLKELVMLPLQRPELFCKGQLTKPCKGILLFGPPGTGKTMLAKAVATEAGANFINISMSSITSKWFGEGEKYVKAVFSLASKIAPSVIFIDEVDSMLGRRENPGEHEAMRKMKNEFMVNWDGLRTKDKERVLVLGATNRPFDLDEAVIRRFPRRLMVNLPDASNREKILKVILAKEELGPDVDLDSLANMTDGYSGSDLKNLCVTAAHYPIREILEKEKKEKNLAKSEGKPEPALYGSEDIRPLSIDDFKSAHEQVCASVSSDSANMNELLQWNDLYGEGGSRKKKALSYFM

SEQ ID NO: 102485 - protein, 49 aa, Setaria italica
  Transcript Sequence Number=SeqID_36511
FHIQYSIVAYGGIFWRSRSCMYTCTLLTRLTKPIVLSFMHATEFIQSAN

SEQ ID NO: 102486 - protein, 165 aa, Setaria italica
  misc_feature (114)..(114): Xaa can be any naturally occurring amino acid
  Transcript Sequence Number=SeqID_36512
  Gene Ontology: Cellular component=cytoplasm
  Homolog annotation: Hit_ID=B9SGN9; Match level="QueryCoverage=92%, HitCoverage=90%, E-value=2e-46, Identity=60%"; Hit description=Optic atrophy 3 protein, putative
  Pfam annotation: Domain name=OPA3; Domain location=4-136; Score =230.6; E_value=3.9e-66; Accession=PF07047.4; Description=Optic atrophy 3 protein (OPA3)
  Pfam annotation: Domain name=RAMP4; Domain location=41-104; Score= -4.5; E_value=0.023; Accession=PF06624.4; Description=Ribosome associated membrane protein RAMP4
  Pfam module annotation: Pfam domain module=OPA3::RAMP4; Domain location=4-136::41-104
MILPVAKLGTLLLKTMSKPIATRLKTEASRHPKFRQLIINLAQANHRISTNIQRRVYGHATNVEIRPLNEEKAVQAAADLIGELFVFSVAGAAVIFEVQRSARSEARKEEARKXEIEAIRQKEDQLAEEILNMKQKLSELERFANSQGLSGLFRSSSVPDQTKPT

SEQ ID NO: 102487 - protein, 273 aa, Setaria italica
  Transcript Sequence Number=SeqID_36513
  Gene Ontology: Mol. function=sequence-specific DNA binding; Cellular component=nucleus; Biological process=regulation of transcription, DNA-dependent
  Homolog annotation: Hit_ID=B3GAU7; Match level="QueryCoverage=98%, HitCoverage=62%, E-value=1e-127, Identity=77%"; Hit description =WRKY17 transcription factor
  Pfam annotation: Domain name=FLYWCH; Domain location=53-121; Score= -0.0; E_value=0.081; Accession=PF04500.8; Description=FLYWCH zinc finger domain
  Pfam annotation: Domain name=WRKY; Domain location=64-123; Score =155.5; E_value=1.6e-43; Accession=PF03106.7; Description=WRKY DNA -binding domain
  Pfam module annotation: Pfam domain module=FLYWCH::WRKY; Domain location=53-121::64-123
DQASDDDVDAGGGRPYPGDDTNEDDDLDSKRRKMESAGIDAALMGKPNREPRVVVQTVSEVDILDDGYRWRKYGQKVVKGNPNPRSYYKCTHMGCPVRKHVERASHDPKSVITTYEGKHNHEVPASRNASHEMSTAPMKPAVHPINSNMPGLGGMMRACDARAFTNQYSQAAESDTISLDLGVGISPNHSDATNQMQPSVPEPMQYQMQHMAPVYSSMGLPGMAVATVPGNAASSMYGSREEKGNEGFTFKAAPLDRSANLCYSSAGNLVMGP

SEQ ID NO: 102488 - protein, 67 aa, Setaria italica
  misc_feature (55)..(55): Xaa can be any naturally occurring amino acid
  Transcript Sequence Number=SeqID_36514
  Gene Ontology: Mol. function=microtubule motor activity; Cellular component=microtubule associated complex; Biological process =microtubule-based movement
  Homolog annotation: Hit_ID=Q7XKR9; Match level="QueryCoverage=100%, HitCoverage=6%, E-value=9e-18, Identity=73%"; Hit description =OSIGBa0144C23.2 protein
ETLSTLRFAQRAKAIKNNAVVNEEKVEDVNALREQIRQLKDELHRMKSNGGLDGXNGSSATGWNPRR

SEQ ID NO: 102489 - protein, 122 aa, Setaria italica
  Transcript Sequence Number=SeqID_36515
  Gene Ontology: Cellular component=exocyst; Biological process =exocytosis
  Homolog annotation: Hit_ID=B6SVR8; Match level="QueryCoverage=95%, HitCoverage=17%, E-value=6e-39, Identity=71%"; Hit description =Protein binding protein
RRPTSRLGSMDDLDTSSEFDPATPHSQDGGAGPDTARSAGIAGNNPFDDQVFDLVRPEAVDELRAIADRMVRAGYASELAQVYCAIRRDLLEECLNVLGVERLSIDEVQRIEWRHLNDKMKK

SEQ ID NO: 102490 - protein, 54 aa, Setaria italica
  Transcript Sequence Number=SeqID_36516
WPVGDVRNLGDSSEIRSRRVAVFQRHRPPANYEDANETKKKKVKSTKKISMYDL

SEQ ID NO: 102491 - protein, 158 aa, Setaria italica
  misc_feature (1)..(1): Xaa can be any naturally occurring amino acid
  Transcript Sequence Number=SeqID_36517
  Gene Ontology: Mol. function=aspartic-type endopeptidase activity; Biological process=DNA integration
  Homolog annotation: Hit_ID=Q53KZ4; Match level="QueryCoverage=98%, HitCoverage=13%, E-value=2e-64, Identity=74%"; Hit description =Retrotransposon protein, putative, unclassified
  Pfam annotation: Domain name=RVT_2; Domain location=46-158; Score =54.5; E_value=8.9e-22; Accession=PF07727.6; Description=Reverse transcriptase (RNA-dependent DNA pol
XIGNLHERTTRHSSRQISHFAHSAFVASFEPRDIGHALSDSNWVNAMHEELENFERNRVWVLVEPPPNCHPIGTKWVFKNKQGEDGLIVRNKARLVAQGFSQKEGIDYEETFAPVARLEAIRILLAFSVAKGFKLFQMDVKSAFLNGFIEEEVYVKPT

SEQ ID NO: 102492 - protein, 200 aa, Setaria italica
  Transcript Sequence Number=SeqID_36518
  Gene Ontology: Mol. function=sequence-specific DNA binding; Cellular component=nucleus; Biological process=regulation of transcription, DNA-dependent
  Homolog annotation: Hit_ID=Q9LEE7; Match level="QueryCoverage=100%, HitCoverage=24%, E-value=4e-70, Identity=70%"; Hit description=OCL4 protein
RHFTDQSPVMGCGDLIQSVLAPPPQQIAGGGAENHAASSSYMGSIMAPVPEQDRQLVLDLAATAADTLAKMCRAGEPLWVRCRSGAGSEVMVADEHARMFSWPVDSGKQGGGSPVAGARTEGSRDSAVVIMNSITLVDAFLDANKWMELFPSIVSKARTIQVINHGAASGHLGSGSLLLMQAEVQFPSPLVPAREVVFFR

SEQ ID NO: 102493 - protein, 119 aa, Setaria italica
  Transcript Sequence Number=SeqID_36519
  Subcellular localization annotation: CTP_CleavageSite=63; ConfidenceScore=5.66e-01
ATCKALTSHSQPPQLGSFGSKLPSNPNKTAPNDRKHSHGSLSSPTPTPTPHLAAFQLAAHLARSPAGQETDRQERRDEHRRHSARGADAGAGRRQLRGHVQSPYRLFGRSFGLRRRRLP

SEQ ID NO: 102494 - protein, 91 aa, Setaria italica
  Transcript Sequence Number=SeqID_36520
  Gene Ontology: Mol. function=RNA polymerase II transcription factor activity; Cellular component=transcription factor TFIIE complex; Biological process=transcription initiation from RNA polymerase II promoter
  Homolog annotation: Hit_ID=B9RC71; Match level="QueryCoverage=86%, HitCoverage=28%, E-value=3e-29, Identity=77%"; Hit description =Transcription initiation factor IIE subunit beta, putative
ALKAAGEVWLLSNMDSQEDIVYPNDPKNKIKVDDDLKQLFRDIELPRDMVDVEKELQKNGFKPMTNTAKRRAAAQIDGVKPQAPRPRRSNA

SEQ ID NO: 102495 - protein, 279 aa, Setaria italica
  Transcript Sequence Number=SeqID_36521
  Gene Ontology: Mol. function=RNA polymerase II transcription factor activity; Cellular component=transcription factor TFIIE complex; Biological process=transcription initiation from RNA polymerase II promoter
  Homolog annotation: Hit_ID=B9RC71; Match level="QueryCoverage=100%, HitCoverage=100%, E-value=1e-100, Identity=67%"; Hit description =Transcription initiation factor IIE subunit beta, putative
  Subcellular localization annotation: CTP_CleavageSite=67; ConfidenceScore=5.12e-01
MDLKDSLSKFKQQQERCQSSLASIAASASKPKHRAQPVNAPSAPARPSQPIKFSNDTERLQHINSIRKSPVGAQMKLVIELLYKTRQAFTAEQINEATYVDIHGNKAVFDSLRNNPKVSYDGRRFSYKSKHDLKGKDQLLVLTRRFPEGLAVVEVKDAYPNVLEDLQALKASGEVWLLSNMDSQEDIVYPNDPKAKIKVDDDLKQLFRGIELPRDMVDIEKELQKNGIKPMTNTAKRRAAAQINGVKPKAKPKKKQREITKRTKLTNAHLPELFQNLNT

SEQ ID NO: 102496 - protein, 278 aa, Setaria italica
  Transcript Sequence Number=SeqID_36522
  Gene Ontology: Mol. function=RNA polymerase II transcription factor activity; Cellular component=transcription factor TFIIE complex; Biological process=transcription initiation from RNA polymerase II promoter
  Homolog annotation: Hit_ID=B9RC71; Match level="QueryCoverage=100%, HitCoverage=100%, E-value=1e-102, Identity=67%"; Hit description =Transcription initiation factor IIE subunit beta, putative
MDLKDSLSRFKQQQERCQSSLASIALTSKPKHRAQPINAPSVPARPSKPIKFSNDTERLQHINSIRKSPVGAQMKLVIELLYKTRQAFTAEQINEATYVDIHGNKNVFNSLRNNPKIQYDGRRFSYKSKHDLNGKDQLLVLIRKFAEGLAVVEIKDAYPTVMEDLQALKAAGEVWLLSNMDSQEDIVYPNDPKNKIKVDDDLKQLFRDIELPRDMVDVEKELQKNGFKPMTNTAKRRAAAQIDGVKPKPKAKKKQREITKRTKLTNAHLPELFENLNT

SEQ ID NO: 102497 - protein, 258 aa, Setaria italica
  misc_feature (247)..(247): Xaa can be any naturally occurring amino acid
  Transcript Sequence Number=SeqID_36523
TRLIMVPLCRVLSRSRNIVLSSSCLSTLELPSYYRLGNLINCLPILEAAFAPILKIIFSVGINDQNKPLWSFCMNLFHDFSKSKSRHREDLCTPVNWNLVAQSCMHLKALLDFQHIKWLPWDIGCFHFQLDILGTILNPELFQDMIPEKMLIVMDSATEIFKFLLGGVQIELKEKCSYEQVRLCITDVCKFVKTKLFLDHVGKHSGNKCAMLLEFGLQFVEVIVGELDHSLLNSEKIEICLDIEHIXRSKYAECTRKF

SEQ ID NO: 102498 - protein, 73 aa, Setaria italica
  Transcript Sequence Number=SeqID_36524
  Gene Ontology: Mol. function=catalytic activity; Biological process =folic acid and derivative biosynthetic process
  Homolog annotation: Hit_ID=B0FBR6; Match level="QueryCoverage=69%, HitCoverage=19%, E-value=5e-15, Identity=84%"; Hit description =Tetrahydrofolate dehydrogenase/cyclohydrogenase (Fragment)
  Pfam annotation: Domain name=THF_DHG_CYH_C; Domain location=25-73; Score=-110.6; E_value=0.008; Accession=PF02882.11; Description =Tetrahydrofolate dehydrogenasecyclohydrolase, NAD(P)-binding domain
MRRMKEESWLTYSCPTQDRHLEKACGKLYLAALQSGIEIMGKHVTVIGRSKVVGLPTSLLLQRHHATVSVIHA

SEQ ID NO: 102499 - protein, 29 aa, Setaria italica
  Transcript Sequence Number=SeqID_36525
VPGGVGPVTIAMLLSNTLDSAKRVYGLSD
